United States Patent Application Publication US 2011/0183924 A1 - sequence listing, part 72

SEQ ID NO: 257391 - DNA, 288 bp, Homo sapiens
gatcaaagctgcctgtgcccaggtcgctggctgggtcatgttgttaagtcaaatgacctctcagcagacaaggggatacatgaaatgcatgggtgatggaaggggaaacagggatggtgatatgatatggttccccgtcttggagcagctgctggcctgctgtgctcagtggtttcggggttaaaaatagatgtccctgcataccttattgaggcgataggggtggtcaggtggtccagcatttacaaactaggcccgcgaggcagaatccaggtcagggtcctgatc

SEQ ID NO: 257392 - DNA, 326 bp, Homo sapiens
cctatattctgaaatatagtcaggactcattcacttggtaaacacttatggggttttcttggcctgatatagactgtgggcatgagcctccttctggaggctgtcaccagggaaggaagatgtgtaaacagtgcccagtattaggagaggaacatgtacaaaatacaaaggaagatacaacaactatttctaataaaagccacctgttttcagcacaggtagagagtgtagaaatcacagatatattcctttactcacttaatgcacccgagcagagtgtttagcagatccaggctttcagcctaaatgttgttggtgtgatagca

SEQ ID NO: 257393 - DNA, 148 bp, Homo sapiens
gagaggtttcattgcctatggctccacaggctgtagaggaagcatggcagcatctgcttctgaggaggtctcagggagcttccaatcacggcggaaggcaaagtgggagcaggcgtcttacaggacaggagcaggaccaagggggtgg

SEQ ID NO: 257394 - DNA, 397 bp, Homo sapiens
ctcatctttttccacaaaggagacaacattgtattcactctctgctcacaatatcattatcctaagagataaataatatagtttcttttaaaatagtgatatctgttccaggaaaggacttgggctgtgaattgctagggtacagctactagggatgtgttgttgggtttccccggcataatattccaccacctgtactttgacatcattgtcaattgaactcctggggaccctttcttcttgctctgatctggactctcacatgccatcttgaaatattcccccatcagttttctggtttagatttgctgtatcacacatagttatttttttttctgtctgagttcactgatatatgttctctagtgtaagaaaaataattctaattctcccatac

SEQ ID NO: 257395 - DNA, 229 bp, Homo sapiens
cttccttatagccaggtaacggcggcggatgtcggacatttgttctggaagtttggcagcaaagaagaagggaggaaggaaacagcccaggctgctgggtcgagagaaaggttctcggttgttttgttttatttgaggagagagttttatttttctggaaggaaggagacctgagcgtgtttgaggaaacagtcaatgaagagcagacactaaagactaccgtaagggg

SEQ ID NO: 257396 - DNA, 495 bp, Homo sapiens
cagaaatcaatgaaaataaaaagcttttaaagtttcccacctcaaggctgttgtctggggtgtgatttcttcctaaaaattaattttgaaaaggataaaggagggaaatttccaaacaacacaatattgttttgtaaaaatttcaacttaagtcaaaggagtgaggtttgtgaagggtcctgagagtcagattatcctcccatccagatcctctcctcttatcatggtgcaggagcattgttttatcaggtggactggagagtaagaagttacaccagatgacagttttccagataacaagctttcactttaaattctctttctaaaattttatttttttctaaaatacttcctatcattagggtatactttcatcaatcttctttccatcatgtttcagctaacgttatttgttttattcgtcagtgccataacacaggacttatgttcaatttgctggtagaatcttgttaaaaggcaggaacgtcataggtt

SEQ ID NO: 257397 - DNA, 481 bp, Homo sapiens
gggatccctgcagggtgaatgatgagagaaaaagatgttaaaaatgaaatgaccatcagtgagctacaggaaaacttcaagtagctaacatgtaatggaagccccaaaagaagaggaaaaaggaagggagaacaataatatatttaaggaaataatggtcagaaaactttcaaatttgatgaaaactataaacccagacattcaagtatctcaaagaacccgaagtacaaaaagaaagaatgaaagaaagaagagaaaaagaaagaaagaaagagaaaaggaaagaaagacaaagagagaaaaaaaaggaagacagaaagagaaagaaaaagaagaaaaaaaaaaaagaaagcaaggaagctacacactataccatggtacatcatattcaaattgatcaaaaacagtgataaagtaaaaatcttaaaagacagagaaaaaaacacccattatgtaaggagcaaaggtgatgatacaaatt

SEQ ID NO: 257398 - DNA, 228 bp, Homo sapiens
tttttaattttgtcttccagcttgaggagttattggtgattttaattgtttatacacctaaatttaaaatgatttttaaatcactatgatatacagaaagaagtaatgaaaacgagctttctattagagacttttatcacagcctctatgcttgtcactagtgctaaatcccttcctctagcaggaatgggagtagaaagatcacagtagaccaacagtcgaatgcgc

SEQ ID NO: 257399 - DNA, 425 bp, Homo sapiens
cagcaagacactgtggacgtgtgaccgctgctctgccaagtttcctctgcagacgactctgagacaactgttcctgtctcactgacagaacagtgggcaaacccaactccatggcaagtcataggcccatttagtctgaaaagaatcagctgggtgcggtggctcatgcctgtaatgccagcactttgggaggccgaggcaggtggatcacctgaggtcaggagttcaaggccatcctggccaacatgctgaaaccccgtctctactaaaaatacaaaaactagccaggcgtggtggcgggtgcctgtaatcccagctactgtggaggcaggatggatcacttgaatccaggaggtgggggttgcagtgagccgagatcgtgctgctgcactccatcctaggtgactgagcactactccatctaa

SEQ ID NO: 257400 - DNA, 414 bp, Homo sapiens
tgcttgaagtgacagataccccaattaccatgatttgatcattacacattctatgcttgtatcaaaatatcatatataccccacacatgtaactactgtgtccataaagttaacaaaaaatttttttaaagactaatgcagaaaaaagaaaaaaaaagccttctaatttcccaaactatactgagaaagagttcattcactgaatagagatttagcaacagaacattcttttttattttttagagatggggtcttactatgttgcccaggccagagtgcagtggtggctattcacaggcacaatcatggtgcctcaaagtcaaatgactctcccacctcagactacaggcctgagctaccccgcccagcagaatattttaacagtgtccattctattaaaaaaaaaaacaaaaa

SEQ ID NO: 257401 - DNA, 375 bp, Homo sapiens
attctgaccgatatgttagaaaaatggtgtgccgaccaattcatgacatgtgtcccaaaactagcaacggaaattgtattcgccgtgttgaggtctctaatccagatgatgctcatctatgtactggaaaaggcagagtcctttcctgacaagctgctgaaactcttcagaaacatctcatatttcctgaagaagatgatgtctggacaagcagcacaggaggaagagggtaatccggatgagttttctgacctactcggcggctgtgattaaacaaccaccaggaaattttgacgacactgttctcctgagctcctccctttcctccgggaacaaaacaattgaatttacaaaaataaagtgttatttgactgg

SEQ ID NO: 257402 - DNA, 579 bp, Homo sapiens
gcttgcagccaatttactggagcagggatgacgtagcccagtggctcaagtgggctgaaaatgagttttctttaaggccaattgacagcaacacgtttgaaatgaatggcaaagctctcctgctgctgaccaaagaggactttcgctatcgatctcctcattcagacctcgactctgatgtaacttgacaaagggcgaggatcctgcagaaggtcttggcatagtccctaactacgttcaacctttatttactcctggagacctgccagaagttaataaactaaccgtcatgaggaaacgtccctcattacaggagatgagataaagccccagcacccgtatctccactgttcttcccagttgccacagaccgtttatatgaagaaatgctaaagaagttccccagaagtagagatgttattgaaacttgaaagtttatatcttcaaaattgagtaatttggaagggacacaaacatacctgaaacattttgtctcatatcatcaattctgtatgtaatctcacaataagaaaactataaaacaaccatgtaaataaatcagactatcctaaatagttc

SEQ ID NO: 257403 - DNA, 338 bp, Homo sapiens
tccttctgactattctaacgccccagaggtcagatgttgaattgcagctttgaccaatttccatgggagaattgcacatttaaaaaaataaacttttcttcaaagctagtgaggcagagggagacaccttcatctccctcccgcccttcttagctcctccagggctggccatcctgtctgcaacgcggattcttctgcatttacacatgtgatatttacagtgaatgaaagctttatactcattattcataataataatatcaagtgcctcttagttccaggaactgtttctcttcattgcccccctctttaagttaacatgcagggaaagaaagaaa

SEQ ID NO: 257404 - DNA, 206 bp, Homo sapiens
cccccaagcccagagcccactgaaatgacccagttctaattctgctcagcttgcctcctctgccttgcctggaaaatggcaataaaggctcttgcccaccctttcccttcaccccctccctgtcctgactggccctgggtgcttccccacgtgcccctcctcctgggaactgtgagtaataaactcctctttcaaaggcggttgtc

SEQ ID NO: 257405 - DNA, 676 bp, Homo sapiens
cccccctctgcccccattccataaatttgtgcctgatcgctcttgaaaccaaaatacttcccacatctatttgtggttaatgatccagataaacatatcctttttacctgttgaaaaaggaccctggggagttgtacctggaagtcttggacccttcagtaactgcatgtactttttttctcttgctacaccacaaactttatttttgttaaagccttatacgagcagaccttagtgagtcctgtgagagttttcaactctataaccttgtatagatgttgtacctacctatactcctccatcctaaccaaggtgtcagactttctcatacctttcaaccaaagtaatttttacatgccagaggccctcagaaacttctaaggtatagcttgaatatttctttgacattttgtgtttatctgtaaatatataaattatattatttctcaaaatattaccatgagattgttatgctgaaaaaatgtgcatcgtatttctcctatgggtttcttatatcctcaggattccttcccagtcctagaatatccttttcggatctggttagggtgatcaaccattcagatttgcctaggactgagaaggttcaagggacatgggactctcagtgctaaaactactaaagtcccagacaaactgaaagcaaatggtcacccta

SEQ ID NO: 257406 - DNA, 478 bp, Homo sapiens
acttactataagatcataagaaggaggatgatggaaggtaacaaattgactgcctatcagactatatatcatctcagttattgtatcagtctgttctcatcctgctaataaaaacatacctgagattgggtaatttataaagtaaagaggtttaatggtctcgcagttccacatggctggggaagcctcacaatcatggcagaaaatgaagaaagagcaaaggaacatcttatatggcagcaggcaagagcgagagcatgtgcaggggaatccctctataaaaccatgagatctcatgagacttattcactatcacaagaacagcatgggaaagacccaccctcatgattcaattacctctcacagggtccttcccatgacacatgggaattatggaaactataattcgagatttgggtggggacacagccaaaccatatcagttagttatgacccaaaccctgcaagacaggctttt

SEQ ID NO: 257407 - DNA, 415 bp, Homo sapiens
acattgtagagaagagagcactcggatgtcttagaaatataattgaaatactcactgtttcttattgtctctgattaggtcttgtgcccattgttgaaccaaatgctgtgcttaggaggatgggacatgttctttttgttttgcttagttagggcctggctctggagccaggagaggggaggaggaaatgttgctggatgtaagttagcactgatactaattattctaacaatgattaatagttagaatggctgggtgcagtggcacatagtcccagctccgcaggaggttgagatgggaggatcgcctggggccaggagtccaaggctatggggcaccatgatcatgatgcctgtgaatagccactgtgccctaacctgggcaacatagcaacatagcaaaaccctttctctta

SEQ ID NO: 257408 - DNA, 515 bp, Homo sapiens
ttcttctcgaggtgctcatctgctgccaagctcagagcaaccttcgaaacccatctcaggaaacgacctgacctattctccactcccagaatccacactgggattccaaagctcctatgaggcccttgcttaggctctctagaatattcctgagcctctgttttctccctcagcctgagctgatggggccggcgtcactttatgcatcccaaggccatcagcccatctctcctggacttcggaacatggccacaatgcagagagacccagcagtaattaagaaaatttcctcaatttatattgagtgatgttggtgaacatggcaaggcacaaagcaggaaactccacagctgctgctctggacctaaagaggcaccctggacttctgggtggtgacattgcctggcttgcagaggaagacctgacccctctggtcttccaaggctgccaggatgatgacagagccttggacaggtcccagcgcaggggccatcccttcccaggttcccctggcc

SEQ ID NO: 257409 - DNA, 386 bp, Homo sapiens
agaaagtagccatcagggaaggatgactttttaaagacatacattagaattttattaaaatatatgcaaaaaatagattaaagcttttattaatatatttatggtaattgcttgtgattcttttacgtttcaaaagcactaagttttaaagagctgccattgttagtatacttgtagaaagttttaacctttaattggcatttcagtaacatttccttgaaactgatattttcatgattgatcccatgtctcgtgaatttttaacagctataaattgttactgaagaaaggtgtgcatcacaaaacagaccctccaatataaaacaatgtgtttcttactataacttggtttcagagaattaaaagtgtttatttttgtatttgaa

SEQ ID NO: 257410 - DNA, 420 bp, Homo sapiens
cacccatgtcctgttttcatgggtgacagttggcttcatacatgttagatgatgacagtcattacgatgagctaggtgtgcatacaaggctcacaatttcacctgtgtgctgtgccctgcttagattctgtgtgtgtaacccaaagactttgtaaatatgtgtgagtgttacagtcttttgtgaactttgaacgagaaggtgatccgggacatcacacatgtccctaaacctagttataagactcaatgtatcctttattggataagtccacataagagagtcattatcatgcctgtgatccatgcttaggtatatgttacaattccctctgtggttatgaagcaggcagaagagccacatcacctaaatgctgggccagaaatattccaatatcttgattgtgggtaggttccagtcag

SEQ ID NO: 257411 - DNA, 552 bp, Homo sapiens
gaatcagagcctggttaggggctgactgtcatgtactcaaggtaacgtcatgtccagcactatatcccactaattcctgggaagctgggcatcagccagaatagtatgggttcctctttcatgtatccaccagcagtgacgtagttatgtggcgaagcaaatgtatatttgaatttttcattgcttgaattgcttgtcattatcttcagagataataacatagagttttacctctaattcctaaatactactaatagcaagtttgtcctatgagcatacaaattctcaaagacctccaaatatttttttaaaatataagtagaaaaaaagaatgttttctttgtcaaagagatatgaaacttttaaaacgaaagtcttgctatggtcagatgtttattatgaggataactccctccagactactaattattaacagacgactagcagttttgcctgggtgacttgtattactcaacactacttataaaataaccttgtgccatatgacgggctttttcattcacttctgttattttgaaagaactacaataa

SEQ ID NO: 257412 - DNA, 315 bp, Homo sapiens
gaccagtagtgggagacacccataagaagaaagtgtcatgagctaggagtacaccctcagtgctcagagagagaggaactttaaagattctcttgtcggctgtgccagatgagaaacgcacatgagagataggagcaaagaaggcttcaggagaaggtgagataaactagagcagggtgtggagatgagtttggaggtgggaagtatttgcaaatttctcgttatggtaactcttcagtgtttggagggaaatattatgtttgttttctacatttaaatgtaggaaattgatactatcaagggctaaaaattctt

SEQ ID NO: 257413 - DNA, 432 bp, Homo sapiens
tctctaaatcaaaatatcgccttggttgttgatatctcttaaatctatttctagtttccaatatcttttgcccgtgcattggactatccttgtgcctttagcaaacttccctacatgatagtaactttacagtgattttattatcggacaaacaaggagacaatctgcgcctctgcaggctgctgtggtgagtctcacttatggaaggtgtgatttggggcaaggtggattaatttctgcactgagagatgcagtttctttatctggaaaatttaaggcaaaagctctggctctctcccagggtggctgtaggatgccgtgagcatccctttccttctctggtgagtaccagtactcaccctgcgcttggcctgccccattgtcaggagctgctttccccaggtgggaaaaagcagtgagccatgttcacac

SEQ ID NO: 257414 - DNA, 285 bp, Homo sapiens
aaaaatgttatacttctgggcataaatctttaaatttaagaggaggagcctttaaccttaaagtgaaatatcacagacttcaatatccagaggcaagtggataggccatataggttagaaagagctcttaaaccattctactgacataagtagccatgcaagataaccagcatctactaggcaaagccacccagtgaaaacacaaattagaagtctaagatttagtctctgcccaaaataacaaggtagagaaatgtctatctccaaaagtgacccaaaatgaca

SEQ ID NO: 257415 - DNA, 232 bp, Homo sapiens
catccaggccatccttgatttgaactaactggcgaatatgacaagtcagacttcaaaatacttaacacttaatccctactgatgaaaagtcataaccaaagtatcttttcaggaaacctattttctcccataaaagttctataattgatcatgaaaatacattaaaagaaataaagcaaaatgtgtttgtaaagtactaagtgggcaaaataaaaacaatataaaaaccatg

SEQ ID NO: 257416 - DNA, 712 bp, Homo sapiens
ttccccccaaatgcattctacataagttataaatccttttagctgttcataccccaaaccaccaattgcatctgccctccagaaaggcctggaagttccgttttgaaaccattctgggagaagctctaagacaaacagctttttcctcacaggctagcagcctcatggttgacagacgatataatttaaaataattccttgtatggcttatggtttaattttttttaagagcactgctctttcaaatacagtcaacaaaaatcatctgatattgacgagtctttttcgatatctagttccactcacttctcaccgaagcagagttgggagcagcaaatttatgccgattgtatcctttaataacaatggcacagcctctctagtcttcaagtatggcccaagctcctaagaattcctttcattttatcctcagttccagccctggagagtccagctggtctgaattagccattcgtcctccctagctggggtgtttgcatttgaactgggctggtcggcggatattcctgcaactttaaacacaggaagtccttcattcggggccagcttggggcttcctgtctccaaaacatcatggcattgttgtggctcccaggccaaccctgcgctgtagctgcaaaacaaggcgagcggagccccgcgccaggccttcggaaaggcaggcgggcgggcgggcagcagcagcggccgc

SEQ ID NO: 257417 - DNA, 245 bp, Homo sapiens
taactcaaatgagttataaatgtggatgtcataaggaaggagagctcattcttattgctctctctgccaattagcattatccttcaatataactgattttgttttccatctaaaatagactgctacttgaagatgttgtcttctaccctttcatgattgctcctcccacacaacccctgtaccctgctagctcagcacatattcgattagtaaatgtgagctgcatgattttaagctgctataca

SEQ ID NO: 257418 - DNA, 438 bp, Homo sapiens
actgattgcattgaagctttggttgggcttgaacagttttaaaaacaaccaaaacattacattgctattacttctgctgcttatattaatattttaaaaaggaatggcctcgtatatcaagggtcatgtaagtattttaccttgttaatagctcttttggaaacttatccaaagtaagaatacaaaagaaagaagttataagcacaaagcttcccctgcccagatttgttttaaaataacaaaaagtttgacgcaacctaaatgtctaacaagaagggaaaagcatagcttctaaatgaaaactaatttgatcatttaaaatgttcattacaaagattatatagaatcatggggaaattcttaagatataatgagagcaggatgtaaaattatatgttaaaatgtatgtgtgatagggaaaagtagaagggaaaattc

SEQ ID NO: 257419 - DNA, 537 bp, Homo sapiens
tgacagctgtcacatcaatccagcccagacctccctcggcagctctagaccagcagatcccactgcctcctgacaacccctctggatgtcccacagttcctcagacttagcatcctttccaaatccatgcccccatctcatttccaaaaaagaaaaatcatagaggcctccccaatacaaatgcataggacatgggaaacaaggtttgaaaggatatccagaaaagcttagggatagccctggccttttggaggtgacttgggggtggtatgagaggccagagtcagcagtaacttctcctttcttccccacgaaggtgtggacttcttagcttcctgtccttttcgtaccatttgccaaattgaatttaaataattattactgtaattgcttacttattgtctgtctctcctggttgaagcttctcaagggcagggatcatgtctgtttcacttctgtatccttggcatctgtcatataatcagtatctgacatataataggtgcttaataaatatttgtttgaattaatgaatat

SEQ ID NO: 257420 - DNA, 660 bp, Homo sapiens
  misc_feature (46)..(46): n is a, c, g, or t
  misc_feature (57)..(57): n is a, c, g, or t
  misc_feature (62)..(62): n is a, c, g, or t
  misc_feature (84)..(84): n is a, c, g, or t
  misc_feature (87)..(87): n is a, c, g, or t
  misc_feature (111)..(112): n is a, c, g, or t
caagcgtgtaaacttcggaaaatcatgggaacacagaatatttagntccagaaatcntgaantatgatcccattaccacagcancanatatgtggtaagatgttgttagtnnccttaaacatctttatggaaagttgggaaacgtatattctggggttctttgactccaagagtaataaataataaggctttcttcaaaagattttatttgaatatcattattatgctacaggaaaatatttacctttccattatttttaaataacacttaacttctgagccaaaagtacagaaataataggaaaatctctctctgtgatgaaaactcagttgagtaaaagaacaaaatacttgcagtacattgctacatattttatgatgaaggtgaaatgcttaataagcatagaagcagcagcagacagtccattgccgggctccacctcacaaagggagacatctgatctaggtctaaaagagttggccgggcgtgctgggattacaggcgtgagccactgcgcccccgcccaggagctcttttcttatgacatataaattatgacatttatattctttatatgactttatgttctcttcttatgacatttaaattctttaagtagtttgttggtccaataaactagacgttgtataatctaaaaa

SEQ ID NO: 257421 - DNA, 376 bp, Homo sapiens
gtgtttacacaatcatttccgttcagtttcataagtaaagagtataatgaggtagccactgagagccagagccaataaaacagtcacttttgtctcgacccaagaatcctgcctagacttgcaggaactaaatactttccaagggaagggactggagagaatgcagcattgtgattaccagcaacaaagagcagctttgggatgctggtacttctctctcctcacatggatgctaccgctctttctagtttaaaatgatggcagccctgaagaatttatgccctgttacattatagcatagaatgaatatataggggtacttccataattgagtttgcatataaatgtgatctgcctcagaaaattcaaactatga

SEQ ID NO: 257422 - DNA, 852 bp, Homo sapiens
  misc_feature (430)..(430): n is a, c, g, or t
  misc_feature (513)..(513): n is a, c, g, or t
  misc_feature (520)..(520): n is a, c, g, or t
  misc_feature (852)..(852): n is a, c, g, or t
agcggatgtccacgcgcaataaggaggggcgaaaggacatttttttttttcttgctcccgcctctgttcttcccccacctgccacgtacagagcccaagttctcgctaggcttgttgggtcagcgcgattggccggggcccgcgcgagcctgcgagcgaggtgcggcggtcgcgaagggcaaccgagcgggccgtgaccaccgcctccccgcgacgccccagtccagtggcctcgcttccgcccattcagcggagacctgcggagaggcggcggccgcggcctccgcaagccgtctttctctagagttgtatatatagaacatcctggagtccaccatgaacggacagttggatctaagtgggaagctaatcatcaaagctcaacttggggaggatattcggcgaattcctattcataatgaagatattncttatgatgaattagtgctaatgatgcaacgagttttagaggaaaacttctgagtaatgatgaagtaacaataaagtataaangatgaangatggagatcttataacaatttttgatagttctgacctttcctttgcaattcagtgcagtaggatactgaaactgacattatttggttaatggccagccaagaccccttgaatcaagtcaggtgaaatatctccgtcgagaactgatagaacttcgaaataacgtgaatcgtcattggatagcttggaaccaccttggagaacccaggaaccttccaccaatattcctgaaactgatactgtgcgatggcagggaagcacaaggtctgcctctgattcttctgggaaaacagtcttatcaggtattggcagcagtatgtccgctttgatccn

SEQ ID NO: 257423 - DNA, 381 bp, Homo sapiens
ttaatcactgtgcttggagacaccatgggagtggggacatctgacttcctaggcttggattccttgagagtctcatttgcttcctcacaccctgtcgccttcacaccagggctgttttattgttttataaccttctttggagctttagttgccaaagattctaatgaggctattctccactttctcactttaccaaaccccaagtcttgctgtgttaagcagtttggtcacttgcaaaggctttcctttcagatctaagcgaattacagaaacctctaggcatgtggctaccttcaactttgtccaagcccatgcacaacaatatggagggagccaagtgttaattccaactgctactcccacccccaaacccacccagcc

SEQ ID NO: 257424 - DNA, 412 bp, Homo sapiens
gatgtactgagaatcaaagcttgtatttattgagcactttctatatataaaatgttattaaatgttttcatagagacaatatcatgtgattcaaatttcacaaacaaagtaactaaggccaagagaaattaactagcctgtccaatatcagatagcaacaataagtagcagagttagaattcctaactaaacacaggaataacaaagaaataaactgtatattgaatgtatgtcatccatatgaagaagttattttaaaactaaacgtaatactggaatgtattcactatgaagtgagatgcattatcttgaatataaacctctactgtcaacaaaattaactagaaattattactcttgcacaatgtaggtttcagtttgttttttttatcagaaaaaaattggaatgagg

SEQ ID NO: 257425 - DNA, 466 bp, Homo sapiens
tgagccctgcatcatcctgggagtgacgtgggccaagcctagccatgcagcagaactctgtgtttcttaggagccctggctccagcgcagctcaggcgtaagcacaacccatgactctgggatgcccctcaattgtcttacaaagtaactcaggcattgatgtggggtagagacaagcccagcacacaagttcttccaggttgggggattttatgtgtgtacttggagccagagcatttctggtgcagaataggaagctgacagacagggattagagtcacttatctgaggtcaaaaaaattaaatagcagaggcaggagaaacacctggtgggaggctccaaagcctgatattctagcaatttgaccaccttgggcacatgttctcaggacctcttgagacagtgctgtgggccatggtcactcatatttggctcaaaataaaactcttcaaatattaaaaaaaa

SEQ ID NO: 257426 - DNA, 426 bp, Homo sapiens
ctggagcagacagtattgacaacaaatgagcaggtagcttatacagtgtggacatactggacaaagggatgattaacatcccgggcaggacagcccaggatggcacaagatttcatcacactaatcagaacagtgtgcaatttaaaacatatgaattgtttatttctggaattttccatttaatattttcagacacataagggaactacctattggagaagtcattggaacactgctatgtggctcacaatattaaatctggactcagacaggagcaacttagtgaaatgataaacaaaagattatattattgacttctaaataaatcaataactgatttgttattttggatgaatgatttatataactaagtaagcaattgcataattatagatgtgtgtcatacacatgtctaatttagagcag

SEQ ID NO: 257427 - DNA, 346 bp, Homo sapiens
aaatgtgaggacatgagatttgggaggggcaaggggcagaataatatggtttggttgtgttctcacccaaatctcatcttgaattcccaagtgttgtgcgagggaccctgtgggaagtaactgaatcctgggggcaggtctctcccatgccgttcttgtgatagtgaataagtctcatgagatctgatggctattataagagggagttttcctacacaagctctctttgcttgctgccatctgtataagacatgacttgctcctccttgccttctgtcatgattgtgaggcttccccagccacgtggaactgtaagtccaattaaacttctttcttttgtaaattg

SEQ ID NO: 257428 - DNA, 498 bp, Homo sapiens
ccaggtgagaggacagagagcagcagggctgtgttcaggtgcagagtccagtacctcaccaggtgaggactctaccaggtgagcaatggtctcagcctaacctgcagattgaggtctgaggccacccactgagctggaaggaagaggatttttttttttttcatggatttttcctgccttaaggaagaggattttggaatcaacaaagacatgaggccaggtgcagtggctcacacctgtaatcccaacactttgggaggccgaggcgggaggatcatctgaggtcaggagtttgagaccagcctggccaacatggcaaaaccctgactctattaaaaatacaaaaattagccagcatggtggcgtgcacctctaatcccagctactcaggaggctgaggcacgagaatcgcttcagcctggggggtggaggttgcggtgagctaagatcatgccactgcactccagcttgggtgacagagcaagactcggtctcaaa

SEQ ID NO: 257429 - DNA, 1916 bp, Homo sapiens
tgtcgctctcgtagttagagaggcccggatggaggacgcagaggcacgctgttgccatggcagtgtggtcctggctgccgcggaggcaggtgccggggtctcctttgcctcaatgtgaagagcttagaaagaggaggagaggagaactcccccggccatctctgtgatcccagccgccgcattttacacagcatatttccttcacaaacagaaaatgaatgaaaataaagatactgattcaaagaaaagtgaagaatacgaagatgactttgaaaaggacctggagtggttaattaatgaaaatgaaaaaagtgatgccagcataatagagatggcttgtgagaaggaagagaatattaaccaagacttaaaagagaatgagacagtaatggagcacaccaaacggcattctgatcctgacaaatctttgcaggatgaggtctcaccaagaagaaatgacatcatttctgtaccaggtattcaacctttggatcccatatcagattcagatagtgaaaactctttccaggaatccaaactagaaagccagaaagacttggaggaggaagaggatgaggaagtaaggagatatattatggagaaaattgtacaagctaacaagcttctacagaatcaagaaccggtgaatgataaaagggagcgaaaacttaagttcaaggaccagttagttgatttggaagttcctccactagaagacactactacttctaaaaattattttgaaaacgaaaggaatatgtttgggaaactgtcacaattatgtatttccaatgattttggacaagaagatgtgctcctgtcacttactaatggaagctgtgaagaaaacaaggataggacaatactggtagagagagatggaaaatttgaacttctgaatttacaagacattgccagtcaggggtttttgcctcccattaataatgcaaatagtacagaaaatgaccctcagcagttgttacccagatcttccaactcctctgtcagtggcaccaagaaagaagattctacagcaaagattcatgctgtcactcactcatcaacaggagagccgctggcttatatcgctcagccaccactcaaccgcaagacttgtccaagctctgctgtcaactcagatcgaagtaaagggaatgggaaatctaatcacaggacacagtctgcacatatctcaccagtgacttcaacatactgtctttcccctcgacagaaagaactacaaaaacaactagaagaaaagagagaaaaactgaaaagagaggaagagcgacgaaaaatagaagaagagaaagaaaaaaagagagagaatgacatagtatttaaagcgtggttgcaaaagaaaagagagcaggtcttagaaatgaggagaattcagcgagcaaaggaaattgaagacatgaacagtagagaaaacagagatccacaacaagcttttcgattatggcttaaaaaaaagcacgaagagcagatgaaagaaagacagacagaagaactaagaaagcaagaggaatgtttattcttccttaaaggaacagaaggccgggaaagggcctttaaacaatggttaagaaggaaacggatggaaaaaatggcagagcaacaagctgtcagagagagaactagacagctccgactagaagctaagcgttctaaacagttacagcaccacctatatatgtcagaagccaaaccttttcgttttactgatcattataactgaaagtttctattaaatatttcagtgggcagctgctatcaaaattttggatatgatttcttagggtctgtgtactttggttgtattctaaattatggaaatggtatttatcttttattgacagtgaatttgtttttttaatactagaacaaaataaatttttttctcacagtgttgt

SEQ ID NO: 257430 - DNA, 400 bp, Homo sapiens
tgtcgctctcgtagttagagaggcccggatggaggacgcagaggcacgctgttgccatggcagtgtggtcctggctgccgcggaggcaggtgccggggtctcctttgcctcaatgtgaagagcttagaaagaggaggagaggagaactcccccggccatctctgtgatcccagccgccgcattttacacagcatatttccttcacaaacagaaaatgaatgaaaataaagatactgattcaaagaaaagtgaagaatacgaagatgactttgaaaaggacctggagtggttaattaatgaaaatgaaaaaagtgatgccagcataatagagatggcttgtgagaaggaagagttttccaaagaaagatttgatatagctattatctattacgccagacca

SEQ ID NO: 257431 - DNA, 1896 bp, Homo sapiens
tgtcgctctcgtagttagagaggcccggatggaggacgcagaggcacgctgttgccatggcagtgtggtcctggctgccgcggaggcaggtgccggggtctcctttgcctcaatgtgaagagcttagaaagaggaggagaggagaactcccccggccatctctgtgatcccagccgccgcattttacacagaaaatgaatgaaaataaagatactgattcaaagaaaagtgaagaatacgaagatgactttgaaaaggacctggagtggttaattaatgaaaatgaaaaaagtgatgccagcataatagagatggcttgtgagaaggaagagaatattaaccaagacttaaaagagaatgagacagtaatggagcacaccaaacggcattctgatcctgacaaatctttgcaggatgaggtctcaccaagaagaaatgacatcatttctgtaccaggtattcaacctttggatcccatatcagattcagatagtgaaaactctttccaggaatccaaactagaaagccagaaagacttggaggaggaagaggatgaggaagtaaggagatatattatggagaaaattgtacaagctaacaagcttctacagaatcaagaaccggtgaatgataaaagggagcgaaaacttaagttcaaggaccagttagttgatttggaagttcctccactagaagacactactacttctaaaaattattttgaaaacgaaaggaatatgtttgggaaactgtcacaattatgtatttccaatgattttggacaagaagatgtgctcctgtcacttactaatggaagctgtgaagaaaacaaggataggacaatactggtagagagagatggaaaatttgaacttctgaatttacaagacattgccagtcaggggtttttgcctcccattaataatgcaaatagtacagaaaatgaccctcagcagttgttacccagatcttccaactcctctgtcagtggcaccaagaaagaagattctacagcaaagattcatgctgtcactcactcatcaacaggagagccgctggcttatatcgctcagccaccactcaaccgcaagacttgtccaagctctgctgtcaactcagatcgaagtaaagggaatgggaaatctaatcacaggacacagtctgcacatatctcaccagtgacttcaacatactgtctttcccctcgacagaaagaactacaaaaacaactagaagaaaagagagaaaaactgaaaagagaggaagagcgacgaaaaatagaagaagagaaagaaaaaaagagagagaatgacatagtatttaaagcgtggttgcaaaagaaaagagagcaggtcttagaaatgaggagaattcagcgagcaaaggaaattgaagacatgaacagtagagaaaacagagatccacaacaagcttttcgattatggcttaaaaaaaagcacgaagagcagatgaaagaaagacagacagaagaactaagaaagcaagaggaatgtttattcttccttaaaggaacagaaggccgggaaagggcctttaaacaatggttaagaaggaaacggatggaaaaaatggcagagcaacaagctgtcagagagagaactagacagctccgactagaagctaagcgttctaaacagttacagcaccacctatatatgtcagaagccaaaccttttcgttttactgatcattataactgaaagtttctattaaatatttcagtgggcagctgctatcaaaattttggatatgatttcttagggtctgtgtactttggttgtattctaaattatggaaatggtatttatcttttattgacagtgaatttgtttttttaatactagaacaaaataaatttttttctcacagtgttgt

SEQ ID NO: 257432 - DNA, 418 bp, Homo sapiens
aacaaaggatagtgggacaactggatattcacatgtgggagaatgaagctagaactttacctcatactatataaaaaagttacccaaagtagatcaaatacccaaatgtaagagctaagactatacaactcttaaaagaaaacatagatatgaatcttcatgaacttggatatgacacaaagcacaagcaacaaaaggaaaagtagattgattgcacttcatcaaaagtaaaaactttttgcttcaaaggataccatcaaaaaaatgaaaagataaatgtgaagaaaaaagtgaaaaggggccagatgcagtggctcacacctgtaatcctagcattttgggaggccagggcaggaggaccacttgaggccaggaattcgagaccaacctgggcaacaaagtgagacctcatctctac

SEQ ID NO: 257433 - DNA, 696 bp, Homo sapiens
ggaaaaaaaaaacacaacgtagctggggctgggcgcagtggcttacgactgtcatccaggcactttgggaggctgaggtgagtggatcacctgaggtcaggagttcaacaccagcctggccaacatggtgaaaccctgtctctactaaaaatacaaaaattagctgggcgtggtaccacgcgcctgtaagcccagctactagggaggctaacgcaggagaatcgcttaaacatggcgggcggaggttgcagtgggctgagatcgcgccacttcactcctgcctgggcaacgaagagtgaaactccatctcaaaacaaacaaacaaacaaacaaacaaacaaaagcactctaggtataaaaggaacttcctctgcctgcaagaccccccatctccttcccatgaagtccttaacttctgttcaacccaaacgcccagcgcgtcccttccactgcgctgcccgatgcacctcttcccgccacgccttcagtgttgtggtcatttgtgcctgcgcacccagggctgcaggtaccttcctcctgtgtgcttccaggacggttattcaggatgctgagacgagccgccagctcacacagaactggggtgtgacctcagcacctgctgcctgtgttcctgaggctgtccgccaaggcgctcaggaaacgcacatgcctcctgagcctcatatgcacacctcg

SEQ ID NO: 257434 - DNA, 272 bp, Homo sapiens
acagatgacttatacaaatttgtattattgtttgaatagtgcccacttaatgcagatagttatgaggctactagtcctatttgcactatttatataaagtgtttagcccagggatttaagttctcaagtgctgttgtttttatttattgtatttgttttattgtagtttttagagatagggtctcaccatgtcatccaggctggaatgcagtggtacaatcatagctcacttataaccttgaactcctggtttcatgcagttctcctgcctt

SEQ ID NO: 257435 - DNA, 438 bp, Homo sapiens
aaactgacacagcacatagacacaccacatttactctgttgctttcagtgtgactaacccaaaggaacctggcaagcaggagaaaccagacctcccggcgctcccaagccacatccctatcctggcttcttccccatagagtctaaatcatctaaaggaggtgaggtggccatatgtaccttacaggggtgttgtatgactttgaagaaacaataaacaacacaaacagaagtccccagcttagtcctgggcacacggcaggtattcaacacgtcagctgtccacctcaacctcagcccacctccaccagctctagcatacattctacagaagacaaagttaaaaacagaaaagtaggattgcctgaggtcagcagttcgagaccagcctgggcaacatagggagaaccagtctctatgcaaaataaaacattttaaa

SEQ ID NO: 257436 - DNA, 191 bp, Homo sapiens
ctgtgtctgtgcctttgctgggaagctggtgatagagaccatggctgcacgactgccagctttcatgtggctcggttgacaggggtttcaccctctgatgaagttctccaaactttcttggaaaaccagctgggcaggtttaccttttgtctactgccttggatggatctcatttctatcctagtttgggg

SEQ ID NO: 257437 - DNA, 366 bp, Homo sapiens
cctgtaaacaacttttgaagcaggttttgatcatccccatttacagaagagaaaacagcctcagagaggttaagagacttcctctggatcacacagctaatgtgcactaatggggctttggagggtggcaacaggaggcccggtgaaatccccggtgagagcagccttttcgccgtggcctgccgtgaagcactatggcagcacccacacctgccaggactgaagatgaagaaaccgaggcccagagggactgacgcacttgctcgagacctaccccaagccagtctgttctcttaacgtctattctgcagtttgatatgtgaccattcacagtgagcttggtcaatacaaagatgttcccagaaa

SEQ ID NO: 257438 - DNA, 492 bp, Homo sapiens
ccagtaagtgctgatgcagaagctacagcaagtcatcctaaaaatctagccaacaaaattaatgaaagtagctacactggtcaggcatggttgctcacgcctgtaagttcagcactttgggaggctgaggcgggtggatcacctgaggtcaggagttcgagaacagcctggctaacatggtgaaacccaatctctactaaaaatacaaaattagctgggtgtggtggcgcaggcctgtaatcccagctattcaggaggctgaggcaggagaatggcttaccaaggagacagaagttgcagtgaacggggattgtgccattgcactccagcctgtgcaacaagagtgaaactccatctcaaaaaaataaaaataagaaaaaagaaagcagccaaaccaaacaacagattttcaataaagacaacatagacttctattgtaagaagatataatctaggactttcatagctatagagaagtcagtcaatgcctgg

SEQ ID NO: 257439 - DNA, 306 bp, Homo sapiens
  misc_feature (171)..(171): n is a, c, g, or t
  misc_feature (245)..(245): n is a, c, g, or t
agctcacagcctcactcccccctcttccttgatcatccctcgcacgctccccactcagagctttggcacggtgcctgctgttcctccacctggaacattctttttgcagggatccacggacctggctccctcatctcccccaactctcatcttcccagggggttcttcctnaatcactccacacaaagccacagtacccctccccaaccctcagtaccgaccctctaccctcttttcacatactntgcattttgattcctgtacactgtgtagctcaccacatcaagtggtgacatttatgaagct

SEQ ID NO: 257440 - DNA, 545 bp, Homo sapiens
tctccttctttctgcttctctgatcccttttttccccaaagcactagagtgactttctcttaagttcccttatctaattaagggaagttcttccagaagaaatgcaattgtcttaaaactctgtctctagtaatatgaacaaataaccaggaaagattaaccacaagaagagaagagattaaaacttgtcacatctagatagacttttcatgtatttttctggagatagctccaagaaatcacctgggagacattatctgtataagacaacctttgttcacagtgaagttttgcctctcaccttcacaccacctcccccagagctcacaggaactctttgtccaaggccattgttccttgggctcattaattttccccaaaaatcatttactacccctcacaattggctacatttcccccatttccctctcccttatgaagaggatatgtaagcttcaactctctggcctttctttgagtctcatatttaaatggctactgtacttactcacattttaaaaattatctgccttttctcctattga

SEQ ID NO: 257441 - DNA, 420 bp, Homo sapiens
ctgcccccgtaatgcaatgggcatcttcacgaagaataagctccttttcacttaaaaatattcagagaaggagaaacaatgtgaggcagtggaaacagcatagggtttagactcagagaacctatggtcaaatcctggccctgctgcttgttagctgtgtgacctcggagaagtcacttactctttgagcctgtttcttcatctgtaaaatgggtagcagatgagccacaaagaatgactgtgatgattacataacagaaaaactccaggtacatgtctattatgcccattatcactggtgtccattcccagggtgttgcagaaatgttgcctgcttttggtgaacatttgaacacaatgttctctgaggttcctaaatggcaggtatgatcttatttacaagaataaacgtgcctacca

SEQ ID NO: 257442 - DNA, 695 bp, Homo sapiens
gttgatttggaatgtagagtggatcttgatttctagaaatgcagattgacactcactaaacattacatgtgtttaaactaaagagaagcatacagagggcatctggtacagttcctggcacttccacatctataaatcacaggaagcaaaattatgtaagaaacatagctttccctctcctggcttttattttttgtttttatttttagagacggggtctccttctgtagcccaagctggagttcagtggtgtgatcatggctcagtgcagcctcaacctcctgggttcaggggatcctcccatctcagcctcctgagtagttgggactagacgggatctccctctgtagcccaagttggagtgcagtggtgtgatcatggctcactgcagcctcaacctcctgggctcagaggatcctcccatctcagcctcatgagtagttgggactacaagtatgcaccaccatacctggctaattttttatttttgtaggggtctcgctatgttgcccaggctggtcttgggcaacataccctcctaccttcttggcctcccaaagtgctaagattgcaggcatgagctgtggtgtctgacgcatcttctatcttttaaaggcatatatccaagtggtcagtattttcaatttaagttcttaccatggctttccaggcctacaaggtccacctcctgtctc

SEQ ID NO: 257443 - DNA, 301 bp, Homo sapiens
atgaaaaggttttttataactctcataatcagctaaatggtgctaataattctctagcaggtctctgaaatgctagagaaggcttttcatggagtgtctggcaacagtgatgatccatgctcatttgtaacccagaagcagcaattattatttttaattgctatgatttttcaaaataattcaaacaattcttcttctagtatgtcttttaaaacatataaattatttaattgcagagttagaaagaaatttagaaaataatttgatggtgggtttgccaacatcaaatgctgcttcagga

SEQ ID NO: 257444 - DNA, 370 bp, Homo sapiens
tcaagtagatcctgcctgcttctgagtagatcctttctgcttctttgtttcttaagatatttctggccgggcgtggtgactcacacctgtcatcttaacactttgacaggccaaggcaggtgcatcacctgaggtcaggagtttgagaccagcctggccaacatggtgaaaccccgtctctactaaaaatacaaaaattagctgggtgcggtggcacattcctctaatcccagctactcaggagactgaggcaggagaatcacttcaacctgggaggtggaggttgcagtgagcccacatcaagccattgtactccagcctggatgacaagagcaaaactctgtctcaaaagaaaaaaaacaaaaaatat

SEQ ID NO: 257445 - DNA, 506 bp, Homo sapiens
acatttgcattttcggccagcagcttcttgatattctcagataacaactgaagccgatgtgttttggttgcgaaaatgttcgagaagctatttagatgtaaagctttctgaaattcctggcatgccttggtaccatcttagagattctgtggaatgtgatctaatctgcagctgtgtagacctcacgaaatgaccaccgaccacagatgcaggacttccaagccctgtgtttgcttgcttgctccttcccaatgagtgaccactctcagttgttgttaaaaggcctgtttctaagcagctgaggttctgtggtttgaggcagcctaggaaaaaaattaattttttttttcgagacaggatcttgctctgttgcccaggctggagtacagtggtgtgatcttggctcactgcaacctccacctcccatgctcaagtgatcctcctgcctcagcctcccaagtagctggaactacaggcgcgtgctaccatgcctgcctaattgtttt

SEQ ID NO: 257446 - DNA, 368 bp, Homo sapiens
tgatggtcaagagaaagcgattagaaaatagtccctactttgcatgtgatagccttgagtagcaattaaagtgagtgttttctcatctttgacaaagacgttagcaaagatgatgatgaagataatgataatgatgatgaaggtatcttttgccattttactcaagcagctactcttaaattggacattttcttctttaattctctcagcaagtctgcttaggaactattaccatctgcattatgcaaatgagaaaactaactctcgaagagtttaaataactctcctaaaggctccacatctagtaagcagaagcaatttatgatatgcccttcacctctgtggtgtgtgtctttttaaaatcataa

SEQ ID NO: 257447 - DNA, 455 bp, Homo sapiens
gcccattcctcactgccttcttgctgtgtcactgcatggtgggaggggcaagcaagctcccacggcctcttttacagcggcccagattccattggtgagggttctgccatcatcacatcatcaccacgtcaccttcagggctaggatttcaacgtaagaattccggggggccgggtgtggtgactcacgcctgtaatcccagcactttgggaggctgaggcgggcagatcacgaggtcaggagatagagaccatcctggctaacacagtgaaaccccgtctctactaaaaatacaaaaaaattaaccgggcatggtggcaggcacctgtagtcccagctactcgggaggctgaggcaggagaatggcgtgaacctgggaggcggagcttccagtgagccaagatcacgccactgcactccagcctgggcgacagagcaagactctgtctcaaaaa

SEQ ID NO: 257448 - DNA, 148 bp, Homo sapiens
aatatactgcatatgttcaagtatgtagaggaaaaaaaaagagtatgataaagagagtcatggaagatataaaatagacatgcattaaatttctagagttgaaaaaatatgatacagaagatacatgagagggataaacagcaaccat

SEQ ID NO: 257449 - DNA, 189 bp, Homo sapiens
gataaacaaaataaaagtgaagtcttaagtagaactttgcaaggagtagcagtacactatacggaggtattaggtttttttgaatatgacttgaagttgttaaaatgatattttagagttttgatgtgcttaaaaactggaaattgagaatttttttttttattttttgttttaagttaaaaattaagc

SEQ ID NO: 257450 - DNA, 414 bp, Homo sapiens
cttgccacgaagccgatgtggaaccatcgccgtgctcagtggagggaccatgagttcatggcgtgattagctgggaggtttggaaacagcaaaagcaaaaaggcatctcccacaatgtccagtgactcaagtctacagagcttgtgtgcaaattcccttaaagtccctcctcatcttcagaagatatccaatgactcaagtctatggagcttgtgtgcaaattcccttaaagtccctcttcatcttcagaagttgaaataggaaaggaaaaggcaacacttagaccaaatgctgaagtcaacgtgacatgtaggatgtgatttgttaagttacactgacatctggtggccttcagtgttagaagagaaacacacgagatcctgtgatctgaaacacacatgatcaaatgtgcct

SEQ ID NO: 257451 - DNA, 400 bp, Homo sapiens
tcatgtcttgacaaaagatatgacagaattttcctttaatcataattgtagtggctgcatgcaaaaaaagaaaatatatccaaaatacaatgaataagcagggaaagagtgcaaaggaagtgaatctcccttctctatttaatatagttgactaatttgtccccatgtgtaccaagatatgtttacctgctgaataccctgagcaaaacaaaacaaaaccttcttaggtaagatgagtgtattcactgaagtggccttcaactagggatcatttctaaaacattcttggtactttcagctgacagactacatgcctctaagctgtttcatacttaagagactgaattcactggaggtacttaaaaggatgagactgtataatggttgatcatttcagctg

SEQ ID NO: 257452 - DNA, 1128 bp, Homo sapiens
aagtgaagactgagtctgaaatgggaaagatatccccacacaagtccagcacaggctgttagaactctatatctcttgttctggaagctttgaagtccaagatgaaggtggcagcagcttgagtgtctgggtccccagtttgaaatgtcttgttactgctgacaagacctgcatgactgaccatttgctccctaagagatgaaaactgacattgctttgaagttcaaaatgacattgccaaaacaagaagaaatggaaaataactgcagcacgtttatgacattcgtttctttctccacatgaaacatacaatgagaacactttatagatgaattgtgtcttcgattgaatagagaatggtggactagctttggttttatggaattggataatttgtcatagtttctgtccctggaaaaatgagaacccaaaggaaaacaagtggaaagcctttaaaaaatagtgatataatacacagctgatatttttggttcatagaatactttaaagtacatcatttacaaagcaaattactaaattataagaaatgctgtcatcatcaataaacattcacagagcttcaggttttaacacaaagcattcctcatatttcaggtgatattatttatgaaaaaattacttggagattgctccaaggttatcacattcttttcaaaccatcaattccctattattatttactattattagttattatttataaatacatatgaatacacaatgaaagcatgctttatgtatagcatataaatatatttgaactttactttccccacatactatctatcctgcaatattacaccaccagtaaaagagtatctaaatattaattgctcctatcacaatagtggaaactagaagagataagttttcccaaatctgagtagaaaaccatggttagcggatatccatttgtcctttacggaatatagcaataaaatccaccaataatttttagttgcttattatgtagtgggcaaacataatgtctttttctcacccattccagggtcacagctgacttcctttaacaaaaaccagatgaacaagaaaaatgcataatgtgttcatttaataaagttttaagtgacgtgggagccttcagaa

SEQ ID NO: 257453 - DNA, 1017 bp, Homo sapiens
aagtgaagactgagtctgaaatgggaaagatatccccacacaagtccagcacaggctgttagaactctatatctcttgttctggaagctttgaagtccaagatgaaggtggcagcagcttgagtgtctgaaacaagaagaaatggaaaataactgcagcacgtttatgacattcgtttctttctccacatgaaacatacaatgagaacactttatagatgaattgtgtcttcgattgaatagagaatggtggactagctttggttttatggaattggataatttgtcatagtttctgtccctggaaaaatgagaacccaaaggaaaacaagtggaaagcctttaaaaaatagtgatataatacacagctgatatttttggttcatagaatactttaaagtacatcatttacaaagcaaattactaaattataagaaatgctgtcatcatcaataaacattcacagagcttcaggttttaacacaaagcattcctcatatttcaggtgatattatttatgaaaaaattacttggagattgctccaaggttatcacattcttttcaaaccatcaattccctattattatttactattattagttattatttataaatacatatgaatacacaatgaaagcatgctttatgtatagcatataaatatatttgaactttactttccccacatactatctatcctgcaatattacaccaccagtaaaagagtatctaaatattaattgctcctatcacaatagtggaaactagaagagataagttttcccaaatctgagtagaaaaccatggttagcggatatccatttgtcctttacggaatatagcaataaaatccaccaataatttttagttgcttattatgtagtgggcaaacataatgtctttttctcacccattccagggtcacagctgacttcctttaacaaaaaccagatgaacaagaaaaatgcataatgtgttcatttaataaagttttaagtgacgtgggagccttcagaa

SEQ ID NO: 257454 - DNA, 432 bp, Homo sapiens
ggaaaagaggcagacagggaggtgagggggaatgtgggaggtgatgagaaagaaggaaaaagaagaaaggagatggagagagtgatagggagacaggaggggagaaggaggaacagataggagggagctatgaaagaaagagtaaggttagaataaagatttgggaaggagagggaggcggaggaagaaagaggaagggagggagctggagagcaagattttgaaactcttaaactaagaagagcaaagcagctaatatgtatggagcacctgctaggtgtcacgcattgagctaggtgtcatttcattattatttgatctcatgctaacaccaccttggtgttatctccctcatttttataggtgagggatgggtgctctgagtttcaataactttgcccagaaccacagcgttgaggctgtagggaggtt

SEQ ID NO: 257455 - DNA, 727 bp, Homo sapiens
tagggatgggttctcactatgttgcccaggctggctttgaattcctaggctcaagcaatcttcccacctcagcctcccaaagtgctgggattacaggtgtgagccaccgtgtccggccttattattagttattgttattagtctcttactgtgcctaatttataaattaagctttatcatagacattatgtataggaaaaataatagtatatattgagttcagaactacataaagtttaaggtatccactggaagtcttagaacatacccctgaggataaggggtggggggcagttatgtattattacatagcctggaggatcatgtggaactccaattagaaaagaaaaaataccttttccttctgactcagaggccaaatgttcttgggtaaatgaagataaatccccagcttagatatcaaatttatcatcatgtgggaaaggcctctttaacagagagttttccagctttctgggggttgggaggagtcttctatcattcctcagacacagtaattggccttcaaaggacctctccacatctgaggctcataaccccagaggcctgagtattctgtctctgggcctgacctattttagattgtgcattctaacccacagtaaatattaaagtgttatgaattgttgagcacctaacaagtgctagtcccttaaaaaactaaagtatggctttagttctttatttcaaatcctcatgacaacgc

SEQ ID NO: 257456 - DNA, 384 bp, Homo sapiens
cgagattttgaatttaggtctggcgttaacaccagtggcattgtgtctccttagtagtatggtagaaggaaaaacctcccattagctcaaagcaactgttctaactctatcaactcacatggctctgcagcatgtggctggatttcatattctcttccaggcagggttggtaacacatggtcagtgtttgagcattgcacagatcataacttacaggtaaatttatcatttgtgtgtgtgtgaaaaccaacaaaaagaggaaaggcttgttacttgttcaagggagaggttctacagcatttgaatttgtggctccctgcaatgagttaattgagaggagactatccatttattagaatttgaaccgccccacagccatgcata

SEQ ID NO: 257457 - DNA, 390 bp, Homo sapiens
gcaggcaaagaaatgttatgattggacttattcatgagataccacagtctctaatatatgaagtttttcatatttacactactggtgaatctctagttgtatacctgcctctgtggtctcattgttggtccctaggatagcttataaataaaaacagatgatactgtctactggccagaacaagctcacaactcactttctactccattctcaagtgactatgtagagaaagatggatggttgaggtcaggatttggagttctctggctaactgcatattaactttgttatcatcgccaatattatcacctgacagagaaacagacttgatggatttgggctttagccctgacttcatcacaaataaacagtgtcatcttggatgctaac

SEQ ID NO: 257458 - DNA, 3700 bp, Homo sapiens
  misc_feature (836)..(836): n is a, c, g, or t
tcatcaggaaggaaatgaggcagcccaaggaggcgggagacggggccctacccagcacccagccatctgcattgacacggctgcccgcaggatatcactgcccccatcccggggcccaccattaccagcagggagagggaggcaggtgagcaccccgagccccacgcctcctgtcgcggggactccccagacccaatgctgtgccagtgcaggccaggcagggggctgaggccgaggcctggtcattgccatcctggtcacgatctggtgaaggatttgagtccagaagccaaacgtctacagtcgtgtggtgcggacactcaggatggactgcccaggccatggggggctctgagggatgaagaggaaactgcgggggcgaggtgggctgcgcgtctctgagaaagtgtgtgagttgagtgctgctgcagagggaagctggggtccaccgctggtgagcggggaggggacgggacacagaaccggccgtggcccaccccgagacggaggcgcagacaccaggcccgttctgtgctctggaggctttgggcagctgtcaggctagtggacggtgtgcagagcagatggaggcgtgaggaggcggctccggggtcacctaggtgggcagccctcacaggggaggccgagggggagggcaggagggcggagcaggcggcggtgcaggaggcccgtggaacttggagggctctgtgtccagctctcatggcccagggcgggggcagctccaaggcctcgggcttggggacagaagggagaggacttgggggttgggggtggtcagagcattgtgggagggatctggggcagctggggcntcccagagggtgaggtgtctgctgggaattggggcagccccaggcgtcccaggcctccagcccagccccggttcctccacgctgcaggccagggtatcaattgcctgctgggaaacctcagggtgcctctgtctcaagtgcctgcccctgacactcctggccctgggctccccccgcctccccgtctgtctgctttccccacctcctcccctcccctggccgtctttctgactcggggatggcgtcacctctcaccccaaatcaggaccctgggccccagctctgttccccacctcaccttccttgtgaccaactcctgacctcccgtgggcttggggtgtctgtggccggaacattcctcagaccctctcctccagccccactctgtcccaccacccaggcatcccccacctgggttccagccctccaaggggccccacgctctgtgtccatgatcaggacactcacacgcacccagctcgcgcccttccttccagacattcgagctctggaagctcacagtcaccctagcttagtgcacagccacaggccaggcaccttcaacatccccaccttccaggtgaggaaaccgaggcaccgagagctgggggccaggccagggggtctccctggggggagcagaggagtgtcggacctcagaagaggctctgggggtctgagccgccaccgggcgctgccttccaggttcagcagggacagagctcagggggaaggcacctcccgtcctggttcaatacatggacccctgaccctgggaaagggactgagccaggggaggcctcaggtcactgcaccatgaagttgtggggagctgcgggggcctctgggctccgagctgggcaggcacagcgtggggaccacgtgccgaggggaagaagcgtgccagggtggacgtctcagtgcacacgcaggaacatgcaacggctgagccagcccagagaggcagcggagcgtgtgcggggcggccggcggaggagcagcaggatcccaggcgggagcgcacggccttttcggaggcaggttccaggacaatactaagcgtttacatcattgcactatttgatccaggaggtcccactgtggcgtttcatcgataaacgcacatgcgaggtggagggtggctggtgtggaatgtgcccggcagccttcatagcaaaggagaattctagaaccaaccgaagtgcccctctgaagggagctggtcccgtccgttccagccgccgtggagtaacacagccagcagtttccctcctgccacgaaagctcgagactgaaactcaggatgaactgttttcagcccggtcaccccagccctgggtggaggcccattgaggatggccgagcaggggcgggcatccaggcaggtccagcagtcctggcgggctgaggagaaggaggtcagtgctcagggagacatccgcagagggacctggcaggcagagctccagaagggagggaactgcacagacagaaagctccagaaggctgcctgagggcctctgaggcctccggagtcaggcgccatggatgtggaaggtggactcttcagcatggatgggaccctagggggctgtggacccccggcccctgggactcacaggtgggagacaggagttccaaccgccagggggagagtcctggaggatcctgggctgttggcagccacccagcagggcccgtcctgggagtggggctggactcttcctgcaggaaaggctgggctggacctgctctgagaggcttcagaaccagccacacgaagaccaaagtgaagagcaaggagctgaactccacgcagaacacagcgcagcgtcctttaaaggaaggccaaaaacaacccaacaaaaatgccaggtgatcaaagcggtcacagcacaatgtccacatccaacgagaaattgctactacgtccagacgcagggaaaggtggccgtgggaacgtgagtcagcagcaacaggcccagaagggcagccacggtggacttgtcagacgtggaccctgaaatgacaatcacagcatgatttcaggcaggagcctgaaatggtacagctttggacatcggtttggcaaattcttttagagagaaacacacaccttccctaggacccagcaactccactcctaataaccaagtgaaatggaaggagttgtcctcagcaaaacgtgtgtgcggaagttcacagtcactttctcggtgataaccaagagctggaaaccactgcaacacccaccagcaggtgaacggattaacacactgggctagggccacacaatgagatgctccgtggcaacacaaaatgaaccgtggacacacactgcacggcggatgaatatgcagacatcaggccacgtgaagggagccaggccccgaggcgccacgctttgtgattcagggtggtccctctgcgcccaagacccggctgcctcctcctcttcctggctgcagggagtgcttgtgtctgaagaacgccaggctggtgtccccagagggcggctggaggggctcagaaaccattttcaccttctgtctcctccatgtctgcactgtttgggtttgtacccgcctgtgtcgcttttgcacgggaagtgagatggagagacacgtgaaccaccattgctggggttccagcatggggccccaggggacccatggctttcccagaaggaagctctgccattggacagccggtctcaggctgctgcacaggcccctccccgccctcagccctggcctgcgggaatcaggaaagggtggggtccagctgcattgcgaatggactaaagccactgatttgcacacttgccaatggctgaaatggtcaataaaacgtcatgtaccttt

SEQ ID NO: 257459 - DNA, 505 bp, Homo sapiens
tcatcaggaaggaaatgaggcagcccaaggaggcgggagacggggccctacccagcacccagccatctgcattgacacggctgcccgcaggatatcactgcccccatcccggggcccaccattaccagcagggagagggaggcaggaaagaaagcacgcagccaaagagcgcaaagaggctcagaggaggcccgggtgccctggagagacgctgcgtcctgacgacacagcatccctgtcccgcagcggagatttcccagatgaaggattccccggcgggagacagggccctgcacacaggtcctctgccacgctgctcaccatgcctgtgtgttatctccccatgaaaagtcacctaggccgagcatggtggctcacgcctgtaatcccagcactttgggaggtggaggcgtgcggatcatctgagatcaggagtttgagaccatcctgagtaacatggtgaaaccccgtctctaggaagaatacaaaaattaactgggcatgg

SEQ ID NO: 257460 - DNA, 376 bp, Homo sapiens
agcaactcattccattgcatactcaaggccatggtaccaatttttctgacctttgattataccaaatattacatagctgaacataaaaattttggttatatggagatgtaatacaatatttaatacacataacatgtattaacaatgcataaatataatttcatgatatttctgaaaaagtaaaatgttcaaagaaaattcctgtcttctatattacccctccattttcttttgacaattaaccctgttccaactatagttcacatacggactgtgcaaccatgtattgaaacaaggaagaaaacagcccatatatctaaagatgaaaatagactctgaagttccatgtatcaccaacgtttttacattgactctt

SEQ ID NO: 257461 - DNA, 473 bp, Homo sapiens
cagttttcttaaagacttttcttatgaggaacttgagacaagttctctcaagggcaagacagagaaatatgactatagtacttcaaattatagtattaaaatatccccaactcttaattctgaatgtgtcacagacaacacaattctctccaacaaattcgtaaagtaatagcatactccatataaagtagtccataaatggatatgaaggtactttttaagtcattattttgttttagattctttagtcgggcatcctggtatccaactataagacgaaagtcatcttaatcgtttctctgtatgcaaataaaactactaagggctcattctaatatgccagagttcacgaggtgagaatatgaattaatttacaatgactcttagagtataaaattaaattaagtaggaagagcataaatattaaatcagtgaaacactgtcagcaccaggaattattgctatttttattg

SEQ ID NO: 257462 - DNA, 239 bp, Homo sapiens
gggttaagagataatttatttcaagtacttacaaccttgcctggtacatgataaatgctgcataggcattttctattattattacctgcataaagaccactttgagaaaggttattaaagccctcttcacctgttcctcccatcgcctatttatatctacttgttctcacttctattatctaatcttgtacgtgtttccaattagctctcttgtatattttcatcatctttccatgctc

SEQ ID NO: 257463 - DNA, 658 bp, Homo sapiens
ggagaattgcctgaacccaggaggcagaggttgcaatgtgccaagattgtgccactgcactccagcctaggtgacaaaagcaaaactccatctcaaaactataattatgtcagtgtgtagaaaaataataagttgtaaatcattaacataccaatacaataatataaacccaattgataatctaaagaatgttgatgatttattttaaaaccaagattatattgtcttattattatttactatagttttatagttatttatatatgttcttgtggatattgttgagatacaatttacatagaaacaaaaatacaatcggaagatataaagtatactttagtctacattttgcgttttggagtttgcttttattagctttgaagtagttactacaggaaagagcagtttcaaaaggaaagcgtggtgaaacaagagttattactccactgcatctcagaaaacttccctgcacaaagtaaaatacttaacaagtttctgaagtattacctaatgtagacttatgtagtattttgaattatttttattaaaacttcttatgaaattaagtcagtacccctcttatatgtgggcaaacaggaccatgctgtgggccacattctttccagacccctctctgggtattctcctgtgcaactgc

SEQ ID NO: 257464 - DNA, 410 bp, Homo sapiens
aactctcctatacctggagatgcttatgttaatctctaaactgtacatacctctttatgtgaaactgagctgtggggcttccatgttcacccctgttgtatttaacacacttcatagtactcttactgaggctagccaagtagacttctgtagtatctcttaagaagggaaagggcagcattgtattctgtctgaattgtcagccagtctcctttttgttacttctctgtcccctgtttggactccatctttctttcttgttcagcactggttcctatgccagtgccggtgcttcagccacctagcttaggtgtgggaaatgtttgcagagagaaatagggcagctgatccccttaagagactagagggtggggcagtgggcaggacacctgtgcctaaagaacagcttc

SEQ ID NO: 257465 - DNA, 503 bp, Homo sapiens
ctccacactgcctctcatggggggctgggatagagaggaagacaggtgtgcaggcctggtcctgttctgaggactctgctgaaccggatcctatgaggttattttgtaaactctaatatatgacttgtaaactggacatgaacaagaatttgtgatatagcctctttaccaggattgaagaagatagaaagaaaaaaatcttggacaaattaattgcaggaagaaatgatcaaattttggcttacatattttgcaacagtggtataacacaaagaagtaagcaaatatggcagaagtgtggtggctttggcgtctacttttgaccatagtggtggccctgttattcgtggctcccggggttcctacacatccttcccgatggaagaaggggttggccaaaaaggtcagccagctgatgggttggaccaagaaagacagagtgataagaatgagtgacaccatgttctatcattttgtattagatgcaccaaaaaactattctg

SEQ ID NO: 257466 - DNA, 159 bp, Homo sapiens
cttataatagctatgtactgctgctttaactgcctatcaattataggtagagagtaccctagactgaaatctactgagtgacctgacaggtctgaatgaaagcccagcactcctagacaaccaagggtctgttgtgtggccagaagggttgagtttgta

SEQ ID NO: 257467 - DNA, 419 bp, Homo sapiens
tgttgtgccagaaacagctcaatagccaccacatgcgtcctacaaaaggacttgcttaagcttttacagaaaattgatttctaaggccccttcaaggtccaaaatgcctcactttatttgacagctatcccgttatctcacttaccacctgctttctaacagggaggctgacattgttctgtaaagtggaggtgaagaaggatatttcaaacttcctgaaggaggtttccagcttcctgaggccatggatgcagaggctgcctgcttggtggtagaactcatcgcctgagaattgttttgactgtgacattatgaaaacattggtgcttcttaatgttttcacaatcactggattccaagcagtaaaattttcaccaagaatgtcacaatacctcctgccaacaaaagcccaaatagta

SEQ ID NO: 257468 - DNA, 249 bp, Homo sapiens
aacctctgtgcttggaggatcccccacttggcacttcgatgcttttgaaagctggaagtccttccttggtttccagtgctgttatactgtcttcacaaataaactataaactactaagcttaagggtgggtttctgcttcatgaatgagcacttgaacttggaattctaaaacaaggttttgagtcctggctcccttatctaatatctggttagcataggtaagtcacataccttccctgagcctccct

SEQ ID NO: 257469 - DNA, 423 bp, Homo sapiens
ggccaccggtcacccaggggtgccttctggctgggaggagcaaaacaccctttttcttctcaactgacaaaactcagtctctcattaacatatgaaaacagcagttcaatttctcacacaaatgcacacagaaaaactgaattaacattaaatttgagagaaaaagcaatagggaagagcctttagaatgcatctctgaactagaattaggttccttaacaacttcagacaggaacaaatagcaaaaacaaacacacacacaaaacagcaataggatcactgagcgctccaatggtaaggaggaattacgaccagttagttgttaatattaactttaaccaagacaaaccccagttcagttacttacctagggatgagtctcaggctgaagactggtttctaccagcaagaaagcaaaaaaaa

SEQ ID NO: 257470 - DNA, 252 bp, Homo sapiens
gaagttgcggtcagctgagatcacgccattgcactccagcctgggcaacaagagcaaaactctgtctcaaaaaaaaaaaaaaaatggaggaaagaaatgccttttagcaaggaaaagttaagaagaaagttggaggccgggcgcggtggctcacgcctgtaatcccagcactttgggagggcgaggcgggcagatcacgaggtcaggagattgagaccatcctgcctaacatggtgaaaccccatctctact

SEQ ID NO: 257471 - DNA, 1229 bp, Homo sapiens
  misc_feature (650)..(650): n is a, c, g, or t
  misc_feature (652)..(652): n is a, c, g, or t
  misc_feature (839)..(839): n is a, c, g, or t
  misc_feature (976)..(976): n is a, c, g, or t
ggagaagtcagcaccagcttaccctgggaaagtcaaggtgggcatcacagagaagtgatgtttaatttaggacctaaaggatagatgagatttgtcagacacattgaagagctcctgcctataggaagcatttgcatgcatttctctttttgcatgtcctacctgcttggtaaattttatagcctcaaagctttttccaaggacaaatatagagtcatttaatttaacatcaatatttttggaggacacattactatttaatagatgagtcaaaagcataatggtagatgatggatgctaggcttggaaatgcatcatctaaaggccaaactttgcttaagaaaaaaaaaacaataatgaataaagtaaaaatgtacatcttgataacaaatgcaagagtcagaatatttgtcctaattaggtaaagcatacaaaaatttcaacacagaattgtgattatttaaataggacagcaggaagagaaatgcatgcaaatgcttcctataggcaggagctcttcaatgtgtctgacaaatctcatctatcctttaggtcctaaattaaacatcacttctctgtgatgcccaccttgactttcccagggtaagctggtgctgacttctccttatgtttattatgcctcgttcaangncctatcacattttagtttcttgttacataagcactgcacctctagtaccaatgtggattagttatctactgatgcataataaactatcctaaaactcaaaactgaaaacaacaagaatttattgtttcacgtattttctgaaggtcaggaattgggagccatttagacggacggttttgactcagantttcttatgagtttgcaatcaagctgatggccaggcctgtaatacctgaaggcttgacaagggggaggatctgcttcaaagctcactcacatgtgtgtggccagcttccattttttattagctcttgccacatgagnctctctgcatacattgcctatcgtcacaacagctagctttccataggttagtgggccaagagaaacagcccaacacggaaacctctgtctttcaaaacctaatcttggaagtgacatatggtcgcgtctgtcatcatctatttgtcaggggcttgaatatgaggaggtagggactgttggaagagtgttggtggatggcaaccatatttcctatctggtggtctaatgcattggtagacatcaataactactt

SEQ ID NO: 257472 - DNA, 411 bp, Homo sapiens
tcaagggttggatcaaattttatttgcctctattttccaatacctagcagaacagaagcatatcccaacttgtccggtcaagggaatcatcctctggagtgcttttggtgaattacacaatatccaccagcctttatgagaagttattttgttggcagagggctgctctgacatcctgtgcacctgagaggcaaggaagaccacctgaaagagaagaaatatagatgccccagagagactgtcttttctacaggatttggaaaatgaaccacaaatccaaatacccccacagaggcagaatgctaaaaaccttcatctcagattgacacagtttagagatttgaaagcccacttctccttttaccatgtcaaattataacaggaaaaataaaatgctgatttgagtctcta

SEQ ID NO: 257473 - DNA, 220 bp, Homo sapiens
tgagtggggacattgatctcctgccgctgacacttatggttttcaggccttcagaccaggactggaatctacaccactggctcttcagctcccagactttcaaactttgtcaccagctttactgggtctccagcttgtacatgacagattgtgggacttctcagcctccacaattgcatgagttgatactttataataaatatctttatgtatatccatc

SEQ ID NO: 257474 - DNA, 380 bp, Homo sapiens
agctaccttctgctcattgggttccatactaatagtggtgtcaaagtaattaacagtgtgatgttttgtggactggtgagatggccaaagtccatgtgagctaggctaggggtcagcaaactacagcctggaagtcaaatctgacctgcaccccatttttgtaaatcttgcaagctaagagtggtttttgttttgtgaagttgaaaaaaaaaagaaagaagaagaagaatatggaacagagaccatttgtggcctgcaaagcctagaatatttactatttggccctttacaggaaaagtttgccaatccctacactaaattgtcatatagagccagagagttgatgtagcccttagtccattactgttcctgccagttga

SEQ ID NO: 257475 - DNA, 344 bp, Homo sapiens
cacacccaaagccaggaaaagtgactccctcctctatgtcctttaaaagtgaggcaaacagccaggcgcggtggctcacgcctataatcccagcactttgggaggccgaggccagtggattgcctgagctcaggagttcgagaccagcctgggcaacacggtgaaaccacatctctactaaaatgcaacaaaaattagccgggcatggcagggtgcgcctgtagccccagctactcaggaggccgagacaggagaatcgcttgaacctgggaggtggaggttgcagtgagccaagatcgcaccactgcactccagcctgggtgacagagagtgactctgtctca

SEQ ID NO: 257476 - DNA, 3627 bp, Homo sapiens
agcagttggaagttggcaggtggagaggcaggttgggagggaaagtcgggggaggacgcggaagaggagctgtgggaagggggaggagggagggaggaaaagaggaggaggcggaggagaactgagcagagcagagcatcgagccaaaggggagatgagtttgtctgtcctctgctgaggctacggccgggcctagggaactgggagcttgggtggaagcgacacccgtggaagtgggaggaggtggcgccgggactttaaccccttgtgggctctgcggcaggggatttaaccctttgtggatctggcccctcggaggcagcgtcatcggtagttttaaccccttcggggctgggtttcacgcactggacttaccctcatcaccttgctcaccaactcctttattggggtgctccgcttggaggtttgaggcccacctccgcccattacgtactgttcctgccgctgcacccccttggacccgctagctggccgcactgtgggcgcttaaccctttactgacttgagctccccagattgcagttggagtttgctgatagaaggactagctaaaggcgtcactgcaggaattacaaactgaagaggactctgttggactgttttttttttctttttcttttttttaagaaaaacccatttttttccttaaggacttactagccaaaatttcttaaacttcgaggactctactagccatggccgagccattcttgtcagaatatcaacaccagcctcaaactagcaactgtacaggtgctgctgctgtccaggaagagctgaaccctgagcgccccccaggcgcggaggagcgggtgcccgaggaggacagtaggtggcaatcgagagcgttcccccagttgggtggccgtccggggccggagggggaagggagcctggaatcccaaccacctcccttgcagacccaggcctgtccagaatctagctgcctgagagagggcgagaagggccagaatggggacgactcgtccgctggcggcgacttcccgccgccggcagaagtggaaccgacgcccgaggccgagctgctcgcccagccttgtcatgactccgaggccagtaagttgggggctcctgccgcagggggcgaagaggagtggggacagcagcagagacagctggggaagaaaaaacataggagacgcccgtccaagaagaagcggcattggaaaccgtactacaagctgacctgggaagagaagaaaaagttcgacgagaaacagagccttcgagcttcaaggatccgagccgagatgttcgccaagggccagccggtcgcgccctataacaccacgcagttcctcatggatgatcacgaccaggaggagccggatctcaaaaccggcctgtactccaagcgggccgccgccaaatccgacgacaccagcgatgacgacttcatggaagaagggggtgaggaggatgggggcagcgatgggatgggaggggacggcagcgagtttctgcagcgggacttctcggagacgtacgagcggtaccacacggagagcctgcagaacatgagcaagcaggagctcatcaaggagtacctggaactggagaagtgcctctcgcgcatggaggacgagaacaaccggctgcggctggagagcaagcggctgggtggcgacgacgcgcgtgtgcgggagctggagctggagctggaccggctgcgcgccgagaacctccagctgctgaccgagaacgaactgcaccggcagcaggagcgagcgccgctttccaagtttggagactagactgaaacttttttgggggagggggcaaaggggactttttacagtgatggaatgtaacattatatacatgtgtatataagacagtggacctttttatgacacataatcagaagagaaatccccctggctttggttggtttcgtaaatttagctatatgtagcttgcgtgctttctcctgttcttttaattatgtgaaactgaagagttgcttttcttgttttcctttttagaagtttttttccttaatgtgaaagtaatttgaccaagttataatgcatttttgtttttaacaaatcccctccttaaacggagctataaggtggccaaatctgagaacaattaaattcattttagttataataaatttaatatttgtaaatgtaacatagtttcagtgtgatttctagagctaattcaaaatagtattgatatattttatgtgactgcatttttggggaggggtaccgaaatcgttaaatttgtcagtttgcaaaaatatcaatctttaatgggagaattttcaatttgccaattttttccttgaatgggtttaagtatgctacaatatacagttcaggcaaaatttaagatgtaattatcttcaatacttaagtgtgcttgctttctagtgccttggttttctttcttgatgctggaaaaataaacaaaccggtattgagtgtttaggcgagtggaaagtggctacaatccaaaattttaaatttaactctgcctcggccattcaaaagtctaataacaaaaaatgtaaacctaatttggcagtttgttaggttagacaactgacagcctcatttcattcctacaagttggttttcagtaatctcttccttccccccagtaaggctggaagaggctcttggcaaacttcttagtgcaagcaatggttagattaatttgtgaggcagctctttaagacgttcagaggtaagaaatactggatttataaagcaaatggctgtttgggggattccaaggatttacctaattgtccaattctacgtgctctctataccaaaacaaaaaaaaaaagctatccacctttccatgtgggtcaaactaaaattagaaatgtcccctcactgcagatcaaatgtaaagcttccagttaaggagctaaatgaggtcctcagctgaatgaggaaccctgtacatccccttgcacagccctattctaaatcgcttaaactatgctgatagctgcttaggttcttgagtagttctgctcttaaacgtagggaggccctgagaactaaattttgccccaaaataaaaacagaaattatgagattgcctcctgtcattttggttaacccagtccttcacctgccctgtgtcagtgtcttctgagggcaattgcgttgctcaaatcactagcacagaggttccttaatttggggccttagaaaccattgtgggccttggggtccatgaaccccatgaaattatttgtagacttgtatgtacatttttctggggagaaggttcaagagattcataagattgtcaaactccttgaaggttcagaacctctgcagggaagggggaagaaaaccctcccattaggaagcatgcttttgcagttaaatggcgatggtggaggtgatagggacttcaagagtaaaatgcaccttgtattgcataagaagcatacacaaatcaataaatcaagggagattataccagtaggactgaatcagggccttcaaagctggactgagttggtcctgttctggcacatatggtccactggagacaatgtatgattgagtttttctttggtctaaaaattatattaaacatttattttga

SEQ ID NO: 257477 - DNA, 2181 bp, Homo sapiens
agcagttggaagttggcaggtggagaggcaggttgggagggaaagtcgggggaggacgcggaagaggagctgtgggaagggggaggagggagggaggaaaagaggaggaggcggaggagaactgagcagagcagagcatcgagccaaaggggagatgagtttgtctgtcctctgctgaggctacggccgggcctagggaactgggagcttgggtggaagcgacacccgtggaagtgggaggaggtggcgccgggactttaaccccttgtgggctctgcggcaggggatttaaccctttgtggatctggcccctcggaggcagcgtcatcggtagttttaaccccttcggggctgggtttcacgcactggacttaccctcatcaccttgctcaccaactcctttattggggtgctccgcttggaggtttgaggcccacctccgcccattacgtactgttcctgccgctgcacccccttggacccgctagctggccgcactgtgggcgcttaaccctttactgacttgagctccccagattgcagttggagtttgctgatagaaggactagctaaaggcgtcactgcaggaattacaaactgaagaggactctgttggactgttttttttttctttttcttttttttaagaaaaacccatttttttccttaaggacttactagccaaaatttcttaaacttcgaggactctactagccatggccgagccattcttgtcagaatatcaacaccagcctcaaactagcaactgtacaggtgctgctgctgtccaggaagagctgaaccctgagcgccccccaggcgcggaggagcgggtgcccgaggaggacagtaggtggcaatcgagagcgttcccccagttgggtggccgtccggggccggagggggaagggagcctggaatcccaaccacctcccttgcagacccaggcctgtccagaatctagctgcctgagagagggcgagaagggccagaatggggacgactcgtccgctggcggcgacttcccgccgccggcagaagtggaaccgacgcccgaggccgagctgctcgcccagccttgtcatgactccgaggccagtaagttgggggctcctgccgcagggggcgaagaggagtggggacagcagcagagacagctggggaagaaaaaacataggagacgcccgtccaagaagaagcggcattggaaaccgtactacaagctgacctgggaagagaagaaaaagttcgacgagaaacagagccttcgagcttcaaggatccgagccgagatgttcgccaagggccagccggtcgcgccctataacaccacgcagttcctcatggatgatcacgaccaggaggagccggatctcaaaaccggcctgtactccaagcgggccgccgccaaatccgacgacaccagcgatgacgacttcatggaagaagggggtgaggaggatgggggcagcgatgggatgggaggggacggcagcgagtttctgcagcgggacttctcggagacgtacgagcggtaccacacggagagcctgcagaacatgagcaagcaggagctcatcaaggagtacctggaactggagaagtgcctctcgcgcatggaggacgagaacaaccggctgcggctggagagcaagcggctgggtggcgacgacgcgcgtgtgcgggagctggagctggagctggaccggctgcgcgccgagaacctccagctgctgaccgagaacgaactgcaccggcagcaggagcgagcgccgctttccaagtttggagactagactgaaacttttttgggggagggggcaaaggggactttttacagtgatggaatgtaacattatatacatgtgtatataagacagtggacctttttatgacacataatcagaagagaaatccccctggctttggttggtttcgtaaatttagctatatgtagcttgcgtgctttctcctgttcttttaattatgtgaaactgaagagttgcttttcttgttttcctttttagaagtttttttccttaatgtgaaagtaatttgaccaagttataatgcatttttgtttttaacaaatcccctccttaaacggagctataaggtggccaaatctgagaacaattaaattcattttagttataataaatttaatatttgtaaatgtaa

SEQ ID NO: 257478 - DNA, 1820 bp, Homo sapiens
agcagttggaagttggcaggtggagaggcaggttgggagggaaagtcgggggaggacgcggaagaggagctgtgggaagggggaggagggagggaggaaaagaggaggaggcggaggagaactgagcagagcagagcatcgagccaaaggggagatgagtttgtctgtcctctgctgaggctacggccgggcctagggaactgggagcttgggtggaagcgacacccgtggaagtgggaggaggtggcgccgggactttaaccccttgtgggctctgcggcaggggatttaaccctttgtggatctggcccctcggaggcagcgtcatcggtagttttaaccccttcggggctgggtttcacgcactggacttaccctcatcaccttgctcaccaactcctttattggggtgctccgcttggaggtttgaggcccacctccgcccattacgtactgttcctgccgctgcacccccttggacccgctagctggccgcactgtgggcgcttaaccctttactgacttgagctccccagattgcagttggagtttgctgatagaaggactagctaaaggcgtcactgcaggaattacaaactgaagaggactctgttggactgttttttttttctttttcttttttttaagaaaaacccatttttttccttaaggacttactagccaaaatttcttaaacttcgaggactctactagccatggccgagccattcttgtcagaatatcaacaccagcctcaaactagcaactgtacaggtgctgctgctgtccaggaagagctgaaccctgagcgccccccaggcgcggaggagcgggtgcccgaggaggacagtaggtggcaatcgagagcgttcccccagttgggtggccgtccggggccggagggggaagggagcctggaatcccaaccacctcccttgcagacccaggcctgtccagaatctagctgcctgagagagggcgagaagggccagaatggggacgactcgtccgctggcggcgacttcccgccgccggcagaagtggaaccgacgcccgaggccgagctgctcgcccagccttgtcatgactccgaggccagtaagttgggggctcctgccgcagggggcgaagaggagtggggacagcagcagagacagctggggaagaaaaaacataggagacgcccgtccaagaagaagcggcattggaaaccgtactacaagctgacctgggaagagaagaaaaagttcgacgagaaacagagccttcgagcttcaaggatccgagccgagatgttcgccaagggccagccggtcgcgccctataacaccacgcagttcctcatggatgatcacgaccaggaggagccggatctcaaaaccggcctgtactccaagcgggccgccgccaaatccgacgacaccagcgatgacgacttcatggaagaagggggtgaggaggatgggggcagcgatgggatgggaggggacggcagcgagtttctgcagcgggacttctcggagacgtacgagcggtaccacacggagagcctgcagaacatgagcaagcaggagctcatcaaggagtacctggaactggagaagtgcctctcgcgcatggaggacgagaacaaccggctgcggctggagagcaagcggctgggtggcgacgacgcgcgtgtgcgggagctggagctggagctggaccggctgcgcgccgagaacctccagctgctgaccgagaacgaaatggacggagggagcgaggcgttcagttggggataatgaattttggggaggggaagggatttcgtgtggatc

SEQ ID NO: 257479 - DNA, 1591 bp, Homo sapiens
agcagttggaagttggcaggtggagaggcaggttgggagggaaagtcgggggaggacgcggaagaggagctgtgggaagggggaggagggagggaggaaaagaggaggaggcggaggagaactgagcagagcagagcatcgagccaaaggggagatgagtttgtctgtcctctgctgaggctacggccgggcctagggaactgggagcttgggtggaagcgacacccgtggaagtgggaggaggtggcgccgggactttaaccccttgtgggctctgcggcaggggatttaaccctttgtggatctggcccctcggaggcagcgtcatcggtagttttaaccccttcggggctgggtttcacgcactggacttaccctcatcaccttgctcaccaactcctttattggggtgctccgcttggaggtttgaggcccacctccgcccattacgtactgttcctgccgctgcacccccttggacccgctagctggccgcactgtgggcgcttaaccctttactgacttgagctccccagattgcagttggagtttgctgatagaaggactagctaaaggcgtcactgcaggaattacaaactgaagaggactctgttggactgttttttttttctttttcttttttttaagaaaaacccatttttttccttaaggacttactagccaaaatttcttaaacttcgaggactctactagccatggccgagccattcttgtcagaatatcaacaccagcctcaaactagcaactgtacaggtgctgctgctgtccaggaagagctgaaccctgagcgccccccaggcgcggaggagcgggtgcccgaggaggacagtaggtggcaatcgagagcgttcccccagttgggtggccgtccggggccggagggggaagggagcctggaatcccaaccacctcccttgcagacccaggcctgtccagaatctagctgcctgagagagggcgagaagggccagaatggggacgactcgtccgctggcggcgacttcccgccgccggcagaagtggaaccgacgcccgaggccgagctgctcgcccagccttgtcatgactccgaggccagtaagttgggggctcctgccgcagggggcgaagaggagtggggacagcagcagagacagctggggaagaaaaaacataggagacgcccgtccaagaagaagcggcattggaaaccgtactacaagctgacctgggaagagaagaaaaagttcgacgagaaacagagccttcgagcttcaaggatccgagccgagatgttcgccaagggccagccggtcgcgccctataacaccacgcagttcctcatggatgatcacgaccaggaggagccggatctcaaaaccggcctgtactccaagcgggccgccgccaaatccgacgacaccagcgatgacgacttcatggaagaagggggtgaggaggatgggggcagcgatgggatgggaggggacggcagcgagtttctgcagcgggacttctcggagcattctaagcgcttcaccttgtgagcctggagaacttgaccccctgggacctttcaggtggtactggg

SEQ ID NO: 257480 - DNA, 555 bp, Homo sapiens
cgcacgctcagcgagttccagaggcgccagtggaagctgcggcggcggtgtctcgcgttcggcgggatttctcttcgctccggctgcgcgccgagaacctccagctgctgaccgagaacgaactgcaccggcagcaggagcgagcgccgctttccaagtttggagactagactgaaacttttttgggggagggggcaaaggggactttttacagtgatggaatgtaacattatatacatgtgtatataagacagtggacctttttatgacacataatcagaagagaaatccccctggctttggttggtttcgtaaatttagctatatgtagcttgcgtgctttctcctgttcttttaattatgtgaaactgaagagttgcttttcttgttttcctttttagaagtttttttccttaatgtgaaagtaatttgaccaagttataatgcatttttgtttttaacaaatcccctccttaaacggagctataaggtggccaaatctgagaacaattaaattcattttagttataataaatttaatatttgtaaatgtaa

SEQ ID NO: 257481 - DNA, 3674 bp, Homo sapiens
agcagttggaagttggcaggtggagaggcaggttgggagggaaagtcgggggaggacgcggaagaggagctgtgggaagggggaggagggagggaggaaaagaggaggaggcggaggagaactgagcagagcagagcatcgagccaaaggggagatgagtttgtctgtcctctgctgaggctacggccgggcctagggaactgggagcttgggtggaagcgacacccgtggaagtgggaggaggtggcgccgggactttaaccccttgtgggctctgcggcaggggatttaaccctttgtggatctggcccctcggaggcagcgtcatcggtagttttaaccccttcggggctgggtttcacgcactggacttaccctcatcaccttgctcaccaactcctttattggggtgctccgcttggaggtttgaggcccacctccgcccattacgtactgttcctgccgctgcacccccttggacccgctagctggccgcactgtgggcgcttaaccctttactgacttgagctccccagattgcagttggagtttgctgatagaaggactagctaaaggcgtcactgcaggaattacaaactgaagaggactctgttggactgttttttttttctttttcttttttttaagaaaaacccatttttttccttaaggacttactagccaaaatttcttaaacttcgaggactctactagccatggccgagccattcttgtcagaatatcaacaccagcctcaaactagcaactgtacaggtgctgctgctgtccaggaagagctgaaccctgagcgccccccaggcgcggaggagcgggtgcccgaggaggacagtaggtggcaatcgagagcgttcccccagttgggtggccgtccggggccggagggggaagggagcctggaatcccaaccacctcccttgcagacccaggcctgtccagaatctagctgcctgagagagggcgagaagggccagaatggggacgactcgtccgctggcggcgacttcccgccgccggcagaagtggaaccgacgcccgaggccgagctgctcgcccagccttgtcatgactccgaggccagtaagttgggggctcctgccgcagggggcgaagaggagtggggacagcagcagagacagctggggaagaaaaaacataggagacgcccgtccaagaagaagcggcattggaaaccgtactacaagctgacctgggaagagaagaaaaagttcgacgagaaacagagccttcgagcttcaaggatccgagccgagatgttcgccaagggccagccggtcgcgccctataacaccacgcagttcctcatggatgatcacgaccaggaggagccggatctcaaaaccggcctgtactccaagcgggccgccgccaaatccgacgacaccagcgatgacgacttcatggaagaagggggtgaggaggatgggggcagcgatgggatgggaggggacggcagcgagtttctgcagcgggacttctcggagacgtacgagcggtaccacacggagagcctgcagaacatgagcaagcaggagctcatcaaggagtacctggaactggagaagtgcctctcgcgcatggaggacgagaacaaccggctgcggctggagagcaagcggctgggtggcgacgacgcgcgtgtgcgggagctggagctggagctggaccggctgcgcgccgagaacctccagctgctgaccgagaacgaactgcaccggcagcaggagcgagcgccgctttccaagtttggagactagactgaaacttttttgggggagggggcaaaggggactttttacagtgatggaatgtaacattatatacatgtgtatataagacagtggacctttttatgacacataatcagaagagaaatccccctggctttggttggtttcgtaaatttagctatatgtagcttgcgtgctttctcctgttcttttaattatgtgaaactgaagagttgcttttcttgttttcctttttagaagtttttttccttaatgtgaaagtaatttgaccaagttataatgcatttttgtttttaacaaatcccctccttaaacggagctataaggtggccaaatctgagaacaattaaattcattttagttataataaatttaatatttgtaaatgtaacatagtttcagtgtgatttctagagctaattcaaaatagtattgatatattttatgtgactgcatttttggggaggggtaccgaaatcgttaaatttgtcagtttgcaaaaatatcaatctttaatgggagaattttcaatttgccaattttttccttgaatgggtttaagtatgctacaatatacagttcaggcaaaatttaagatgtaattatcttcaatacttaagtgtgcttgctttctagtgccttggttttctttcttgatgctggaaaaataaacaaaccggtattgagtgtttaggcgagtggaaagtggctacaatccaaaattttaaatttaactctgcctcggccattcaaaagtctaataacaaaaaatgtaaacctaatttggcagtttgttaggttagacaactgacagcctcatttcattcctacaagttggttttcagtaatctcttccttccccccagtaaggctggaagaggctcttggcaaacttcttagtgcaagcaatggttagattaatttgtgaggcagctctttaagacgttcagaggtaagaaatactggatttataaagcaaatggctgtttgggggattccaaggatttacctaattgtccaattctacgtgctctctataccaaaacaaaaaaaaaaagctatccacctttccatgtgggtcaaactaaaattagaaatgtcccctcactgcagatcaaatgtaaagcttccagttaaggagctaaatgaggtcctcagctgaatgaggaaccctgtacatccccttgcacagccctattctaaatcgcttaaactatgctgatagctgcttaggttcttgagtagttctgctcttaaacgtagggaggccctgagaactaaattttgccccaaaataaaaacagaaattatgagattgcctcctgtcattttggttaacccagtccttcacctgccctgtgtcagtgtcttctgagggcaattgcgttgctcaaatcactagcacagaggttccttaatttggggccttagaaaccattgtgggccttggggtccatgaaccccatgaaattatttgtagacttgtatgtacatttttctggggagaaggttcaagagattcataagattgtcaaactccttgaaggttcagaacctctgcagggaagggggaagaaaaccctcccattaggaagcatgcttttgcagttaaatggcgatggtggaggtgatagggacttcaagagtaaaatgcaccttgtattgcataagaagcatacacaaatcaataaatcaagggagattataccagtaggactgaatcagggccttcaaagctggactgagttggtcctgttctggcacatatggtccactggagacaatgtatgattgagtttttctttggtctaaaaattatattaaacatttattttgaaatagttttcttcgtgtttttttcttctgctatgacgtcatgcagca

SEQ ID NO: 257482 - DNA, 3631 bp, Homo sapiens
  misc_feature (3588)..(3590): n is a, c, g, or t
agcagttggaagttggcaggtggagaggcaggttgggagggaaagtcgggggaggacgcggaagaggagctgtgggaagggggaggagggagggaggaaaagaggaggaggcggaggagaactgagcagagcagagcatcgagccaaaggggagatgagtttgtctgtcctctgctgaggctacggccgggcctagggaactgggagcttgggtggaagcgacacccgtggaagtgggaggaggtggcgccgggactttaaccccttgtgggctctgcggcaggggatttaaccctttgtggatctggcccctcggaggcagcgtcatcggtagttttaaccccttcggggctgggtttcacgcactggacttaccctcatcaccttgctcaccaactcctttattggggtgctccgcttggaggtttgaggcccacctccgcccattacgtactgttcctgccgctgcacccccttggacccgctagctggccgcactgtgggcgcttaaccctttactgacttgagctccccagattgcagttggagtttgctgatagaaggactagctaaaggcgtcactgcaggaattacaaactgaagaggactctgttggactgttttttttttctttttcttttttttaagaaaaacccatttttttccttaaggacttactagccaaaatttcttaaacttcgaggactctactagccatggccgagccattcttgtcagaatatcaacaccagcctcaaactagcaactgtacaggtgctgctgctgtccaggaagagctgaaccctgagcgccccccaggcgcggaggagcgggtgcccgaggaggacagtaggtggcaatcgagagcgttcccccagttgggtggccgtccggggccggagggggaagggagcctggaatcccaaccacctcccttgcagacccaggcctgtccagaatctagctgcctgagagagggcgagaagggccagaatggggacgactcgtccgctggcggcgacttcccgccgccggcagaagtggaaccgacgcccgaggccgagctgctcgcccagccttgtcatgactccgaggccagtaagttgggggctcctgccgcagggggcgaagaggagtggggacagcagcagagacagctggggaagaaaaaacataggagacgcccgtccaagaagaagcggcattggaaaccgtactacaagctgacctgggaagagaagaaaaagttcgacgagaaacagagccttcgagcttcaaggatccgagccgagatgttcgccaagggccagccggtcgcgccctataacaccacgcagttcctcatggatgatcacgaccaggaggagccggatctcaaaaccggcctgtactccaagcgggccgccgccaaatccgacgacaccagcgatgacgacttcatggaagaagggggtgaggaggatgggggcagcgatgggatgggaggggacggcagcgagtttctgcagcgggacttctcggagacgtacgagcggtaccacacggagagcctgcagaacatgagcaagcaggagctcatcaaggagtacctggaactggagaagtgcctctcgcgcatggaggacgagaacaaccggctgcggctggagagcaagcggctgggtggcgacgacgcgcgtgtgcgggagctggagctggagctggaccggctgcgcgccgagaacctccagctgctgaccgagaacgaactgcaccggcagcaggagcgagcgccgctttccaagtttggagactagactgaaacttttttgggggagggggcaaaggggactttttacagtgatggaatgtaacattatatacatgtgtatataagacagtggacctttttatgacacataatcagaagagaaatccccctggctttggttggtttcgtaaatttagctatatgtagcttgcgtgctttctcctgttcttttaattatgtgaaactgaagagttgcttttcttgttttcctttttagaagtttttttccttaatgtgaaagtaatttgaccaagttataatgcatttttgtttttaacaaatcccctccttaaacggagctataaggtggccaaatctgagaacaattaaattcattttagttataataaatttaatatttgtaaatgtaacatagtttcagtgtgatttctagagctaattcaaaatagtattgatatattttatgtgactgcatttttggggaggggtaccgaaatcgttaaatttgtcagtttgcaaaaatatcaatctttaatgggagaattttcaatttgccaattttttccttgaatgggtttaagtatgctacaatatacagttcaggcaaaatttaagatgtaattatcttcaatacttaagtgtgcttgctttctagtgccttggttttctttcttgatgctggaaaaataaacaaaccggtattgagtgtttaggcgagtggaaagtggctacaatccaaaattttaaatttaactctgcctcggccattcaaaagtctaataacaaaaaatgtaaacctaatttggcagtttgttaggttagacaactgacagcctcatttcattcctacaagttggttttcagtaatctcttccttccccccagtaaggctggaagaggctcttggcaaacttcttagtgcaagcaatggttagattaatttgtgaggcagctctttaagacgttcagaggtaagaaatactggatttataaagcaaatggctgtttgggggattccaaggatttacctaattgtccaattctacgtgctctctataccaaaacaaaaaaaaaaagctatccacctttccatgtgggtcaaactaaaattagaaatgtcccctcactgcagatcaaatgtaaagcttccagttaaggagctaaatgaggtcctcagctgaatgaggaaccctgtacatccccttgcacagccctattctaaatcgcttaaactatgctgatagctgcttaggttcttgagtagttctgctcttaaacgtagggaggccctgagaactaaattttgccccaaaataaaaacagaaattatgagattgcctcctgtcattttggttaacccagtccttcacctgccctgtgtcagtgtcttctgagggcaattgcgttgctcaaatcactagcacagaggttccttaatttggggccttagaaaccattgtgggccttggggtccatgaaccccatgaaattatttgtagacttgtatgtacatttttctggggagaaggttcaagagattcataagattgtcaaactccttgaaggttcagaacctctgcagggaagggggaagaaaaccctcccattaggaagcatgcttttgcagttaaatggcgatggtggaggtgatagggacttcaagagtaaaatgcaccttgtattgcataagaagcatacacaaatcaataaatcaagggagattataccagtaggactgaatcagggccttcaaagctggactgagttggtcctgttctggcacatagggggcgctaaatacaaaagaatcccacccnnnggggtggtatgtactggtgcgggctcgactccgttttgaat

SEQ ID NO: 257483 - DNA, 3620 bp, Homo sapiens
agcagttggaagttggcaggtggagaggcaggttgggagggaaagtcgggggaggacgcggaagaggagctgtgggaagggggaggagggagggaggaaaagaggaggaggcggaggagaactgagcagagcagagcatcgagccaaaggggagatgagtttgtctgtcctctgctgaggctacggccgggcctagggaactgggagcttgggtggaagcgacacccgtggaagtgggaggaggtggcgccgggactttaaccccttgtgggctctgcggcaggggatttaaccctttgtggatctggcccctcggaggcagcgtcatcggtagttttaaccccttcggggctgggtttcacgcactggacttaccctcatcaccttgctcaccaactcctttattggggtgctccgcttggaggtttgaggcccacctccgcccattacgtactgttcctgccgctgcacccccttggacccgctagctggccgcactgtgggcgcttaaccctttactgacttgagctccccagattgcagttggagtttgctgatagaaggactagctaaaggcgtcactgcaggaattacaaactgaagaggactctgttggactgttttttttttctttttcttttttttaagaaaaacccatttttttccttaaggacttactagccaaaatttcttaaacttcgaggactctactagccatggccgagccattcttgtcagaatatcaacaccagcctcaaactagcaactgtacaggtgctgctgctgtccaggaagagctgaaccctgagcgccccccaggcgcggaggagcgggtgcccgaggaggacagtaggtggcaatcgagagcgttcccccagttgggtggccgtccggggccggagggggaagggagcctggaatcccaaccacctcccttgcagacccaggcctgtccagaatctagctgcctgagagagggcgagaagggccagaatggggacgactcgtccgctggcggcgacttcccgccgccggcagaagtggaaccgacgcccgaggccgagctgctcgcccagccttgtcatgactccgaggccagtaagttgggggctcctgccgcagggggcgaagaggagtggggacagcagcagagacagctggggaagaaaaaacataggagacgcccgtccaagaagaagcggcattggaaaccgtactacaagctgacctgggaagagaagatcgccaagggccagccggtcgcgccctataacaccacgcagttcctcatggatgatcacgaccaggaggagccggatctcaaaaccggcctgtactccaagcgggccgccgccaaatccgacgacaccagcgatgacgacttcatggaagaagggggtgaggaggatgggggcagcgatgggatgggaggggacggcagcgagtttctgcagcgggacttctcggagacgtacgagcggtaccacacggagagcctgcagaacatgagcaagcaggagctcatcaaggagtacctggaactggagaagtgcctctcgcgcatggaggacgagaacaaccggctgcggctggagagcaagcggctgggtggcgacgacgcgcgtgtgcgggagctggagctggagctggaccggctgcgcgccgagaacctccagctgctgaccgagaacgaactgcaccggcagcaggagcgagcgccgctttccaagtttggagactagactgaaacttttttgggggagggggcaaaggggactttttacagtgatggaatgtaacattatatacatgtgtatataagacagtggacctttttatgacacataatcagaagagaaatccccctggctttggttggtttcgtaaatttagctatatgtagcttgcgtgctttctcctgttcttttaattatgtgaaactgaagagttgcttttcttgttttcctttttagaagtttttttccttaatgtgaaagtaatttgaccaagttataatgcatttttgtttttaacaaatcccctccttaaacggagctataaggtggccaaatctgagaacaattaaattcattttagttataataaatttaatatttgtaaatgtaacatagtttcagtgtgatttctagagctaattcaaaatagtattgatatattttatgtgactgcatttttggggaggggtaccgaaatcgttaaatttgtcagtttgcaaaaatatcaatctttaatgggagaattttcaatttgccaattttttccttgaatgggtttaagtatgctacaatatacagttcaggcaaaatttaagatgtaattatcttcaatacttaagtgtgcttgctttctagtgccttggttttctttcttgatgctggaaaaataaacaaaccggtattgagtgtttaggcgagtggaaagtggctacaatccaaaattttaaatttaactctgcctcggccattcaaaagtctaataacaaaaaatgtaaacctaatttggcagtttgttaggttagacaactgacagcctcatttcattcctacaagttggttttcagtaatctcttccttccccccagtaaggctggaagaggctcttggcaaacttcttagtgcaagcaatggttagattaatttgtgaggcagctctttaagacgttcagaggtaagaaatactggatttataaagcaaatggctgtttgggggattccaaggatttacctaattgtccaattctacgtgctctctataccaaaacaaaaaaaaaaagctatccacctttccatgtgggtcaaactaaaattagaaatgtcccctcactgcagatcaaatgtaaagcttccagttaaggagctaaatgaggtcctcagctgaatgaggaaccctgtacatccccttgcacagccctattctaaatcgcttaaactatgctgatagctgcttaggttcttgagtagttctgctcttaaacgtagggaggccctgagaactaaattttgccccaaaataaaaacagaaattatgagattgcctcctgtcattttggttaacccagtccttcacctgccctgtgtcagtgtcttctgagggcaattgcgttgctcaaatcactagcacagaggttccttaatttggggccttagaaaccattgtgggccttggggtccatgaaccccatgaaattatttgtagacttgtatgtacatttttctggggagaaggttcaagagattcataagattgtcaaactccttgaaggttcagaacctctgcagggaagggggaagaaaaccctcccattaggaagcatgcttttgcagttaaatggcgatggtggaggtgatagggacttcaagagtaaaatgcaccttgtattgcataagaagcatacacaaatcaataaatcaagggagattataccagtaggactgaatcagggccttcaaagctggactgagttggtcctgttctggcacatatggtccactggagacaatgtatgattgagtttttctttggtctaaaaattatattaaacatttattttgaaatagttttcttcgtgtttttttcttctgctatgacgtcatgcagca

SEQ ID NO: 257484 - DNA, 3620 bp, Homo sapiens
agcagttggaagttggcaggtggagaggcaggttgggagggaaagtcgggggaggacgcggaagaggagctgtgggaagggggaggagggagggaggaaaagaggaggaggcggaggagaactgagcagagcagagcatcgagccaaaggggagatgagtttgtctgtcctctgctgaggctacggccgggcctagggaactgggagcttgggtggaagcgacacccgtggaagtgggaggaggtggcgccgggactttaaccccttgtgggctctgcggcaggggatttaaccctttgtggatctggcccctcggaggcagcgtcatcggtagttttaaccccttcggggctgggtttcacgcactggacttaccctcatcaccttgctcaccaactcctttattggggtgctccgcttggaggtttgaggcccacctccgcccattacgtactgttcctgccgctgcacccccttggacccgctagctggccgcactgtgggcgcttaaccctttactgacttgagctccccagattgcagttggagtttgctgatagaaggactagctaaaggcgtcactgcaggaattacaaactgaagaggactctgttggactgttttttttttctttttcttttttttaagaaaaacccatttttttccttaaggacttactagccaaaatttcttaaacttcgaggactctactagccatggccgagccattcttgtcagaatatcaacaccagcctcaaactagcaactgtacaggtgctgctgctgtccaggaagagctgaaccctgagcgccccccaggcgcggaggagcgggtgcccgaggaggacagtaggtggcaatcgagagcgttcccccagttgggtggccgtccggggccggagggggaagggagcctggaatcccaaccacctcccttgcagacccaggcctgtccagaatctagctgcctgagagagggcgagaagggccagaatggggacgactcgtccgctggcggcgacttcccgccgccggcagaagtggaaccgacgcccgaggccgagctgctcgcccagccttgtcatgactccgaggccagtaagttgggggctcctgccgcagggggcgaagaggagtggggacagcagcagagacagctggggaagaaaaaacataggagacgcccgtccaagaagaagcggcattggaaaccgtactacaagctgacctgggaagagaagaaaaagttcgacgagaaacagagccttcgagcttcaaggatccgagccgagatgttcgccaagggccagccggtcgcgccctataacaccacgcagttcctcatggatgatcacgaccaggaggagccggatgatgacgacttcatggaagaagggggtgaggaggatgggggcagcgatgggatgggaggggacggcagcgagtttctgcagcgggacttctcggagacgtacgagcggtaccacacggagagcctgcagaacatgagcaagcaggagctcatcaaggagtacctggaactggagaagtgcctctcgcgcatggaggacgagaacaaccggctgcggctggagagcaagcggctgggtggcgacgacgcgcgtgtgcgggagctggagctggagctggaccggctgcgcgccgagaacctccagctgctgaccgagaacgaactgcaccggcagcaggagcgagcgccgctttccaagtttggagactagactgaaacttttttgggggagggggcaaaggggactttttacagtgatggaatgtaacattatatacatgtgtatataagacagtggacctttttatgacacataatcagaagagaaatccccctggctttggttggtttcgtaaatttagctatatgtagcttgcgtgctttctcctgttcttttaattatgtgaaactgaagagttgcttttcttgttttcctttttagaagtttttttccttaatgtgaaagtaatttgaccaagttataatgcatttttgtttttaacaaatcccctccttaaacggagctataaggtggccaaatctgagaacaattaaattcattttagttataataaatttaatatttgtaaatgtaacatagtttcagtgtgatttctagagctaattcaaaatagtattgatatattttatgtgactgcatttttggggaggggtaccgaaatcgttaaatttgtcagtttgcaaaaatatcaatctttaatgggagaattttcaatttgccaattttttccttgaatgggtttaagtatgctacaatatacagttcaggcaaaatttaagatgtaattatcttcaatacttaagtgtgcttgctttctagtgccttggttttctttcttgatgctggaaaaataaacaaaccggtattgagtgtttaggcgagtggaaagtggctacaatccaaaattttaaatttaactctgcctcggccattcaaaagtctaataacaaaaaatgtaaacctaatttggcagtttgttaggttagacaactgacagcctcatttcattcctacaagttggttttcagtaatctcttccttccccccagtaaggctggaagaggctcttggcaaacttcttagtgcaagcaatggttagattaatttgtgaggcagctctttaagacgttcagaggtaagaaatactggatttataaagcaaatggctgtttgggggattccaaggatttacctaattgtccaattctacgtgctctctataccaaaacaaaaaaaaaaagctatccacctttccatgtgggtcaaactaaaattagaaatgtcccctcactgcagatcaaatgtaaagcttccagttaaggagctaaatgaggtcctcagctgaatgaggaaccctgtacatccccttgcacagccctattctaaatcgcttaaactatgctgatagctgcttaggttcttgagtagttctgctcttaaacgtagggaggccctgagaactaaattttgccccaaaataaaaacagaaattatgagattgcctcctgtcattttggttaacccagtccttcacctgccctgtgtcagtgtcttctgagggcaattgcgttgctcaaatcactagcacagaggttccttaatttggggccttagaaaccattgtgggccttggggtccatgaaccccatgaaattatttgtagacttgtatgtacatttttctggggagaaggttcaagagattcataagattgtcaaactccttgaaggttcagaacctctgcagggaagggggaagaaaaccctcccattaggaagcatgcttttgcagttaaatggcgatggtggaggtgatagggacttcaagagtaaaatgcaccttgtattgcataagaagcatacacaaatcaataaatcaagggagattataccagtaggactgaatcagggccttcaaagctggactgagttggtcctgttctggcacatatggtccactggagacaatgtatgattgagtttttctttggtctaaaaattatattaaacatttattttgaaatagttttcttcgtgtttttttcttctgctatgacgtcatgcagca

SEQ ID NO: 257485 - DNA, 2709 bp, Homo sapiens
agcagttggaagttggcaggtggagaggcaggttgggagggaaagtcgggggaggacgcggaagaggagctgtgggaagggggaggagggagggaggaaaagaggaggaggcggaggagaactgagcagagcagagcatcgagccaaaggggagatgagtttgtctgtcctctgctgaggctacggccgggcctagggaactgggagcttgggtggaagcgacacccgtggaagtgggaggaggtggcgccgggactttaaccccttgtgggctctgcggcaggggatttaaccctttgtggatctggcccctcggaggcagcgtcatcggtagttttaaccccttcggggctgggtttcacgcactggacttaccctcatcaccttgctcaccaactcctttattggggtgctccgcttggaggtttgaggcccacctccgcccattacgtactgttcctgccgctgcacccccttggacccgctagctggccgcactgtgggcgcttaaccctttactgacttgagctccccagattgcagttggagtttgctgatagaaggactagctaaaggcgtcactgcaggaattacaaactgaagaggactctgttggactgttttttttttctttttcttttttttaagaaaaacccatttttttccttaaggacttactagccaaaatttcttaaacttcgaggactctactagccatggccgagccattcttgtcagaatatcaacaccagcctcaaactagcaactgtacaggtgctgctgctgtccaggaagagctgaaccctgagcgccccccaggcgcggaggagcgggtgcccgaggaggacagtaggtggcaatcgagagcgttcccccagttgggtggccgtccggggccggagggggaagggagcctggaatcccaaccacctcccttgcagacccaggcctgtccagaatctagctgcctgagagagggcgagaagggccagaatggggacgactcgtccgctggcggcgacttcccgccgccggcagaagtggaaccgacgcccgaggccgagctgctcgcccagccttgtcatgactccgaggccagtaagttgggggctcctgccgcagggggcgaagaggagtggggacagcagcagagacagctggggaagaaaaaacataggagacgcccgtccaagaagaagcggcattggaaaccgtactacaagctgacctgggaagagaagaaaaagttcgacgagaaacagagccttcgagcttcaaggatccgagccgagatgttcgccaagggccagccggtcgcgccctataacaccacgcagttcctcatggatgatcacgaccaggaggagccggatctcaaaaccggcctgtactccaagcgggccgccgccaaatccgacgacaccagcgatgacgacttcatggaagaagggggtgaggaggatgggggcagcgatgggatgggaggggacggcagcgagtttctgcagcgggacttctcggagacgtacgagcggtaccacacggagagcctgcagaacatgagcaagcaggagctcatcaaggagtacctggaactggagaagtgcctctcgcgcatggaggacgagaacaaccggctgcggctggagagcaagcggctgggtggcgacgacgcgcgtgtgcgggagctggagctggagctggaccggctgcgcgccgagaacctccagctgctgaccgagaacgaactgcaccggcagcaggagcgagcgccgctttccaagtttggagactagactgaaacttttttgggggagggggcaaaggggactttttacagtgatggaatgtaacattatatacatgtgtatataagacagtggacctttttatgacacataatcagaagagaaatccccctggctttggttggtttcgtaaatttagctatatgtagcttgcgtgctttctcctgttcttttaattatgtgaaactgaagagttgcttttcttgttttcctttttagaagtttttttccttaatgtgaaagtaatttgaccaagttataatgcatttttgtttttaacaaatcccctccttaaacggagctataaggtggccaaatctgagaacaattaaattcattttagttataataaatttaatatttgtaaatgtaaaaaaaaaaaaaaaaaaaaaaaaaaaaaaaaaaaaaaaaaaaaaaaagggggggcaataaaaaattttcaaaggggggcaaaatagggtcgttttgtgaaaacggggcttcccctattatggtgggaagctctgtttatattatacgccttagcgagcgcaggaccagcatgcgtcgttcatcaacacaacgtactgcagtacttgggacaaacctgcgttgacgcacgcggatgttacattactgttgaaaaaagacaccccctacactcacctagcggcggggtcggcatccctattgttggcggaaacacatcacttcctaggaaaatatttctaacgccctccacgggtacaaatctaaacaccttatcaggtgccttagttgggtgtcctacctcccgcgcattactctgtactgctcattagaacaactatgtcctaacaagacgtattaattcaggaaactttttaccgcgggcgtatcatgatcatctctactacctctgacttatctctgataagctgtc

SEQ ID NO: 257486 - DNA, 1649 bp, Homo sapiens
agcagttggaagttggcaggtggagaggcaggttgggagggaaagtcgggggaggacgcggaagaggagctgtgggaagggggaggagggagggaggaaaagaggaggaggcggaggagaactgagcagagcagagcatcgagccaaaggggagatgagtttgtctgtcctctgctgaggctacggccgggcctagggaactgggagcttgggtggaagcgacacccgtggaagtgggaggaggtggcgccgggactttaaccccttgtgggctctgcggcaggggatttaaccctttgtggatctggcccctcggaggcagcgtcatcggtagttttaaccccttcggggctgggtttcacgcactggacttaccctcatcaccttgctcaccaactcctttattggggtgctccgcttggaggtttgaggcccacctccgcccattacgtactgttcctgccgctgcacccccttggacccgctagctggccgcactgtgggcgcttaaccctttactgacttgagctccccagattgcagttggagtttgctgatagaaggactagctaaaggcgtcactgcaggaattacaaactgaagaggactctgttggactgttttttttttctttttcttttttttaagaaaaacccatttttttccttaaggacttactagccaaaatttcttaaacttcgaggactctactagccatggccgagccattcttgtcagaatatcaacaccagcctcaaactagcaactgtacaggtgctgctgctgtccaggaagagctgaaccctgagcgccccccaggcgcggaggagcgggtgcccgaggaggacagtaggtggcaatcgagagcgttcccccagttgggtggccgtccggggccggagggggaagggagcctggaatcccaaccacctcccttgcagacccaggcctgtccagaatctagctgcctgagagagggcgagaagggccagaatggggacgactcgtccgctggcggcgacttcccgccgccggcagaagtggaaccgacgcccgaggccgagctgctcgcccagccttgtcatgactccgaggccagtaagttgggggctcctgccgcagggggcgaagaggagtggggacagcagcagagacagctggggaagaaaaaacataggagacgcccgtccaagaagaagcggcattggaaaccgtactacaagctgacctgggaagagaagaaaaagttcgacgagaaacagagccttcgagcttcaaggatccgagccgagatgttcgccaagggccagccggtcgcgccctataacaccacgcagttcctcatggatgatcacgaccaggaggagccggatctcaaaaccggcctgtactccaagcgggccgccgccaaatccgacgacaccagcgatgacgacttcatggaagaagggggtgaggaggatgggggcagcgatgggatgggaggggacggcagcgagtttctgcagcgggacttctcggagacgtacgagcggtaccacacggagagcctgcagaacatgagcaagcaggagctcatcaaggagtacctggaactggagaagtggtcgagcggccgcgaatttagtagtagtagtagtagtagtagc

SEQ ID NO: 257487 - DNA, 667 bp, Homo sapiens
aattataatatgataccgaggcccaaagtcctaaacgtggaaactgaaaggagagcccccttaactcatcttcatttgaacctcaacaacaaaaaattaaaaaggaaaaacagttgctcccttcttaagtactgccttttaaaatgttcttgttgcacactgcttcaacttttctctgcccaccaggcttccatttgtgatctgtctgaaataactatttttgcataacacattctttcttcgctgctgatcttccctggagctgctgctgcttcccgtggggaatacagatgaggctggtgatgcaccaggagcaggccaggggactctgagatgatgactctttgtcattgtgaataattctctctgaattctcgggtttctggtgggtttttcttctttcttttcatcttcttggtataaatctagttttaattatttcacagaatatttgtctttctgaaagcttctcgtgcaaaacaaagacaaaacattaacatagtaaagttattttatcagtagcctttctctgtgttaattaggatgtatatcaatatgacatcattattttcattatttaaatgtactaaagtttaaatacttgtagcttttagacatgaattaaaaatagaactattttgaaactggtcatgaagactgagaggtt

SEQ ID NO: 257488 - DNA, 449 bp, Homo sapiens
gttctttctgctgatcctgccctcccgtgggaacttactgccttgtgctacaagctgcccttcctgccagctggtctgcagggctctttgctgcttgtctgacctccctccaagagctgccacagctcccagctcaggcagctgagcctctattccaagagggtggacactccaggtcctaccgctctgggatgagctggccactctggcatgcttctatccagggactggatagctgtgtggccacagctgtgcttgggtaaatggacaccaattaaaggattactggcaatgagaagtcagtcctgattctcatttgattggaaagggaatttgggactcaatgatagagctgccacagccacgtgtcttccccaatccacctgctctgattccatccaggactgccacaaatctaggcatgtcccaaaataaagcaatcattagat

SEQ ID NO: 257489 - DNA, 476 bp, Homo sapiens
aaatgttacttggtggtgtgccaatatcttttgcttgtttaagtcctagttaaagagattgccctaaaagatgtcaaagaattgtcaagattcagttattgcaaatccactccttataggatcattaaaagtggtttggaaaagcatttgctgatccattttgaactgtagctgttattcttgaggatttcatctgtcttggggtggataatgaacaaatgtcaatggagattagaaactagcaaacggaatattagaagctttcaaagattacaaatgggacattgagcagtaaacctagaaatagaacaaagaaagaaaagaaatgccatctgaaaagacacatatacactcagaattcacagtaaagggaattatgagattttgtaggacacttcatatttcatttttcaaaaatgtttaatggctcaaaaatgaattttcacccaggaataatgttctgatatattcatagt

SEQ ID NO: 257490 - DNA, 423 bp, Homo sapiens
agagataatactaatctattaagataataatttggcagaaaggtttaatcaagagagtggagcataaactgtatcgtggatgttatgtgggatctgaatggatggttgggggtcaaagcaaggcacacgagatgaaacaaacagcatacaactgtagggttagaaatgagtaggaatagtcatttcaacctatgaggtagaaccctgataactccgagtgtggatctcattccagcagtatcagcaacacctgggagcttgttagaactgcacatagggtgagaggaaggagaggatcagaaaaaatagtgaataggtactaggcttaatgcttgggtgatgaaataatctgtacaacaaaccctcatgacacaagtttacttatgtaacaaatctgcacatgtacctgtgagcttaaaagtt

SEQ ID NO: 257491 - DNA, 774 bp, Homo sapiens
agccagggtctcacttgactagagtgcagtggtgcaatctcagctcactgcggctcccacctcctgggctcaagcaatcctcctgcctcagcctcccaagtaacctggactccacacgtgtcccatcatgcctggctaattttttttatttttttgtagagatggaggtctctacagtctggtcttaaattcctgggctcaagcaatcctcccacctcccaaagtgctaggattacaggcatgtgccacagtgcctagtttgttattttttaacgtactatgttattgccacttcattattcaatttcacaaacctaatatcaatggaatgttactccttttgaatgataatcttgggcacctggaccactcccttttatttctggctgccaaatacccctgctggttttccagcttgcccctgttttgtcccattatccttgtttagtgaggttaataaataatgtttgtgaaaatccagtcagaggagcctttcctcagatgctgtttcccttacttttagtcccccttccctggtctctttgctttttacccacctgctctgccctgtcctcaagaggcagaaatactgcctcaaaacctggtctctgagaccctggctaatgtgaactggattctcctttcaccttcaatgtcagtgtcataacaggctccatttgcctgtcagtatagtcttttatctgttttagcacttttcacagccaagtcactcctcctgtctgcttcccagcctctcagaaaaaaaaaaaaaaa

SEQ ID NO: 257492 - DNA, 485 bp, Homo sapiens
aatgaaagggagaggggaaggtatatgtgtggtgtttggggtgggggttagttttagacaggcaggcaaggctgcctccctgggccgggggtgagacgtgagttggggagcacagcaggtgcttttgcagaagagagctccagggagagggaacagcaagcgcagagcctcaagcaggagcttctgcagcagcagagggagggaggtgtggcagggtagtggctgaccctcagtgtccttgtggcccttggaaggtctgtggagggggtatgacaagagtggtattcctttcattttaagggcccctctggttatggtgtcaagacacagagagatagagctgcagggcaagggcaggagtgaggggaccagttaggaggctgccaccatccgccagggacgcactgatgtggctcagagcagggtggcaggggtggcatctgctgagactcctgagatccaactgaaagagacaacaagtttta

SEQ ID NO: 257493 - DNA, 411 bp, Homo sapiens
cgagaagactgacgctcccacgcaaggatcgtttctgcccggctgtgccacctggggctccaggcctggctttgctctctggcttccccaccattggctacctggcctcgggcaggcccggcccagctctgcgactcagtgcctgggagaatgaagatgatcctttgagggtcctaagtatggggagggctgcgcaaagccatgactcagcacgtgggagatgagcgctctgcagatgcacacctgccctggggggagccgccagctggggcctgtggcaggaggcaggaagaaggaaccttgcacaggaagggcccaaccagggtctgcaggggccaggtctgctgtctcctgaggacagggcagagactgcgtgtggctgctggcgtggagtccgttccccaggaggtg

SEQ ID NO: 257494 - DNA, 460 bp, Homo sapiens
gaagtccccttcacaagcttcgcagctctgtgcagtagcagccctttaatagctgtaacttcaccactgggaaaggaaaggaaaggaaagcctctctgctttcatgctgattgctatggaagcttgcccaagatacttccccttgcatgtgcagggctgtgtgcaaaacagagaaattgctttccacttaaaagcgttggcctgttattactctatgaacctttgaggaaatcagattcagaggtttcctaaatatagaaagttcctttctctcttgttattaaagccacaaacaatctaggggtaattttttatattattttgaggttgcattaaaattaagaggaaggacagtactgcagagatgcctggttgtttgttgggtttcttaaaaggactaaatatgaataaattacgaattcttgcacgttaggaaagggaccttttgttgttgttgttg

SEQ ID NO: 257495 - DNA, 527 bp, Homo sapiens
gactagctgaagatttccagtgcagcagcctgtggacagagaccacaggcactgaagcttagagcggccaaagtcatcaacatttttctttaagaaaatgatctgcatcctataaagatacctatgatggtcgtaaagtttactctctaagtgcatcagcagagtaatgaaggctgggtttcataacaataaaaataagttatgtcttgcacctgatttttttcccccaaggattgttaaattgacaaaagttttaagatctatgacttctttatgcgcctttgtttttactaaggcagatgtccttgatcaaaaattaattagttataatataaatcagtggttctgcataattgcaaataaaatgcagtatggaaggctatctttttctttgactaacattcagataagctttcaaatttggcataacgtttcctggccaggcatttttgaggacagatgctatttggcagccatcaacatgctacatcaagcgtctttcaagtcctttgtgagctctttggtgc

SEQ ID NO: 257496 - DNA, 270 bp, Homo sapiens
gaagacagaaataaaactaaaagctaattctctctggacttggaaaggaaggagtatcagagaagcagagaagagaaaaaagcttagaaagcaggaaagaagctgaaagcatttggaagacatcgtgaactctttgaaggcagaaactaaatgaaattcaccttcatatttacagggaccagcacagcctctagaacagaatgggtgctcaaatcaatatttctttaaaagaataaatgaatgaataaataaatgaatgcaagtggaaga

SEQ ID NO: 257497 - DNA, 395 bp, Homo sapiens
atgcaaacaccagaagctgggaagaataggggagagaaagaggttggttaataggtacaaacatacagttataaaaaaaaataggtactagtgttcgatagcacagcagggtgactgtagttaacaacaatttatcctattttcaaaacagctagaagatttgaaatgttcccaaagtaagacattataaatatttgaggtgatagatatcctaaataccctgctttggttattatacatcgtacgcatgtatcaaaatatcacatgtaccccataaatatgtataattattatgagcaataaaaaagctttaaaacagaaaatgcaatctaattaattttttgttctcagacaagaaataattgagtccaaaatatttttctgaattgctatta

SEQ ID NO: 257498 - DNA, 416 bp, Homo sapiens
cagcactgttatggtgttccagttgccattctaacccaaattaggtctttacctcagtcagtaagctagctggccatgtcaggattggtgaagttcaaaaattagtcttcataatgttaaaagccacaattcatcatgaacataagacagctattgatacctacctatgtatcaagttacacatctgcaattttttttttttgatggagtcttgctctgttgcccaggctggagtgcaatggtgcaatctctgctccctgcaaactctgcctcccagattcaagcaattctcctgcctccacctcccaagtagctggaactacaggcgcatgtcaccacgcctggctaattttttgtatttttagtggagacggggtttcaccgtgttagccacgatggtctcagtctcctgacct

SEQ ID NO: 257499 - DNA, 483 bp, Homo sapiens
atgattgaagataaggttttgaaaagatctaccagacacatactaaatcaacttctgtagttatattaatgatttcaacaaaatataagtaagttaaagggaaaaaattaatagggttaaccagagatattacttaataataaaaggaaaacactataaaaatatagaaaaattatgaagctatgtaaatctatcaacataacctcaaatatacaaaacaaaaatttataaaattataagaataaatctacagaatggaaaatttcaatatacttgtcccacaaatgaatattaaatacagacaaaaatgagtgataatatagaatatttcaacttcaaattgtacaagagtaattgaatatacagataaatgtatattctgtataaacatatataatctgtatgaatctataatacatctatatctatttctacatgaatacatggataattgttaaccaaaatacgagcacctatgccact

SEQ ID NO: 257500 - DNA, 200 bp, Homo sapiens
gatccggctggaggcagaccggttgacatgaattgctgcccagtcttagtgaccccctgaaatgccaacatgatctcccctatcaagccaagcccctgctagaaaaggacatctctaaaatgtgttagcacactgcagtttcattttaaatgtgtctcataatcaccagtgattactactaaggagcttctctagagatc

SEQ ID NO: 257501 - DNA, 413 bp, Homo sapiens
gaggaggaaaatcagacctagagatgtctggttgtgtcctttggagttagagggccctggatttgaattctgaccctgcctttgtattttatctgcgtctccttgggttgagttggcttctcctttgagtctccggttcttctgtaaaaatgagaagaatctattagagtaggcttgattagaaacctgtgtattagctaacaagaagagaaatgccattccagaagcctttttaggctggagtctgtgctgttcacagaaggtctgatcagaagttggctgagacttggaggctccagttggatttctcaacttctgaagtcccgtctctgagcactgtgaggcctccccaccctcacccacacacccacccccgctctgtgcagtcacagagcctctcctgacagcctcca

SEQ ID NO: 257502 - DNA, 648 bp, Homo sapiens
gagtgcggaggcaccttgtacatgttacctgacatgcacacttttggattagtacaacaaagaaagaaagatgtataagaattcagtccatgaagggataattcagaaattgccatccacatagaatactttggcatcttaataaaaacaaaagttctgatttcaaatttttagctcaaatagatttttaacctctaaattataactttcaacaggctccacaggtaaatctgtagccttgaatttcatttaaataaaaagccacagaaaattagtgacctctacccaaaataagacaattctctcatgtatgaatttaggtttcttgaattcactaagtcagcacacttaagcagactaccaatccaacgtaggattttctttcttaaatagtttttctacttctaattccacaatgatataaattctttcattaatctgatttgcaataattttaaataattaatgctaactagcagtaaaaattcaagtatttcttcacggaagaaagaatatgggaaagcacaaacagcaattttccccagcaaactgtcccatcaatactcctgaatttttctgacacttctttagaaataaagctccccagccgggcgtggtggctcacacctgtgttcccagcactgtggg

SEQ ID NO: 257503 - DNA, 435 bp, Homo sapiens
aggttcaggcgattctcccacctcagcctcccaagtagctgggattacagttctggaggtcgggaagtccaagagcatgctgctggcatttgtcaaaggccttcctgctgtgtcatcccgtggtggaaggcagaagggccagagagggtgatggcaagctcaattcacatccatcacaagcccactctggcaacagtgaatccactccctcaataataacattaatcctttcatgaaggcaggtccctcatggcctaatcacctctaaatggtcccacctctcaatactgttttatggaattgtgtccaacacttgaattttgggggacacattcaaactatagcgatcatgaaaaatcttttttattatctcaaatgtcaccaaaatctctaggcttttcctttatagtcaataaaagtgtaattaaatacatg

SEQ ID NO: 257504 - DNA, 481 bp, Homo sapiens
gcacttctttttaaaagaatagggatagtgtgttacctctaagatccaagtgcacccttctagatgcattctgtgataatcatttctctgaagaacgtgtgctgtgaagttttctcagtagagcactgggaggaagaggctgtcctaagtgtccagcatgggagatggcaatgtgggtgtgaggaccatcgacactgtggcccagcgacagcctagaacgtggtctttctgtgaccttgcagactcagcctatcctaacgttttgggagctcagctgacatggccactaaagcctccacatggctcttgtgttctaaaggcctcctggcccagccagggcccacaccctgctacccaccggatggccagtaacccactggatggcctgctctctgccagcactccagaaggtaaacgacggcttgcccagagactttggatcagctccagtcttgtcaaaccagcaaactcctctgtgatt

SEQ ID NO: 257505 - DNA, 412 bp, Homo sapiens
actgttgggaaggcatgatgtgttttgaaatgtgagaaggacatgagatttgggaggggccaagggcagactgataacgtttggctctgtgtccccccccccatccaattctcatctcgagttgtgatccttagtgttggaggagagacctgtgggaggtgactggatcatggggtggatttcccctatgttcatctcatgatagtgaataagttctcatgaaatctggttgttaaaaatgcatgtggcacttcccccctgctacctctctctctcctcctccaccatgagacgatgtgccttgattcccctttgccttctgcgatgattgtaagtttcccaaggcctccaagtcttgcttctggttaagcttgcagaactgtgagtcaattaaaccttttttcttcataaa

SEQ ID NO: 257506 - DNA, 681 bp, Homo sapiens
tgtaaaattgtctcctaatcgagttatctgatcaggctatagagaaggaaatctttctgttccttaactacattgtagggaatatcatgtttatttaatcaattctttgtgatggatgtttgtttccagttttcactattataaataatatgtggcaaatagcattgttcatgcatcttttgatatttgtgagattatttctttgcacaagagccaaaatgatagaattgtgcagttaaaatgtgtacaaatgaacatgtaacagatgctaacagggagtcctcaaagaggcttgtatcagtttatgctgtttcctcacatccactccaacaccagatagcaagcatttttggtaaccgatttatagaaatgcttaaggttaaacatcaaatggtgcaccataaatttcttttaaaaaaagaaaaacacaatgcttaaagaattactattcatgttttaatggaaagaaagtggtccaaacatatattcattcaacagacacttattgaaaacctgctgtgtgacaggcatcattgtagatgctggcataataacaaggaataaaagagataaaaatcctcactttggcatagtcaattgttaagaaacaatgggatacttaggccgggcgcagtggctcacgcctataatcccagcactttgggaggcttaggcgggcag

SEQ ID NO: 257507 - DNA, 651 bp, Homo sapiens
ttctttgatgtagaaatttcatttaactactggataagagggaaatcctaataaatagcatttgattggggaactcttcctcttttctactgtcttcctttctgtttctcctgtccctctgtatcctgctggttttcaaatgatattgcatatttttaaattccttgtgtaattccaagagtttctcagacatttggcatcattgcaatgtgatcttagttatataaaagctgcctttcagaggacagctatctagtttcagatgggttgctgaaggtgtcctcaaggtatcctctcacctggttttgctctgctggtttggttccagtccattgctgggcactgtactgggtgctgcaggggtacagagaggaggtagatgcagtcctgccctcaagaggcttccagtttagagagaaggcaagtgccttcattcacagagtgtttgcactggaagaaattgtagagataatctggtccaatcctttcatattaaaaggtgaaagagaaacccagagttagtttattacaccagatcagagaacttggcgacagagcagacattagatctcacctctccgggccctctgtctagtctgctgtatcacaggtgattatttccaaacaaaaatgttgttttcttaataagta

SEQ ID NO: 257508 - DNA, 484 bp, Homo sapiens
ctattgtctgacattctcatataatgaatcctgggaaactgaagtattaattttaaaaattttctgagaaaatatgaaaaagaaaaaaaacagtaaatatatgatgggatccttttcccagtaagtagaaaatctttggcgttattattgcctcattataaaatgtatctattttgtgattagcaaatcccatgaaaatagtgattctacttgaaaattcttgataaatactgacctattcttataatccacatattttttggatccattatcctcatgctaaataatttaaaatgtaaatgaatgattttattctttgtttatagatttttaaacttcatcttcttggggctaaatcctacctatcttttattagactctgagtagacatagaaaaatcatgtctcactgggtgcggtggctcacgccggcaattccagcactttgggaggctgaggtgggcggatcacctgaggttgggagt

SEQ ID NO: 257509 - DNA, 432 bp, Homo sapiens
tcaattttagagttatctttaaggatttcatgtttctgatactgcagtttggaggccaaaccattctcttttctatgcaatcccatatggagtccataaagtagaccagcaaggagaattatttgtggtaggctggtcttaatggacaaaatgcatttattcatgtgaacattcctgtctcaccttttcatctgctctgcaatttttgtgtgcttttgccagctgaggcattgctgcttacattttttcacattcacgtttgtgttatatcctgcggcagctggcctggtcctaactacttcaaattgtcagtggctgatcatagccttcgaatgccttgttagatagtggtattcctaaatcctattacctgaaggagaactgtttatgaaaggaacagagtacagaaataaatggaatttgatatgattc

SEQ ID NO: 257510 - DNA, 697 bp, Homo sapiens
gtactttctggtgcatctttttggtattttattgttcatccttttattttaaaataaaaacattgtcatttgggtgttttgcttttaagcagcagcatgtagctggtgttgcatttgctgtcaaaccaagtggtgttaacttttaatagtgactttacttaataacagataaatttcatgagacttgctcaggggttgactgaggcagatgagtaggtgttttactacagcaataggaaagaaggaaggtcagggcaaaggaagtaaagcatctgtattagtcaccttgggccgccatgacaaaatactgtggactagctggcttaaacaacagaaattcatttagttatagttctggaagccagaagttcaagatcaagttgtcagcaggtttggttgctctgagtcctcactcctgaacttacagatggccaccttccccctgtgtcttcacatggccctttctcaatgctcacacatctttgtcgtctcttcctcttcttaaaaggacaccagccccattggattagggcccacccttacgaccttatttaaccttaattacctctttaaaggccctgtctcctacagtcacattagggattacagcttcaacataagaatttgggggaaacacaactcagtccataacagcatccttgtgagagcaccatagtgatttcatagactctccgcc

SEQ ID NO: 257511 - DNA, 342 bp, Homo sapiens
aatttgtacacaattcttcacatatgtaccaaaaatctaaaaagccatgtattgcaaattctttgtgaagttactctagtgactttccagcttaatatccggaggcaaaatttccttaagaggctatcacgtaccaatatcttcacatgttgataagctgttaaatacgtcctaccaattcataactgaatagcatgtacactacatactcaaattttcattcacagcacattcacaaagttattggaaaacaggactatcacaactaaatatgttacagagtgcacacaattcagacagggaaatccacgaatatggagtggttttctttaggaaacaatt

SEQ ID NO: 257512 - DNA, 478 bp, Homo sapiens
tgaatgaagtgtagccatgaacttaatcacgaaacacccccttattggtgagaggcagtgtggcatagtgcctgggcactgacacttgctttgaacgtagcagccgtgagatcctgggcaggtcacttaagctcttggtgcctctgatcttctgtgaatgaggatgatgggtttactgagaggatgaatgagtcggtgggcgagaggtgctcaggctgctgcctggcacgcagcagcaggtgaagccctggtgatcgtgtgtgccagtgtctgctctttttttttttttttttttttttgttccctggggaatagaagccactgtgactggattggattacactgtggctgtgagagttttcatctctgaccatcagagcagacctgcaaggcaggcagccatagccttgacttcctcagagggcaacgcaggtaggcagagctagggatccaaatccccatcatgcagagagccagg

SEQ ID NO: 257513 - DNA, 478 bp, Homo sapiens
tacatcttgaatctccggtatcaccttccaaagactgtcctggacaagagctggctgaggcctcctggcatcttggaaaatgcatcagatctgctcaggaaaatgtgcgtgaggaacctggtgcagaagtactgccgcgggatcacagctgagcggaaagcaatgatgcagcaaaaggtagttacaagtgaaatcttcaggggaaggaaagacggctacacagaaagtttaaatcaaccctttgtcaacagtcggatagatgaaggagacattaatccgaaagtgcttcagctaattagccatgagaaaatccagaagccactgtgactggattggattacactgtggctgtgagagttttcatctctgaccatcagagcagacctgcaaggcaggcagccatagccttgacttcctcagagggcaacgcaggtaggcagagctagggatccaaatccccatcatgcagagagccagg

SEQ ID NO: 257514 - DNA, 301 bp, Homo sapiens
ctttgattaaaaaataaactggtttgggtttttatatctttaaaatcctttcatttttatcatgtgacatcagtttcatatgggagtgaaatccatcgtatttacagttctgcctacacttatgaggagggaattatatagaacttgtacccccagggaatcttgtgggctatcttgggttttggtcaagcacagaaggcaggagtggatgtagagagatgagttcggaggctgcggtagtgagaatgatatttgctttgcagaatggtgacatattgatagggagaaatgtatggattta

SEQ ID NO: 257515 - DNA, 336 bp, Homo sapiens
tcaccagtgcatgctttggtttagaggctaccaaactgtcgtcttcatccagagaatgatttttataaaaaagatgttggaaaattacagccactgaatagaacatatggaagtccatgagagaaagagtggagtattttaggcaggatggatgaggtctgctttgactccaaaaataatctcaattcaaactgatataagaaaacatttaaagttgatggtgtcccacaaaccttagattcttctgggaaattaaatttttctaggtagctcattaatctgagtctagataacattggcatatgaaaagtcttgagactgttgaaagggttcaaa

SEQ ID NO: 257516 - DNA, 464 bp, Homo sapiens
tagttccattaacaaatgatgtgatgcagtctatgttgcaagttggactaccatttatccaagacgacgaattgtgctctggaatgcagaatacagcactgggagttggcctcaggacttcaagatttgctgcaggcattcagaagagttatttaaattctctggacttcagttttctcacctacaaatacaaacaaaggtaaaataatctctaagtttccttcaagctctaatattcggcaattttataagtagacctgtgtgtgtgttatgggaattacaaaaataatcccagtgctcttctaagtaaataatgtagctttctttataaagtgttatcaagaagttacacaaataaactgttgacccttaaataatttttttcatttgaaaattgatatatttgtagtattgccatgtgacaacatataataaaaattgtttccagtttgtttttcctgtgt

SEQ ID NO: 257517 - DNA, 286 bp, Homo sapiens
taaaactgtctgtaaccatgagctaagtatacaaattcagagttagcatttaacaacttctataacaatttgacattgtaacatctcagcacatggttatttttctagtaattcacttttattgtatttgacaaaaatgttattctgcagtggattggagataaaaattctggttctttatcgcagctagtttgagagggagaaaagggctaaaaatgcattgggaaggtactccaagtataaagatttcttgatgtttcccatagatattgaagtatgacagctg

SEQ ID NO: 257518 - DNA, 397 bp, Homo sapiens
ctgctgacagtctcatcagatgttgtgagtgatccaaatgctttatgatagctctccttggtgctcctgtttcctttgaatggaattcctacagaagaaaaagggaagcaaatatccctctcttttcccaggctctaacactcttcttgggtcctcagtgtagcaccgtgggagaagttcttgccctttcagctcagaagactcattttgaagccaaaacatgatgatagatgcaccactggcatttgctgatcaagaaaactcatgtctgcctggtatggtggcttgtatctgcagttccagctattttgggaggctgaggcgaggggattgtttgagttcagagtttgagatcagcctgagcaacacagtgaaaccccatctctttaaaaaaaaa

SEQ ID NO: 257519 - DNA, 417 bp, Homo sapiens
gatgtggagctgcttcttaggggtgcgcagagaaagtggtctcttgagatggaatctactcctggtgaaaaggctatgaacactgttgaaatattggcaaagaatttagaatattacataaacttagctgacagtgcaacagcagggtttgaaaggattgattccaatttccaaagaagttctactctgggtataatgctatcagtgtcacatgctgcagggaagtcttttgtaacaaggggagtggtggcaaatttcttgttgtcttactttaagaaattgccccagccaggccaggcgtagtggctcatgcctgtaatcccagaacgtttggaggctgaggcgggtggatcataaggtcagagttcacaaccagcctggccaacatagtgaaaccctgtctctactagaaaaaaa

SEQ ID NO: 257520 - DNA, 569 bp, Homo sapiens
cctagatttggctcagtctggagagaactggttttgagaatcagtgaaggctgcaaaagtgtaatttggaaattatttcagttcggaggtgagccctgtcttatctttggacagtagttagtaactggcgcaccaggagttgtggagtggctgggcctgggctttcatcttggcccagcctcttgttagcagcccttcaagtgactggagctttacggagaacatgctgcaacctggctttgctcagcctgccgccagtgtgggcaaacctcttcgctggcagggcccggggcacggcgctaggtctcaccacccctctccccagccaacggctttctcccagcctcccaagacagcctctcacccggccaggcaggcaccccggcgaatctgatccctggcctagctcagctcacaacacgggtgtctccgagccccacagcagccatttccccgtgtttaccctcctcggtcctctgaccacccccttcaccctcagctgatgaccacctcccgcttcgcagtggaactaatagcgtctccagctctccagccccgatcctcccttc

SEQ ID NO: 257521 - DNA, 703 bp, Homo sapiens
gaaagagacgattgaaaatggcaaagtgatgtgttcttgtatcaagatattttttctactttaagaaaccgtactcctcattattgatatggttttattcaacatgattgtcagtagaaagagttttttactggaaaatatataatggcatatacatgactaatggactgatagttggtagaaagtgtacttcaatagttttaaatcccattttgaatttagttctggaaaattaatacagacagtccctgactaattaaggggggaagaaatctttaaaatggcattaagaaaaaatacatttttactatttgtaggaattttctgttattttcaaaatgtaacttgcaaaattagactggaatattcacaagggagggcacattctcaaaaattatatatggagatgcttaatggacagaataacagcaaagaaagaataataaatggagatttcttagaactctaggatgactaatttaggccatttgaacgtgggcttatccaaggaatacaccactatttctgattatgactttgatagctgagaattattttccatttcaagtataaaagtgaatgctttaataaaataaaagaaaacaaagattaacatggttctagaatatgaaaaaaataatcgtttttgccttttttcagttattaaaattgattgctttgtggttgctttccacaaaaagcc

SEQ ID NO: 257522 - DNA, 556 bp, Homo sapiens
cagttgtttttgtcctgccactatgaatgaattatttgtgtcctctggcttctgttcatgcaattgagaagtcagtgtccatctgattgtccttcctttgtgtgtaatctgtcttttgtctagttgatcttttttaataaaggtaaaatttatatagtgtaatgtacaaatagtaagtgtgcagttcattgagttttgatgaacatacactaatccaccccatcaagatacaagaacattctattagcatagaaggttacatctatttccaggcatttcctctcccattccacaataggaaaccagatttctatcaacatagattagttttccttgctcttgaacttgatacaaatggaatcatgcaaatggactcttttgtgtgtggctttcttcactgagcataatgtcaatgaaattcatccatgttgttgtgtttatgagtacttcgtagacttttatccctgagtactactattcctttgtatgaagagaccatagacatttgagttctttgagactacaataaataaagctgctataaatattcatgtat

SEQ ID NO: 257523 - DNA, 432 bp, Homo sapiens
tcgaactcctgacctcaagtgatccacccgccttgggctcccaaagtgttgggattacaggcgtgagccacagcgcccggcctacgtcatcatttttaatgactgtatagtatttcttcacgtgttacaccgtaattgattcaaacaatcaaaattatatgtagatgaagtaatgtatgtatgagaatttagggcttggactaaggtgacacaagtgaacattgcagggtgtgacctaaagagagagcacctcttaaattccataccatgggctccttgctagctctaccctggtcctatccctgcaaggatggttatctagtagtatttataatcatttaaaaaattagtgtcatttgacttgttttcagttttgaccctattgtaaaccaaattgcagttaaaagccttgtgcaattattttattattat

SEQ ID NO: 257524 - DNA, 246 bp, Homo sapiens
gtggccggatcagtgtctatttgccgttgcagaggcaggatccatgaactcatctctggattggatgaagatggttgcagttgactcattttttggtctatattggctgggtagtgacaagactcacatttagttattcttttctgcagtggagctgtctgttagacacttgggatcctcatgtgtttcagccctgagcccctgttgaagctttaccaataaataatcctttagccaggacgatgg

SEQ ID NO: 257525 - DNA, 380 bp, Homo sapiens
gcagctgctgcttttacatcaattgtagcaccagcctcattccatttctcccaccttccaggacaattaagacattcaaccacagaattactcccatttccagacagcactccatctgagcatggcctgtgtatcagtcagggttctctaaacggacagaactaataggatagatgtatatatgaaggtgagtttatcaggagaattggctcacatgatcacaaggggaagtctcacaataggccgactgcaagctgaggagccaagaagccagtctgagtcccaaacttcaaaggtagggaggctcacagtgcagccttcagtctgcggctagaggcctgggagcccctggcaaaccaatggtgtaagtccaagagtcc

SEQ ID NO: 257526 - DNA, 329 bp, Homo sapiens
gcaagttggcatagctccctaagccttaagggtgagctgtacatcatgacttctttctaagggtgcagagtacagtttggaggagaggggagtaactttacagtggagaaacctgacaaacatttcttcagccaggtgatcaagtccaacatgaaaataaggcatgttgatataggtacctttgattgatgtgataggatggaaatggcactttatctctgtggtcttcaatcacgagaaaaacatcaaataaattccactggaggagcatcctacagtataccttactgctattcctcaaaactgtcaagatcatcaaaggtaaggta

SEQ ID NO: 257527 - DNA, 559 bp, Homo sapiens
gatggcatcatggttgtttggtacctccaagatgccaatcatagatctttattcctttgcttcaccattctcagtgttggcctattgtccccttggttgtcattgtatgttcacaagatagcacaattcccgcatcacatccttacatcattttcaatgccaggaagcagaaatataaggggcaggtgcaaaaaaaaaaaagtgatttggcactgactagttataagaagagcactaactcctcagggtagtataacttggcaaatgttaaaacaatgaacagtaataatattgtacactttgtgtcaagcattgtgctttacaattattatctttttaatcttcacaacagtgctatgagagtaatactatgaaaatcttcttttttttttttgagacggagtcttgctctcttgccaggctggagtgcagaagcatgatctcagttcactgcaacctccacctcccggatccaagcaattcacctgcctcagctgaaaatcctcattttatagctattaaaagatgatgtagcaatattaaaaatgatttttacaaa

SEQ ID NO: 257528 - DNA, 260 bp, Homo sapiens
tagttcttccctttttctcacctcccatgccatatacacacatcatgcccctccccacaaacacacgaaaccagccttatctcaccttccaccattcccatccccacctacagctgatcatcaaaggtacacggaggaagtagtagacacggagctcaggccaatcattatcttgagaaatctaaacccagggctgtcaggctatgccccataggccatacccagcctgccaaatggtttttacatgttttaattgagga

SEQ ID NO: 257529 - DNA, 373 bp, Homo sapiens
tcttatctctatgcttaccacatttatctgttaccgcacagtatacaagcctcaaagtcaggaattgaacaaatctctctgactccaaagttttactctttcttctgcttcctacttgagtttcttgagagggtaaaagacactgaaatatgcatgcgataaggaggaaatggtcaggatactaagattataaatgtgagcataaatctgtgaaatgctgcagtgttcttggttcaacaactgtattcccattgtctaataaatgcattctatattattaatgaatattctgctagaatgtatatttcttcatttaagagatctaaaagttcatgacaattgcatcaagatgattgaagcagtctggagtaga

SEQ ID NO: 257530 - DNA, 403 bp, Homo sapiens
caaacctcttctctttttcaacagaccccaaacttctcctagataacagacgtgaaaacactttgagaaagtaaaatacaatacaaattagacttattattcttcagtaatcactcatcaattgtcttcttcagattggaaagctaagacaggaaggatggtcattttaatcttttccagtactgaatataaattcttattttcaggtgtgaggtatgatacaaatttatgagcaccccatgtttatataagtctcaaaattatgtaaataatgtttggcagaatttcttagtatggtttttggaaagcctaggtttatgtgaatttaatatataacataaagctattccagttgcacttttattataaaaggtaacatcattttttctcaaattaaatattt

SEQ ID NO: 257531 - DNA, 714 bp, Homo sapiens
gatcgcctgcttcagcaggacaaagccagcctcactagaaccctacagcacaggattgcactccacgtagctgatggtttgagatacctccactcagccatgattatataccgagacctgaaaccccacaatgtgctgcttttcacactgtatcccaatgctgccatcattgcaaagattgctgactacggcattgctcagtactgctgtagaatggggataaaaacatcagagggcacaccagggtttcgtgcacctgaagttgccagaggaaatgtcatttataaccaacaggctgatgtttattcatttggtttactactctatgacattttgacaactggaggtagaatagtagagggtttgaagtttccaaatgagtttgatgaattagaaatacaaggaaaattacctgatccagttaaagaatatggttgtgccccatggcctatggttgaaaaattaattaaacagtgtttgaaagaaaatcctcaagaaaggcctacttctgcccaggtctttgacattttgaattcagctgaattagtctgtctgacgagacgcattttattacctaaaaacgtaattgttgaatgcatggttgctacacatcacaacagcaggaatgcaagcatttggctgggctgtgggcacaccgacagaggacagctctcatttcttgacttaaatactgaaggatacacttctgaggta

SEQ ID NO: 257532 - DNA, 326 bp, Homo sapiens
gtacaagaattcagggatgcaaggatgccttcctgcaagacagagatcattctatctaaaccaattgttttcaggttttttactaggagcacatgcatgaatgtgtatatatgtgtatagctatgcaaaaacatgaacagatgtatgcatgtgtataatctaaaacacataaaggtacatatactgacatactgaaacacatattaatataaccaaaataaaaatttcatgagacagtattaatgttaaccacatgctatatacttatatttttctttcatttgcaaaagaatgctgttatgactgtctaaacctctggcttgaga

SEQ ID NO: 257533 - DNA, 170 bp, Homo sapiens
tccagggcacaggccagaagccacgaagttatactgcctccatccacagaccgtatcacatcaaacagatcgcctccaaagaagcctccgctggctccctcatacctaccactgccctctgcatggcccctaaagccatctggaggcaaccagatgcagtcctagtctgt

SEQ ID NO: 257534 - DNA, 297 bp, Homo sapiens
gcataggatgatgcaagattgtgtccttaatagaatttaaattatgcttagtgttttgtataagaaggtcatttattgatttcttcatgttagagtctaaaccttgtccactagcatacatattttatctaacggtctttttccagaaaaaattcattaagagttattaaattggcagggtgtggtggctcacccctttagtcccagtactttgggaggccgaggcgggtgaatcacttgagcccaggagtttgagactagcctgggcaacatggcaaaaccctgtctctagaaaaa

SEQ ID NO: 257535 - DNA, 620 bp, Homo sapiens
ttttctcatgtttgctatggcttcaaacttactggcgcaaagttatttgtatgattgccttatgtttgtaatcttggctgtatccaaagttatgtccccctttttacatgtaatattgtttatttgtgccttctctctgttatagctggtcaatcttggcagaaggtcattattagtcttttctaagcaccagctttttgttgtcattctttgtattggtatttcattaattgctgctcttaccgtatttcccacttatactccctttgtttttgtttgtttttgtttttttctcataaccaatgggaaacaaaccaatccctctgggtttatcctgtagttctttttctttttcctttctttgttttgttttgttttgttttgtttctgagatggagtcttgctctgtcacccaggctggagtgcagtggtgcaatctcagctcactgcaacctgtgcctcacaggttcaagccattcttctgcctcagcctcctgagtagctgggattacaggcgcccaccaccacgcctggctaatttttatattttagtagagacggggtttcacctgggtgacatagtgagactccctttcaataaaaaattaaaagtcaagaat

SEQ ID NO: 257536 - DNA, 866 bp, Homo sapiens
ggcgatgccgaggtggagggaggatgaaaggccgagtcggagacgcaggggtacaaagactcggagatgaaggaagcagagggggagaggcacggcttccgaaagagcgggaggcctggagaggctttcaagagctggatcaccaagagggagcaacagggtgctacagagagactggagtgtgagggcaaaaggagtcctggggaaaacaggagggaaaggttgaagagggcaggctggttggggtctgtgggaggcaggcgccctccctgtccgtcttccctggcccctccagcctccagctcaccctcctctgttgcctgcccctctggtgggtctaggggcagccagaaggagccctctccgacccattcacaacctcctcttctgcccgagtcccttcccaccccacacccagcccttcctccacaacttccctgagccgcctcctgccttccagaaccttgcactcaattccacctgaaatgtcctccctgcattgccccagagcagacagggggttggagtcagggggctgtgccctgactgctgctccctgaggccacctgctgccatccagaccatctcctgcctcatggggaatcattgcattgttcaacaaacattttttgagcacctactatgtaccaggtcccatacaaggccctgggggcaccaagtgaccagggcagacccagttcttgccttctcagaccaccttccaagcggtgcaccctggtaggccagagcttctcctaggtcgccctggtggctctgaggtctctcttgacagctttctctgagggctcctgctgaaatggctgtgacttcatttgtagagtgggaacaataaccaggcctgtttg

SEQ ID NO: 257537 - DNA, 663 bp, Homo sapiens
caaaagactatatgctctttaagtttaggcaagctagtaaggaagtgagaaaagcaagacctgaactttgatctggagcaaatcactttacctttgaacctttttccctctctgtacaatgaaatggcaatccctgccctgcttgccttctgttgttttggatgacctcattagccattagacaacatatttgaaagtaatctctgattttattttttatttatttttattattttttttcaactaggggcatacccagatatctctgattttaaatcttccgccaacctaatactgtttcaggtggacagtaggtgcctgttaacaagtcataggtggtgggaggatccctgcacttaaaaatttcatttcactggaaatcttctcagagtgctaaacacttgagggattcaccatattaagttgctatcactgattcacatatatggagacacctctagatgtgaacagagcagtcccaggaaggaggtatgtgagagtgttatatgctgcccagccatggctctcccatcaacgcttgcttcactggctagtttagcaagaatgagagggtgttgctcactggtttgctctgatgggaagcttggcattctcctgcagcaataagaggtcctgtctatttttctagttaggtcccaaatc

SEQ ID NO: 257538 - DNA, 451 bp, Homo sapiens
taataatcaattgttatccctgtaagttccaggaaatttagtttaaggtttcttataggaaatatggataggcaaaagttcctctataaaaactctgcccaaatcacctatttctggggcacattgcttataataggtactgaatgaatatgttctaaatgaataagtagataaaccacaaacactttcaaccccttgacccttgtgagacttttacccctaccttactttcaaaacagaactccagaggcaagagttaaacaaaggccaccaggacacagaatgtagcaatgctgggatgtgcggtgagagaacagggaagagagaccttagctgggtctgtcctctgatgtttggtgtgactgctgacacatggcaggacctcagtaagcattggttggatggatagatgaatgagtgagtcagatcatctagctttgaagatctcagt

SEQ ID NO: 257539 - DNA, 2051 bp, Homo sapiens
ctggtgaaaacagataggaaaaggaagttgcctggttttgttggaacctatggtccaccaaaagaaactgagagaggtaagactgtacaggaaacctaaggccagttacggccagcattgagcatcacgctaaagggaaggaattttactctgggaattatgagaaaccattttaagtttctgagcaagaaagacaagatggccgctgcacgcagaagggcctggagagagggggaacgggcagcggggagcctcacaagaggactacagctggaaccatggcactggcagggggcatggaggagaaagagaagaaaaacagtaagcaggcaggaccatccgaacagatcctcaaagctgccatggacctcacttccctgtccccacagggaggctgctggagacagagcctatttggggaacacaaaccacgggtctgacacgtctgagatgagctgccgagcctctgcctccactctcattcagacactcagcttttccgaactactccaagcaccaggctgatgaggacatgggaaacccacgctctggcaaagccgggcccaggtgtcctggcctcccacagtgtcctggcctcccacctgaatccccacccaggactgtgtccaagggtgggactaggcggctctgcccctagagccaccttcattgcggcagccaccactgtgcctgcctctgctgtgcttttgcccccccttcccctcctccgtcatagcccccgccccccgcccactctgcggaactggcacagcaggacagaaaaaccaacgccaccatgtcggagaccagcagaaatggctccaaaatggcagctcatcagaggagtccagaaagatcataaacccacccagggaaaagaggggaagccagtgacaaggggagtaaactgtcaaaactacctcccaaccaagcccccgataatcatcacatcttttccttcagaaacatcctctcaaaaatcagatgggacatgagtgaaagaagggtgccaccccctccaccagagaggccctaggggccataggtggtatggggcactcagaaggatgttctgtagcctcttccccaagatgaggctagaaaaccaccacttttgtcctcaagcttggctcctgccagtaactagacaagagttagccctcccagggattgcagtccttcactgctacccagtcagaccctccccagctctatgggccctggggagcaagaaggtagggttgcaaggaagggccgagaaggcgcgtgccatgccctcagttatgtaataagaagggcggtgctcgtcctaggccagagacccagggcgcactgcgcttccagatgcgcagtcacgggtgggggccactgcgcatggcgcagggcttggtaaaccccctccccacaaacgtgagacctgcgacaaagacaggttagagagccgggaccctgatttttcgaggcctccctcccccaaccaaaggcggacagcctgctgccctagttttattctgattctcctcattccctagactgacaaacctttctaacccggggcctccaaacctcccgtctcccactgacttttctggaaatcccaccagatgcggagtttcgagcaatttcctggggtcagtcccccatcctcacctttccaagcaccacgtagtagtagcttccagaaggtagatctttcccatactgggctcagctcacaactggctcttgagggcctctggacagccccggacgtcaatgcaaatctgttgtccccagggagtagcccagagtcagcaggaagcccagggtggtggcagtatcagcagcagcagctctgccctaccttgcccatgcgtttccaggggagccaagaattattttgccgcaacactgaggtgtggctgattggaaaattcccttttccaacaccaaactacagaataaatattttcttccaatttggtcaaccctctgcatacccatctccctagcattcttccctctaaataaaaagttttgggagccctgagctcttcctccttatagtgcgt

SEQ ID NO: 257540 - DNA, 336 bp, Homo sapiens
aacgtttttagtaagagtacatgaactctgaggccaccttatctagtccatagcctttaggcaaaattgtattgaatcatgttaatctcctttttatatgtcccagttttaaagacatctgagagaaattcatcatgtggattattttacctgattcttgtctgttgacaataagactaactttgattcttctgctcttgactatggggattagctctttctgtatcatcccttgccttaacctgtattagaaatggtaattctaatatataatcataaaatgcttgaataaagaatatcttatggaaagtttatggaggcaggtgtgtccttcag

SEQ ID NO: 257541 - DNA, 283 bp, Homo sapiens
ctttgaatagacagcatagggacctggcatctgacatgcctgggaggcagcttagggacccataacaggggtgggacggggacttgctgacttggtgaccattggcaggtcatatccctctctgagcctccatttcctagggacagtcattctgccctgctatctcacagggctggcatgaggctcagaggcgggcagagatggataagagctttgtaatctgtagcatgctgtgtatgtatatgcaattgctgttattaattttaaagatattctgctgtag

SEQ ID NO: 257542 - DNA, 425 bp, Homo sapiens
gtttttccatggcaggcaggagcatggcaggcaggagctttaggtaacaaggctgatggctccagctcccagctccagctggtggctcctggtgacaggcctccagctcttggcctcaagtgatcctcccacctcagcctcccaagtagctgggattacaggcatgagccaccccatctggctctcatttcttgcattctctttctttctttctggcttgaggttatcgagaatggaccaccgctgtccttcatggtgagatggtagagctggggcctcgccgtgaggggattgtgggcctgatatggtgcaggtagtatctgaggcagctggctggttgacgtttgtgtgttttgttttgtttttttttttagatgaggtttcgctcttgttgcccaggctggagagcagtggcacaatctcgg

SEQ ID NO: 257543 - DNA, 339 bp, Homo sapiens
aattctaaatatcaccccaaaatacagataccttacttcttagttggcattattcaagtttattcactttgtgctgcaaatgtttgaattagaaaacaggagagaactcccgcagcagagatgcacttctctgctctcctgtcagtcacagaacccacactgggtgattagccagaggggcgggctcctttgttgacttaagagttcaccaggcaagatggaacaattatcttgttgcctcttcttaactgtctattgttgacttacttctagtatgcttccattgtacaaaattctatccaaaattgaagaataaatcgtaagttaaaaaggtaataa

SEQ ID NO: 257544 - DNA, 339 bp, Homo sapiens
ctacttcatcaagctacacagatagcttcatcctattagagttggtgcctgatatcaaaaccaagaaagaggccctttggcctatgggaaaattctcacatgtatgtgtgacatgtcccatttttgaatctgtcctctctttttactgatgtaaactcattaaatggcatgcggtccctagcatgggcgcttcataattacttgacagctatgctctagttccatggagtagcttagttcataataatggtgagcaaacatcaaatgcgatttgaaagatatttttttccactgactaatccaacataggatattctgctactttacttgctaaattaa

SEQ ID NO: 257545 - DNA, 417 bp, Homo sapiens
gacgtcaagggtgcaatgtgccatgattgagccacgaaactccaacctgggcaagagaatgagaacctgcctgaaaaacaaaaacaaaaacacacaatcaaaattctgagcccataaaaaatatgattgataagtgtaactgcatcaaaattaaagtttttgtatggtgaaaaacatcattagaaagaaagtaaaaaaacaaacaaacaaaaaaagaaagaaagtcaaaaggcaatcaaggcaatcaacaaactgggaaaaaaaggtgcattggagctggcctgcacttatatgagctgattgttacgttttcaggaattttgcaagctggttgtcacagttattattaaaaattaaattatagaaactttaaagtatgttagaatcaaaagtaataaatactgaaaaactcatcac

SEQ ID NO: 257546 - DNA, 567 bp, Homo sapiens
gctttgtcacgcaggctggagcgcgatgattggatctcagctcactgcaacttccgcctcccgggttcaagcaattctcgtgcctcagcctcccaagtggctggtactacaggcacgtgccaacacgccgatagttttcgtatttttagtagagacgggtttcaccacgttggccaggctggtctagaactcctgaccacgtgatccacctgcctcggcctccgaagtgctgggattacaggcttgagccaccgcgcccagcaagaaaggggttttgaaccctaatgcagttcctgtttttgtttccatcccctattggctgggatcagaccgcacaatctaagctgatcctggtaagcttagacccaaactttttccaaataaagtaaatgcgcgatttgcgagaaaaggaaaagggggtagaagaagaggtagggttgatttacaacttttacaacttatgaccagaaagttgagtcatttaaaaggaacttagttgtcctaacacctctttacctcaagtgatccgcccgcctcggcctcccaaaacgttgggattacaggcgt

SEQ ID NO: 257547 - DNA, 390 bp, Homo sapiens
atatgacttaaaatccatcctcaggaaactactgatcttcccctaaaactacatcatgctttgccaagttccagcatctctgctcctgctgttccctccgcctagaatgatccacttcatcctgggtccttgtctcttctttatggaactaagtttttgcatccttcagagcagggtcactctcaaagcacggcttgacaaggcttcagctcaattgctcaagctactccaaatacactgcatttgtgatgtaccccgcttccaaccagactgttaccctaaccctcttttatgtgtgaaaattctggagctaccacttcaaagaccagttcacatctcaccttcaccgtgaaaatctcatctgatagtgaagtgaatcactccctccca

SEQ ID NO: 257548 - DNA, 1546 bp, Homo sapiens
  misc_feature (549)..(549): n is a, c, g, or t
  misc_feature (1211)..(1211): n is a, c, g, or t
  misc_feature (1232)..(1232): n is a, c, g, or t
  misc_feature (1542)..(1542): n is a, c, g, or t
cagccatttggtgtgtctcagcaaatcccgctgagttccgaggccgcctaggtatgcaatcctgctgagagttgttcccaggtcagagaatggagagagcctgtgcatgatgggatatccctgcctagatctttcagtgagtctctacctcagctactcttaggatcagggggagaaccatggaaaggcccggtgtcagacatccggaaagaagagggatgaatgtttcacctctgaagtacatcccaaatgtgggagttaacttcagctttgctggggtctacttggccagcgaaactctgcctggttcattcgcacatccggaagccacttcacggggagccgtcgcaaccggaaccacacacttggcatcggcggttgagccaaatggggactcgtggtgcaagcaacgctccccacgtgttagcgtgcgtgagattcaattggcggaattttactaggtgcgtgttggtagagcggggctgaggttttcttgctcctgtggatgtataggaagtcaaaggtcctgcccagccctgcggtcccctnagtcaactctgtttcggagacataacgatttggattgctaacaagtcaagaaatgttcaagtccttggatgtagggaaaagaaagagagatcagactgtcactgtgtctatgtcgaaagggaagacataagagactctattttgaaaaggacctgtactttaaacaattgctttgctgagatgttgttcatttgtagctttgccccagccactttgccccagccgctttgacccaacttggagcacacaaaaacctatgttgtataaaatcaaggtttaagggatctagggctgtgcaggacgtgccttgttaaccaaatgtttacaagcagtatactttgtaaaagtcattgccattctctagtctcaataaaccagggacacaatgcaccgtggaaagccgcagggacctctgcccttgaaagcagggtattgtccaaagtttctccccatgcgatagtctgaaatatggcctcgtgggatgagaaagacctgactgtcccccagcctgacacccgtaaagcgtctgtgctgaggtgtattagtcaaagaggaaagcctcttgcagttgacatggaggaaggccactgtctcctgcttgcccctgggaactgaatgtctcggtgtaaaacccgatcgtacatttgttcaactctgagctnggagaaaagctgccctgtggngggaggcgagacatgttggcagtaatgctgccttgttattctttactccgctgagatgtttgggtggagagagacataaatctggcctacgtgcacgtccaggcatagtaccttcccttgaacttaattatgatatagattcttttgctcacatgttttttgttgacctccttattatcaccctgctctcctagtatattcctttttgctgaaataatgaaaatcataatcaataaaaactgagggaactcagaggccggtgcaggtccttggtgtgctgagtgccggtcccctggacccactgttgttnccct

SEQ ID NO: 257549 - DNA, 674 bp, Homo sapiens
caggaatgcagcagcacaattacactggctaatttgtttttgttttagttttgtaatgacagggtctccctaggttgcctaggctggtctcaaactcctgggctcaagtgatcctcccgccttgaccaaagtgctggtattataggcatgaaccactatggccggttgcttccaagtattttcaatccagttagtcaaatctagatatggaacccacagatagggagggctgactacattttgtaaatttataggatttatgggctaaaaaaacaaaaaacaaaaaactgggaaaattgtagacttccctactttttttttttttgagatgaagttttgctcttgttgcccaggctggagtgcaatggcgcaacctcggctcactgcaacctccgcctgctgggttcaagcaattctgtttttgctttttttttgagatggcgtcttgctctgtcgcccaggctggagtgcagtggcgcgatttctgctcactgcaagctccgcctcccaggttcatgccattctcctgcctcagcctcccgagtagctgggactacaggcgcccaccaccacacccagctaattttttgtatttttagtagagacggggtttcaccgtgttagccaggatggtctggatctcctaaccccgtgatctgcccgcctcagcctcc

SEQ ID NO: 257550 - DNA, 281 bp, Homo sapiens
cccattttgtttaaatatgtgtgtatttgtctgtgtgtacatgcttgtgtttgattgaatcaaatgaaaatttggctgtttttgacttatataaaaggcaatttcataaggttcaacctagtgcatgcacacaaacacacacacacacacacacacacacagaaaagtctgtaagaacctacactaaattgttaacagtagttttagatggtggaaaaatatttgatctttattttctttataccttttcatattttctgaaaagtggcagaagtttaaca

SEQ ID NO: 257551 - DNA, 431 bp, Homo sapiens
gtggatatcaaggacttatacaaacatgaaatgtcctgagactccagaaaaagggaggggagagtaatcagggaaagctttgaaggatggggacaactatactaaataaaaaggtgaaaagcaatcagcgtatggaagaaagtctattaactagaattgagttcatctgtgagtaacagaagtgccaaaataacaatggctgaaagaagacaaaagtttgttttactctcatataaaagaaattaagttgctagggacctaggttctttctatcttgcttctccaccatctttagtgtattgcctcgtggtttaatatggctgcttatgctccagccactacattcagaatccacacaccaggaagaaagaaggtaaagtgaaagggacaaagaacttaggctaagttcttttaccattttgttggacaga

SEQ ID NO: 257552 - DNA, 470 bp, Homo sapiens
aaaatttttgtccaccaggttacagatgttggaatgcatactgcaaggcaagcagtatactgattccttaccatagattaatgaaataaggagctagctcatactgtgattcacaaatagaagaaagggaggaatgcccaagagtgactgaaaggaagagtcacagaaaaagatgttaaatacgagggctccactttctctatttcagactttttaactctaagattctttttggaacaagaatagaatgaagaacaggatcagaataagggatgaggtataggaaaacccacattccaagaaatcatgctaacaactgacttgtaacttttggtgagttacactgttctttaataaaagggaagaaagactcttgatgagtaaagcaaatggccaatgtggggttggatctggattcatttgttcatatgatcttcaaatcttgcctatacagagtaaaaatatcacct

SEQ ID NO: 257553 - DNA, 862 bp, Homo sapiens
ctgtgcagctgctcccgagattttctttaaaacatatttgtgtgcgttattgtcaggagaggttccttttcttttttaatacaatagataatcattgggcatacaaggggagagggcaccatgtgatcataacagatgttttttggagcagcctgaaatttatcagggaaaacaaatgactactcagataatacaataaattatacttgacatatgagcaaagctcacatactgagggcgttccaagggctgtcgctcttctgaccgttgtgtttagggaacacagcaggggcagagtctcaaagaatttattctccacatgcgtaagcaagggagtacgcaccacagattgtcaggcaaagcctcaggaataggtagagaccttcagggtgtggttggtgaagcttgagttttctaggtcgatgggggcaataagcttggagatccagttatgttgtgagtatggacttgaccctagttaagtagggattgttgatatgtttgtttttgttgcaatggtaggtcactctagttcttacgtctgggcgtagaataacattacttgcacaagggtgctggcggtaggagctttgcaagagattgtaaaagaaccagtctaggacttgacaattagggagtgagggtgcgaagccaagggaaaagaaagagtctaaaattgatcctgggtgactgagataatagaaaagtcacaaggcgtaggtttccagggaagatgagtttttagcctatttgttagtctcatgggatgagtgaagaaatcacaagaaagtaattaggttatcttgggtttcagtcagtattgactaggtgacataggtgaactaggtactctagagatgta

SEQ ID NO: 257554 - DNA, 366 bp, Homo sapiens
ttgtttttttgtttttttattcagaggcagagtcttgctctgctgttgcccagcctggagtgcagtggtactatcatagctcactgcaggcctcaaactcctgggctcaagggatcctcccacctcaacctcctgagtatctgggactataggcgtgcactgccacacccgtcttttcgtttgtttgtttgttttacagattgggtcttgctatatcgcacaggctggtcttaaacttctggcttcaaatgatactcctgcttcagcctcccaaagcactgggcttacagctcctcttttattttaataatccatgccaattttatattctactccataatacatgtgttttttgttttttcgttt

SEQ ID NO: 257555 - DNA, 526 bp, Homo sapiens
tgcacctgtgtttcagggatgacagttgtagctattttcgttcttaatttggaaagatgagataatagctcgtattctggtgcgttgtaaattaaaaatgtcgtcaggcattaccgtgctcaatgacagctatggcatgtccaagccttgctcaccttcaagactttgttcttgctgattgttcagcttgagtgctagaatgttctttacaccctcagttccccatcagccttcatctccagataggctgtgttcatcctttgaagcctctcggtgaagccttttctcaaacctaaggacgttcctcctgagactgtcttcatgcaccctcctgacttggagcccgtctggctgtgtcatttgagggcagcatctgaggaggaatcttctttggccatcgccacggccctagttggggtcttgcactgagcagatgttactcgaattctttctgcggattgagtagaacggcctggcactggctttgtgggattcacattgtaactgctatggaatgggctggaga

SEQ ID NO: 257556 - DNA, 575 bp, Homo sapiens
cgagtgagggtatttccatgctcactaccaaggttcagggacatgctccccagaaatagtctgtgatgaagcacgtggtagaataaggcatcccacttcacatgaactcttgttttctatatttgtttttttttctaagttatgataatctgaaaatgacagaatttacacagttggagtatatttcctgagatcccaccacataaagaaaagatcacaatataaggcatgaagagtgggaactcacagacccggcgtattcaccagtgtgctccctgacctggagaacacaactgcagttgccaggctggccctgtgaagcccacaaatcaggacacgccacttaatggcaccaccagcaacatagccttcccttggagactcaataatatctgaacccttcacggcgtggagctgctgatgttcctaactacaaattcaggctccacagaaaacatggcttctctttattttagattatcttattttataaaaagcaagaatatataaaagatatagagaaaaaaggcagacagaagccactgcccagtgagaacgtgctggaatataaaaat

SEQ ID NO: 257557 - DNA, 366 bp, Homo sapiens
ttgcacatttctggaataacttaaaatacctgacttttcagtaccaccctgcctgataattggttgacctgcagatttatctttagcagagtaaaaatatcactctgctcgaggaaacattgttagaattttatagcaagctctgaagtgagtaacagccaactgatcttcaaggttgtcctctgtgatattcctctgagttggcccaaaagaacctcgcacaggttttaaaagaaaaaaataaggtgccaataaagtgcagtaaaattatttactttaattatgtttaattaacacattctttccctagaacttttgctttgcttggccctctttccttgactattcaagtacttactaagtaaa

SEQ ID NO: 257558 - DNA, 385 bp, Homo sapiens
tttttctttttgctgttctgattaggtaatttcaaatgttctgtctttgggctctcagattctttcctgtttgaccaacttaattgctaacctttaagttgcttctgagtcagggagacattccatatgagcatgtgggctgtatgggaaatccggccagggatttgggccttcctgtggatcgtgcacctctgaagcactatggtgccccactgatcagaatgaagagcatctactgagatctgcatggtagttgctgagatcagcactcctactctttgtctccagatcacctcaggtgggtcagccctcttgttactcccaatgcttctggtagaacaggaccaaagcaggttttccatgaagattccgagactagtaggga

SEQ ID NO: 257559 - DNA, 243 bp, Homo sapiens
gtgtttctctctctgcctttgcttctgatgtccccctctacctggaatgctctctctccccctcccctagaatttgaactcattcttttaaaacttaacatttgtcaccagctattcctgaaagcctttcctggtttccctttcttccttttcccagcatcctccaccaagctaggttaggtccccctctttagagttctatcataccttgtacataattttattacggtactttggttggga

SEQ ID NO: 257560 - DNA, 411 bp, Homo sapiens
ttgttagtatatggaaatgctactaatttttgtatatttttgtggcctcaactttactgaatggatatattagctctattttttgtttgtttggtatagtctttatggttttctgtatcttcaaatcacttcatctgtaaacagtgagaattttacttctttattcctgatttgaatgcctttttgtttctttttcttacctaattgttctggcttgatttctcactactatgttgaatagaagtgttgagattgggcacctctgtcttgtttctgatactagaggaaactttcagcatttcactgtttactctgttgagatggatacttttgtatgtatgttgtttggagtttttattatgaaaatgtatttacttctgttataggcttttaataaattttttgagagga

SEQ ID NO: 257561 - DNA, 650 bp, Homo sapiens
gaagaaagtttccttcctctttctgggatgtagggggctggcccggtgcagagttttgacataggaaatgtttgtccttggcactctgccatctccttattcatacttctacatctcaaaaccctactccttggccgcaaaacccagccctctgctatgtgcatccaaccatgactctccacccagatctgcctttcttgtcactaagcgtttcatcttctaaacacatcacccttgcctaccttctccccacactcctccccaagctccaccttgcaggatagctatggctagctgagtcaaaaacaacagcaacaacaaaagctgtcttttcatgcttgcatgttttcttagatatttagaagttatatatatgtggagcaatcggaccctttggtagtctcttcctaataagcaaactgctaatggctcaggatttaaaagacatactacataaattatttccccctatggaataaatatgcaagctgaaaataaactacagatcctaatagccaagcagaaggagtatacttgtctaagcgaaacatcttctatgtaatttggcttgtcaaacaatgtgaagtaggatgaaagcatctttacaatgtgcagctggtgtgagagtgtcacacagatgctaattgttt

SEQ ID NO: 257562 - DNA, 456 bp, Homo sapiens
gcttcaacaatgatcaactcgaggtcaatcttgttttatctctacccctactcactcctgcctcctagtattaatttgaggcaacacatttgtaaatgttttggtaggtattgctaaaaataagggctcttgtataaaacataaccacaaatacatgtcattatacatttatccaaacccacagaatgtacaacaccaagagtgaaccctaatgtgagctatggacttggggtgatgatggtgtgtcagtgcaggctcactactgtatcaaatgctctgctctgctgggggatgttgatactgtggcaggctgtgcacaacgtgggggcagtctctgtaccatcttctcaattttcctgtgaacttaaaactactctaaaaaagttaagtcttaaaaaataaaatcaaaagagcaaagctcctgttattaaatctaaaaaatgaacaataattctt

SEQ ID NO: 257563 - DNA, 340 bp, Homo sapiens
aatgcacatgtagaggcggaacaggactgagctgcgcctgtagaaaattgaatgtgtccattgatccgctaagtctgaataaactctcattcttgttagcacagcaattagtcctcatggtcactggagcattgaaacaaggcagtttggcccacttgtcttgttttcctgtattcccaaacatgaaacacgtccagattgggacagaacaaacctccttcactttcaatcaccacccgcttcaaattaagaagtagactgagaagcggcaacagcatggaggtgacatttaatctcaagatctacccactgctgttgctcaacattagcttggcccttt

SEQ ID NO: 257564 - DNA, 1879 bp, Homo sapiens
catcctgccactaacagatttctccaaacatctctgcacctcagagtgcaaataccatcaaacatttcactccattgataggaagcatccttcactatcttctaccaaggcctttctcctttgttgcttcaaaattttttatgaaaggaacatccattttattcaaagcacctccaaacctgcagtcctaagttccaggcaactcaatcccaaaaatccactgtagatgcccaaagggtggggtgttcggtcttcaacatttttgcctttatggctcccagtcaagatagagctgcaccaagtccaattccattcctcatcacagatgattttttctactttaagatcagaactatacaagcttcttgctttgtgtcagcatgctgttgtacccatgggcaaattcttaggtaagacaaaaacacagccccaagggcaggtagtaattttttcagaaaaaggtaaggcaatcatttatctcagtctgcccaggacagtcccaatttacacatgtatattctcccaatctgtaggctgtcttttcattttgttgattatttcatttaattttttattatttatttattttatagagacagatctcattatgttgcccagggtgatccttgatctcctggcctcaagtgatcctccaaccttggtctcccaaagtgctgggattacagatgtgaactaccacacccagtcaacgtgcagaaggttttcagtttgatgtagtctgatgtagtctcatgtatttatccttgttgttgttgcctgagcttttggtgtgatatccaaaaatatcattgccaagatcaatatcaagaaactttccccctatgtttcttacagaaattttatggtttcagatttttcatctattttgagtatatttttgtgtatgatgtaagataagggtccagtctccccagtgttggatatccaattttcataacaccatttattgaagagattattctttctccactgtgttttcttgatgtccttgtcaaaaattagttgacttttatatgcttgggtttatttctgggctctattctgtttcattgctttacatctctgttttcatgccagtgccacagtgttttgattactatagctttgtaatataatttgaaatcagaatgtgtaatacctataactttgttttttgctctaaagatttatttatttatttatttatttttgccatttcaggtcttttgtggtttcatatgaatttcagaattgtttttcctatttctgtgaaaaatgccattgacattttgatagggattgtgttgaatctatatattgctttggatagtatggatgttttaacactattaattctcccaatccatgaacatgaaatatctttccattcacttgtgtcttcttcaatttctttcatcaatgttttatagttttcattgtgcagatctttcacttacctggttaaatttattcctacaatttcattctttttgatattagggtaaattgaattattttcttgatttctataaattatttattatcatactcatacttgtcaggcctttgggcccaagcctgcatgtatacatccagatggcctgaaataactgaagaatcacaaaagaagtgaaaatggccagttcctgccttaactggtgacattaccttgtgaaattccttctcctggctcagaagctcccccgctgagcaccttgtgacccccgtccctgcccaccagagaacaaccccctttgactgtaattgtccactacccacccaaatcctataaaacagccccacccctgtctcccttcactgactcctttttcagactcagcctgcctgcacccaggtgaaataaacagccttgttgctc

SEQ ID NO: 257565 - DNA, 431 bp, Homo sapiens
  misc_feature (32)..(32): n is a, c, g, or t
cggcacgagggcgcgcatgagcggacgctgcntacgggtggccgggcgggatgtaatcggctgctgagctggcagttctgtgtcgctaggcttctgcccggccgccgccgcacataagctgcgaggaggagctttacgacttcccggtcttcggggccgggcgcagcaagggccagactctgcgctagcaggcgctgcgcgccaaccggccggcacctgtcgcagaaggtgcaaccgatcgcactgtcgcgcagaagctcctcaatggccggcgccagctgcagccccggccgcccactcgcctcatctgagcctgggcgaatctggactgggaaagttgatattaatcaactcattattcctcacagatttgtattctccagagtatccaggtccttctcagagaattaaaaagcctgtacaggtctaca

SEQ ID NO: 257566 - DNA, 572 bp, Homo sapiens
  misc_feature (32)..(32): n is a, c, g, or t
cggcacgagggcgcgcatgagcggacgctgcntacgggtggccgggcgggatgtaatcggctgctgagctggcagttctgtgtcgctaggcttctgcccggccgccgccgcacataagctgcgaggaggagctttacgacttcccggtcttcggggccgggcgcagcaagggccagactctgcgctagcaggcgctgcgcgccaaccggccggcacctgtcgcagaaggtgcaaccgatcgcactgtcgcgcagaagctcctcaatggccggcgccagctgcagccccggccgcccactcgcctcatctgagcctgggcgaatctggactgggaaagttgatattaatcaactcattattcctcacagatttgtattctccagagtatccaggtccttctcagagaattaaaaagcctgtacaggtctacatattggtatttttaattgatgataagctggaataatattaatacacacaaagcacgtgttgtaactttcattatgcttccctagaggtaagatgcaaatttgcccttagccagtgtaagatggtaaatatgacttcataaa

SEQ ID NO: 257567 - DNA, 2170 bp, Homo sapiens
catcctgccactaacagatttctccaaacatctctgcacctcagagtgcaaataccatcaaacatttcactccattgataggaagcatccttcactatcttctaccaaggcctttctcctttgttgcttcaaaattttttatgaaaggaacatccattttattcaaagcacctccaaacctgcagtcctaagttccaggcaactcaatcccaaaaatccactgtagatgcccaaagggtggggtgttcggtcttcaacatttttgcctttatggctcccagtcaagatagagctgcaccaagtccaattccattcctcatcacagatgattttttctactttaagatcagaactatacaagcttcttgctttgtgtcagcatgctgttgtacccatgggcaaattcttaggtaagacaaaaacacagccccaagggcaggtagtaattttttcagaaaaaggtaaggcaatcatttatctcagtctgcccaggacagtcccaatttacacatgtatattctcccaatctgtaggctgtcttttcattttgttgattatttcatttaattttttattatttatttattttatagagacagatctcattatgttgcccagggtgatccttgatctcctggcctcaagtgatcctccaaccttggtctcccaaagtgctgggattacagatgtgaactaccacacccagtcaacgtgcagaaggttttcagtttgatgtagtctgatgtagtctcatgtatttatccttgttgttgttgcctgagcttttggtgtgatatccaaaaatatcattgccaagatcaatatcaagaaactttccccctatgtttcttacagaaattttatggtttcagatttttcatctattttgagtatatttttgtgtatgatgtaagataagggtccagtctccccagtgttggatatccaattttcataacaccatttattgaagagattattctttctccactgtgttttcttgatgtccttgtcaaaaattagttgacttttatatgcttgggtttatttctgggctctattctgtttcattgctttacatctctgttttcatgccagtgccacagtgttttgattactatagctttgtaatataatttgaaatcagaatgtgtaatacctataactttgttttttgctctaaagatttatttatttatttatttatttttgccatttcaggtcttttgtggtttcatatgaatttcagaattgtttttcctatttctgtgaaaaatgccattgacattttgatagggattgtgttgaatctatatattgctttggatagtatggatgttttaacactattaattctcccaatccatgaacatgaaatatctttccattcacttgtgtcttcttcaatttctttcatcaatgttttatagttttcattgtgcagatctttcacttacctggttaaatttattcctacaatttcattctttttgatattagggtaaattgaattattttcttgatttctataaattatttattatcatactcatacttgtcaggcctttgggcccaagcctgcatgtatacatccagatggcctgaaataactgaagaatcacaaaagaagtgaaaatggccagttcctgccttaactggtgacattaccttgtgaaattccttctcctggctcagaagctcccccgctgagcaccttgtgacccccgtccctgcccaccagagaacaaccccctttgactgtaattgtccactacccacccaaatcctataaaacagccccacccctgtctcccttcactgactcctttttcagactcagcctgcctgcacccaggtgaaataaacagccttgttgctcacacaaagcctgttggtggactctcttcacacagatgcgcaagacaatactaacaccaatattattttgattcgtcagatggaaaagtaaggcttgaagaggttagaaataacttttccaaggtcacagagctaattgccacaactataactcagctctagtatgtgaacaaagatttttttataccaaaccaaaattatttatttctactccactattctatcatggtgcattttaggtgctaatgggaaaaggtgctctatgatggtgtccaatagacaattaaaattc

SEQ ID NO: 257568 - DNA, 2078 bp, Homo sapiens
gttgaatatttaaggttgagtaaagtgggtgagtttaacagatattttcccttatttcttttaggcgaatctggactgggaaagttgatattaatcaactcattattcctcacagatttgtattctccagagtatccaggtccttctcagagaattaaaaagcctgtacaggtctacatattggtatttttaattgatgataagctggaataatattaatacacacaaagcacgtgttgtaactttcattatgcttccctagaggtggaacaatccaaagttttaatcagagaaggtggtgttcagttgctgcttacaatagttgataccccagtatttggagatgcagtggataacagtaattgctggcagcctgctatcaattacattgatagtaaatttgaggactacctaaatgcagaatcgcaagtgaacagatgtcagatgcctggtaacagggtgcagtgttgtttatacttcattgtctcctgcatgacatggagacagatctcattatgttgcccagggtgatccttgatctcctggcctcaagtgatcctccaaccttggtctcccaaagtgctgggattacagatgtgaactaccacacccagtcaacgtgcagaaggttttcagtttgatgtagtctgatgtagtctcatgtatttatccttgttgttgttgcctgagcttttggtgtgatatccaaaaatatcattgccaagatcaatatcaagaaactttccccctatgtttcttacagaaattttatggtttcagatttttcatctattttgagtatatttttgtgtatgatgtaagataagggtccagtctccccagtgttggatatccaattttcataacaccatttattgaagagattattctttctccactgtgttttcttgatgtccttgtcaaaaattagttgacttttatatgcttgggtttatttctgggctctattctgtttcattgctttacatctctgttttcatgccagtgccacagtgttttgattactatagctttgtaatataatttgaaatcagaatgtgtaatacctataactttgttttttgctctaaagatttatttatttatttatttatttttgccatttcaggtcttttgtggtttcatatgaatttcagaattgtttttcctatttctgtgaaaaatgccattgacattttgatagggattgtgttgaatctatatattgctttggatagtatggatgttttaacactattaattctcccaatccatgaacatgaaatatctttccattcacttgtgtcttcttcaatttctttcatcaatgttttatagttttcattgtgcagatctttcacttacctggttaaatttattcctacaatttcattctttttgatattagggtaaattgaattattttcttgatttctataaattatttattatcatactcatacttgtcaggcctttgggcccaagcctgcatgtatacatccagatggcctgaaataactgaagaatcacaaaagaagtgaaaatggccagttcctgccttaactggtgacattaccttgtgaaattccttctcctggctcagaagctcccccgctgagcaccttgtgacccccgtccctgcccaccagagaacaaccccctttgactgtaattgtccactacccacccaaatcctataaaacagccccacccctgtctcccttcactgactcctttttcagactcagcctgcctgcacccaggtgaaataaacagccttgttgctcacacaaagcctgttggtggactctcttcacacagatgcgcaagacaatactaacaccaatattattttgattcgtcagatggaaaagtaaggcttgaagaggttagaaataacttttccaaggtcacagagctaattgccacaactataactcagctctagtatgtgaacaaagatttttttataccaaaccaaaattatttatttctactccactattctatcatggtgcattttaggtgctaatgggaaaaggtgctctatgatggtgtccaatagacaattaaaattc

SEQ ID NO: 257569 - DNA, 1181 bp, Homo sapiens
tcacgctttatacttctcataacagctctattatttaaaaaacaccaagtatttcttggtaatccactgactcctcaatgaggtgcccaaattttttgaacaaagcattcatcaaatttgactaattaaaattgatgtttaattagtttaaccattcaggcaagtagttctaacctctaaaccacacctcttttttatttatttatttatttatttatttttgccatttcaggtcttttgtggtttcatatgaatttcagaattgtttttcctatttctgtgaaaaatgccattgacattttgatagggattgtgttgaatctatatattgctttggatagtatggatgttttaacactattaattctcccaatccatgaacatgaaatatctttccattcacttgtgtcttcttcaatttctttcatcaatgttttatagttttcattgtgcagatctttcacttacctggttaaatttattcctacaatttcattctttttgatattagggtaaattgaattattttcttgatttctataaattatttattatcatactcatacttgtcaggcctttgggcccaagcctgcatgtatacatccagatggcctgaaataactgaagaatcacaaaagaagtgaaaatggccagttcctgccttaactggtgacattaccttgtgaaattccttctcctggctcagaagctcccccgctgagcaccttgtgacccccgtccctgcccaccagagaacaaccccctttgactgtaattgtccactacccacccaaatcctataaaacagccccacccctgtctcccttcactgactcctttttcagactcagcctgcctgcacccaggtgaaataaacagccttgttgctcacacaaagcctgttggtggactctcttcacacagatgcgcaagacaatactaacaccaatattattttgattcgtcagatggaaaagtaaggcttgaagaggttagaaataacttttccaaggtcacagagctaattgccacaactataactcagctctagtatgtgaacaaagatttttttataccaaaccaaaattatttatttctactccactattctatcatggtgcattttaggtgctaatgggaaaaggtgctctatgatggtgtccaatagacaattaaaattc

SEQ ID NO: 257570 - DNA, 461 bp, Homo sapiens
ggtagataaactcaaacatccctaccatcacccctggtaggaaatcactggtgtaatgtatgatattaacatctgcaccaattactcttataggtggaacaatccaaagttttaatcagagaaggtggtgttcagttgctgcttacaatagttgataccccagtatttggagatgcagtggataacagtaattggtaaaaaggatttgtcctcacaactttccagtgtatttggggtactggggtggttaaactttctcttcttaacattttaaaactcttcttagcaaaggtcaccaaacttcaagtaacatgacaggtttgtataccaactttgccacttatttgacaaagtttaacttcaaagttaaacaaagaagtttaacttctttgaacccatttactttttgataaaatggagataatacctatcataaaattgttttgaagacatattccaaa

SEQ ID NO: 257571 - DNA, 291 bp, Homo sapiens
cagacagaattttaaggagaaagagaacaaacccataacaatcattgcagacttcaacactcctttctcagtaatcactagaacaagcagacaggaaatcagcaaggatagggaagaccttaacacgatcaaccaacttgacctaattattatttatgaaacactttacctaaaggcagcagaacacatctttcctattacaaactgaacattgacctaaacaaacaatgtttcaggccatatacaaacctctacatttttttttaattcatcataacgagtatgttccct

SEQ ID NO: 257572 - DNA, 414 bp, Homo sapiens
ggtggtggtggaatttcgcatacctcagggcttagtaaaaaccatgagttgttctgctaatggacacagaccatctggaattagaattgccatgtgaaattttcgaatctgatagttgaataatttcttagggatagagtagtcatcttgagatgagttctatgaaacatgattattattattttacttttgctttgtgctgtcttggttaaccaaaacactatcttttcctgctaaaaaagtctccgttccctccacattagctctttaataataatatttcccctatatctcagccttcttattgccttgcctatgaactactcatcagtagtcaaatcagagtcactctttcctgcagttgattgtgaagagcagggagacaaaccaggagagaaaaacaaaactcaattt

SEQ ID NO: 257573 - DNA, 442 bp, Homo sapiens
tgatgggcagcaccccctcccgtctggagtctgccggggcccttcctgctctccttgttaatttattttctgtcttggagggaagctgggtgcacctgctcaggtggccccctagggccagaagacctgtcagtcactttcaaatacatgttctttccagctcttccttgccaaaggttctaaaaacactgttgtccgtctcacccaaaaagctaagcttctgtccaatccttaacggtagctataaatgagaagcataagcttggtttccttctaacatccggcaagttagaagataaaacgtatttcttcacttattcatcacatatttgcagggcacccctacacgggacagcagaggtcccaggccggtgctgcacccggagccaggctcggagctggccgcgcgccctcagctgaaactcaccggaggcgcggccgc

SEQ ID NO: 257574 - DNA, 681 bp, Homo sapiens
aacaatgagagaactagtcgatgaaatataaaataatgttggcaaatcttagctagactaaccaagaaaaaatagagaagactcaaataaataaaatcagaaatgaaagaagaaacaatacaactcataccataaaaatacaaatgatcataagggattactataaacaattatttgacaataaattggaaggccaagaagaaatgataaatttctggaaatgtacaccctactatgactgaatcatgaagaaaccgaaaatttaaacagaccaatagtgaataagaagattgcatcaccaataaaaaactgattaaaaacctctcagcaaagaagctcaggaagagatggctttgttaataaatgccaccaaacattttttaaaaattaccagttctttatatactcttccaaattattgaagaaaaaccacatttccaaactcattaaatgaggctagtatttctgtgatatcaaagccaaagactttataagataagaaaattacaggtcaatattcttgatgaataaagatgcaaaaattctcaacaaacttaaatactcacaaacagaattcaacagcacattaaaagtatcacacctcatgatcaagagagatttatccttgagatgcagggatgattcaacatatgcaaatcaataaatgtagtacaccacatt

SEQ ID NO: 257575 - DNA, 405 bp, Homo sapiens
tggtgtgatggggaaaccaaggcccagagagggcctgttttggagtggaatcagcctcactggcagtggcggtgagcagcaggcttgtgacctgttctatccctagggccgaagcctttcttttcagctgggaagacttttgggattggacgcctggaaatgctgggtggcttcaaggggggcgccatccagatcctgaagcagagggcctaccagtgcagcaggcagtgttcccagcacgcagggcaggatgagagctgacccttccccttctctgcctctccataggctgtgggtttgagccatgctgcagaggctggcccaggcagtgcccctcctccagccaccctgtggagcagggactggacttggctcctccttcactaacaggctcttttccaatca

SEQ ID NO: 257576 - DNA, 580 bp, Homo sapiens
gcacaatgttcaggttagctacatatgtatacatgtgccatgctggtgtgctgcacagaatcagccatttctgtgagaagccctggtccccttcactggagaatggtattaaaaaccaaaatctgggcactaagtgtacataaactaatttttaataacaccaagtgagcatatatattatggtacttaagagtccaaactcccctaattcttaactgagatcttactatgagctcatcttgggggatccaaatgatgttcttcaattctagatatagcaatatcctaaaaacctcaagatacttcatccctttaaatttaactgtgtactgaagttggacacgaaagaatctctgaacacttcagaaaaaagtttttaaacagaatctcgcaatccctaatgactagatagcaagctaggtaaagcagtctatgtacgtattttcctgacaattaatattaagacaagatacaattacagaagatattttttcaaattaaaaatgcttaaaattgagaaatgccttaaagaaaaatgaaaaatattttaatatttaggtaaattgctcaaaacgaaagc

SEQ ID NO: 257577 - DNA, 434 bp, Homo sapiens
agggcacgatgcttggagctggccaagagaagagtggcctccagagtggagcctgggtccatccttttcagcactgccccacccagggccattccaagaggaaccgtgactggatgaggagggtgggagcggttcatgtggagcctggtactggcagactgcctgttggtctagctggggcagtggaggcgatggtggttgtggccatggtgtggagggggcgtttgctcagtggccagtactgctctgtgctgtgtggcccattcccacctgtggtgagctgggagctggctctcagggaggaaatcccgacccatagtgttggctgtgtctcaggtgtgagcactcccaccacagcactctccactgcctgtgggtggggctgcggcatcggccccagcatgccctggttcaggcctgcgggggcggccgct

SEQ ID NO: 257578 - DNA, 418 bp, Homo sapiens
gagttgccagatcattttcaaatggctgtgcatcaaggctcacctgggagcttgtaaacatagtggtgcttggcccgtaagaggccggatccacaggggaaggtcccagtagttcagattttcagagttcttcccaggaaaccgtgaagcatactagtgataagggcatctgggctgcaccattaaccagctcaaaaatagttcattcagaatttccccatgactatttcattattttgttattagggttgatagttttaatacataaaaatagaggataaatgataatattttatatataaataaaaaacatatatgtataatagtatatttaatacataagaatagaagataaataataaataaaaataggtatatttgaatttctgataatgcatattcttgcatgcatatgtcc

SEQ ID NO: 257579 - DNA, 378 bp, Homo sapiens
aatcttcacactaaaaacttatttaacccttattacctgatacaacacatctgggctttgacataaaattacaaggcatactaaaagtcaagaaaaacttctagagataaaatactaccatcagaatcagattcaaacatgacacaaattttggaattatcaggcaggaaatttaaaataattataattaatgagctaagggctctgaagtaaaatgagctaagggctctagacaacatgcaagaacagatgagtaatatatgcagagttggagactctaagaaagaataaaaaggaaataccagaaataaaaacaactgtaacagaatgaagaatgcctctgatgggctcataagcagattggatacagccaaaaaa

SEQ ID NO: 257580 - DNA, 690 bp, Homo sapiens
ccggtctgcaggaatttggctcgaggaaaatttagttataaaatattaatgtgatgcaattctattttgtttaaagatactggtctctgtgtgtttaacttatgggaggactagaaggaaaatgttttgttgaactacaacttgagtccatatacctagtagatctgtctgctagtttccgttacattctatattcgtttattcagtattcactcattcattctatatttatttgtccgataactcttgcccttctagatgctaatatgtcatctgtcacaattccacagcaaaagtactatggaaaaagatgggtctgctttattcactgaaaaattaaagaacacttcaaaaaggaactgatacttgagtttattcattgttcattcaagaaatatacttattgagcacttgcgacatgctagtcactgtcctttgtgcttgcaacaaatcagtgaaccttaaaaacaaaaacacaacatactcctgttcttatgatgtaatcttgagagatggtgattgtttcatcaaacagaaatcacaatagttatcaatttatttgtgtgattctcccactggactctaagttccttaagaagggaactctggcttgtactgctgtatctctgatgcccattgttcagacccataataggcacacagtaaatatttttgaataactaatactat

SEQ ID NO: 257581 - DNA, 284 bp, Homo sapiens
tggcattcaactacctgggtttgaacccacttaacatctatgaactggggcaggactcatagagccctataatataattgttagaaatgtggacttgagccaaatttcctcagactgccacataataactgaggtctttggcaagttacttaactcctctgagcttcagtttcctcatctacaaaatgtgaacaataatagtacgtgtggcataggtttgttgtgaacagtaaatgacttacgactttgcaatatacttggtacataataagtactcactatgt

SEQ ID NO: 257582 - DNA, 363 bp, Homo sapiens
tatgagtgtccttgtcctggtgctctgctatacacctgaacataacctatgcttcagacaaaagcaaggtctctcatttggaacaaggataatctgcttaaaaatctaaatctctaataaatggctgacgtgtgcaagaatatcatagtacatagctctttgtaaggtaattttaaaagaaaatggtacgcattttgctcagccaagcaatctgaaagttcaaaaggtaagaagcacttctcagcatgaaactgtcaaacatatttgaaaagaaagttaattacaattggcattttcaagccttctgctggccatggctatcttactgaaaggtgacattagtgacatccattgtataggggc

SEQ ID NO: 257583 - DNA, 503 bp, Homo sapiens
ctgagggttaaatactgtaggttaagaatttagtagataataaaagtggattaaaggaatttttggactcaaatgtccttactctgcccttaaaccgatgtctagatgagctgatgtggcaactggaagcctggaaatcaagatttctgcttgctcttctattaccctatccatgaacttgggtttccatgtttagatagctcaaggtctggagacaatgacaaatttgactttttaagacaacaaaccctggggacttagaaactgtttagaaacaaacaagactctaacttaaaacagaaagtcatcattctgcttcattgcccaggttttgtcggagtgaccttgagagtgtacgcaatgatgaggcaagcaattaataagggaggattttaaatgtctctataaaaataggatcaaaaacttagatcaattataatgaaaataattaaaacacattaatttggacaactgtcagtaaactattggacgtttctatctca

SEQ ID NO: 257584 - DNA, 460 bp, Homo sapiens
ttttttgcctactgtccttgttggtatagcctgctagctgagaggtagcaaccaggtggatgcatggaagaatatcagtttagctctattgagttttactagtgtgatctatggaggactggctcactctagagaggatgggatgatgcttatcagtcctttggcctctgccccttgtgccaagtcttgagagggctgatgcatagccagataggcaggccaagctccttgaggctagacctagactgctgctgggctttgcaaaacccaactggggatgggtcctgggctgctctctgtggttctgaagcaccatctcccgccagtgtggctgctcccccttaatctgcatctctggtgtctcctatacagcctctgccagaaattcaaaagcagagagggcttttattttctatcttccaaaataaatttcaaagtattattggcaaacttgaatagt

SEQ ID NO: 257585 - DNA, 318 bp, Homo sapiens
aaggcccccccctcccaggggcctccaggtagacggtgttatactagagatgtaactgagagagccaaataggcaggccaagctccttgaggctagacctagactgctgctgggctttgcaaaacccaactggggatgggtcctgggctgctctctgtggttctgaagcaccatctcccgccagtgtggctgctcccccttaatctgcatctctggtgtctcctatacagcctctgccagaaattcaaaagcagagagggcttttattttctatcttccaaaataaatttcaaagtattattggcaaacttgaatagt

SEQ ID NO: 257586 - DNA, 773 bp, Homo sapiens
gactgagcaaatggaggaaaaggaaaccgcctttcagttcaaccgactcactgcatgatatattggcctttctgggtctttggtggctatactcgtttggcttttctccttcccagcttggaggctgctttatccaaatgctttcttcagtcctcaacttggcgtttcaacccgaatccgccttttcttccatcttagatctgccttcttatgtgtttctccagctcttcgtttaaaactccttcaaatcgtatttcagttttgactggtatagcatacattggcaactgttacacgcagcggctcttttcctcataataccgtatttggtttaatttgtgtaagtcctgccttgcgaattggattttaagttcgagaagggcaagggcagaaccgttcttttgtctgttccacaccccgggtgcggggcctgggaagtagaggctttgcttactactccatactgcaaaccttagtgtacctgcctttgcagggcagctattctcatgctcttaataaccctgaataaacctcagaattgcatttccaagttttctgtagctaccacaagacggacctccagtaacacttgttctgtccactttaggacctggtcatcagctacgaagtcccagtagctaaccgtgagggtgagacccaactaggtctttgattataggcccacttgattctcttcctattcctgtagaaatactcttgaccaaattattctgaaacttaaagtttacgaaaaatcaagggctgtgattttg

SEQ ID NO: 257587 - DNA, 472 bp, Homo sapiens
ttttttttttaaacttggcagtctgaagagatttggcctctttgtagtggtttttgtgctaatattgatccaaatttagtttcagtgcctgttttcttctctttcctattcagtcaactatttaacctctcagtgattttagttgtcctgaaatttggtctttcttagcaaggacagtttgttttatgttctttaatagttagaggatgactgggttcattcccgtaataccagaactttgggaggcttgagataggaggatcatgagctcaggaattcaagaccagcctgtgcaatatactgagacccccttctctacaaaaaataaaaacattagctgggtgtggttgcatgggcctgtagtcccagctacttgggagtataaagtggaaggattgcttgaacacaggaggttaaggctgcagtgagctatgttgctgccactgcactccagcctgggtgaccctgtctt

SEQ ID NO: 257588 - DNA, 545 bp, Homo sapiens
caagtattttatttttaagacaagagtctccctcttgctgcccaggctggagtgcagtggcatgttcatgacttactgtagccttgacttcttgggaccaggtgattctcccttagtctcctgagtagctgggaccacaggcgcatgccaccatgtccagctaactttttctatttttcgtagtagagatggggttttgccctattgcccaggctggtctcgaactcctggactcaagcaatctgcctgccttggtcttccaaagttctgggattacaggcacgagccaccattcctgtcctttactgtatcttatagatttttaattcataaatatctggtagggttgattcccctagtacagttcttggaatgtattaaaaactgcattaaaaaaacaaaaactacttttggttgtttggatcatgtttctttgaatatggtttcattcagatagtggacctcataggtccagatgtcataagggttacccatatatacccagtgttaacatgttgagaaaaacggaaaaccccatagtggtc

SEQ ID NO: 257589 - DNA, 1224 bp, Homo sapiens
tgtttatactttccacaaagatacagaatgattaatgctgaaaaataaatatgaaaagccttacaatcaaattaggagagcgcttgataaaataagccctcttcttgtgagtaatttgaaagaataactgtttttcattacaatctcagctcccagcaggtcctacataaaccaagccagctgcggttcaagaaaaggtccaaaggaggacccactcgaggtgaggataaatcacaattgtgatcacagaccaggtttctatcttttttattccctttaataaattgggcttgacctgaaactccaagaaagttaatttataacagccaaaataattttttttacgtaacagcccacctttctttttcttttaaacttaaaccattatgacaaatggagatttattacataccataaacacatgtggcttgagcactggtatttagtctggaaactcagatggggcagtaagctgctgctgcaatcaggaaatgccatgtgacattcttgataaagacgaaacacacacacattccacagcacttattgtggccacagtggttttggccattgtgtgggcaccacagccccagtgcagggctgtgaagtgaaagatgattcagcagacgaaggaaagatactcctgtcagagccacagtcacttgagtcagaaaggtcttcacaagggccaccagagtctttaattagagatgagcaaagaaaaccagcttcccaagacatttctcccacataggcctggtcttctcctccttatccatgcctaaaataaccctacaagtggttcgcatgttttggtccagagatactcagtaatgctatacagaaccatcctgaaacatgaagttgggtgcactgatgaataaatagaatcttgggtgcactgatgaataaatagaatcttgggtgatccttcttctcccttcccttggccaggctgaaatgatctatttcttctcaactgatcattcttgtagtcctcactggcaacaagcacttggtgatttatcagctaagcagggttctctggaaggtcatattaactggtggttaaagacatgaactttggagccaatcctagctccaccactttcccaaaccatctaaacctaagtttttccatctgtaaaatgggaatattgaagtaccctatgtgtctgtggggaggattcagtgaaataatacatgtatatcacatagatttac

SEQ ID NO: 257590 - DNA, 377 bp, Homo sapiens
cagccaccctgccccttccctcctcccagagcccgggctcttgcagactcctccccaccagtgtccacggaacactatttgcaataaaggtgaatggttaaaaataaatgaatataataaaatagtggaatgcaatatatccaggtaacaaacctgctcaggtacactctgattctaaaataaaagttgaaaaaaaaagtgggagagacagtaaaaaaataaaatagtgtaaaaatgaaggagtgaaagtctgtgttatataacttccctgtatataatttttctagtaattcagatttgaatgccctcctcccagtatggaatttagtttgtatcgatacttttaaaaccaataaataactgataaactctaaatg

SEQ ID NO: 257591 - DNA, 392 bp, Homo sapiens
ggggaggaagatttgtagtttaagctaaacgggagagaaaagccactttgatatatacatatgaagcacagattgccagtgcttgctaaggtgtatcccacaaagtattggctgccttttcatatttacgcctgttcagcccaagcagtgagtgtggaaaagtgagtaataaacatcagagaattctgaataatggcagtaaatgtaaatacactaatttaacatcttcgacttatctcgaaaaccttgccaaaccagtaatgcacattctcctgaagatgggaagagagaatgcccacaactcttcctgtcactgactgaatgggccctcctgttactctgagagactcttctcagagaaaagcagacttcgcagggtgtggtggctcaca

SEQ ID NO: 257592 - DNA, 385 bp, Homo sapiens
ggacaacttctacattaaaagcaagttttccacaggagtaacgtatttaattctgaagagggatagccttataatgttcattttgatcatgaatcatgaatatgatagcatcctttgaacacttttgccattataaccatctaatatctggtaccattaaatatttgtggagagaattatattgtgtaaatattagcaaagaattccaaacataagagcctcctctttgcctttagttttaatcagtcttaatccattcttgctaaaacaagagtttccaaacccttagcaaaatattttcttttaaaaaattaaatcttggccgggcgcggtggctcacgcctgtaatcccagcactttgggaggctgaggcaggcggatcacc

SEQ ID NO: 257593 - DNA, 238 bp, Homo sapiens
gatcctagaagctggagaaggaggaacccttggccagaagccctggagcagctctgtttgttaattatttctgtagtaaccaagggaacattggtgagcaccccacagagtaaccacaggtcagcatcaaagtaagcaagtagctggctggcagtatttcacagcatctttgcttttcttcccaaatctgcagtttgagagaggcggcttgccctgggaactctgctggtagggcatc

SEQ ID NO: 257594 - DNA, 392 bp, Homo sapiens
aaagccttcagccagattgcacacctgactcagcatcagagagttcatactggagagagacctttcgaatgtattgaatgtggaaaggcctttagtaatggttcatttcttgctcagcatcagagaattcatacaggagagaaaccttatgtgtgtaatgtgtgtgggaaagcctttagccatcgtggatacctaattgtacatcagagaattcatactggagagagaccctacgaatgtaaggaatgtaggaaagccttcagccagtatgcacaccttgctcaacatcagagagttcatactggagaaaaaccttatgaatgtaaagtatgtaggaaagccttcagccaaattgcataccttgatcaacatcagagggttcatactggaga

SEQ ID NO: 257595 - DNA, 152 bp, Homo sapiens
tcttctgtgttaatttgaatcaaagcccaggcatcctcttattccatccataaatatttcagtatgtatccctggcagataagggcttaagaacgtaaaaccaccatacattatcacgtctaaaaaataataaaaactccttcaaatatcca

SEQ ID NO: 257596 - DNA, 425 bp, Homo sapiens
tgttaacatatatgtacagatggtcccgtaatatataaattactcacacatttttttcaacttcatgcaaacactaactcccctgctccccatattaaatgctgtgcatgcactgactgaaaagtatgcttccctgaacgacttcctaaaatacagtttagtcaaaagaaataagttctcctgggttcttacaagtgaatgtgtattttattctcaatccttatcatttaagggactagctatatacaggacaactctttgtgactttttttaaaaacttgataataggcactttctacaaagaggatttgaattcaaaagactaaaattcagtctttagtatccccctttcacaaatggacctgcctgagccacaatagcttattgaatcaactcagcagaagtccagcagtagaactgtgtgc

SEQ ID NO: 257597 - DNA, 670 bp, Homo sapiens
  misc_feature (58)..(58): n is a, c, g, or t
tgaggtatatggtttccacgagatgagtcgcgagtacaagcaacccactggagtgtgnacacattaactctatgcccagaagaacttcaaaaaatgttgtattagggcgcaccaagaggatgcaaaaagattcagaactgcggagctctacagagcagacggtcagtctcctcccaaaacaaatggcacaacagaaatggcggaggcagggcaaaaatactactgacaagattgaaagaagattgaaagacacataaaccaaaggcaatgtgtggcccttgctggatctttatttgtgcaaactcaatggtaaaattacattcctgagaccttttggggaaatccgaacattaattgaggtataaggtgatataaaggtattcataattttctttggtgtgataatggtaaagtgcttatttttcttttaaactttatcagttggagatacatggctggtaaatttacagtgaaattacataatgtctgaagtttactttaaaatacctcagagggggaaaaaagcatgcaaatgagtgtgtgtataagagctgggatacgtaaaacagaactggcaaatatcaacaacctgagctgaggcatgggtacaggagaaggctcattctgtatttttgtgcatgtttaaacatatccacaataaaaatttcct

SEQ ID NO: 257598 - DNA, 748 bp, Homo sapiens
tactactaaattcgcggccgcgtcgatgaacagtcatgaattatactatttcaaaacatgtgggatgcaggtaaagcaggacttaagggtaagtttattgacttaagtcttccaaaaaaagatgtaaatgaattaagttcaattcaaaagttagaaaatgaaacacagaaaagctggagggaaaaagaacagaaaaaatagaaataagttaataatgcagtcatcttttattaacaggtagctgagaagattggattgaactaaggcattattctgagggaggttggtctgtaatattcctctctttaatatccttggttctgtctcggtgctgtgctagcctgatagaagaattgggcagtcttgagccaggtatgatgctcgcctgcagtctcagctgcttgagagacagacagtaggattgtttgaagccaggcatttgagaccagcctaggcaacatagtaagacagaaaaggggaaaaaaaaaaaaaggtgtgctaatgtaaagagaaattaaaagtaggacttctgttgtcttaaatagtttctgcctcagtgagtaactactcaacttatgtagaaatggctcagtattttttcagcgcacactttgtgccagatgctgtgctaggtattgaggacacatagatgactacgatatgacccatactcctgtggcactcagtctgagggagcatataaatttgtaagtaaaaaattagaatcaggcaataaatgtcagtagac

SEQ ID NO: 257599 - DNA, 190 bp, Homo sapiens
cgtatcttcatatccaaagtgggaggtggagtagtatttttatctctgccagtatttctcaaagtgtggtcttctggtcacctgtgccatgaaacagtgtctgacagtggtattgcagttgtgggggtgggtaggaacagtgtaccctggtagggaggagtattttatcacttctatcaattctgtgtta

SEQ ID NO: 257600 - DNA, 305 bp, Homo sapiens
actctaagtttgcttcgtgataactaagcacactatttttgaatgtcattagaacctaagttctctggagagtataacatgccgattaagagcttagtatcaacactggaatattattcaggttttaaaaagaatgggatcctgccatttcctacaacacagattgacctggaggacattatgctaagtgaaataaggcagacacaaaaataaaaatattgcatgatatcatttacatgtggtatctaaggaagaaaagaggtcacatacacagcgaataaaacagtggttgccggggcagggaa

SEQ ID NO: 257601 - DNA, 458 bp, Homo sapiens
ctttaaaatatttggttaaactttgatcatggcagccttgacctccccagactcaggtgatcctcccacctcaccctccccagtggctgggaccacaggagtacgccatcacgcttggctaatttttgcatttttttgtagacatggagtttcatcatgttgcccaggccggtctcaaactcctgggctcaagtgctccacccaccttggcctaccaaagtgttgggattataggcatgagccactgtgcctagccaggttaaactttaaatatagcacttctctgcatgtcagtgaatgttcactatgaataatgattttttttaaaagacccagagagagagaaaaagagagagggaaagagagagagaatgaaaagagaggaattgggggcaacattaagtatattctgtcctcttgtctttgggtcacactcaagatacaacatcccaggagac

SEQ ID NO: 257602 - DNA, 656 bp, Homo sapiens
aaagacttttgcattatcacctaatttaatcctcaaaattgtcttctaatttagtttgagctaatttattttgactttacagatgaagaaactgagtctcagagaggtgacagaatgggttactttaaaatcaaatttctcaagtgtccaaacagccaatctgttctttctctaaatttctgacctcagtcacttagatattttaggggtggacgtagattttgagggggcggtagcagcaaggtgagaggactggtagtgagcagggctgtcgcttttcagccgtagttacctagctgacttatttatgagtattcaggcatacgttacacacataaaaagcagtgtgttcaaaggaagcctcatataccaaagtctggatttataagactcaaatgagtgattgttattccactgttcaaggctttttttttctcccttcttactctatcaaagtattcctcatagggtttcttaaaagagcaatctcagtctcccagcatgcttttaaaatgcaatttattgcccacattttattagcattccactgcttagtaatgcagtccatgtttaaaatggcaggtatccactcatagaattgtgccagtctgagatgtcattagcttggtacttccagttgtcttcatggttgtttt

SEQ ID NO: 257603 - DNA, 341 bp, Homo sapiens
caaactgttggggcaggtatgtttgcacaaaaacttatccattttacaaacataaaagcaaaaagtacaaatggataagggacaagttcctttatagacgtaagcccacaaatagccaggagtgggttttctttctttctggaggccaggatgtttgggacactctcgatttcacagaccaggctgtgcctgcctccagaactcacccacaactgccccagaagaccaccttcaaggctcctgaccaagacatgggccacactgggagatgcagcctcagtttcagagcaagcttcccagggatcctccctcctggggctcctggctccccgggaactggg

SEQ ID NO: 257604 - DNA, 479 bp, Homo sapiens
gctctctctacgtgtgccactgccagcccaccccaaggctcgggccacagtcctgcaggtctccccattttcacatgttgcccgtggcagctcccggagggcagtgccgggtggcagctgatcacataggcacaggaggcaggtggcctaagcaaggggctccactttggagttgctgccatccttctccaggtgttcatcgggcagctgtgctgggggcaccatgatggcccagtctctgctgctactctcgatatgccaacagaccaccgtggatctgctccagtaaatatttgctgactgactgactgacttaggttcttaaatgcctatggtccagccttatataaagagagagaaggctgggcgtggtggctcatgcctgtaatgccggcatattaggaggccaaggcaggaggatctcttgagaccaggagtttaagaccagcctggtcaatacagtgagacccgatctatac

SEQ ID NO: 257605 - DNA, 416 bp, Homo sapiens
ggtgcagcaaaccaccatggcacgtgtatacctaagtaaaaaacctgaacattctgcacgtgtaccccagaacttaaagtataataataaaaaaagttttatgtcttcatgatgatgttaacttaccataaattaaattatttatatatatatgcatttgaaaaattaggcataacatcaaattcatctatgtcaaactccttattttacatgttaaaatattttttaaaaatatttaattctcttattcatgaaaaataattacagtttctctccttgaatgcaatgcttcctgtatcttatcctggttaatttttaagtttcctaacgatcaccttccaaaatattcaatattctaacttctaatattaattaatggagtttgaaatttatctaaataaaacactgtaatataa

SEQ ID NO: 257606 - DNA, 324 bp, Homo sapiens
gaaagaagcaaccacattgatgagtagaatgaattgaaaattcagaaaatacaaagagcagagagaagaaaataaaaagcatatatagtcccatcacagactttcccagttaaaattttgccatatgccctttgagactttttcccatgtacatatctctatcttgtatttatttctgatttatcaattgaagcaactggaattgctcattttgcaggttaaacatgactaatgacaacttcagatggttcaacctaacacttctgaaaatgtctggggataacttataatagtaaaatatataaaacaggtcatttttttaaa

SEQ ID NO: 257607 - DNA, 855 bp, Homo sapiens
cagattcctgggtgcaaggtggcctcattagtgcccggagaccgccccatctccagggagcagatagacagacaagggggtgatcaggggcacagtgatccaaccctggcctctgaacgccgcagcggccattccttgggcccagcctggagacggcccccctgcagcaggctaatcttagacttgcctttgtctggcctgggtgtggacgcaagtgcctgtcaattccccgccacctcagagcactataaaccccagacccctgggagtgggtcacaattgacagcctcaaggttcctggctttttgaaccaccacagacatctcctttcccggctaccccaccctgagcgccagacaccatgaaccttccttccacaaaggtctcctgggccgccgtgacgctactgctgctgctgctgctgctgccgcccgcgctgttgtcgtccggggcggctgcacagcccctgcccgactgctgtcgtcaaaagacttgctcttgccgcctctacgagctgctgcacggcgcgggcaatcacgcggccggcatcctcacgctgggcaagcggaggtccgggcccccgggcctccagggtcggctgcagcgcctcctgcaggccagcggcaaccacgccgcgggcatcctgaccatgggccgccgcgcaggcgcagagccagcgccgcgcccctgcctcgggcgccgctgttccgccccggccgccgcctccgtcgcgcccggaggacagtccgggatctgagtcgttcttcgggccctgtcctggcccaggcctctgccctctgcccacccagcgtcagcccccagaaaaaaggcaataaagacgagtctccattcgtg

SEQ ID NO: 257608 - DNA, 521 bp, Homo sapiens
tgaagtgaatggagggtggcggtaggtatcaaaaacaaaaaatttcaggtctcctgggccgccgtgacgctactgctgctgctgctgctgctgccgcccgcgctgttgtcgtccggggcggctgcacagcccctgcccgactgctgtcgtcaaaagacttgctcttgccgcctctacgagctgctgcacggcgcgggcaatcacgcggccggcatcctcacgctgggcaagcggaggtccgggcccccgggcctccagggtcggctgcagcgcctcctgcaggccagcggcaaccacgccgcgggcatcctgaccatgggccgccgcgcaggcgcagagccagcgccgcgcccctgcctcgggcgccgctgttccgccccggccgccgcctccgtcgcgcccggaggacagtccgggatctgagtcgttcttcgggccctgtcctggcccaggcctctgccctctgcccacccagcgtcagcccccagaaaaaaggcaataaagacgagtctccattcgtg

SEQ ID NO: 257609 - DNA, 423 bp, Homo sapiens
ctgcagctgcctgaaggagccatctcatccacagctcttccttgagcagccatggccagctccaggcgaggcctcctgctcctgctgctgctgactgcccaccttggaccctcagaggctcagcactggtcccatggctggtaccctggaggaaagcgagccctcagctcagcccaggatccccagaatgcccttaggcccccaggaagggccctggacactgcagcaggcagcccagtccagactgcccatggcctcccaagtgatgccctggctcccctggacgacagcatgccctgggagggcaggaccacggcccagtggtcccttcacaggaagcgacacctggcacggacactgctgaccgcagcccgagagccccgccccgccccgccatcctccaataaagtgtgaggttctccg

SEQ ID NO: 257610 - DNA, 399 bp, Homo sapiens
ctgcagctgcctgaaggagccatctcatccacagctcttccttgagcagccatggccagctccaggcgaggcctcctgctcctgctgctgctgactgcccaccttggaccctcagaggctcagcactggtcccatggctggtaccctggaggaaagcgagccctcagctcagcccaggatccccagaatgcccttaggcccccaggcagcccagtccagactgcccatggcctcccaagtgatgccctggctcccctggacgacagcatgccctgggagggcaggaccacggcccagtggtcccttcacaggaagcgacacctggcacggacactgctgaccgcagcccgagagccccgccccgccccgccatcctccaataaagtgtgaggttctccg

SEQ ID NO: 257611 - DNA, 542 bp, Homo sapiens
agtgaggtggcctggtgcagccccactggagggtgtttttaagttcttgcagtgacaagttgtcacattttctttttgcttcatccagatgcatgaatcaaagcaactgaagtctgaaagggaatgaaatgccatgagccagtatctgtaacctgcgggtgacaactcgagagcaacaagtgactgggtttaagatgatctccttttaaaggcgtctttaaagcaaaaggaagcatgtgtgttagggatccacgcgcatgtgatgaaccacatagagcagtgaagtggtgcaaatggaaaattcagtagccagtacatggggcgaggaggtagtgagatggcacgagggaacagcacatgcgtgaatgcaaaggcgtacgccacaacacccggctcatttttgtattttttgtagagacagagtttcaccaggttgtgcaggctggtctctagttcctgggttcaagcagttctcctgtcccagcctcccaaaatgctgagatggcaaggtgtgagtcaccgttcctgaccatcatctctca

SEQ ID NO: 257612 - DNA, 691 bp, Homo sapiens
atggctactctgatctacgttgataaggaaattggagaaccaggcacccgtgtggctgccaaggatgtgctgaagctggagtctagaccttcaatcaaagcattagatgggatatctcaagttttaacaccacgttttggcaaaacatacgatgctccatcagccttacctaaagctaccagaaaggctttgggcactgtcaacagagctacagaaaagtcagtaaagaccaatggacccagaaaacaaaaacagccaagcttttctgccaaaaagatgaccgagaagactgttaaaacaaaaagttctgttcctgcctcagatgacgcctatccagaaatagaaaaattctttcccttcaatcttctagactttgagagttttgacctgcctgaagagcgccagattgcacacctccccttgagtggagtgcctctcatgatccttgatgaggagggagagcttgaaaagctgtttcagctgggccccccttcacctgtgaaaatgccctctccaccatgggaatgcaatctgtttgcagtctccttcaagcattctgtcgaccctggatgttgaattgccagctgtttgctatgacatagatatttaaatttcttagtgctttggagtttgtgtgtacttgtattaataaagcattatttgtttaacaacataataaatacataaatat

SEQ ID NO: 257613 - DNA, 229 bp, Homo sapiens
acccgttcagaacagtgtaaagaaagagtaagtgggtctaaagaccacaaggtgttgactttcctttttcccagcagacacacacctgtgcaaaataatttgggtgagcttctttggaggacggtggcagttctttgttcaaaggaactgcacattttgaagccagattaattgatttctgcacgctcttggcaaagagccctttaattgatgatttcacagcaattag

SEQ ID NO: 257614 - DNA, 352 bp, Homo sapiens
ttatttttgaagatgagaatagttttgtgacccacctgggtgggaggggatgagaagaattataacctttttaccttaaaactttcctgataaggcactaaaccactgggctggtctacactggtccaaaagacatttatttccttccttccttccttccttccttccttccttccttccttccttccttccttccttgctttctgcctttcttccctcctttccttttctttcctttccttcctttcctttcctttcctttcctttcctttcctttcctttcctttcctttcctttcctttcctttcctttcctttcctttcctttcctttctcttttcttttctttcatc

SEQ ID NO: 257615 - DNA, 505 bp, Homo sapiens
tgaaaactgaaaagatgcatatgattagtcatcagaaagatgtttgacttctaagttttttccaacagcaggtatggctgcatggaaaatgcatacatccattgttgcaaggcctttatttccttatcaccatcatcaagcagtattaatgaagaagccaattgtgcatgacatagtgcaggtctctgtatgtagttatggaaaacgcttccacagttaaattgagtatggatatgtaaagtgattaaccaagacttgacagctcacacaattctttaattgcagcaagcatctcaagtaaatacataacttttaagaaaatccagaactataaagtcttaatttttgaaacaaatcatgatctttcacgttacaaacagatctttctttctaaaaagatgattcacaatcttttatgctggaacatcaaacatagattttactttacttctttttaaaataattggtttgttaacagttaggaaagccatacgtgttatttgtt

SEQ ID NO: 257616 - DNA, 1889 bp, Homo sapiens
  misc_feature (1)..(2): n is a, c, g, or t
  misc_feature (6)..(7): n is a, c, g, or t
  misc_feature (9)..(9): n is a, c, g, or t
  misc_feature (1843)..(1843): n is a, c, g, or t
nnagcnncngtaaggatagcatcaactggcaaacggagaaggaggagaacagagtggagaggaaccctgttaggagaaattgagcggcattccatctggtaggcaagtttgcatttctcctttttgggatctgcccaggaatgttgtcaagtgtaatggctcccctgtgggcctgcatcctggtggctgcaggaattctagccacagatacacatcatccccaggattctgctctgtatcatctcagcaagcagctattacagaaatatcataaagaagtgagacctgtttacaactggaccaaggccaccacagtctacctggacctgttcgtccatgctatattggatgtggatgcagagaatcaaatattaaagacaagtgtatggtaccaagaggtctggaatgatgaatttttatcctggaactccagcatgtttgatgagattagagagatctccctacctctaagtgccatctgggcccccgatatcatcatcaatgagtttgtggacattgaaagataccctgaccttccctatgtttatgtgaactcatctgggaccattgagaactataagcccatccaggtggtctctgcgtgcagtttagagacatatgcttttccatttgatgtccagaattgcagcctgaccttcaagagcattctgcatacagtggaagacgtagacctggcctttctgaggagcccagaagacattcagcatgacaaaaaggcgtttttgaatgacagtgagtgggaacttctatctgtgtcctccacatacagcatcctgcagagcagcgctggaggatttgcacagattcagtttaatgtggtgatgcgcaggcaccccctggtctatgtcgtgagtctgctgattcctagcatctttctcatgctggtggacctggggagcttctacctgccacccaactgccgagccaggattgtgttcaagaccagtgtgctggtgggctacaccgtcttcagggtcaacatgtccaaccaggtgccacggagtgtagggagcacccctctgattgggcacttcttcaccatctgcatggccttcttggttctcagcttagctaagtccatcgtgttggtcaaattcctccatgatgagcagcgtggtggacaggagcagcccttcttgtgccttcgaggggacaccgatgctgacaggcctagagtggaacccagggcccaacgtgctgtggtaacagagtcctcgctgtatggagagcacctggcccagccaggaaccctgaaggaagtctggtcgcagcttcaatctatcagcaactacctccaaactcaggaccagacagaccaacaggaggcagagtggctggtcctcctgtcccgctttgaccgactgctcttccaaagctaccttttcatgctggggatctacaccatcactctgtgctccctctgggcactgtggggcggcgtgtgaagactgaagtgttcttcagtaattgtgctggcacttaggagagagaggagggggaataatagtgggttaaaaagctttctgggtcgggtgtggtggttcttgcctatagtcccagtgctttgggaggccatagcaggaggattgcttgagcccaggagttcgagaccagccagagcaacatagtgagaccacatctctaccagtaaataaataaataaataaataaataaataaataaataaatagctgggcatagtggctcatgcctgtactctcagctacttgggaggttgaggtgggaggattgcttgagcccaggatttcaaggctgcagtgagccatgattgcaccactgcaccccagcctgggtgacagancaagaccctgtctcaaaaaaaataaaataaaaggctttctgccttc

SEQ ID NO: 257617 - DNA, 1328 bp, Homo sapiens
  misc_feature (41)..(41): n is a, c, g, or t
  misc_feature (1282)..(1282): n is a, c, g, or t
cactcgttatgcaagtgtcaatattaaagacaagtgtatgnacaagaggtctggaatgatgaatttttatcctggaactccagcatgtttgatgagattagagagatctccctacctctaagtgccatctgggcccccgatatcatcatcaatgagtttgtggacattgaaagataccctgaccttccctatgtttatgtgaactcatctgggaccattgagaactataagcccatccaggtggtctctgcgtgcagtttagagacatatgcttttccatttgatgtccagaattgcagcctgaccttcaagagcattctgcatacagtggaagacgtagacctggcctttctgaggagcccagaagacattcagcatgacaaaaaggcgtttttgaatgacagtgagtgggaacttctatctgtgtcctccacatacagcatcctgcagagcagcgctggaggatttgcacagattcagtttaatggcacttcttcaccatctgcatggccttcttggttctcagcttagctaagtccatcgtgttggtcaaattcctccatgatgagcagcgtggtggacaggagcagcccttcttgtgccttcgaggggacaccgatgctgacaggcctagagtggaacccagggcccaacgtgctgtggtaacagagtcctcgctgtatggagagcacctggcccagccaggaaccctgaaggaagtctggtcgcagcttcaatctatcagcaactacctccaaactcaggaccagacagaccaacaggaggcagagtggctggtcctcctgtcccgctttgaccgactgctcttccaaagctaccttttcatgctggggatctacaccatcactctgtgctccctctgggcactgtggggcggcgtgtgaagactgaagtgttcttcagtaattgtgctggcacttaggagagagaggagggggaataatagtgggttaaaaagctttctgggtcgggtgtggtggttcttgcctatagtcccagtgctttgggaggccatagcaggaggattgcttgagcccaggagttcgagaccagccagagcaacatagtgagaccacatctctaccagtaaataaataaataaataaataaataaataaataaataaatagctgggcatagtggctcatgcctgtactctcagctacttgggaggttgaggtgggaggattgcttgagcccaggatttcaaggctgcagtgagccatgattgcaccactgcaccccagcctgggtgacagancaagaccctgtctcaaaaaaaataaaataaaaggctttctgccttc

SEQ ID NO: 257618 - DNA, 695 bp, Homo sapiens
agttcaacaagttcacaaaagacaagatgaacatacaaaaatctattatttttatatatattagcaatgaacccatgggcatcgaggtcaacatatatcatttacagtgattcaaaaataaaatacttgtgtgacaaaacacagagtaattaaatgttgtcaactacacaacactgaagaatgaaattaaaaactaaataaattatgaatatatatatatacatatgtaatgttattggattagaaggctcaacatagcaaaaatgtcaattttccaaaaatgatgtagagatttaacaccatttttatcacaatctcaggaattttttaaaataaatattcgagtttattttaaaatttatacggaaagtctaaataactaaaatgactaaacacttttgaagaaacaagaaggtctaaaataaaaaatacaaacaacctcaaacaatgatgcagataaatttatcactcacactttgctacttggaatgtaaaatggtgcagccacttagtaaaagtgattttcattttctttaagaaactaatcatacaactaccacatattccaagaatttcattcacgggcatttatcctacccaaaacaaaaacttatgttccctcaaaatacctgtacacagatgtttatacagctttctttgtaacagctaaaaaatggaaagatgtccttcaaggg

SEQ ID NO: 257619 - DNA, 455 bp, Homo sapiens
gtggacttcttgctgcaatattcaaaagtaattacattctgggggggaaaaaagccttttcctacccaataagtctttattataatcaaatccttatgggagtaaacttcaattaattgatgcatgaaaaataccagagacaaagtgaaccctttaatttctctaaatttggctatgcataaagaaagctgcacctaccatgcctgtcataaactgtcaatggccagtcagactgaacctgctgccctcacattgcccctgttgtgagcaagtatctccatgctctagtgaactcttactgagatagacctactatttggagctttgatgtccatcaagggttttactcccatctctatattaaagcatcatgtttttaggttttggataaacatccaatgtatgtcttttatgagtaaaacagatcacaagaaattatgatatgtgtttggttt

SEQ ID NO: 257620 - DNA, 689 bp, Homo sapiens
gaataagtcttggagacttcttgtgagtccagtaatacaatatgaagtgttttgtgtctagttcctagttgtttggtagcagaagggagctttcagtgtatctaaacaggcatattgcagaaaattgggttttacatgtatgtgtctccccttcctagactgtgagctctttgagaaacaaaatatgcctatctccagtacctagcatagtgcctggatagtaatagaccctcaaaaaatatttgttaaaagaatatatgatataataatgctttcctccctcaaaacactaccagagtacccttcgcatattcatagcatatactccttagtctgattgtttttctttgatatttattttctgaatttctacttttatgagagaaattgagggccaatcattggagtttgtttcaggtccaaactacaattccttgtctatcacccagcttcccaccccttggagtagtggttgatggttattactatgaagtttggaggataagtttacttcatgataaagttcagtctgcctaggtacttcagaatccttgggaatgtaattggtttatagattttaaatatctgtattccacacatacatcactgttggtatcctgagtctcctgaagttttctggttcagacactctgatctgtcctgcattccctgtttcccagtaaaataag

SEQ ID NO: 257621 - DNA, 356 bp, Homo sapiens
acacaggacaaagagaatctatagaaaaagggaacacataccttccttcacagggtcctgtgattttctttttcctctaaaaatttagtttttcattatttaagagtgatgaggccaggcgcggtggctcacgcctgtaatcccagcactttgggaggctgaggtgggcggatcatgaggtcaggagttcgagaccagcacggtgaaacctcatctgtactaaaaatacaaaatttaacctgctgtggtggtgcgcggctgcaatcccagctgctcaggaggctgaggcaggagaatcactcgaacccaggaggcggaggttgcagtgacctgagatggcgccatggcactccagc

SEQ ID NO: 257622 - DNA, 3457 bp, Homo sapiens
actgaaggcttccgggcatgcgcacagcgttgtgcaaatgaatgccttccactgaaccgaggcactgttatagaagaatggaagaagatacagattatagaatcaggtttagttctttgtgtttctttaatgatcacgttggatttcatggcactataaaaagctcaccaagtgactttattgttattgaaattgatgaacagggacagttagttaataagaccatcgatgagcctattttcaagattagtgaaatacaacttgagccaaataattttcccaaaaaaccaaaactagatcttcaaaatctgtccttagaagatggaagaaaccaagaagttcatactttgattaagtacactgatggtgaccaaaatcatcagtctggttcagaaaaggaagatactatcgttgatggaacttccaaatgtgaagaaaaagctgatgttttaagctcctttttggatgaaaaaactcatgagttactgaataattttgcctgtgatgtaagagagaagtggctttctaaaacagagctaattggactacctcctgaattctcaataggcagaatccttgacaaaaaccagagggctagtttacacagtgccattaggcagaaatttccatttttagtaactgtaggaaaaaacagtgaaattgttgtaaaaccaaatcttgaatataaagaactttgtcatttggtatctgaagaggaagcatttgacttttttaaatatttggatgcaaagaaagaaaattccaaatttacctttaaacctgatacaaacaaagaccacagaaaagctgtccaccattttgtcaacaaaaagtttggaaaccttgtggaaaccaaatctttttctaaaatgaattgcagtgctggtaatccgaatgtggtggtaacagtaagatttcgggaaaaagcacacaaacgtgggaaaaggcctctttctgaatgccaagaaggaaaagttatatatacagcttttaccctacgaaaggaaaacctggaaatgtttgaagcgattggttttttagctatcaaacttggtgttattccttcggattttagttatgcaggccttaaagacaagaaagccatcacctatcaagcaatggttgttagaaaagtgactccagagaggttgaaaaatattgaaaaagaaattgaaaagaaaagaatgaatgtctttaatattcggtctgtagatgattccctgagacttggtcagctcaaaggaaatcactttgatattgtcattagaaatttaaaaaaacaaataaatgattctgcaaacctgagggagagaattatggaagcaatagaaaatgttaagaaaaaaggctttgtgaattactatggaccacagagatttgggaagggaaggaaagttcacacagaccaaattggactagctttgctgaagaatgaaatgatgaaagccataaaattgtttcttacaccagaagacttggatgatcctgtaaatagagcaaagaagtattttcttcaaactgaggatgctaaaggcacactttcattgatgcctgaattcaaagtgcgtgagagagcattgttggaggcattgcaccgctttggcatgaccgaggaaggttgtatccaggcatggttctctttaccccattccatgcgcatattctatgttcacgcatataccagcaaaatttggaatgaggcagtatcttacagacttgaaacctatggagcaagagtagtgcagggtgatttggtctgtttggatgaagacattgatgacgagaatttcccaaatagtaaaattcacctggtaactgaagaggagggatcagctaatatgtatgcaatacatcaggtggttcttccagtacttggatacaatattcagtacccgaagaacaaagtagggcagtggtaccatgacatacttagcagagatggactacagacatgtaggtttaaagtacctactctgaaactgaatataccaggttgctatagacagattttgaaacatccctgtaatctctcataccaactaatggaagatcatgacattgatgtcaaaacgaaaggttcccacattgatgaaacagctttgtctcttttgatctcttttgatcttgatgcttcatgctatgctaccgtttgtctgaaggaaataatgaagcatgacgtttaaaactgatacccttggtataaccatatatatgtcaccctttcctgtttttgaaattattgatcagaacaatatacaagggaaatgccatacctctgtttgtgatagataccccagagtagttattacctctttgtgagataagtaatctttgatgaagattgaaatacaatttctcatccaatttttatatcttggcatacgctgaccctcttgaccatttgtaattttttcatattatctaaaacaggtgttagagtcagacagattcattcttagattctagctctgacacttactagtgattttgagtatgttgttgatttttttgtgtgtggttactgatagaatcaagacaattacaacttcataaatgacaaataataggattatctccacattttctgttgctggaggaacaaaacattgtgcccatttgaaaattttaatttttgttggtttaactatcccacattataaatcatccttcaccattttatatcagttaaatatgggtgtgttggggaggaatgactggcatgtagacatgtattgatttaggaagatctgagcatttctttcattgttggtaagatataatgatgaaatttaaaaagcagtatggagcattatatatcagtaatgtgatatatatacttaagccagtttaaccattttgggaaatgttagcattaggaaataaaatccaaaagaaggaagagaagctatatgcaatgcaaaatttgcttattgcaatattttcatatacagacactaaaaacagttttcaaagtccagcattacgtaactaaagtaagtaaaatgatgtgtatcaacttgatggtaaaatatgtagttatttaaaaaagcaatgaacaatttagtttcatgagaaaatgttgccccctaaaagtagaacacatatgttacaactgcaataatactctgaattcatctttcacaaataagagacatgttagcatagtgattaaaagcacagatattggagacaaactaacccagtttgaaccctggcactgccacgtatagcactgcagccttgggaaagttatttaaactcatgggcttcagtttcaacatctgtaaaatgggcatgttaacattgcctacctcataggattactgtgagaattttctaagttaatatatgtaaagcaactttaaaaagtgcctggcacttagttattgttaagtaagtgtctgcagatgcaagtttggaagagaaaagcaaataaatgaaaatcccttcctgttaa

SEQ ID NO: 257623 - DNA, 890 bp, Homo sapiens
aagcagtggtatcaatgcagagtgcccattacggccggggtgtttgttttcttgttctggaagaaataagaaaatttaaaattgtccaccaaaataccggtaatgtgactgagcagtagaggttactctttgtgttatagaaagtacatgctttattttatacagattaagtctttatcagctaattaagtgtacctaaacttcttaaacagtggattgtttaataatatctgatttgagttggttaccttagttattgtgagtccttgattttagttagctattttctttggcagcataaaaatatcatagcatattatttaaagcatgttttaggctgattgtggtgtttatattctgagactatttttacaaatccaggtcgcagtcataaaagtacattaaaaatatgatcatgtatctttttgaaggctattttcatattttttccctcttttctttcacaggtggttcttccagtacttggatacaatattcagtacccgaagaacaaagtagggcagtggtaccatgacatacttagcagagatggactacagacatgtaggtttaaagtacctactctgaaactgaatataccaggttgctatagacagattttgaaacatccctgtaatctctcataccaactaatggaagatcatgacattgatgtcaaaacgaaaggttcccacattgatgaaacagctttgtctcttttgatctcttttgatcttgatgcttcatgctatgctaccgtttgtctgaaggaaataatgaagcatgacgtttaaaactgatacccttggtataaccatatatatgtcactctttgaaggaaagggggctaaaatgtcttaagcaccttccatgtgttaggaacttcataa

SEQ ID NO: 257624 - DNA, 3553 bp, Homo sapiens
actgaaggcttccgggcatgcgcacagcgttgtgcaaatgaatgccttccactgaaccgaggcactgttatagaagaatggaagaagatacagattatagaatcaggtttagttctttgtgtttctttaatgatcacgttggatttcatggcactataaaaagctcaccaagtgactttattgttattgaaattgatgaacagggacagttagttaataagaccatcgatgagcctattttcaagattagtgaaatacaacttgagccaaataattttcccaaaaaaccaaaactagatcttcaaaatctgtccttagaagatggaagaaaccaagaagttcatactttgattaagtacactgatggtgaccaaaatcatcagtctggttcagaaaaggaagatactatcgttgatggaacttccaaatgtgaagaaaaagctgatgttttaagctcctttttggatgaaaaaactcatgagttactgaataattttgcctgtgatgtaagagagaagtggctttctaaaacagagctaattggactacctcctgaattctcaataggcagaatccttgacaaaaaccagagggctagtttacacagtgccattaggcagaaatttccatttttagtaactgtaggaaaaaacagtgaaattgttgtaaaaccaaatcttgaatataaagaactttgtcatttggtatctgaagaggaagcatttgacttttttaaatatttggatgcaaagaaagaaaattccaaatttacctttaaacctgatacaaacaaagaccacagaaaagctgtccaccattttgtcaacaaaaagtttggaaaccttgtggaaaccaaatctttttctaaaatgaattgcagtgctggtaatccgaatgtggtggtaacagtaagatttcgggaaaaagcacacaaacgtgggaaaaggcctctttctgaatgccaagaaggaaaagttatatatacagcttttaccctacgaaaggaaaacctggaaatgtttgaagcgattggttttttagctatcaaacttggtgttattccttcggattttagttatgcaggccttaaagacaagaaagccatcacctatcaagcaatggttgttagaaaagtgactccagagaggttgaaaaatattgaaaaagaaattgaaaagaaaagaatgaatgtctttaatattcggtctgtagatgattccctgagacttggtcagctcaaaggaaatcactttgatattgtcattagaaatttaaaaaaacaaataaatgattctgcaaacctgagggagagaattatggaagcaatagaaaatgttaagaaaaaaggctttgtgaattactatggaccacagagatttgggaagggaaggaaagttcacacagaccaaattggactagctttgctgaagaatgaaatgatgaaagccataaaattgtttcttacaccagaagacttggatgatcctgtaaatagagcaaagaagtattttcttcaaactgaggatgctaaaggcacactttcattgatgcctgaattcaaagtgcgtgagagagcattgttggaggcattgcaccgctttggcatgaccgaggaaggttgtatccaggcatggttctctttaccccattccatgcgcatattctatgttcacgcatataccagcaaaatttggaatgaggcagtatcttacagacttgaaacctatggagcaagagtagtgcagggtgatttggtctgtttggatgaagacattgatgacgagaatttcccaaatagtaaaattcacctggtaactgaagaggagggatcagctaatatgtatgcaatacatcaggtggttcttccagtacttggatacaatattcagtacccgaagaacaaagtagggcagtggtaccatgacatacttagcagagatggactacagacatgtaggtttaaagtacctactctgaaactgaatataccaggttgctatagacagattttgaaacatccctgtaatctctcataccaactaatggaagatcatgacattgatgtcaaaacgaaaggttcccacattgatgaaacagctttgtctcttttgatctcttttgatcttgatgcttcatgctatgctaccgtttgtctgaaggaaataatgaagcatgacgtttaaaactgatacccttggtataaccatatatatgtcaccctttcctgtttttgaaattattgatcagaacaatatacaagggaaatgccatacctctgtttgtgatagataccccagagtagttattacctctttgtgagataagtaatctttgatgaagattgaaatacaatttctcatccaatttttatatcttggcatacgctgaccctcttgaccatttgtaattttttcatattatctaaaacaggtgttagagtcagacagattcattcttagattctagctctgacacttactagtgattttgagtatgttgttgatttttttgtgtgtggttactgatagaatcaagacaattacaacttcataaatgacaaataataggattatctccacattttctgttgctggaggaacaaaacattgtgcccatttgaaaattttaatttttgttggtttaactatcccacattataaatcatccttcaccattttatatcagttaaatatgggtgtgttggggaggaatgactggcatgtagacatgtattgatttaggaagatctgagcatttctttcattgttggtaagatataatgatgaaatttaaaaagcagtatggagcattatatatcagtaatgtgatatatatacttaagccagtttaaccattttgggaaatgttagcattaggaaataaaatccaaaagaaggaagagaagctatatgcaatgcaaaatttgcttattgcaatattttcatatacagacactaaaaacagttttcaaagtccagcattacgtaactaaagtaagtaaaatgatgtgtatcaacttgatggtaaaatatgtagttatttaaaaaagcaatgaacaatttagtttcatgagaaaatgttgccccctaaaagtagaacacatatgttacaactgcaataatactctgaattcatctttcacaaataagagacatgttagcatagtgattaaaagcacagatattggagacaaactaacccagtttgaaccctggcactgccacgtatagcactgcagccttgggaaagttatttaaactcatgggcttcagtttcaacatctgtaaaatgggcatgttaacattgcctacctcataggattactgtgagaattttctaagttaatatatgtaaagcaactttaaaaagtgcctggcacttagttattgttaagtaagtgtctgcagatgcaagtttggaagagaaaagcaaataaatgaaaatcccttcctgttaagatgatggggtatttggattttttttaatactaaaaagttttttttgttatatgttttggcaataaataattctcaatacacaaaattggatattg

SEQ ID NO: 257625 - DNA, 3586 bp, Homo sapiens
actgaaggcttccgggcatgcgcacagcgttgtgcaaatgaatgccttccactgaaccgaggtagacggggtcgagtttcttgcgcgatggtgggcactgttatagaagaatggaagaagatacagattatagaatcaggtttagttctttgtgtttctttaatgatcacgttggatttcatggcactataaaaagctcaccaagtgactttattgttattgaaattgatgaacagggacagttagttaataagaccatcgatgagcctattttcaagattagtgaaatacaacttgagccaaataattttcccaaaaaaccaaaactagatcttcaaaatctgtccttagaagatggaagaaaccaagaagttcatactttgattaagtacactgatggtgaccaaaatcatcagtctggttcagaaaaggaagatactatcgttgatggaacttccaaatgtgaagaaaaagctgatgttttaagctcctttttggatgaaaaaactcatgagttactgaataattttgcctgtgatgtaagagagaagtggctttctaaaacagagctaattggactacctcctgaattctcaataggcagaatccttgacaaaaaccagagggctagtttacacagtgccattaggcagaaatttccatttttagtaactgtaggaaaaaacagtgaaattgttgtaaaaccaaatcttgaatataaagaactttgtcatttggtatctgaagaggaagcatttgacttttttaaatatttggatgcaaagaaagaaaattccaaatttacctttaaacctgatacaaacaaagaccacagaaaagctgtccaccattttgtcaacaaaaagtttggaaaccttgtggaaaccaaatctttttctaaaatgaattgcagtgctggtaatccgaatgtggtggtaacagtaagatttcgggaaaaagcacacaaacgtgggaaaaggcctctttctgaatgccaagaaggaaaagttatatatacagcttttaccctacgaaaggaaaacctggaaatgtttgaagcgattggttttttagctatcaaacttggtgttattccttcggattttagttatgcaggccttaaagacaagaaagccatcacctatcaagcaatggttgttagaaaagtgactccagagaggttgaaaaatattgaaaaagaaattgaaaagaaaagaatgaatgtctttaatattcggtctgtagatgattccctgagacttggtcagctcaaaggaaatcactttgatattgtcattagaaatttaaaaaaacaaataaatgattctgcaaacctgagggagagaattatggaagcaatagaaaatgttaagaaaaaaggctttgtgaattactatggaccacagagatttgggaagggaaggaaagttcacacagaccaaattggactagctttgctgaagaatgaaatgatgaaagccataaaattgtttcttacaccagaagacttggatgatcctgtaaatagagcaaagaagtattttcttcaaactgaggatgctaaaggcacactttcattgatgcctgaattcaaagtgcgtgagagagcattgttggaggcattgcaccgctttggcatgaccgaggaaggttgtatccaggcatggttctctttaccccattccatgcgcatattctatgttcacgcatataccagcaaaatttggaatgaggcagtatcttacagacttgaaacctatggagcaagagtagtgcagggtgatttggtctgtttggatgaagacattgatgacgagaatttcccaaatagtaaaattcacctggtaactgaagaggagggatcagctaatatgtatgcaatacatcaggtggttcttccagtacttggatacaatattcagtacccgaagaacaaagtagggcagtggtaccatgacatacttagcagagatggactacagacatgtaggtttaaagtacctactctgaaactgaatataccaggttgctatagacagattttgaaacatccctgtaatctctcataccaactaatggaagatcatgacattgatgtcaaaacgaaaggttcccacattgatgaaacagctttgtctcttttgatctcttttgatcttgatgcttcatgctatgctaccgtttgtctgaaggaaataatgaagcatgacgtttaaaactgatacccttggtataaccatatatatgtcaccctttcctgtttttgaaattattgatcagaacaatatacaagggaaatgccatacctctgtttgtgatagataccccagagtagttattacctctttgtgagataagtaatctttgatgaagattgaaatacaatttctcatccaatttttatatcttggcatacgctgaccctcttgaccatttgtaattttttcatattatctaaaacaggtgttagagtcagacagattcattcttagattctagctctgacacttactagtgattttgagtatgttgttgatttttttgtgtgtggttactgatagaatcaagacaattacaacttcataaatgacaaataataggattatctccacattttctgttgctggaggaacaaaacattgtgcccatttgaaaattttaatttttgttggtttaactatcccacattataaatcatccttcaccattttatatcagttaaatatgggtgtgttggggaggaatgactggcatgtagacatgtattgatttaggaagatctgagcatttctttcattgttggtaagatataatgatgaaatttaaaaagcagtatggagcattatatatcagtaatgtgatatatatacttaagccagtttaaccattttgggaaatgttagcattaggaaataaaatccaaaagaaggaagagaagctatatgcaatgcaaaatttgcttattgcaatattttcatatacagacactaaaaacagttttcaaagtccagcattacgtaactaaagtaagtaaaatgatgtgtatcaacttgatggtaaaatatgtagttatttaaaaaagcaatgaacaatttagtttcatgagaaaatgttgccccctaaaagtagaacacatatgttacaactgcaataatactctgaattcatctttcacaaataagagacatgttagcatagtgattaaaagcacagatattggagacaaactaacccagtttgaaccctggcactgccacgtatagcactgcagccttgggaaagttatttaaactcatgggcttcagtttcaacatctgtaaaatgggcatgttaacattgcctacctcataggattactgtgagaattttctaagttaatatatgtaaagcaactttaaaaagtgcctggcacttagttattgttaagtaagtgtctgcagatgcaagtttggaagagaaaagcaaataaatgaaaatcccttcctgttaagatgatggggtatttggattttttttaatactaaaaagttttttttgttatatgttttggcaataaataattctcaatacacaaaattggatattg

SEQ ID NO: 257626 - DNA, 3908 bp, Homo sapiens
actgaaggcttccgggcatgcgcacagcgttgtgcaaatgaatgccttccactgaaccgaggtagacggggtcgagtttcttgcgcgatggtgggtgacgtggactagtgtcgtgcctttggacaggcagagtaagaggagggagaagaaacaggtagagctgctggccttgtcggggacacctttggacgtgctggagggcaacgacgccctagttttctgtgaagttaagtagcttctgcaggactgggttcagtatttctagtaccttctcaggatccctcctccgccaacgaattcctcaaccacgggccaagcaaactactcccccgcccactgtcagcagcagtctctgttgaatgggaatactgcaccttcaggcttaacgccacgtgggctcctttgctgtcctccaggcactgttatagaagaatggaagaagatacagattatagaatcaggtttagttctttgtgtttctttaatgatcacgttggatttcatggcactataaaaagctcaccaagtgactttattgttattgaaattgatgaacagggacagttagttaataagaccatcgatgagcctattttcaagattagtgaaatacaacttgagccaaataattttcccaaaaaaccaaaactagatcttcaaaatctgtccttagaagatggaagaaaccaagaagttcatactttgattaagtacactgatggtgaccaaaatcatcagtctggttcagaaaaggaagatactatcgttgatggaacttccaaatgtgaagaaaaagctgatgttttaagctcctttttggatgaaaaaactcatgagttactgaataattttgcctgtgatgtaagagagaagtggctttctaaaacagagctaattggactacctcctgaattctcaataggcagaatccttgacaaaaaccagagggctagtttacacagtgccattaggcagaaatttccatttttagtaactgtaggaaaaaacagtgaaattgttgtaaaaccaaatcttgaatataaagaactttgtcatttggtatctgaagaggaagcatttgacttttttaaatatttggatgcaaagaaagaaaattccaaatttacctttaaacctgatacaaacaaagaccacagaaaagctgtccaccattttgtcaacaaaaagtttggaaaccttgtggaaaccaaatctttttctaaaatgaattgcagtgctggtaatccgaatgtggtggtaacagtaagatttcgggaaaaagcacacaaacgtgggaaaaggcctctttctgaatgccaagaaggaaaagttatatatacagcttttaccctacgaaaggaaaacctggaaatgtttgaagcgattggttttttagctatcaaacttggtgttattccttcggattttagttatgcaggccttaaagacaagaaagccatcacctatcaagcaatggttgttagaaaagtgactccagagaggttgaaaaatattgaaaaagaaattgaaaagaaaagaatgaatgtctttaatattcggtctgtagatgattccctgagacttggtcagctcaaaggaaatcactttgatattgtcattagaaatttaaaaaaacaaataaatgattctgcaaacctgagggagagaattatggaagcaatagaaaatgttaagaaaaaaggctttgtgaattactatggaccacagagatttgggaagggaaggaaagttcacacagaccaaattggactagctttgctgaagaatgaaatgatgaaagccataaaattgtttcttacaccagaagacttggatgatcctgtaaatagagcaaagaagtattttcttcaaactgaggatgctaaaggcacactttcattgatgcctgaattcaaagtgcgtgagagagcattgttggaggcattgcaccgctttggcatgaccgaggaaggttgtatccaggcatggttctctttaccccattccatgcgcatattctatgttcacgcatataccagcaaaatttggaatgaggcagtatcttacagacttgaaacctatggagcaagagtagtgcagggtgatttggtctgtttggatgaagacattgatgacgagaatttcccaaatagtaaaattcacctggtaactgaagaggagggatcagctaatatgtatgcaatacatcaggtggttcttccagtacttggatacaatattcagtacccgaagaacaaagtagggcagtggtaccatgacatacttagcagagatggactacagacatgtaggtttaaagtacctactctgaaactgaatataccaggttgctatagacagattttgaaacatccctgtaatctctcataccaactaatggaagatcatgacattgatgtcaaaacgaaaggttcccacattgatgaaacagctttgtctcttttgatctcttttgatcttgatgcttcatgctatgctaccgtttgtctgaaggaaataatgaagcatgacgtttaaaactgatacccttggtataaccatatatatgtcaccctttcctgtttttgaaattattgatcagaacaatatacaagggaaatgccatacctctgtttgtgatagataccccagagtagttattacctctttgtgagataagtaatctttgatgaagattgaaatacaatttctcatccaatttttatatcttggcatacgctgaccctcttgaccatttgtaattttttcatattatctaaaacaggtgttagagtcagacagattcattcttagattctagctctgacacttactagtgattttgagtatgttgttgatttttttgtgtgtggttactgatagaatcaagacaattacaacttcataaatgacaaataataggattatctccacattttctgttgctggaggaacaaaacattgtgcccatttgaaaattttaatttttgttggtttaactatcccacattataaatcatccttcaccattttatatcagttaaatatgggtgtgttggggaggaatgactggcatgtagacatgtattgatttaggaagatctgagcatttctttcattgttggtaagatataatgatgaaatttaaaaagcagtatggagcattatatatcagtaatgtgatatatatacttaagccagtttaaccattttgggaaatgttagcattaggaaataaaatccaaaagaaggaagagaagctatatgcaatgcaaaatttgcttattgcaatattttcatatacagacactaaaaacagttttcaaagtccagcattacgtaactaaagtaagtaaaatgatgtgtatcaacttgatggtaaaatatgtagttatttaaaaaagcaatgaacaatttagtttcatgagaaaatgttgccccctaaaagtagaacacatatgttacaactgcaataatactctgaattcatctttcacaaataagagacatgttagcatagtgattaaaagcacagatattggagacaaactaacccagtttgaaccctggcactgccacgtatagcactgcagccttgggaaagttatttaaactcatgggcttcagtttcaacatctgtaaaatgggcatgttaacattgcctacctcataggattactgtgagaattttctaagttaatatatgtaaagcaactttaaaaagtgcctggcacttagttattgttaagtaagtgtctgcagatgcaagtttggaagagaaaagcaaataaatgaaaatcccttcctgttaagatgatggggtatttggattttttttaatactaaaaagttttttttgttatatgttttggcaataaataattctcaatacacaaaattggatattg

SEQ ID NO: 257627 - DNA, 1603 bp, Homo sapiens
cagggtccaaatttaaggtccatgtgaccccaaagcctgtgttttttttctattatatgtttcagtgacctttattctgtgtcataaagttacaatcttttaaaaccattaggaatatatataatactgcaagataacatttaagaaaaaaagttgtgaatattcatatcctccagctccttgcttagaacactagtaaaattaggtcgcagtgaagcaaatgttggagagaaagatagatgaagcatttgctaattattattgtccccctttcctgtttttgaaattattgatcagaacaatatacaagggaaatgccatacctctgtttgtgatagataccccagagtagttattacctctttgtgagataagtaatctttgatgaagattgaaatacaatttctcatccaatttttatatcttggcatacgctgaccctcttgaccatttgtaattttttcatattatctaaaacaggtgttagagtcagacagattcattcttagattctagctctgacacttactagtgattttgagtatgttgttgatttttttgtgtgtggttactgatagaatcaagacaattacaacttcataaatgacaaataataggattatctccacattttctgttgctggaggaacaaaacattgtgcccatttgaaaattttaatttttgttggtttaactatcccacattataaatcatccttcaccattttatatcagttaaatatgggtgtgttggggaggaatgactggcatgtagacatgtattgatttaggaagatctgagcatttctttcattgttggtaagatataatgatgaaatttaaaaagcagtatggagcattatatatcagtaatgtgatatatatacttaagccagtttaaccattttgggaaatgttagcattaggaaataaaatccaaaagaaggaagagaagctatatgcaatgcaaaatttgcttattgcaatattttcatatacagacactaaaaacagttttcaaagtccagcattacgtaactaaagtaagtaaaatgatgtgtatcaacttgatggtaaaatatgtagttatttaaaaaagcaatgaacaatttagtttcatgagaaaatgttgccccctaaaagtagaacacatatgttacaactgcaataatactctgaattcatctttcacaaataagagacatgttagcatagtgattaaaagcacagatattggagacaaactaacccagtttgaaccctggcactgccacgtatagcactgcagccttgggaaagttatttaaactcatgggcttcagtttcaacatctgtaaaatgggcatgttaacattgcctacctcataggattactgtgagaattttctaagttaatatatgtaaagcaactttaaaaagtgcctggcacttagttattgttaagtaagtgtctgcagatgcaagtttggaagagaaaagcaaataaatgaaaatcccttcctgttaagatgatggggtatttggattttttttaatactaaaaagttttttttgttatatgttttggcaataaataattctcaatacacaaaattggatattg

SEQ ID NO: 257628 - DNA, 3997 bp, Homo sapiens
actgaaggcttccgggcatgcgcacagcgttgtgcaaatgaatgccttccactgaaccgaggtagacggggtcgagtttcttgcgcgatggtgggcttgtatgtgtgtgtgtgtgtgtgtgtgtggggggggggggtgacgaggttggcattgaggatccataccctttgcgcccaaagaaaggtgacgtggactagtgtcgtgcctttggacaggcagagtaagaggagggagaagaaacaggtagagctgctggccttgtcggggacacctttggacgtgctggagggcaacgacgccctagttttctgtgaagttaagtagcttctgcaggactgggttcagtatttctagtaccttctcaggatccctcctccgccaacgaattcctcaaccacgggccaagcaaactactcccccgcccactgtcagcagcagtctctgttgaatgggaatactgcaccttcaggcttaacgccacgtgggctcctttgctgtcctccaggcactgttatagaagaatggaagaagatacagattatagaatcaggtttagttctttgtgtttctttaatgatcacgttggatttcatggcactataaaaagctcaccaagtgactttattgttattgaaattgatgaacagggacagttagttaataagaccatcgatgagcctattttcaagattagtgaaatacaacttgagccaaataattttcccaaaaaaccaaaactagatcttcaaaatctgtccttagaagatggaagaaaccaagaagttcatactttgattaagtacactgatggtgaccaaaatcatcagtctggttcagaaaaggaagatactatcgttgatggaacttccaaatgtgaagaaaaagctgatgttttaagctcctttttggatgaaaaaactcatgagttactgaataattttgcctgtgatgtaagagagaagtggctttctaaaacagagctaattggactacctcctgaattctcaataggcagaatccttgacaaaaaccagagggctagtttacacagtgccattaggcagaaatttccatttttagtaactgtaggaaaaaacagtgaaattgttgtaaaaccaaatcttgaatataaagaactttgtcatttggtatctgaagaggaagcatttgacttttttaaatatttggatgcaaagaaagaaaattccaaatttacctttaaacctgatacaaacaaagaccacagaaaagctgtccaccattttgtcaacaaaaagtttggaaaccttgtggaaaccaaatctttttctaaaatgaattgcagtgctggtaatccgaatgtggtggtaacagtaagatttcgggaaaaagcacacaaacgtgggaaaaggcctctttctgaatgccaagaaggaaaagttatatatacagcttttaccctacgaaaggaaaacctggaaatgtttgaagcgattggttttttagctatcaaacttggtgttattccttcggattttagttatgcaggccttaaagacaagaaagccatcacctatcaagcaatggttgttagaaaagtgactccagagaggttgaaaaatattgaaaaagaaattgaaaagaaaagaatgaatgtctttaatattcggtctgtagatgattccctgagacttggtcagctcaaaggaaatcactttgatattgtcattagaaatttaaaaaaacaaataaatgattctgcaaacctgagggagagaattatggaagcaatagaaaatgttaagaaaaaaggctttgtgaattactatggaccacagagatttgggaagggaaggaaagttcacacagaccaaattggactagctttgctgaagaatgaaatgatgaaagccataaaattgtttcttacaccagaagacttggatgatcctgtaaatagagcaaagaagtattttcttcaaactgaggatgctaaaggcacactttcattgatgcctgaattcaaagtgcgtgagagagcattgttggaggcattgcaccgctttggcatgaccgaggaaggttgtatccaggcatggttctctttaccccattccatgcgcatattctatgttcacgcatataccagcaaaatttggaatgaggcagtatcttacagacttgaaacctatggagcaagagtagtgcagggtgatttggtctgtttggatgaagacattgatgacgagaatttcccaaatagtaaaattcacctggtaactgaagaggagggatcagctaatatgtatgcaatacatcaggtggttcttccagtacttggatacaatattcagtacccgaagaacaaagtagggcagtggtaccatgacatacttagcagagatggactacagacatgtaggtttaaagtacctactctgaaactgaatataccaggttgctatagacagattttgaaacatccctgtaatctctcataccaactaatggaagatcatgacattgatgtcaaaacgaaaggttcccacattgatgaaacagctttgtctcttttgatctcttttgatcttgatgcttcatgctatgctaccgtttgtctgaaggaaataatgaagcatgacgtttaaaactgatacccttggtataaccatatatatgtcaccctttcctgtttttgaaattattgatcagaacaatatacaagggaaatgccatacctctgtttgtgatagataccccagagtagttattacctctttgtgagataagtaatctttgatgaagattgaaatacaatttctcatccaatttttatatcttggcatacgctgaccctcttgaccatttgtaattttttcatattatctaaaacaggtgttagagtcagacagattcattcttagattctagctctgacacttactagtgattttgagtatgttgttgatttttttgtgtgtggttactgatagaatcaagacaattacaacttcataaatgacaaataataggattatctccacattttctgttgctggaggaacaaaacattgtgcccatttgaaaattttaatttttgttggtttaactatcccacattataaatcatccttcaccattttatatcagttaaatatgggtgtgttggggaggaatgactggcatgtagacatgtattgatttaggaagatctgagcatttctttcattgttggtaagatataatgatgaaatttaaaaagcagtatggagcattatatatcagtaatgtgatatatatacttaagccagtttaaccattttgggaaatgttagcattaggaaataaaatccaaaagaaggaagagaagctatatgcaatgcaaaatttgcttattgcaatattttcatatacagacactaaaaacagttttcaaagtccagcattacgtaactaaagtaagtaaaatgatgtgtatcaacttgatggtaaaatatgtagttatttaaaaaagcaatgaacaatttagtttcatgagaaaatgttgccccctaaaagtagaacacatatgttacaactgcaataatactctgaattcatctttcacaaataagagacatgttagcatagtgattaaaagcacagatattggagacaaactaacccagtttgaaccctggcactgccacgtatagcactgcagccttgggaaagttatttaaactcatgggcttcagtttcaacatctgtaaaatgggcatgttaacattgcctacctcataggattactgtgagaattttctaagttaatatatgtaaagcaactttaaaaagtgcctggcacttagttattgttaagtaagtgtctgcagatgcaagtttggaagagaaaagcaaataaatgaaaatcccttcctgttaagatgatggggtatttggattttttttaatactaaaaagttttttttgttatatgttttggcaataaataattctcaatacacaaaattggatattg

SEQ ID NO: 257629 - DNA, 2279 bp, Homo sapiens
actgaaggcttccgggcatgcgcacagcgttgtgcaaatgaatgccttccactgaaccgaggcactgttatagaagaatggaagaagatacagattatagaatcaggtttagttctttgtgtttctttaatgatcacgttggatttcatggcactataaaaagctcaccaagtgactttattgttattgaaattgatgaacagggacagttagttaataagaccatcgatgagcctattttcaagattagtgaaatacaacttgagccaaataattttcccaaaaaaccaaaactagatcttcaaaatctgtccttagaagatggaagaaaccaagaagttcatactttgattaagtacactgatggtgaccaaaatcatcagtctggttcagaaaaggaagatactatcgttgatggaacttccaaatgtgaagaaaaagctgatgttttaagctcctttttggatgaaaaaactcatgagttactgaataattttgcctgtgatgtaagagagaagtggctttctaaaacagagctaattggactacctcctgaattctcaataggcagaatccttgacaaaaaccagagggctagtttacacagtgccattaggcagaaatttccatttttagtaactgtaggaaaaaacagtgaaattgttgtaaaaccaaatcttgaatataaagaactttgtcatttggtatctgaagaggaagcatttgacttttttaaatatttggatgcaaagaaagaaaattccaaatttacctttaaacctgatacaaacaaagaccacagaaaagctgtccaccattttgtcaacaaaaagtttggaaaccttgtggaaaccaaatctttttctaaaatgaattgcagtgctggtaatccgaatgtggtggtaacagtaagatttcgggaaaaagcacacaaacgtgggaaaaggcctctttctgaatgccaagaaggaaaagttatatatacagcttttaccctacgaaaggaaaacctggaaatgtttgaagcgattggttttttagctatcaaacttggtgttattccttcggattttagttatgcaggccttaaagacaagaaagccatcacctatcaagcaatggttgttagaaaagtgactccagagaggttgaaaaatattgaaaaagaaattgaaaagaaaagaatgaatgtctttaatattcggtctgtagatgattccctgagacttggtcagctcaaaggaaatcactttgatattgtcattagaaatttaaaaaaacaaataaatgattctgcaaacctgagggagagaattatggaagcaatagaaaatgttaagaaaaaaggctttgtgaattactatggaccacagagatttgggaagggaaggaaagttcacacagaccaaattggactagctttgctgaagaatgaaatgatgaaagccataaaattgtttcttacaccagaagacttggatgatcctgtaaatagagcaaagaagtattttcttcaaactgaggatgctaaaggcacactttcattgatgcctgaattcaaagtgcgtgagagagcattgttggaggcattgcaccgctttggcatgaccgaggaaggttgtatccaggcatggttctctttaccccattccatgcgcatattctatgttcacgcatataccagcaaaatttggaatgaggcagtatcttacagacttgaaacctatggagcaagagtagtgcagggtgatttggtctgtttggatgaagacattgatgacgagaatttcccaaatagtaaaattcacctggtaactgaagaggagggatcagctaatatgtatgcaatacatcaggtggttcttccagtacttggatacaatattcagtacccgaagaacaaagtagggcagtggtaccatgacatacttagcagagatggactacagacatgtaggtttaaagtacctactctgaaactgaatataccaggttgctatagacagattttgaaacatccctgtaatctctcataccaactaatggaagatcatgacattgatgtcaaaacgaaaggttcccacattgatgaaacagctttgtctcttttgatctcttttgatcttgatgcttcatgctatgctaccgtttgtctgaaggaaataatgaagcatgacgtttaaaactgatacccttggtataaccatatatatgtcactctttgaaggaaagggggctaaaatgtcttaagcaccttccatgtgttaggaacttcataa

SEQ ID NO: 257630 - DNA, 356 bp, Homo sapiens
tatttaaagtgctaaaggaaaaaaataaaatttattgtagaatagtatatctggtgaaaatatccttcaagcatgaagaacaaagaccttcccagacaaacaaaagctgagggatttcatcaatgctagatttgtcctaaaataaatgttaaacagagttcttcaacctgaaagacaaagatgttaatgagcaataagaaatcatctatatgaatatttacaacaaaccctcatgacgtgtttatctatgtaacaaaccttcacgtgtacccccaaatctaatataaaaattaaaatacatatatatgtacaaactcgctggtaatagtaagcacatagaaaatcagagaatatta

SEQ ID NO: 257631 - DNA, 506 bp, Homo sapiens
acgaggccagagtgctctggaggccaacaggaaggtagtctccagaattgtgcaagtgacgtactttcaggtttgctgccattcacaacagacaacctaccagctttcatggtctaaagagggcttaaatttaatttgcaaatatcttcagagaagaaatacagtctctacagtctatactgagttataagtgactgataccagctcttcattagaaggttgttctttcttctatttgccatgaactacaggggtcaaaagaagggttagcactatcctagctccctgttaattcttgcaaatcagcactcttttataaccctttgtaacatcccatttcaatgcataatagaaggtatgcagtcttccacctcctcattggtgggtgccatttacacactcctggccaatcccctcattcatgaatgatattcataccttccttaaagtcatcatgcttaatgtcttctatagcattgaataaactctgtactatttccttcaca

SEQ ID NO: 257632 - DNA, 534 bp, Homo sapiens
agatcccaccgcagccagttccgaccggattcaaacagcctcttcccccttctcgggacacccactccgcgcactcaccatttcccagcctccggatgttccgccttcttccctatggatctcccagtacctgcaggtcacaggataacaggggctatggtggagtcaccgaggagctaatggagcggaagagatggaatagtacagacgggtactggactcagagcctagaagctaggagacgaaggccttgccatattgaagagcccgcctcttcctctctagctgcgcacctgattgggcagttttcacgctagcaccactgattggctggggttctccgccccacacatttagaccctgatcgacaggagatgtaatgagacactgggctgaatgaggaaagagtgacaggtttttgcctgcagcatgttcaggcagcgatttctccttgtgttgggggcctggccctgcctgagggacatttgtatttaacgttgtatataagattatatcactttctgattataaaaa

SEQ ID NO: 257633 - DNA, 682 bp, Homo sapiens
gtggacagagggtggatacagactcaaggctgaaagagaagagagctgggaaccctacaagaggttgccaagcatcaggacttgttcctggcccccagctgctcctagggaagggctgagtgaaataggcctggagtggtccactctcaccattgatctctgggattctagctgaaggagaccccaggacccccaaggacatctgagctggcagagaaaactgcctggagagttggtagagacaaaactcctgcattaatcaagcccagaatatttgacacaggaacagctgcagtggagcatggccatgggtgcccatcccacaaagttctccatactccattaggcagctttagactttattagctgctggcattggacagagcaaggctatgcttcctgtgggatggggtctgatattacttggctgtgttgccacccaaatcttgtcttgaattatagttcccataatccccacatgttctaaaagggatccagtggaacacaattgaattatgtagatgggtctttcccatgctgttcttgtgatagtgaataagtgtcatgaaatctgatggttttataaagcagagttcctctgcacatgctctcttgcctgccaccacgtaaaatgtgcctttgctcctccttcaccttctgccatgattgtgagtcctcccta

SEQ ID NO: 257634 - DNA, 277 bp, Homo sapiens
atcagcttccaggtatttgcagtttattatgtgctaaatactgtaatagatactttttatgcatgaatccatttattctcacaaaaccccttggggaagtgaaacagattatttccatagtgtcttaaaaccccagaactctgcgttgctgcgtctattgacatgaacacctgtcaaacctgcaactcatagctcagtattgtctcagtccaatccaaggaaatgaactccttgagaaagctgacattctggaccatggggtagaagctaccctgtc

SEQ ID NO: 257635 - DNA, 221 bp, Homo sapiens
ccccctcagggccgaatcactttttgggagggaggaaaccgtcaagaccagttctgtctacagtgggttaacaggttctaagagggagttttgctttaaacttaattctgtgttcacggttgctgttgtcactccatgtagccgttatgggtaatttgcaaggctttatgtttttaaaatctcaccatataccctaggtatgtcacttcatgcctgttttt

SEQ ID NO: 257636 - DNA, 472 bp, Homo sapiens
gatccaggaggcacaccatccaactaaggataattatagaaagagaaaataaagcatatggagcagagaaaattatttttaaacagaaaaataggaaatatcactgaactgaaagaaccttccagaatgaaaaaggccagccaaatgaatgaaaaaagacacacacaggcacaccacaaaatttcagaacacctcctaaaaagatataaagaatctcctaaaagtttccaacaaaacaacaaaaacaaacataggggggtcacacacacaaagcaggtgtcagaatggcatggtccttctcaacactatgacctgaagctaggattcagtgttatcataatgcctcaaatgctgaggtttccaatctagactaatctaccttgccaaaatatcaatcctggatataataaaggcattttcagatatgcaaggttacaaaatttctaattcccacgcaatattttacaggatc

SEQ ID NO: 257637 - DNA, 380 bp, Homo sapiens
gacctcactgattctttcctttctcctgtggactgttctcaatccagcagcaggctctgttaaaaactagttccatcattcccctcttcagctcaagacccttcaggggctccccatatcactcagggtaaaagtcgtgatcttcaaattgtctctgaagccccagcccctccctctctgtgctcatctctgctgcattgacactgggctccttgctgatctttgaacatgcgtgacatgcttctacctcagggcctttgcacttgctgttttctcccccttccttagatatagatatccatatgacttgctcttgtagtttcctcaagtcttttcacaaacatcaccttttcagtgaggtctctcctgagcacgcaatt

SEQ ID NO: 257638 - DNA, 171 bp, Homo sapiens
tttttttatatttttccaactgtctctaagtgcacatataaaatacactgtaattgctgaatttaatagtcaagtctgctattgacatgtagcaacgatatatcacagataaaaattagaaggaaatttaagtttaaagtaaatctaaatttgattgcttcttttagaaca

SEQ ID NO: 257639 - DNA, 298 bp, Homo sapiens
ccaataggccccagtgtgtgttattcccctctgtgtgtccatatgttctcaccgttcagctcccacttataattgagaacatacagtgtttggttttatgttcctgcgttagtttgctgaggataatgccttccacctccatccacttccatgcaaaggacataatctcgttcctttttacggctcattatttttcttcttaaatgctgtactaaatctgtggataagagcaccaatgttttcgttatacacatgttggaccccaacaagttgcacttgaatacatacaggcaactgc

SEQ ID NO: 257640 - DNA, 478 bp, Homo sapiens
taaattgagtataatcagtagattaaagatcagttatattatacttgaccctagttaaactatgtttacccaaacttcgttttaaaacagctttagaaaagggaagagtatgaagacagtataaagatctgtggttgccatggagcagaggaaagagggacaaatagatgacaggatttttagggctgtgagtgaaactattctgtatgatcctataatagtgtatacatgtcatatatttggcaaaccccgtagaaaatacaccaccaagagtgaaccctaatgtaagctatggactttaggtgataatggtgtgttaatgtaggtccatcagttgtaacgaatatggtgctctggtgcaagatgttaatagtggaggaggctggtggagggaatggcagtgggtatatgggaaccttctgtactttctgctcagttttgctgtgaacctaaaactactctaaaaagtaaattctta

SEQ ID NO: 257641 - DNA, 416 bp, Homo sapiens
ctttgatgtccttcatggcttccaaagtagcattttatttaggctttcttttttctccatattcttaaaggaaaagaataaaattgtagatggacctctaattatattttatctttccaggggagagcaaatattgttttaatgatattgtattagtctgttgtcatgctgctgataaagacatacccgagactgggtaattttttaaagagaaagaggtttaatgaacccacagttccacgtggccggggaggcctcacaatcgtggcagaaggcgaaagtcctggcttacatggcggcaggcaagaaagaatgagagccaagcgaaaggggaaaccccttataaaaccatcagatctcatgagacttattcactaccacgagaacattataggggaaatggcccccatgattca

SEQ ID NO: 257642 - DNA, 434 bp, Homo sapiens
actgtgagtgagattccctggagcaagcgaatctcccgggatgagtcagagaggccaacagtgtggatgtgggtctccacacatagcatgactaagttgagaaagaaaggccccactgggaaaagagacttcaacacagatggaaaaaaaacataacaggcttggaggaaatagcagtttacaaaacagcatttcaaagagcaagtgtggggatcctcaaattaaagaaattaaaagaaaaagctagagcaagctcctgctagcctaaagaaaccaaaccctgactacttgctcatagaactgtgagcaaaacaagacagtcaaaccaaaaaatccacctagaaaagaatttggcagtctcactcagatgcctggcctagaggggacttcagagaatgccctacagagagacaccaagactacaaatgcaaatt

SEQ ID NO: 257643 - DNA, 642 bp, Homo sapiens
tagaacatggccagacgcggtggctcacgcctgtaatcccagcagtttgggaggccgaggaggctggatagcctgaagttgggagtttgagaccagcctgacctacatggagaaacctcatgtctactaaacatacaaaattagccaggcgtggtggcgcctgcctgtaaccacagctactcgggaggctgaggcaggagaatcgcttgaacccaggaggtagaggttgtgagctgagatcacgccgttgcactccagtctgggcaacaagagtgaaactccatctccaaaatataaaaacataggaatgatatataccaaatcatggtgctatttgctagggtaagaggaaggagtgggatgaaagagggagaatatagtgcttcacttataacctgtaatattttattttctcaaaagttgagggaggctgtaggtggaatatgagacaagtgtgggaatgcagtaagatctatcaaactgggtcatgagtatacagtagttgtttattggaatctgtgattctctatacaattgaaatagttaataatttttcattgttttaagtatagttctttgattattacctagattgggttattttattaaggtttgggggcattagtatttatttattttacc

SEQ ID NO: 257644 - DNA, 413 bp, Homo sapiens
caggaaaaaaaggaacttggaggaaatggatataataacatatcatatgggcttcctcttttccagttactgttctgagtgccgaatacattttgctctcatttgtacctcacaataatgccatgcgttactgtatactcttattgtttctattttactgagacaactgatgagcagagtttagataacttgcccaaggtcataggcacagtcaatggtggtgttgattgacatttaagctggatgcagagtctaaatttccagccagtacaccatatactggaaaccattcatggagtaacaggaaaagtttctgtaagcaatatccccagaaacaaaagtagattttgcacccatgaaaaagaacagaatgctatctaaaagaaataaattttttaaaagctctttaaatt

SEQ ID NO: 257645 - DNA, 214 bp, Homo sapiens
ttgacgagggggactaccgccggcgctcccgacccgcgacgcgcgagccccgggcgggcgggggaggcgagagcaagaaacctgtgggacctgtggggagccgcgtccgcggggctggcgcgcgcgggggcggcctcgggctcgcgcgcaaaggcgcgggcgcgggcgggggcggagtggcggcggcagcggcggctagaagcggcagcccaga

SEQ ID NO: 257646 - DNA, 430 bp, Homo sapiens
agaaacaaaaacaagtttagcttgaactccactgatggaagctatggatgagggccttaaaaggtggcatcataaccaagatcactaagtatgctgtggtggcttagggattatgtgatataaatgcaattggtgaccaggaggattggctgagtgagggttggctaagtgaagatcagttaaacacacagtttcttttgcatagaacaaatcagatattgactactatttgtaaagcagaatgttaagaactcctactttattttctacatttttcatatcgtgattaacaatataaattcattattaaatctctcttccatctattatataccatttcttttgccatattatccgatttaattatatcccattaaacttgtacttagtgtcctactcattttaacttttaaagtagtttctaatcttg

SEQ ID NO: 257647 - DNA, 431 bp, Homo sapiens
tagaaagcagcaccttctgggttttcttcctgaggcaacatgacaccctgggctaaaacattgaaagacatcctgtttctagggagaactaaagccagagccagtctgttccatccagttctttcgtatctcaggatgttgtattccctgcacattctataattccgtagaactaaaaacaaggggagaaccaggtcagtccaaggccacccagaaaactgttgtacactggggagaggatctatggcattggagcactgtctatacctgaggttacaagctagaactagagggaaacagtaacatgccattcagaaaatttagggatttagtgtcaatgacagcagttactgaacttttttcctttggtcagatactaacctgggtgctttctgatcatgatggatacagatgtcatcttcagattcttg

SEQ ID NO: 257648 - DNA, 419 bp, Homo sapiens
agcctaatcaagtataaaataactgataaaatagagtgtcagagagttttgtatagacctgccacttctgaataattggcattattattattaataataatgttgtacctgttattaatgttgtttttcacttgaaaatgctaaataagcatctctattaacaagctacaacctttcgatactaatagtacacaaagttaaacaaaaacatagaaagttaattaaaaccaaacaagtgagataatgaaactaaatgactattgatggcttaaactctacagctaactatgtgatggcttgatgtgtgttcataattaacctacaatttgaatatgtaaacattctgtagatttcatttagtaccacagtaattttctttttagaaaataaatcagattaactctcttttctggtcaact

SEQ ID NO: 257649 - DNA, 488 bp, Homo sapiens
ggctgtgagggaacagtcaaatgcccagagaaatgcaaacggtgtgcatgtgattgcggtttccaccatgagcttccacaccatccagggcaaattatttcatatgtagctgccacatttggcaggccttcgtaaagtgagcagacagctttatcagagctacagggaggttcagacagacccatccctgtctgaacatttctggagttctgtactctacagtccaactctgagggcaccagtttacataaattaatatccaaatcagacaggatgccaaatgcctcacattcaaatagcactgtgcagttgacaagggatttctttcctccaaagagaacttcttttaggctttcacagatactacagaatcatagaaagtagaggtgggagggacttagagatgatcaatgtcaccttttcattttataggtgagcttagagaaggtaaggaactcctgtaaggacacacggcaagttaggggcag

SEQ ID NO: 257650 - DNA, 918 bp, Homo sapiens
tgtctacaatttacttttttttggagacagtcttgctctgttgcccaggctggagtgcagtgatgtcatctcagctcactgcaacctccgcctcctgggttcaagcaattctcctgcctcagcctcccaagtagctgggattacaggcatgcaacaccatgacccactaatttttgtatatttagtagagacggggtttcaccgttttggcctggctggtctcaaactcctgacctcaagtgatcaacccacctcagcctcccaaagtgctgggattacaggcatgagccacctcgcccagcctgtaatttactctcaaatggttcaggaaaacaatgtatattttcatatagagacagagataaagacacaaaaaggatgagaatgataaagaaatgaggtaaaatgttaagtactggggaatctgggtgaagagaatgcagggattctttatactacttttgccacttttcttttagctagaaattatttcaaaacaaacagcttggccaaattagcaggtaagaaaaaattattagtgttttttattttatttcattcatgtgttcagtaaagttgaacacatggatgttaatggaccattcgggttatatggttcatattttttgctcatttttatgtcatggtgtttatcttttctgtgctgatttgtaaaagctattttaaaacccttcatctgccatatatgttacatttctttcctgctttctgccaccttccaatttgttaccaactttcttctccaaccttgggccactggcatatacactcattttaaatatcagaacttgtagtgctctttgaaatgcagacagactatggttcattctgcaactgcatattagttaacaggcaaaaataccttagtaagagaaagtgtcttttccttctaatgta

SEQ ID NO: 257651 - DNA, 1019 bp, Homo sapiens
accattcagatttcctcgtctgtaaacattaagtatctacattcactaaaagtagttctgaatgaatgttatttaatggtgccaatgatgttggaggatacctgtgcatctcatgctgtggttacagcatcaattgtgatgaatataggatactgagtccctcctagaaatgacttcaggaacttcaccccccaactccacaatctgggaatggcagacagattcagcaccaggagaacatcacataaaggacaagtgtgtatgtttaaaaatggcaagtttcggcctggcatggtggctcacgtctataatcccagcactttgggaggctgagtctaagtgtacagtgcttgtaaagtctgcagtagcatacagtaatgtccaaggctttcacatccactcaccactcgctcactgacccagccagagcaacttccagtcctgaaagctgcattcatgactcaatcaccacaattgcaatcaaaagacggctttagttggaacctggaacgtgctaatcctgtcaggcagcctgtgattctggaagtgaaggaacaaaaaaaaaaaaaaacaagggacaaatttcacataaaatttccatatgaggaacgacagatggaacacttttgtgtgtgtgcgttcagtaaaacgggcactttcttaagcaggtggcaaagaaagcctgagaatccggctgacttttctaattttcaagaaaacccctgattttccccacaacagggcggagaatagatcgaacagccacgtggcatgggtagattccaccctggctatcaacggccatgtgcaattacacctactgtggcaaggcggggcagttaccaggggcaaaagttcgtcatgccgagatggcgacggacaagcgtactgttaacagcgaaacgatacggaccaagcccccagcgccgaagggcagctgacacacagtagagtcagaactcgggcggacatgggggtaccaggagcgaaatcacaggcgagggaaccaagaaaacgaa

SEQ ID NO: 257652 - DNA, 1461 bp, Homo sapiens
accattcagatttcctcgtctgtaaacattaagtatctacattcactaaaagtagttctgaatgaatgttatttaatggtgccaatgatgttggaggatacctgtgcatctcatgctgtggttacagcatcaattgtgatgaatataggatactgagtccctcctagaaatgacttcaggaacttcaccccccaactccacaatctgggaatggcagacagattcagcaccaggagaacatcacataaaggacaagtgtgtatgtttaaaaatggcaagtttcggcctggcatggtggctcacgtctataatcccagcactttgggaggctgagtctaagtgtacagtgcttgtaaagtctgcagtagcatacagtaatgtccaaggctttcacatccactcaccactcgctcactgacccagccagagcaacttccagtcctgaaagctgcattcatgtatagtttgagggtatccagcctcagattatctgaggatgtagctcaagatttcctaattttgcaaacagcaagcttcccaggagattcttagattcctgctaacaaaaggcggagactcactggacagttactgaagatagacagtagggggcggaagggcccacgcttctttgatattggtggctttggtttttcagtgacgggggacactttgacttcagttcctttttacgacttttggtagtgaagagataaagttcattacaaaacatgccaggcttaagcaattttccaaagggattaacgaattgcagtggccgcaggctatgtaaaaatttttaaaaggtggtgtctctcatattcttcagcataacttgggtcacagaaacccaggcataaaaattcattgtgaactcatattctaccatggcctgacactgactcaatcaccacaattgcaatcaaaagacggctttagttggaacctggaacgtgctaatcctgtcaggcagcctgtgattctggaagtgaaggaacaaaaaaaaaaaaaaacaagggacaaatttcacataaaatttccatatgaggaacgacagatggaacacttttgtgtgtgtgcgttcagtaaaacgggcactttcttaagcaggtggcaaagaaagcctgagaatccggctgacttttctaattttcaagaaaacccctgattttccccacaacagggcggagaatagatcgaacagccacgtggcatgggtagattccaccctggctatcaacggccatgtgcaattacacctactgtggcaaggcggggcagttaccaggggcaaaagttcgtcatgccgagatggcgacggacaagcgtactgttaacagcgaaacgatacggaccaagcccccagcgccgaagggcagctgacacacagtagagtcagaactcgggcggacatgggggtaccaggagcgaaatcacaggcgagggaaccaagaaaacgaa

SEQ ID NO: 257653 - DNA, 1242 bp, Homo sapiens
accattcagatttcctcgtctgtaaacattaagtatctacattcactaaaagtagttctgaatgaatgttatttaatggtgccaatgatgttggaggatacctgtgcatctcatgctgtggttacagcatcaattgtgatgaatataggatactgagtccctcctagaaatgacttcaggaacttcaccccccaactccacaatctgggaatggcagacagattcagcaccaggagaacatcacataaaggacaagtgtgtatgtttaaaaatggcaagtttcggcctggcatggtggctcacgtctataatcccagcactttgggaggctgagtctaagtgtacagtgcttgtaaagtctgcagtagcatacagtaatgtccaaggctttcacatccactcaccactcgctcactgacccagccagagcaacttccagtcctgaaagctgcattcatgtatagtttgagggtatccagcctcagattatctgaggatgtagctcaagatttcctaattttgcaaacagcaagcttcccaggagattcttagattcctgctaacaaaaggcggagactcactggacagttactgaagatagacagtagggggcggaagggcccacgcttctttgatattggtggctttggtttttcagtgacgggggacactttgacttcagactcaatcaccacaattgcaatcaaaagacggctttagttggaacctggaacgtgctaatcctgtcaggcagcctgtgattctggaagtgaaggaacaaaaaaaaaaaaaaacaagggacaaatttcacataaaatttccatatgaggaacgacagatggaacacttttgtgtgtgtgcgttcagtaaaacgggcactttcttaagcaggtggcaaagaaagcctgagaatccggctgacttttctaattttcaagaaaacccctgattttccccacaacagggcggagaatagatcgaacagccacgtggcatgggtagattccaccctggctatcaacggccatgtgcaattacacctactgtggcaaggcggggcagttaccaggggcaaaagttcgtcatgccgagatggcgacggacaagcgtactgttaacagcgaaacgatacggaccaagcccccagcgccgaagggcagctgacacacagtagagtcagaactcgggcggacatgggggtaccaggagcgaaatcacaggcgagggaaccaagaaaacgaa

SEQ ID NO: 257654 - DNA, 156 bp, Homo sapiens
ggttaaacaaatagtattttttattaaatgtcactcaatcccagggctgagaattcatttgtgttttcctcctagactcaatcaccacaattgcaatcaaaagacggctttagttggaacctggaacgtgctaatcctgtcaggcagcctgtgatt

SEQ ID NO: 257655 - DNA, 687 bp, Homo sapiens
gaacattcacatacaaaacaacacacacgtgtgtatgtgtcagacatatggtgttgtaatgcctttataagagggcttcactacataataacttactataaaacaaatgttgttatttaaattattaccagcagaaaattgcctgttgtactgtattttatagagaagacagctcataaatgcactaaagtgcaaagacatttttaaaaaggcaataatgaattttcaataatgaagcctagtaatagcagtgtaagaaagcatctgaaagctgataaaatctatattttagcactgtttctatatgtacaaggtaaggctttctgatctcaattgtcagtatgaattttttgtttcaatttataaagatcaaattcacatttttgaagtgagttattattgcatatcttcatttaaggtcaggcacaattttgaacatgttaatcaaaaagaatacttattgtcatatctcacttctgacatttaagaaaaactcttcatgcaaattaagtatgtgactacactaccaaaagagtgtatcaaatacttaacacagaaatacaatgaacttctctatattgactgaagtccttcatgtgcctcttctcaagtgcaaattagactcagatttctcctctttgaagtacagttacccttgtacatacactgcttaaagcgttacttata

SEQ ID NO: 257656 - DNA, 422 bp, Homo sapiens
atcccacctaaccatctaaactactctaaattagactagaatcctggagccaagatagatacagcacatgtatcttccctttgctttaagtctgggattcaatctgctccctggcaatcagatttagaggctaagagctctctaaatcacttgtttggtcaacacatgagtctggatagaactctcctccctctaggatgaaaacagagtaaatcctaaatttggggctcataaaataacagggcaggttaagggaaagagtcatcaagcttaaggattagaaaaagattgtacttctgaacatacatattcttttgcaggaaataacatgctatttcagataaacttcagacattctaaattgactagtgaggggagagtctccgctataaagacacatgcacaagtatgtttattgcggc

SEQ ID NO: 257657 - DNA, 416 bp, Homo sapiens
tgagagggagggaacctgaatcctagctgggtcaccttctagctgtgtggccccgggaaagtcatgtcactgtgccaagcctctcactgatctgtcaaacccgagggagccagtctcgatgatctttaagttcttttcctatcacagtattcagtcctgggagatggaactgctaaaggcaggctctgcatttaggaccacagggaaaccgagagagagaatttcgggaactcccagtacaggccattatcttttagagtatattagttttaatctttctcctgaaaactttaagatctctctctttttaactgcaggttgctttatccttgtcatatattagatactgaataaatgtctctgttgaaagtccatatgtttagtggaataagtccactgggccaagagtatctatg

SEQ ID NO: 257658 - DNA, 621 bp, Homo sapiens
aagtggcctggatcccacaaaagcaagtcagcaggtcatggccagggccactactttggcagctggagcagctctgatggggacaactttcagtctcgtccactgatttcttgaggccattttctatgggttccttttgaactgctgtttcaactttgcttggaagaaccaggatcttttagagcttattcttagaaggtggtggagtcttagatgagagagaatctgttttcatgcagaaaatcatgggttccagttctgggagaatgcccatccacccaaacttcccatctctaggaaaatcactgcttatctttgagaaattccgcagaaggtggagaatttagtgtcactagtcacccattctgaaggtcttgcaaaatgcaactagcatatattagaccattgcacccccgttgttctacctaaactgcaatctctggctggatcatctgaaaggaaaggaagtacctctgagctcgggtgggctcagaatctgggagaaagttttatatactattacctacaggtttttactgttcatttagcttcaagcaccgacaccgccttgcaaagataaagataaagtctattagacaatttaatcatgagattctaatg

SEQ ID NO: 257659 - DNA, 217 bp, Homo sapiens
agggacatattttttttaatgtgtgggtaaagagttttccttcttcaacaagttcaattgaagaaagcttcttatgcctatttcaaaacacacgcacaaatttaggagcagtgagatgaattctcttgcagctattttgatttgagttgtttcccccttggaatttgtggatagaaactgttatattaggctccacatcattagttatatttcaact

SEQ ID NO: 257660 - DNA, 680 bp, Homo sapiens
gaaaaagccccacttaactttagctgatgtaaacaagtatatttaagaagtgtacgtaaacaagtttatttaaatataattcagcatattctcctcgaaaacattgaattcccaaacagaataataagtttaaaattaatgtggtttattaacaattaaaaatgataacacaagctgaagaagattggaggtgaaatgttgagtttcctttgataggtagagtaattacaaagtgtgcttttgaagttcaagaagacagccttaggacacaacatttttaaagtaaaaattggcttgcactctgttcaagtgatttattttgcactaagaaatgggtgtgagacatgatgtgatttaaaatttcatcccttgatggaactgcttgagggtgacatgaatttttttcttttttcttttctcagcctgctcggcctatgaagtttcctatctaaaagttaatcttctgaaattacttaggaatgtaaggaaacctaatcttttggtgtgtaaacaaaaaggactaagtatatcactccccctctgacacccaggagcccagaagtggggtgcctgctaattaattaccttcagaaaactgcacctttaccatctttctctgtctaagaaggcttgaaagatgtggggaattgaagaggggaggtagaatgtactcaaagaag

SEQ ID NO: 257661 - DNA, 346 bp, Homo sapiens
catgatggcatgcccttgtagtcccagctacttgggaggttgaggcaggaggatcgcttgagctcaggagtttgagttacagtgagctacgatcgtgtcattgccctccagcctgagtgacagagagagaccaagaaagaagctggaaaaatgactgttggctgggatgaaatgagtttctttgacttataaagtgtaaattttaagatcattactttggcaaagttagaaaagatatatctttatgcaaaagtacaagaataagacttctgttgaatttgaaatgcattctttaaacaattatccccaagattgaacagtcttctgtaatagaaattagtggaaa

SEQ ID NO: 257662 - DNA, 430 bp, Homo sapiens
ctggcctatcttctattaatttcttctaattagctattatcaggaaagcactgaatgtctgcctgatgtgattcctacccacctgatgggaacattcaatgataatgctgaacagataattcaagtgctgacacgccctgttgtctgttgtcttatcacagtgctttgagtcaaatacggcagatagcattatcttcatcagatcctggacctctgaagatgaggggacttgcccaaggccacagggaggtttcatttctctgcaaagccggatcactaagggcatgggctctggagttgggcacatctacagtcacatcccagctctgagagttactagcaatgtggctgcagtgctcctctcagtgccccccttaccctcaacactgtaggaagtcctgccaacttctgactgccatcaccttcattt

SEQ ID NO: 257663 - DNA, 262 bp, Homo sapiens
ttaggggctcttttgcaggggaaggaaagacagggggacttttgcttctacaaaggaaagactagtgccttgtctcctgggtgaggcttgtcattgggatggattcacaggcgagcagaaatggcagaatttatggggcccgtgctcccagggggtggccgctccttcagggggttccacagtagcagaaaatgcattatattttgggatcatttgttagtgtctcatttctaccatctgtatgagaataaacagaagctgc

SEQ ID NO: 257664 - DNA, 353 bp, Homo sapiens
actccaattggtgtattggtttaagaacctacctttacatagggatcccagaaaatcaagacagttagctcaaattgcaaaaactctgaagtctgaattcagtctgtgcgaccaaaggtctcggaagagggtgctcttgtaagagagatcagcctgcaaggtcccatgatcagatgacactggccacacaaaaactctggaatgcatttcaaacacaagtgtctcattacagctggcatcttagcctgcagcgggcactcttcttgggcagatgcttagcactgggagactggcagcatcaggttcttcagaaatgcttggcagaccagcttcctcctgtgtctaccccacat

SEQ ID NO: 257665 - DNA, 355 bp, Homo sapiens
gatgtatggaacgcttccccctttcaaagtgttaagtactttgctgtcagcatcaccatcacagcctgcgaactcgacactaaagagagagaagtggaaaaggcaaagtaagaacaaaagccagccacgtcacagggctcagaactcgtcctgacagctggcccctccctccccaggcctgacatgaaagggtcctttccaagctcgctggagactctctgacccccatttcttccggtcctgagccccagctattgtggtttccctgcggacacctcacatatcaccgacagcagaccagaatcccgagccttctgttcttcacatatttcccacaccttttttaccctacaac

SEQ ID NO: 257666 - DNA, 419 bp, Homo sapiens
tctctatccaccttgattcctggtgtgtttctgaaattccttatctcttaggagggagactctgccttgaaaggtacctttttgaacgtgagtatttttcactcctcacaactgtatcaaaaagggtaacaatggccaggccaggcacggtggctcacgcctgtaatcccagcactttgggaggctgaggcgggccaatcacgaggtcaggagatcaagaccatcctggtaacacggtgaaaccccgcctctactaaaaatacaaaaaaaattagctgggcgtggtggcaggcgcctgtagtcccagctactcgggaggctgaggcaagacaacagggtgaacctgggaggcggagcttgcagtgagcagagatcgcaccactgcactccagcctgggtgacagagcgagactctgtct

SEQ ID NO: 257667 - DNA, 1336 bp, Homo sapiens
ttggtccaagcaagaaggcagtggtctactccatcggcaacatgctggtcctttatggacacagcacccaggaccttccggaaaccaatgcccgcgtagtcggagggactgaggccgggaggaattcctggccctctcagatttccctccagtaccggtctggaggttcccggtatcacacctgtggagggacccttatcagacagaactgggtgatgacagctgctcactgcgtggattaccagaagactttccgcgtggtggctggagaccataacctgagccagaatgatggcactgagcagtacgtgagtgtgcagaagatcgtggtgcatccatactggaacagcgataacgtggctgccggctatgacatcgccctgctgcgcctggcccagagcgttaccctcaatagctatgtccagctgggtgttctgccccaggagggagccatcctggctaacaacagtccctgctacatcacaggctggggcaagaccaagaccaatgggcagctggcccagaccctgcagcaggcttacctgccctctgtggactatgccatctgctccagctcctcctactggggctccactgtgaagaacaccatggtgtgtgctggtggagatggagttcgctctggatgccagggtgactctgggggccccctccattgcttggtgaatggcaagtattctctccatggagtgaccagctttgtgtccagccggggctgtaatgtctccaggaagcctacagtcttcacccaggtctctgcttacatctcctggataaataatgtcatcgcctccaactgaacattttcctgagtccaacgaccttcccaaaatggttcttagatctgcaataggacttgcgatcaaaaagtaaaacacattctgaaagactattgagccattgatagaaaagcaaataaaactagatatacattatcatactgtgtctatttgtaattaagccctccagagcaggggtccctatgcctgatgatctgtcactgtctcccatcacccccagacaggaccgtctagttgcaggaaaacaagctcagggatcccactgattctacattatggtgagttgtataattagttcactatatattacagtgtaataataatagaaatgtagtacacaataaatgtaatgcccttgaatcatctcgaaaccatcccccaccccggttcgtggaaaattgtcttccacgaaacgggtccctggtgccaaaaaggttggggaccactgatttagaagaaatgcagttataggatccaagttggatttcaccacatctgcaggctgggtcttccctttg

SEQ ID NO: 257668 - DNA, 618 bp, Homo sapiens
atacttaactgggagccctgaggaaacaagaaaggaggtaggcaggagttactgactgtggacataactgtctttccttcaggtcatcgcctccaactgaacattttcctgagtccaacgaccttcccaaaatggttcttagatctgcaataggacttgcgatcaaaaagtaaaacacattctgaaagactattgagccattgatagaaaagcaaataaaactagatatacattatcatactgtgtctatttgtaattaagccctccagagcaggggtccctatgcctgatgatctgtcactgtctcccatcacccccagacaggaccgtctagttgcaggaaaacaagctcagggatcccactgattctacattatggtgagttgtataattagttcactatatattacagtgtaataataatagaaatgtagtacacaataaatgtaatgcccttgaatcatctcgaaaccatcccccaccccggttcgtggaaaattgtcttccacgaaacgggtccctggtgccaaaaaggttggggaccactgatttagaagaaatgcagttataggatccaagttggatttcaccacatctgcaggctgggtcttccctttg

SEQ ID NO: 257669 - DNA, 353 bp, Homo sapiens
aaatcttgacagcaacaagacaaaatggctcatcacatgcaagggagcatctgtaagattatcagcagatttttcagcagaaactttacaggccagaagtcagtaggatgatatatttaaagggctgaaagaaaaaaacctagaagaatactacatccagcaaagtgtccttcaaaaatgaaaaagaaattaagacattcctagataagagctgaggaacttcattaccactgtattttccctacaaaatcctaaagaaaatccttcaagttgaaacaaaaggatactagacaataattcaaagctatatgcaaatatgaaattccccagtaaatgtaaatatttggacaaat

SEQ ID NO: 257670 - DNA, 176 bp, Homo sapiens
ttctattttttatcctttaaaaatgcttttaaaatggattataatcatattagctaagaaatactaattatggctagcttttgggcacatagtatatatctgaatactaagcagtttacatatattcatttaatcttaataccctgtgaggttggtactattattatccgtcgact

SEQ ID NO: 257671 - DNA, 1562 bp, Homo sapiens
ttcaggatgatgatgcagctcaaggagttatctctgccagtgcatcaaatttggatgatttctacccagcagaagaagacaccaagcaaaattcaaataacactagaggaaatgccaataaaacacagaaagatactggagtaaatgaaaaggcaagagagaaattttatgaggctaaactacagcagcaacagagagagctaacattgcaaacggcatgccctgacttacagttgtggtcagaaatgagaagacatgaaatgttgagggaggagctgcgacagagaagaaagcagcttgaagctctgatggctgaacatcagaggaggcaaggtctagctgaaactgcatctccagtggctgtgtcattgagaagtgatggatctgagaacctatgtactcctcagcaaagtagaacagaaaaaacgatggcaacttggggagggtctacccagtgtgcactagatgaagaaggagatgaagacggttacctttctgaaggaattgttcggacagatgaagaggaggaagaagagcaagatgccagttccaatgataacttttctgtgtgtccttctaacagtgtgaatcataactcctacaatggaaaggaaactaaaaataggtggaagaacaattgccctttttcggcagatgaaaattatcgtcctttagccaagacaaggcaacagaatatcagcatgcaacggcaagaaaaccttcgttgggtgtcagagctctcttacgtagaagagaaagaacaatggcaagaacaaatcaatcagctaaagaaacagcttgattttagtgtcagtatttgtcagactttgatgcaagaccagcagtggatgtccagacttccctccaggctaacactgaggctactgaagaaaatgaacatgatgaacaggtcctacaacgtgactttaaaaagacagcagaaagcaaaaatgtcccattggaacgagaagccactagtaaaaatgaccaaaataactgtcctgtgaaaccctgttacctcaatatcttggaagatgagcaacctttaaatagtgctgcccataaggagtcacctcctactgttgattcaactcaacagcctaaccctttgccgttacgtttacctgaaatggaacccttagtgcctagagtcaaagaagttaaatctgctcaggaaactcctgaaagctctctggctggaagtcctgatactgaatctccagtgttagtgaatgactatgaagcagaatctggtaatataagtcaaaagtctgatgaagaagattttgtaaaagttgaagatttaccactgaaactgacaatatattcagaggcagatctaagaaagaaaatggtagaagaagaacagaaaaaccatttatctggtgaaatatgtgaaatgcagaccgaagaattagctggaaattctgagacactaaaagaacctgaaacggtgggagcccagagtatatgagatgtcttcagaggctcatctaactctgtccttacatactcaatgcatatatgaaaacaatactaaataaacatctgcatctgtataa

SEQ ID NO: 257672 - DNA, 924 bp, Homo sapiens
ttcaggatgatgatgcagctcaaggagttatctctgccagtgcatcaaatttggatgatttctacccagcagaagaagacaccaagcaaaattcaaataacactagaggaaatgccaataaaacacagaaagatactggagtaaatgaaaaggcaagagagaaattttatgaggctaaactacagcagcaacagagagagctaacattgcaaacggcatgccctgacttacagttgtggtcagaaatgagaagacatgaaatgttgagggaggagctgcgacagagaagaaagcagcttgaagctctgatggctgaacatcagaggaggcaaggtctagctgaaactgcatctccagtggctgtgtcattgagaagtgatggatctgagaacctatgtactcctcagcaaagtagaacagaaaaaacgatggcaacttggggagggtctacccagtgtgcactagatgaagaaggagatgaagacggttacctttctgaaggaattgttcggacagatgaagaggaggaagaagagcaagatgccagttccaatgataacttttctgtgtgtccttctaacagtgtgaatcataactcctacaatggaaaggaaactaaaaataggtggaagaacaattgccctttttcggcagatgaaaattatcgtcctttagccaagacaaggcaacagaatatcagcatgcaacggcaagaaaaccttcgttgggtgtcagagctctcttacgtagaagagaaagaacaatggcaagaacaaatcaatcagctaaagaaacagcttgattttagtgtcagtatttgtcagactttgatgcaagaccagcagactctatcttgtctgctacaactcttctcccgggatacagggatacgctccccgggataccagggggatccttctagat

SEQ ID NO: 257673 - DNA, 904 bp, Homo sapiens
ttcaggatgatgatgcagctcaaggagttatctctgccagtgcatcaaatttggatgatttctacccagcagaagaagacaccaagcaaaattcaaataacactagaggaaatgccaataaaacacagaaagatactggagtaaatgaaaaggcaagagagaaattttatgaggctaaactacagcagcaacagagagagctaacattgcaaacggcatgccctgacttacagttgtggtcagaaatgagaagacatgaaatgttgagggaggagctgcgacagagaagaaagcagcttgaagctctgatggctgaacatcagaggaggcaaggtctagctgaaactgcatctccagtggctgtgtcattgagaagtgatggatctgagaacctatgtactcctcagcaaagtagaacagaaaaaacgatggcaacttggggagggtctacccagtgtgcactagatgaagaaggagatgaagacggttacctttctgaaggaattgttcggacagatgaagaggaggaagaagagcaagatgccagttccaatgataacttttctgtgtgtccttctaacagtgtgaatcataactcctacaatggaaaggaaactaaaaataggtggaagaacaattgccctttttcggcagatgaaaattatcgtcctttagccaagacaaggcaacagaatatcagcatgcaacggcaagaaaaccttcgttgggtgtcagagctctcttacgtagaagagaaagaacaatggcaagaacaaatcaatcagctaaagaaacagcttgattttagtgtcagtatttgtcagactttgatgcaagaccagcagactctatcttgtctgctacaaactcttctcacgggtccttacagtgttatgcccagcaa

SEQ ID NO: 257674 - DNA, 2926 bp, Homo sapiens
atgattttttttccatggactttaaagaagttgttgaaaacctggttacaaatgataattcacctaacataccagaggcaattgatagactcttcagcgacatagcaaatatcaacagggagtctatggctgaaataacagacattcagattgaagaaatggcagtaaacctatggaactgggcacttaccataggaggaggttggcttgtaaatgaagagcagaaaattagattacattatgttgcttgcaagttgctgagtatgtgtgaagcctcatttgcctcagaacaaagtattcaacgactgattatgatgaatatgagaataggaaaagaatggttggatgctggaaattttctaatcgctgatgaatgttttcaagctgctgtggccagtctggagcaattatacgtcaaattaattcaaaggagctcccctgaggctgacttgaccatggagaagattactgttgagagtgaccacttcagagtgctttcttaccaagcagagtcagcagttgctcaaggggattttcaaagagcatctatgtgtgtactgcaatgtaaagatatgttgatgaggctcccccagatgacttcaagtcttcatcatctctgttacaactttggagtagaaacccagaagaataataaatatgaagaaagttctttctggcttagccaaagctatgatattgggaagatggataagaaatctactgggccagaaatgctggctaaagttctacggctattagccacgaattatttggattgggatgacaccaaatattatgataaggctctcaatgctgtaaacctagcaaacaaggaacatttaagttctcctgggcttttcttaaaaatgaaaatcctcttgaaaggcgaaacatctaatgaagaactccttgaagctgtcatggaaatactacatcttgacatgcccttagacttctgtctgaacattgctaaactgctgatggatcatgaaagagaatctgttgggtttcatttcctgacgattattcatgaacgttttaagtcatcggaaaatattggaaaagttctgatactccatactgacatgcttttacaaaggaaggaagaacttcttgccaaggagaagattgaagaaatctttttagctcaccaaacaggaagacaactgacagcagaatcaatgaactggttacacaacattctgtggagacaagctgccagtagttttgaggtacaaaattacactgatgccctacaatggtactattattctctgaggttttattcaactgatgaaatggatctggacttcaccaagctgcagaggaacatggcttgctgttacctgaatttgcaacaacttgataaggccaaagaggcagtggcagaagctgaacgacatgaccctaggaacgttttcactcaattttatatattcaagattgcagtcatagagggcaactctgaaagagctttgcaggcaataattactttagagaatatattaacagatgaagagtcagaagataatgatctagttgcagagagaggttcacctaccatgcttctaagtttagctgcccagtttgctctagagaatggacaacaaattgtggcagaaaaagctttggaatatttagctcaacattcagaagaccaggaacaagttcttacagctgtaaagtgtttgcttcgttttcttcttccaaaaattgctgaaatgccggaatctgaagataagaagaaagaaatggatcgacttttgacttgcctgaatagagcctttgtgaaactttctcagccttttggtgaagaagccttaagtttggagtcaagagctaatgaagctcagtggtttcgaaaaacagcttggaacttggctgtgcaatgtgacaaagatccagtgatgatgagagagttttttatactttcttataagatgtcccagttttgtccttctgatcaagtaattctgattgcacggaaaacatgtttacttatggcagttgcagttgatctagagcaagggagaaaagcttcaacagcttttgaacagaccatgttcctgagtcgtgcacttgaggagatccagacatgcaatgacatccataatttcctgaaacaaacagggaccttctcaaatgattcatgtgagaaattgcttctgctgtacgagtttgaagttagagccaaattgaatgatccattactggaaagcttcctggaatcagtgtgggagttgcctcatttagaaactaaaacatttgaaacaattgcaataatagcaatggaaaagcctgcacactatcctttgattgctctcaaggccttgaaaaaggctttattgctctacaaaaaggaagaaccaattgatatatcacaatacagcaaatgtatgcacaacttggttaacctctcagtgccagatggggcgtcgaatgtagagctctgtcccctggaagaagtttggggctattttgaagatgctctgagccacattagccgcactaaagactacccagaaatggagattctctggctgatggtcaagtcctggaataccggagtacttatgtttagcaggagcaagtatgcatctgctgaaaagtggtgtggcctggccttgcgtttccttaaccaccttacctccttcaaggaaagctatgaaactcagatgaatatgctgtatagtcagcttgtggaagcattgagtaacaacaagggcccagtttttcatgaacatggctactggagcaagtcagattaggcaagctcatggccacatgaagaagatacattgtcccgagatgctgactgtttaaatttttgccagagtttctcttgagcttttgtttctgtttgctcagaccctgttttcatgttgttgaataaactttctaaaataaaagcatgctgaatttacct

SEQ ID NO: 257675 - DNA, 619 bp, Homo sapiens
gtcattttattactttagaaaaatgttttgtaaataaacttgggaaggaggcaccaaagttgctgtgaaaagaagaacaaattatgaacaaaaaaggccaataaataaatggtagttatcatgacatccatagcgggtcttccataagtcatagtaatcattccctgcaggaaagcagccactatccatccagggacactaacatcattttattcaaagacttgagggggccaccattcacatatggtagccacacaatctttggacaagaaaatgaagagtttggggaacagcatcatctgccttaggaaaaactcagagccctggtctagaataaactctagggctctgagaaaatgattctctaaaactatcagaagtctacggaaatatggagatttttttcaaagctatgtttaaatacattcggtaaatctgaaatatattaataaacattgttatgtctttctattaagaataattgtgataagaattccccaccaaaatcacctccgtgttggctggacaacccgatgtcattgctaaaagagtgaaaatgtttcagtctctgatattaccaagtaaacataataaatggctgtgatggttaacactcagt

SEQ ID NO: 257676 - DNA, 550 bp, Homo sapiens
aggaggttgaggctgcagtcaactatgatggcaccactgcactgcgtcctcagcaacagagtgagacccttttgcccaggatgcagtgcagtggtgcctcaataaatgaatgaaaataagaaaaaaaaaagtcctaagaatccatttctttccacctctggatcgtgacccaatatcacctaagaaggagcttgggaggaatgttaagaggtgtggattctcatcctgactcttccacctcttggctttgacttcaggcagaccctggaatttttctgaaattttgcttactctgttaaatgggaatcacaatgccatccgtgcataagaaggcaccccacagacctctatttacagaaagcagaattgactatgggctcccagctgtgacactgaaatccatcatcatgtttatgctgaaaccagattccttgaggctccttctagctagttcctgggtatggaagggatactaaggcaggcccatttctgggagacatgctagacgtgcccttggcaaaacatttgtaattacttttcctggaagaaa

SEQ ID NO: 257677 - DNA, 747 bp, Homo sapiens
cacagctttgaaagggggatgggagagcgagcagaaagcagaaaaaccagctttgaactatgcatgcaaggcctctttcaagcctcaaattctataaggacggcttgagccagggcagttcaggaaacacttgaggagcagaggcagcagggcgctggaccagacagaggacgggaatgtccaagaagtggtctctgtgtgcggtaatgagccgagattacagctggcagctggaaactaaaccccatgggtgccacccagagagagctgagactgaccatggagtaacggccaaggtcatgtgtgtagccccgggccatggagagggggtaccctggaggggctgggctggctggctgggctcaggctgtctgacaggcaacgggctccccagtgttctgaagagggagtggccctggtggtaactctctgtggcttagaggggctgaagctagaacaccgctgtgactccgggcccgctggttccctgagggcaagggccaccttgggtcatcgctctgaacaccttccccttgctctgagaagcacagatggccagtgtgaactgcctcagcaatccagggactgtgtcctctcattaagatatcatggcaaatcacgagaagacacaaaaatcaaaacatgcaagagaagaaaagactaatgaaagcagagattccctgcgcggctctttctaagctgactagaagagcagcaggcactccgataacttccgcacagtccatt

SEQ ID NO: 257678 - DNA, 567 bp, Homo sapiens
attctctagtcaacagatatttattgagcatctactacatttcaggcatcttaaacttacttcctgtttataacttactgttgattttgcacatggtgaatattttctatttagttgagatgtgcacctcctctctagttttataatatcaaattaagtctcttctgttcaattgaagcctcatatgccaaaaaatagccatgaactgacatgacaaagaatgagtaaccagaggcatcggcatttcaatgtgttataaatatttgaatgtgtgtgtgtgaagggggtatttttttcttgatgttaccagtgtaaataatccaaatataagtatatatgaataaatgtttagatacacataaattatacctttgaaatatccacaccacagtgtcttagaaccagggtactttgcttatgaagaaaataggagtggcggtctttttaatcaaatagaagcatgctttacaccatatctgcatggatattaaaatataatccttagcctatacctgaggtttttttcctagcataatgcaaaattaaaagatcacatctaatcacctt

SEQ ID NO: 257679 - DNA, 251 bp, Homo sapiens
ttgcccgctccaccatcggcaatcactttcccatatttttgctacccctgctgtgatagatgtatctcagttccttggttatgccatcctcgggataatcacacatgctgcttcacgccctacaatccagtttcatcctctctgcatcctgctaactccttctattcctccaggacttgggtcacttcacttctcttcatttctttctgttttcttttcttttcttttttttttttttttttgagacggag

SEQ ID NO: 257680 - DNA, 422 bp, Homo sapiens
atgtgaccttatttggagaaagggtctttgcagatgtaagtaagtgaaggatcttaagatgagatcatcctggactacacccaatgataagtgtccttaaagagacagaagagaagacacacagagaacgccatgtgaaaatggaggcagagattggagggatataggcacctggaatgcagagggagtgaattcctgccaacacataaatttcagacttctgggccccagattgtgaagaataaatttctattgttttaagccactcagtttgtggacatttgttacagaagccctaggaagctaatacaaccctcaccacctgctttcccaagttgtgttaacaaatatctaatatttatttagcacttgttatattcagctttaaatagataattacattaaactttcacagcaatctt

SEQ ID NO: 257681 - DNA, 347 bp, Homo sapiens
ctaattgatgcaggagtgatttatggggaaatctaggggacagagtttagtgagacaggtgtagtggggccagagtatagagtgcacagtggggaagtggtgagggagaaggcgcaagtgatcaacagggcagccagatcatgcaggtcctttaggtaagacaggtatgtttgtcacacaaaccagaatatgtaaagattaatatagagttcgataattaagccaagacaacagatctaaactggggctgttcatggcctgctggtgaatccataaaccttaacagaaagttttgttttttttgttttttttgttttgttttgttttgtttttggtaagggtagtag

SEQ ID NO: 257682 - DNA, 1471 bp, Homo sapiens
aggattattcgtcttctccccattccgctgccgccgctgccaggcctctggctgctgaggagaagcaggcccagtagctgccaccatccagcagctgctgccgcagccattacccggctgcggtccagagccaagcagcggctgagcgaggggcatcagctaccgccaagtccagagccatttccatcctgcagagccccgccaccagcagcttctgccatctctctcctcctttttcttcagccacaggctcccagacaggacagccatcatcaaagagatcgttagcagaaacaaaaggagatatcaagaggatggattcgacttagacttgacctatatttatctaaacattattgctatgggatttcctgcagaaagacttgaaggcgtatacaggaacaatattgatgatgtagtaaggtttttggattcaaagcataaaaaccattacaagatacacaatctttgtgctgaaagacattatgacaccgccaaatctaattacagagttgcgcaatatccttttgaagaccataacccaccacagctagaacttatcaaacccttttgtgaagatcttgaccaatggctaagtgaagatgacaatcatgttgcagcaattcactgtaaagctggaaagggacgaactggtataatgatttatgcatatttattacatcggggcaaatttttaaaggcacaagaggccctagatttctatggggaagtaaggaccagagacaaaaagggagtaactattcccagtcagaggcgctatgtgtattactatagctacctggtaaagaatcatgtggattatagaccagtggcactgttgtttcacaagatgatgtttgaaactattccaatgttcagtggcggaacttgcaatcctcagtttgtggtctgccagctaaaggtgaagatgtattcctccaattcaggacccacacgatgggaggacaagttcatgtattttgagttccctcagccgttacctgtgtgtggtgatatcaaagtagagttcttccacaaacagaacaagatgctaaaaaaggacaaaatgtttcacttttgggtaaatacattcttcataccaggaccagaggaaacctcagaaaaagtagaaaatggaagtctatgtgatcaagaaattgatagcatttgcagtatagagcgtgcagataatgacaaggagtatctagtacttactttaacaaaaaatgatcttgacaaagcaaataaagacaaagccaaccgatacttttctccaaattttaaggtgaagctgtacttcacaaaaacagtagaggagccgtcaaatccagaggctagcagttcaacttctgtaacaccagatgttagtgacaatgaacctgatcattatagatattctgacaccactgactctgatccagagaatgaaccttttgatgaagatcagcatacacaaattacaaaagtctga

SEQ ID NO: 257683 - DNA, 533 bp, Homo sapiens
aaggtcgatagacctccttcactatctgaatttttatacacacgtacacgtataccatttctatcccccttgtcattgcggtccaagtgacttgcagatattcattgtaatcagaggatgaagaagctgcttcctaattgctcccccattttttcttctctggccagtctctctcatgtagaagtgttgtggccaccttttggaggaagacttcttttaggccgaagctctctttaccctattctcagcactttaggatttcccagattgccattccttggctgaatctactgtcttcaaaatcagttgtaaggagctctgtagtgacagaggtggttcataggtaggggtacttctggaagagggcaggcagaaaatcccagaggagtggggcttttaagaaattgtgacatagctgggcatggtggctcacacctgtaatcccacaactttgggaggccaaggtgagtggattgcttgagaccaggagttcaaaaccagcctgggcaacatagtgggaccctgtctctatt

SEQ ID NO: 257684 - DNA, 419 bp, Homo sapiens
gtaaagtttcctggatgtttaaagcatgaagcacagaagaaatctctttgcattccagtaaaaatcaataaaatatttttcatgcaaagattaaactcatggctaaaagttatgtttgtttttttaacattgctaattattttagagagctcttatttctgttataattttgtttaaagtttatttctatattcatgattaatttatttatatcttgttgctaaatctacttttttaccaagtaaattcactcagaaattctcaaagttactcactactgggccttcagggacatagtaccttcttggagatgcattcttccaatgaccccaatcagatatttttttctgtcttggacttccattgttgtactagttttgtatctgaatttaacacctactccaatctacttacatcag

SEQ ID NO: 257685 - DNA, 698 bp, Homo sapiens
ggaaaaattcaggccaaaaaaacaaaaaacaaacaaacaaactcagataagtagccccatgtggaaatactttactgtaaacattgtttttattcttcatcatcttggataaaatttactatgtattatttcccccagaataagcttttccatatactttgcaccaaacatatcctcatctcaccctatttgatctctctatgcactgttgggagagactgtgtatctgattggctgtcaaggagtatctctactcaagtgactttattactattaattttttaactcccagaaattatgaagaaaagcaaaacaaagcaatacaaaccaaattgatcaaagagaataaatgagctgacgtctgtgaaagcttggcaaaacttaaatttcttttgcctctgaagataaatatgatttctagctcccatgtcttcatctttaaagatgagttttggaagagctcactggtggtgagtgctggaagaagtaagattaatctatgtgtgctttacattatatttcccagataattgtacactttgtataccttgtaaaagttattcttatttgaaggttgatggcaatggacatttgtcatccactattatgaatttttctagacatttctatgggttatttagggtaatttagaaagcagtgttttaagttgtctaaatataaatgcaatattcatttta

SEQ ID NO: 257686 - DNA, 643 bp, Homo sapiens
gcaaaatgatcatcaggactctgcattgtttttcattaaagcatgagtctcaataactgactgcattacaggctgtccaccatttttaggggagtgcctagggctaagaatagtcattaggtacaactcagtgtgcagagtctccaacttttttgagcccattgacttagggccaggagcaataaccacaaaattgcttccctagctttctcagagcccatctgctggatttttcaattgactcactggatatcttggtatgtgaatcagaggataaagagactattgttccatgtcagaattgaaaagctcatgtaaataatacattagcattctagccgcatggtgtctgctggcactttctaagagatgattgattgacatgactggcagagtgccctgtgggatgttgagtctcttgcaattgatccagtagcctccccatcacccttccactgagagtgtcctgcaggctcactagtacctaccaaagtgttccttccagaaaggctttgtgcttcattgaccaccctgctctttgtggtagtttgttagaaacagaaatgccagtttttgagttggtctattaagataacatgccaaactcaaagtaacaattaaccttattcacttactagcatat

SEQ ID NO: 257687 - DNA, 610 bp, Homo sapiens
caggagcagaggaacaacacacagcgccatgcatgggggacaggagtggcgacgctaatatttacatgcctgccaagttggataaacaggaatatcctgagccatagaatgcaggcctttccagatcaggcccttccttatttattggaccacttttgtttaaccagcaaaagagcagtggtctccattcggttcatcagttctcccaacggcttgttagtgtctgggcagtgcggtgagacagaaagcccaggggtgtctggaatcagataggtccaggtttgaattctgctcctgccccttactgatccagtgacttggaataagttacccaaggaagaaagaacattaacttgattgagtgccttctggagccaaaggctttatcgatgctatctcattaacatagcttcttgaggcccaattacttcacctgtcaagtggggatgataaaatcatccttgaagggttatagtgaagattaaataggatgaggcattgaaagtgtttggcacatcacgagagaccttctttcctcactctaaactcttcagagtttgtacctgtatatctgccaaatcaacattattttatctctcacgaaattaaa

SEQ ID NO: 257688 - DNA, 794 bp, Homo sapiens
caagatcaccgcagaacgtgaaggcgggttgcccaacggaggatttacaaacatttgggaacgactttttctggcaggtcgctgtgagaactgcaggactttctgcacacaaagacacagtctaaacctctgcactcaaagacgaggaactctagcgtggcttataggagcatgactcaaggtcccccaccctccgctgccgcctaacctcgaccccagtaaaatgtcttcccgagaaagctcaaggcagccaggagaattccccgtttattctagccaacacccgatggtaaagcccctgacctcccttttttaggatattttcttaaaagggcttacaactgtgaatcctttctctgttgctttgagatgtatatgtatcgcctacacctcagaagtgtctttctcaaggacctgaaagccattgctctgaaatgcagtcatggggaggataggcctctgtcccccagtctctgtgggaggatagaatcccagcttcataacggccagctccaggcacagctgcccgtcattaatactgaccgccccttcatgatttttcacttgatcccctgctagcttcccggccctattctctccttcaccctttaaaacgcccattctgctatgcacaaatgagaatgatcagctttttctcctactgtaagtagttactgagtaaaatctgttttcatggtttaaaaaagaacaaacaagagagaccacgaagcagaaaaccgaacacagcaccaacaaaaagaacgagaaacaaggggggggcgaaaaaaaacaca

SEQ ID NO: 257689 - DNA, 449 bp, Homo sapiens
tttaagaaagcgacaaactgtttactagattacctgtagaaaagtttacattcccaccagtaacatatgagtgatccagtttctctgcatcttcatcagcacttaatgttgtcactattttttattttagccattcttaggtagcaatatttcattgtagttttaacttgcatttcttttttttttttttttttaatttgagatggagtgcactccagcctgggcgacgagcgaaactccatctcaaaagaaaaaaaaaagaagttataatttagaagaatagtgacatggaaaatactcttgtgttattaggtaaaaactgtagaaaaatacagtgaaaatatatactgtgatattaacagtgagtttgtctaaaaatttttttatttgtgttttacaaatgatctacagtacacatatacttctaaagaataaaaatgttacttagt

SEQ ID NO: 257690 - DNA, 452 bp, Homo sapiens
gttcagaatggtattgcctaggttgtcttccagggtttttatacttttgggttctacatttaagtctttcatctatcttgagttaatttttgaatatggcagaagaaatggtccagtttttatctgctgcatatggctagccagttatcctggcattatttattgaataatattgaatattgaatttattgttttcattgatttcataaaagatcagatggtcataagtgtgtggccttatttctgggctctctattctgttccactggtctatttgtatttgtcgcagtatcatgctcttttgcttacagtagccctgtggtatagtttgaagttgagaaacatgaaaataatcttagttctaatctcaacattttcctgtgattttatttctctctgggcctcagttttcttatctgtacaatgagaagtgcactatgtcatgtagggtc

SEQ ID NO: 257691 - DNA, 177 bp, Homo sapiens
tgaggcctcttggagctcaggggtaagagtgtggagactgaattcgttctgtctgccatgggtgctgaaaggcgcatctcagctcctgcaccatctcagtcacgacctttatccctgtggccacatgcgtcaccctactgcatcctccaagcaacctgggcggcaggcagggcaaga

SEQ ID NO: 257692 - DNA, 690 bp, Homo sapiens
tctgggtatacatgcaaaagaaattaaatcactatcttgaagagataccagcaatctcatgttcactgaagcattattcataacagccaagacacagagtcaacctaagtgtccatcgacagataaatgaatatatatacttatatatgaatgcaaatgaatacatgttggaatacacacaagtggaatatttcccagccttagaagagaagggagtcctgccatttgcagcaacatgaatgaacctagaggacattctgctgagtgaaacaagccagtcataaaaagataaatgtcatatgatatcactgttaactcgtatctaaggcctgtctcaatcaatttaggaagcttattttgccaaggttaaggacacacctgtgacacagcctcaggaagtcctggggacatgagcccaaggtggtttgggtacagtttacttttatacattttagggagacatgaaacatcaatcaatatgtgtaagatgtatactcgttcagtccagaaaggtaggacaacttgaagtggggaggggttctaagttataggtagacaggaaacaaacagttgcattcttctgggattttgatgagcctttcagtgaatacacaacttacatgtgagagggggtagaggaattgtcatttaagccttagtctggctcagtgaatctggatttttacataa

SEQ ID NO: 257693 - DNA, 280 bp, Homo sapiens
gtgggttgtgcctgtagtcccagctactcaggaggctgaggtggaggatcacttgagtctgggaggttgaggctccagtgaaccatgattgaaccactgcactccagcctgggcaacagagcaagaccctgtctcttaaaaagtaaacagaaacaaaaaaataaataaaaacactttggtcatacaatccagtttgttgatttacaaatcaaatggtaccagtatctgccaatgccctgcctggtacaaatacaaatttttttccagacagttgttatgc

SEQ ID NO: 257694 - DNA, 214 bp, Homo sapiens
tactgctgcaaagtggcagagccaaaacacaaacctgatcttctaagtccaatgcacacctcacttagcacttacaaagtgaacttactacggtttcatcttgggacttctcaagactgaactattagactaaatgcatctactgtgaactccctgagttgggggcggggggtccatgtcttattccctctatatctccagcacacagacagca

SEQ ID NO: 257695 - DNA, 907 bp, Homo sapiens
aaaaataatataaaagaacaacatatttcatagtaaagcatccaattatagtttactcagaattgagagcagaaatggagagggggaaatatattttctgtagaattaccatgccatgaaatactatatatttattagacaggactgacaaatttgtctttaagcttcattgtagcaaaagctaatatggaaactggttaggtacaatacttacagtgcctgtattgtaaaaaacaaaaacaaaactattgcctaagagtaagaactatcatgatactgacaatgtaagtcttctgttgtctattgtctaatgcctttagagacattctcaacactcctgaaacaaacacaatgataaatctcattggctgcttgttaaagctccctttaaatattacatgtagagtatcagtgctaagtataaggaaaaaataaaccttgagtatagatgtggcttctacagaatatcagtgctaaatagaagaaaaaaattaatcttgagtacagacatttcttctacagtaagaaaattggaatgacctaactagtcaaatgtttcccttacaatgatattagggagttcaaagctaatttttttatcctcttatagtaaccattatatgtttgcttttaagtaccatattgtctgttggaaattttgacatttttttttgtttcactttcccatcattattacgtgttgttctgagtggtttgtatgatcaacagttgaaaccaaagagctggagtaggatgtgaagaagaggacaaaaacccctgggcagagacacaccaaattcaaggtaccctgggaaaactgcagtagtacttacagaaaaacgtgcttgggtcaaattaaaaaaggatgaatgtatagtatctcactggattaaaagaatacaatgta

SEQ ID NO: 257696 - DNA, 329 bp, Homo sapiens
aaatcaatatacgtaatacccctagtattcacacttcacctgctatgatgatattaccattctcctttggagttttctaacttatttgtgtagcatttagggcaaaataccaggcatatgggtgatggcgtgtagtggagttggtgagagggagaccttgagttgtagaaagggtgggcagaacctggtttctgtcctacatcccagatgttgcccatacatatcctgtttgtttctgaccaccctgctttgctgtgagggttcccagcccctctgcctttacctgtcctcattctgccccactgtccatgcccagcatgaatctccac

SEQ ID NO: 257697 - DNA, 218 bp, Homo sapiens
ttcctttttttatggttccgaggattaggaaagtaacaacgtatactttctctgtcatggtttctgtactccagatagactggtagccaacgcaattggaggcagagaaacccattagaggcctctgcaatactgcaggtgttcagagcttcggtatgtctaagtaaaagttattttaaaaaaagagaattaataaaagttgttggttcaaagtaatt

SEQ ID NO: 257698 - DNA, 165 bp, Homo sapiens
cagaccacaaagcaaaacccaccaactctctgccaatactctagagggacacctaagacaaaaattcagaaaggctaaaggctacccataaagacgtgcatggaggggtacaagctatgaagccaaattagacgaggaagcaagttacagtcttgatgtgtgaca

SEQ ID NO: 257699 - DNA, 349 bp, Homo sapiens
gcctggctaacttttgtatttttttgtagaaacggggtttcaccatgttggccagactggtcttgaactacggacctcaagtgatccgcccaccttggcctcccaaagtgctgggattataggcgtgagccaccattcctggccctctcattctctttagaatggcctttgctacccccatggggatgcctagcttctccaatagccttcacctggtctttcttcctcctctctttattcctcctctttctttctctccttctctctctctctctctctctctcaaggtcttgctctgtcacccaggctggagtgcagtggtatcacagctcactgccacctcgaactc

SEQ ID NO: 257700 - DNA, 678 bp, Homo sapiens
ctcttatttaggtgagctcacatttctgaacttggaatgaggcaatatgaggattcaggtatgtcctggaaaagctgttccctaaatgtcagggagagagaagggagtatttgacttttaagtacagtagaaaacaagcaaatgatataaatggctaatttatagaagacaaaataaaaacgaataatagacattttagaatattcaaacttaccatggatcagggaaatgtacatttaaatgagatactatttttcacccatgaaaaagattgacaaaaagtttaaagtttcataatattcaaatactgacagagtgtggggcagggcacttctgccctgtagtgggagtgtaaatgagatggaatttgtggtgggctatttaacactactatccaaagcttaaatatatgtgcccttcaacccaactcttgcatttctgggagtctaccctgcagaaataagtgcacaagagtccactgacaaggatgtgttcggagtattggtaagaccacaaagaacacccaaattccccgaatcagggaagcgtttaaataatcaatggtgccttctttagaacatttggaccaatttaaaggagtgagggtagactgccttggaatagcagtattttgttgagggggaggatgccattttatgtcattttccttctttgcct

SEQ ID NO: 257701 - DNA, 417 bp, Homo sapiens
gcgaatatcctttctctccacatcatacccttcatcctgactgcctcactgtcttatgcattcaaatatgtatatttatgtatcatgtctgtgtgtatacaggcatacctcattttattgtactttactctactgtgctttggagatatcgcattttttacagactataggtttgtggcaaccctgcattgagcaagtctgttggtgctgtttttctaatagcatgtgcttactttgtgtctctgtggcacattttggtagttttcacaatatttcaggctttttcatgattgtcgttttttatggtgatctgtgatcagtgatccttgatgatattattgtcgttgttttgggacaccatgaaccacacccatattgatgttgaacttaatcaataaatgtgtgtgttctcattgc

SEQ ID NO: 257702 - DNA, 451 bp, Homo sapiens
ctcatttctcagaagtttctacttttaatcaaataagggaagtcccaaggaagcttctttctgcatctgttccatctcaaatgtcttcagcttaaaataatctttatactaactccagtgttctgagtgggaccccacaattgtatatttaatcaccttgtgaaacttgacaagtatttaacccaacattttctgatttggaatattttagagaatgtgattcattaataaatcatttatcaaaaaaagagatcattggtttgacagtgctgggcttacaggcatgggccaccatgcccggccagcagtatgtattttagttgactggcaaacagacaattgttcccttttttccttttttaaatttcaagccttgtcactgtgtcataagacaattgttcatgatgtcataaatgtaatttttacttcaataaactataatacacttgta

SEQ ID NO: 257703 - DNA, 785 bp, Homo sapiens
gttgtggagctgtgtcttacagacgaagaaacgggatcagagggataaaggaatctgccccagattacccacgtagggaagggtggcgcaggaacccggacctccatgatgtgaatgagccctttgacagcctttttcttctccttacctgtaccccaaacctctgcacctttaccccagttcctccttgctctggtgtaaacagtggtaacggtcccacttgcggcgtgcccccgcaatgctgggtcctgttccacatgacagaccactgtagaggaattatacggaccattttacagatgagaacacaaggctcggagaggtcaagttacttgctgcagaactgggacttgtacccaggtgacttgactctacagcagagcctttcaattactcgacaccaccttccccagaaaaagaggaaggcttccgaatgttgacagtggacgatacaccctcccttctctctccgacagggtcgccatcaaacccagttgaagagggtccagtgagagcctattagaggcttcacaactcacttgccagcagcagatttctcccatcgcttagagactgctcactcacaccactcctcagaagacctccagcaacatacacagccaggaacgacaggaaggaagggacatgacatttactgaacggcagtgctgaaccaggcactgagccagggcctgttactaagggcaaagctgggagggatattaccagcccaggtttgcagacgaaaaagcggattttttttttttttttgagatagggcctca

SEQ ID NO: 257704 - DNA, 1198 bp, Homo sapiens
ggctagaatgacaggctgtatgtgagatacatgaatctgtgaggaaaatgcacttagcatgtcatgggaccctgaggtcctggttctattccatgcttcctgcactgagaggtacttggttggaggcaggcaatctgaatgctctccccaacatccggtcagttctcatttatcttggtctttcattttccctcacccatttttttgtttctccctttcagtttgcaaaccattctccttgggagagaataccatttaaggtagtttcttttgctatttgttttatttcttaatcttctttattctctgtgcacatgcaaagcccccttttttggctagagtcattgcttcaagctgcagctcccttgggcttttttttcctgacttcattctgtatttgctcctggtaataatctcattttgtaattttgctctttagtcacagggcttcatttgggacactcacatttttgttctctttgtgattatttgtgattaaggagttgaggttatgactttaaggtgcttttgattccagagccatgtgccatataatcatctgtggtttgtgggaatgtctttgccgtgatctctctgaagtctgtgggcacattccagaccgtgctggtcttctgtccgcaggcttcatgcagagaatgaagtgtccttgctttctctttcctaaatgagtctctgcctctgtgagaactgggtccaccttctctcggttgctcttctttgtgggagcctgaatggtaagcatggccagcgtcctgtgaggagttgtagccaaatgagcagaagctgagcagctgtctgggtgggtgcggcctctgcatgctgcttccgcggccgcgctgcctccacctggccggggtccctcagctactcacatgaggctccagcatccggccctgctgccctttaacctcaactgtagcctctccagcgtggtcaccaattttttaacctaagggttcatgttcttgacaagtacacagtttattcattttctatccgttctcttttatattccaaatacctctccatctccatgttcaaatatttcaatcccgtcccaccagttcctggtaggatccatcactgtgtctatgaacacgaagataccgattagactggatgcaggtgctggtgtttctggttctgcagcgtgagtggccacattgcaaacatagcc

SEQ ID NO: 257705 - DNA, 355 bp, Homo sapiens
tgcccactctcacccttcctcctttcccggcccattctctctccccactgggtctccgacacgaccctctctcctcccggctgtccccgagcccctctctgcttccccagctcagccccctctctgacggcttctccctcccacccccaggcgaatctccgggctcccacggggtgcccccgatccccggggtctaggtcaaccgacaaaattattttaaatgggaagatttgaattccattgaattcatggaagcaggaatccatctggtcatattttaaataattttgaaatgataatagcaattatcaatttaaagtttaaccagaattcagaataaccaccattttaccag

SEQ ID NO: 257706 - DNA, 540 bp, Homo sapiens
gtgagcttgaagtatttggagacaattcagtgttacataaaatctgcaaatctctggataaagaagcagagatcccagcatgggacaaatggagcctcaaaagtgggaagaagacagagaagaccagggcagaatgcatctcttcctttctcttggctttcctggataaggactgcatcattcctgtggaaggacaggccatcagctccgaaacactgtatgtattttccagtatatactgctagctgtgtgatgttgggaaaatttgttaccctgtctaacccccacttccctcatctgtaaaatggaaataatgatagtacctacctatctcataggtggcaactacaaggggcagcacactcagggaattaaggaagtttcagtgaacatcaactttatgaacacagtgttcataaaggcaggtcagtgcagtggtttgggagccaggagaagcacgtgggccggagtgtgcctgcaggagacaaggtcagagatgttgctaataatggagaataaaggatgcattctcattactga

SEQ ID NO: 257707 - DNA, 293 bp, Homo sapiens
gcctactactactaaattcgcggccgcgtcgacacccccacttccctcatctgtaaaatggaaataatgatagtacctacctatctcataggtggcaactacaaggggcagcacactcagggaattaaggaagtttcagtgaacatcaactttatgaacacagtgttcataaaggcaggtcagtgcagtggtttgggagccaggagaagcacgtgggccggagtgtgcctgcaggagacaaggtcagagatgttgctaataatggagaataaaggatgcattctcattactga

SEQ ID NO: 257708 - DNA, 425 bp, Homo sapiens
gccagtggtggtgggggaagaaacatctcatatatagaggattaaagataaaaataatatcaaacttattcgcaaaaagtatgtatgcaaagagagactagtgcattatttaaaaaagtgttgatagaacaaaaccactggcctagaattctgtactatgcaaaattatctatcaaagtggaaggacaaataaaggctttctcagacaaaaattgagagaatttgttgccagtaaacctgttctgcaggagatattagaagtccttcagagagaggaaaaatggaaaagtttagaaggttggatctatatcaagaaaagaagaacattagagaaggagtaacttagaaaaaataaaatgttttatttttcttattctaactgatctaacagataaccatcgctcaaataatagcaaccatatatt

SEQ ID NO: 257709 - DNA, 415 bp, Homo sapiens
ttgagggaaacccaggctttgaaaagcaactcagtggtaaggcttttcaaattttatgagaatctctgcgtcagcaggtctggacaaatgcaaaatataaagcgtctgtgttggacttcagttttcccatctgtattgtcagaactccttttttattcccacccatttttcccccatcatagcttcttgagacagatatcaggaagggatctaatacaagaattagaaaatttttatgttttttggaggtgggagggaggccaggtcttactctgtcgcccaggctgaagtgcagtggcacaatcacagctcactacagccttgacctcccaggccaacaagcctggcctgcttttacatttttaaaagaagacttcaaaaggagtgcttagtgaaaaagtctcactgggacttt

SEQ ID NO: 257710 - DNA, 886 bp, Homo sapiens
tttttcatttcatctgcacgtcttttctcattgtggatttcgttggtctttgggctgttgctgtatgtgagtgcctctcaccacagatcttttgcttgccagggattttagggatctcaagggtttttcagtagtttggctgcactccaggttgtgggtagtcgtctcattttggggggccggattttttgcactttacaggagtctcttgggtttctggcaagaatccatgaacatgggtttgactccagcacaaaccctctcattctcccatttgagcctttatttccctttgctttcatgggggatccacagtgcccctcaacagcactcctgggcacccgtttcagtcttgcaatcaccccagacggtttctgaaactctctctcaaccttatgtgtccttgttggatgccagttccaggtgtgagacctcttctccgtcttggacttgcctttattgtcgttcctgccttacccagacagccgcgctgagaagcaggactccctggggggccctggatgaacggaggcagtgagctcaaaggcctcacagtcttccactgacaccctcctctggggtctcaggtatgattccatcacccggagatccctcaacaactcaccagactgtattcccttctccctgggaccggattcttgcacacagactctttcgggaatggagtccaaagagaagttcccagcgcccacctcacattctcgaatcgccttttcctccagcgggacccgactaatgagacggcccgaggatgccctatggtagttacttttaggcttccacagtgattgtcgcaggcagcattttccctagactaggccggctctgccttcccattttcctctgctcaggcaggctgacagcc

SEQ ID NO: 257711 - DNA, 422 bp, Homo sapiens
taggttcacgctgtcacacctaagaatgagcaggtgagaagatgctgctcggttcttgccttaaagcgggatgatcctgccatcttggagaagacccaggctggtgtttgctcctttaagcgactgggactcccaaatctgcagactttctagcatcctgcagggtggccatggtctagttgagcagccagaaagaagctcatcaattggaatggagtttgtctcctgtttctagtttcttcatccagagcggaatttttcaagatgtggtccaaggacgacctgagtcagactcaccccaggtctaggtgaatgtccacaaccactgaagcagaatcttcatggggtagattctaaacaaaacctacatttggaagaagctccttaagaattattctgcataataaaacatataaaacaga

SEQ ID NO: 257712 - DNA, 369 bp, Homo sapiens
cctgtggcatctggcttgctggcttttgccctttccttagggatctgtctggcacccaccatggctctggctctggactcatacccctcttttcataaaccctaactgcatggaaagcatgttgtaaacatgctcatgtagaaatggaaacaactcgagaatttgtatactggccttccctggtgattaatttcaattggcaataaaagccacaacctaaaggaactgaatgtttgaggaattcaaagagtcatttctatgggggcatgtgtgtgtgtacatgcacacatgtctatgaattaagttatacacagactttgaatttcacggccagatgaccagattcttctcaaatctgaaaaaaaaata

SEQ ID NO: 257713 - DNA, 96 bp, Homo sapiens
catctctgtaaattattaggagtggaagtttccagaaatatttagtgcagcagcattgaaacgtccgcctgcatcacgtggccccctcggtggaga

SEQ ID NO: 257714 - DNA, 213 bp, Homo sapiens
acattttaaaaattagaaaaatccctttattcttctaagaaaactgttagaaaaaaaattttagagcaggagaaatattttttaaaaaacatacctgacaaaggacatgtatctagactacataaagaacttctacaactcagttataagacaatctaattaaaaataggttaaatattttaacagacacttactcagaaaagatatgcaagt

SEQ ID NO: 257715 - DNA, 405 bp, Homo sapiens
gctagcgtgatttttctgcagtgtaaaccgccaacccatccctttgcataaacagccttcaatgactcttcatcacctttgcagttgagacctgtggaatctttcttctgaaaaaatccatatgcatgccaaggttggcatgattttcaagttaagaaattttgaaccatgagatatagtctgaactcagcattattatggcatagaaagacctttgaagtcctgtccctgcctaccttgccatcatcagcacccatccactactatcatttcactctgttttgcagctacgttgaattaattacagagtagttaaaagtgtggcttctgcctgggctgactccagctataccacttatacttctggatgtgtgtttttttaagttctgtgcctccgtttgctca

SEQ ID NO: 257716 - DNA, 399 bp, Homo sapiens
aaaacacatcattaggtctgtagcagaagatttaatcaggtcatacttgatgagttgtgttggataaaataactttttgttgttgtttaactctcaggtgaacatagtttgaatataccatgatgtacatgtgcattttcaaaattctcactgaattcttattttgtgaacttacatgactcttttagtcagtgttagctcaacaaatatttcttggttgcatgttttgtgccaggcattgtgtgaggtactcacctcatttgtatcttgtttgtcctcataggcttgtagttctatatccaaaaatctatttatactaattttaaaacactcaatttttatatcatattgtacctaagtgactttatgtatagaaataaattgatatttactgaaatt

SEQ ID NO: 257717 - DNA, 402 bp, Homo sapiens
cattcccccagatcacctcaacaagaatgtttactaggttttttcctctccctccaagattcagcaaacactgtttccagcagaggcgtttccaacaatgtatgacagcgacatctgcgtgggcctggaggcgctgcgcccgagggggctttcgtgcagccagacacatttcctactctggagctgattctgtcatgggggcctccagatttgtcaggcgcccttggcgagcgcaggggagcccctctgttcctgcttctagggcatcagtgaacatctcttttggccagagggaccctgcggggtgctggggtgccacggtgaccaaggcagaccccatcacaccctcaccgagctcctggtttggacaacaaaatgcagagacaaattaatctataaaaa

SEQ ID NO: 257718 - DNA, 453 bp, Homo sapiens
ttaaatgtaaaatatcttccaatttgaacatatactttgtacttttctccccctaaacaaacaaaaactcaatcctcattcaacaatgaaagttttgctgcctgtaaagatacttgcaaatgtgtgatatagacaccaaagacagttcccaaacagcctaaagatgtttagtgctggccgggcgtggcggcgtcacgcctgaaatcccaccactttggaagtctgaggcaggtggatcgcttgagttcagaagctgaacaccagcctgggtaaaaccttgtctctacaaaaagaaccaaaaaattagctgggcgtgctgatgcccacctttggtcacagctacccgggaggctgaggtgagaggattgcttgagcccgggaggtggaggttgcagtaagcccagatcatgccactgctctccagcctgggcaacactgcaagactctgtctca

SEQ ID NO: 257719 - DNA, 428 bp, Homo sapiens
tggcccagggaagccaaaagattggacacccctgatctataccttgctgggtcccagcagtgtattttccttatgtaggtacaaggacggtgcttctggatcctggcagaaaagaatgatgctaaggttactaaaatgtcttcctggctgggcgcggtggctcacgcctgtaatcccagcactttgggaggccaaggtgggtggatcacgaggtcaggagatcaagaccatcctagctaacacggtgaaacactgtctctactaaaaatacaaaaaattagctgggcgtggtagtgggcacctgtagtcccagctactcgggaggctgaagcaggagaatggcgtgaacccaggaggcagagcttgcagtgagccgagattgcaccactgcactccagcctgggtgactgagtgagactctgtcttaa

SEQ ID NO: 257720 - DNA, 309 bp, Homo sapiens
tctataaatgtttcttttatgtgtaattatctggatctatattaagctaaacatgagatctttctgatgtctccaattctaatccattgccaaaggatcattaataatccatatggatcgttcaaacttcctttctctacttatctgtaacctctcaactgcaacagtgagaaacctggcttcagttatctgccatccatttacttattgttcaatttcagtacacatgtacagcagtatcagaactgttaacctatgcctcatgggaaataactttgttaaataaaatcaagagcttatgtaaagttt

SEQ ID NO: 257721 - DNA, 338 bp, Homo sapiens
agaaatcttaagaattagaagtgattactagagagtaattctaggtttacccagcctcagacaggtgctctaattaactattctcattcttcttctttttttctatctagttttcatgctttttcctcctctcatgcccttataattgaggtaaaatgctcagatgagcattgacaaatgtatacacccatgcaaccacaccccagtcaggatctagaacattccgtactcaattttgggggagctgtttttaaaaatgagtattattacagtcctctgctagtaggaatgaactcctctctaaataccaggaaaaaaataaaataaaactgaaggac

SEQ ID NO: 257722 - DNA, 191 bp, Homo sapiens
tgtgaaatctggcggttaataaaaatagcctgcttttttattagcttcatccaactacgggaacagaatagtttaacagtaactaagtatgcttcaaaaggtaactctctaaaagtaaaactgtaaatactagaaaatgtatcatactagaaaaggtataaagggaaacattttgttcattatccccccac

SEQ ID NO: 257723 - DNA, 560 bp, Homo sapiens
tgagagaggatctggctctgttgcccaggctggagtgcattggcatgaacatggctcactgcagcctcgaactcctgggctcaaacaatcctcccgcatagctggggctacaggagcactgccaccatgcctggcttttattttattttatttatttttagagacaaggtcttgctatgttgcctaggctggtcttgaactccttgggctcaagtaatcctcccacttcagcctcccaaagtgttgggattacaggcatgagccgccgctcccagtctctttactctttaaacatgtaaaactatcttcagctcgtggcttctacccacagaaccatccactcatgcactccccagggcactgtcctgcagaatcctgactgagtagtgctatgaattttcaaggaaacccttccggcatttggagaagcaccagggtgccctgaaaagcacacggctttaaaatcccactggcccacctgccaccattcagcttgcagatctgcagttcagagtttggggacctggcatttgtcactgccttggccttagtttcccaag

SEQ ID NO: 257724 - DNA, 640 bp, Homo sapiens
ctttttaaaactgttaaaattgctttatacacctacaataacaattattaattataagatactatttacatgtggttgtaaagaacacacttaaataacttacatatgtgaatttaaattataaatttatatttagcaacatagtgctacttcaaacaactataaaaattgatctatatattcctaaagaagagtaaagggccaaaacaggcaaaataatacagaaaaagaataaatgttagaaggcagttctccattggtctcttgtatttctgcacatcttctcagcagaggcattgacagatttgtgtgtgtgtgtgtgtttctgtactatttttcaatgatgtttttacagaaaacagcttgggaaggtagaagtagtgtctctcctccagggcaatggcagatttgtttgttgtccaggataatgaagaaatgtcttcctcttggataaaggatcggcagatttgctagcaagtgtggggtttcctaaacttgagttcttcactgtgatgcatatagcatcctcttagcccttccatgtcacacataggacttgggtgcaagggtaaatgaggtgaacatgaagcttatactaactgctgtactctgagcaataaaatcatttgcctctgactca

SEQ ID NO: 257725 - DNA, 460 bp, Homo sapiens
caaacttaatgaagaaagtttgctggagttgagagtcagatcacattttttggcaaaacaggaaaacactcccaaactctgaccatatatctgctctagttttttgttggaaaaatgaggtgatgatggaccccttccacacttgtgaaggatatgtgtcatgtaattaacctgggaaaatgcagctcatcaatttggggttcaagggtaaaagagaggtgagacacagttttacagggcttggagatttttttttaggggattttttgtggagagtctagaacttctctaagaatttaagaggtattaggattttgcactttaaatatatttagtgtttgcttcataagtttaaatattcaacaacttttaaaattccttaatttcaccatacagaatatagatttaatttcatctaaaatgaaattattgcttaaatggcttatgtattagttaaaaa

SEQ ID NO: 257726 - DNA, 250 bp, Homo sapiens
atgtgtaaaaactatcaagttggcttagctcagttgtgctaaaaaaaaaaaaaaaaaaaaaaaggtgggtttaaaatttcaaagatcaatagtgtaattagtacattcacagattaaaggagaaaaaccatataatcaactcaatatgaagcaggaatagtgttttataaaatacaacattaattcatgatttaaaaaactctcgaaaaattagaaatagataagaatttatctatcctaatgaaagata

SEQ ID NO: 257727 - DNA, 285 bp, Homo sapiens
tgtttttttttgtacttatatgtagaaagtactagaagcttattgtgtagttcaggttgttctcagttccaaagcatcgagatagagcagacagtttagcttatgatacttccttatcactacattaacttccgagaataataaagcctgttttcactaatagcaaaattttttaatgaggcccaaagatgtcagctgccttcccgtaacagtctcggcagtcaatttctttctgcatttggtgtcgacgcggccgcgaatttagtagtagtagtaggcggccgc

SEQ ID NO: 257728 - DNA, 509 bp, Homo sapiens
tgcattccaatgattagaaacctgcaacagcaaaccaaaatgagacaagttcaaaatcagtgattcttggcctttatcccacctcccttaaagaagggatattttggactcatagttactacatgattaatcacttggttgctttttggtgttatctaaatagaatttcccccacccccaacacacacacaccaaattgatatactaagcatccaatcacatagttggaggaaatggtgccatgagttccatgatagatatctccaaaagaaaagtttcatcttcagttacagtgacattaaaaattggcagcatatctgcaaaggtggtaatccccccagctccccaaggaccatggcacacaggctaagaaccagcagcttctgttccaggcactgtgcctgatactgggaatgtggattcagtccaagtcctcttaaagcccatccagcaaggggcactgacaagtaatcaggcagtttttcaagaattcattcacacacaagaaa

SEQ ID NO: 257729 - DNA, 676 bp, Homo sapiens
ccagatataaattctatcctgtcgtagagggcagtgtaaatgtaatatatgtaaagtttatattatttctttttttgaggtcaataagatgtggtacacagtatattcatattagaaacaagccttgatgcaaaaacataaagtcaagctttcagttttttcttggcatggatgaggaaagaggcgataaaaattaaactaaaatgtatcccacagcaaagtacagcatttcaaagtgacatatgtttaataaacaaacacagatgattttacagtgagcataaaagtttacattgtaaagactctttttataaatagcacacacaaaacacttcactataaattaaatccatgcaggcaacatttctgaaaaatgaaatatttctaaataacttactgaaatggcatgtttaacttttattttttaatcttatgttgaaaatattagaaactaacattttctcaaattattttcctccatatacagaataggagagaaatctatagaaaaaatatacaaagaaaatcttacaaaatataaagaaagtcatatatcaaaagtgagaatacattttttctcatcacccaattctgcctaaaaactgaaattagcctgtttcttcatattcttaaaagcaaacacatatttctttaaaaagcaatgagtagtttatcc

SEQ ID NO: 257730 - DNA, 1030 bp, Homo sapiens
caccgcactccagcctgattgacagagcaagaccctgtctcaaaaaaaaaaaagaattcctaaagtccctggaaacacagaaatccccaaaagatttcagctttcctccttaattctaagaataaaaagcaacagtgatgctgagcttaacgcaacacgagaacagcaagagaaaataaaactgcttccacgaccatcaccaagcatccaagtacgagaggaagtgaatctgagctggagccatggcagcgcccggccgagccagggaggagcagacaggcagggcagctggcccttttcacacagtaacaagccccatgctcgctcacacacagagtgccacagaaaacgaacgcctgccctcgtgagtcacaaagttaatgtcaagaagcaacaagaccagcggccacacctgaggaaggatcaactgcctcaacccatagctgccaccctgcccagaaccacggtttcctgaaactataaaaccattccaaaggtatgattagctacagagaaacaaaaccaaaccccacatgctgaagcccttttaattcacagactcatctactgccccaggtcctaatagagcattcagtgaatgtttgctgcattaattttattggtattgacttgggtctggaaacctaataaagattttttttcttgtaaactgatgcttagaatacagtaattcaaaaagaaaagcagatcagaagttgaacaaaataactccagatatacatttgaatacaaagaattgaacaggccgggcatggtggctcaggcctataatcccagtactttgggaggccaaggcaggcggatcatgaggtcaggagatagaccagcctggccaacatggtgaacccccgtctctactaaaaatacaaaaattagccgggtgtggtggcgggcacctgtagtcccagctacttgggaggctgaggcaggagaatcgcttgaacctgggaggcagaggttgcactgagccgagatcataccatggcactccagcctgggcgacagagtc

SEQ ID NO: 257731 - DNA, 559 bp, Homo sapiens
tccccaattttacttgaaaaatgtataaaaatatagctaatgggaatgctttaggtggaatattaaattcttctgaatacagctaaaaactctgaaagattctgattgcctgatccatactgtagtgatcatagaaccttccctgaggaattgtgaatttgagagaatcttcttattatggctatgatcagagatccctaaagaatggagatctgggtttcttgtatgctgaagagcacttgagagagactggtttgtgtatctaattgatgagaaaggcctagttaataaatgtccataaatgtagccaactttattgcaagccatgctgcccccaaaatagccctaagagttgtacctgaccaaataactcagtccagttttacaggacgtgaagactgagtattccatccccagacaatgcaatttcagttatctgagtttttaatcctgactgggatgagagaaggctgagtgatagaagtatctgaatatgtggtattattcctcctgcaactcagggaagaacagagaaactggcaaagtgaacatcctattt

SEQ ID NO: 257732 - DNA, 1884 bp, Homo sapiens
atgattggccgaggctcaagagagcgtggcgtcgcattgccgtttttgctcagaatcgcgactaaggctttttttttttctccctctgaacggttaggctatggctgcgataaaggccgtcaactccaaggctgaggtggcgcgggcccaggcagctttggctgtcaatatatgcgccgcccgagggctgcaggatgtgctgcggaccaacttgggtcctaaaggcaccatgaaaatgcttgtttctggtgcaggtgacatcaaactcaccaaagatggcaatgtgctgctcgatgagatgcaaattcaacatccaacagcttccttgatagcaaaagtagcaacagctcaggatgacgtcacaggagatggtactacttcaaatgttctaattattggagagttattaaaacaagctgacctgtacatttctgagggcctgcaccctagaataatagctgaaggatttgaagctgcaaagataaaagcacttgaagttttggaggaagttaaagtgacaaaggagatgaaaagaaaaatcctcttagatgtagctagaacatcattacaaactaaagttcatgctgaactggctgatgtcttaacagaggttgtggtggattctgttttggctgttagaagaccaggttaccctattgatctcttcatggtagaaataatggagatgaagcataaattaggaacagatacaaagttgatccaaggattagttttggatcatggtgcccgtcatccagatatgaagaagcgagtagaagatgcatttatccttatttgcaacgtttcactggaatatgaaaaaacagaggtgaactctgctttcttttataagactgcagaagagaaagagaaattggtaaaagctgaaagaaaatttattgaagatagagtacaaaaaataatagacctgaaggacaaagtctgtgctcagtcaaataaaggatttgtcgtcattaatcaaaagggaattgatccattttccttagattctcttgcaaaacatggaatagtagctcttcgcagagcaaaaagaagaaatatggaaagactctctcttgcttgtggtggaatggccgtgaattcttttgaagatctcactgtagattgcttgggacatgctggtcttgtgtatgagtatacattaggtgaagaaaagttcacttttattgaggagtgtgttaacccttgctctgttaccttgttggttaaaggaccaaataagcatactctcacacaagtcaaggatgccataagagatggacttcgtgctatcaaaaatgccattgaagatggttgtatggttcctggagctggtgcaattgaagtggcaatggctgaagctcttgttacatataagaacagtataaaaggaagagctcgtcttggagtccaagcttttgctgatgccttactcattattcccaaggttcttgctcagaatgctggttatgacccacaggaaacattagtaaaagttcaggctgagcatgtcgagtcaaaacaacttgtgggcgtagatttgaatacaggtgagccaatggtagcagcagatgcaggagtttgggataattattgtgtaaaaaaacaacttcttcactcttgcacagtgattgccaccaacattctcctggttgatgaaattatgcgagctgggatgtcttctctcaaatgatgattgaattcaaaatcaacccttctagaagatgaaatttagtacactttacatctgactactattgtgtagcctgagccattctgaatttctacacaataaatgcagtttatgtcttttgggtcttaatagtctcaaaaatatttcatcaaggtataaagaacacaataaatacttttacagtaaaggaa

SEQ ID NO: 257733 - DNA, 1810 bp, Homo sapiens
atgattggccgaggctcaagagagcgtggcgtcgcattgccgtttttgctcagaatcgcgactaaggctttttttttttctccctctgaacggttaggctatggctgcgataaaggccgtcaactccaaggctgaggtggcgcgggcccaggcagctttggctgtcaatatatgcgccgcccgagggctgcaggatgtgctgcggaccaacttgggtcctaaaggcaccatgaaaatgcttgtttctggtgcaggtgacatcaaactcaccaaagatggcaatgtgctgctcgatgagatgcaaattcaacatccaacagcttccttgatagcaaaagtagcaacagctcaggatgacgtcacaggagatggtactacttcaaatgttctaattattggagagttattaaaacaagctgacctgtacatttctgagggcctgcaccctagaataatagctgaaggatttgaagctgcaaagataaaagcacttgaagttttggaggaagttaaagtgacaaaggagatgaaaagaaaaatcctcttagatgtagctagaacatcattacaaactaaagttcatgctgaactggctgatgtcttaacagaggttgtggtggattctgttttggctgttagaagaccaggttaccctattgatctcttcatggtagaaataatggagatgaagcataaattaggaacagatacaaagttgatccaaggattagttttggatcatggtgcccgtcatccagatatgaagaagcgagtagaagatgcatttatccttatttgcaacgtttcactggaatatgaaaaaacagaggtgaactctgctttcttttataagactgcagaagagaaagagaaattggtaaaagctgaaagaaaatttattgaagatagagtacaaaaaataatagacctgaaggacaaagtctgtgctcagtcaaataaaggatttgtcgtcattaatcaaaagggaattgatccattttccttagattctcttgcaaaacatggaatagtagctcttcgcagagcaaaaagaagaaatatggaaagactctctcttgcttgtggtggaatggccgtgaattcttttgaagatctcactgtagattgcttgggacatgctggtcttgtgtatgagtatacattaggtgaagaaaagttcacttttattgaggagtgtgttaacccttgctctgttaccttgttggttaaaggaccaaataagcatactctcacacaagtcaaggatgccataagagatggacttcgtgctatcaaaaatgccattgaagatggttgtatggttcctggagctggtgcaattgaagtggcaatggctgaagctcttgttacatataagaacagtataaaaggaagagctcgtcttggagtccaagcttttgctgatgccttactcattattcccaaggttcttgctcagaatgctggttatgacccacaggaaacattagtaaaagttcaggctgagcatgtcgagtcaaaacaacttgtgggcgtagatttgaatacaggtgagccaatggtagcagcagatgcaggagtttgggataattattgtgtaaaaaaacaacttcttcactcttgcacagtgattgccaccaacattctcctggttgatgaaattatgcgagctgggatgtcttctctcaaatgatgattgaattcaaaatcaacccttctagaagatgaaatttagtacactttacatctgactactattgtgtagcctgagccattctgaatttctacacaataaatgcagtttatgtct

SEQ ID NO: 257734 - DNA, 1774 bp, Homo sapiens
ggctgcctgtggctctgttgccctcctctgtgcgccggcaggatcttttgtggggcttcgttgccctgctctggggcccaggcgggtgctggtccacattcccaggtccccaacagccttcaaagatgggtaaaggagctgcccgtcgcactgtcgactcacagatggcaagtgtgctgctcgatgagatgcaaattcaacatccaacagcttccttgatagcaaaagtagcaacagctcaggatgacgtcacaggagatggtactacttcaaatgttctaattattggagagttattaaaacaagctgacctgtacatttctgagggcctgcaccctagaataatagctgaaggatttgaagctgcaaagataaaagcacttgaagttttggaggaagttaaagtgacaaaggagatgaaaagaaaaatcctcttagatgtagctagaacatcattacaaactaaagttcatgctgaactggctgatgtcttaacagaggttgtggtggattctgttttggctgttagaagaccaggttaccctattgatctcttcatggtagaaataatggagatgaagcataaattaggaacagatacaaagttgatccaaggattagttttggatcatggtgcccgtcatccagatatgaagaagcgagtagaagatgcatttatccttatttgcaacgtttcactggaatatgaaaaaacagaggtgaactctgctttcttttataagactgcagaagagaaagagaaattggtaaaagctgaaagaaaatttattgaagatagagtacaaaaaataatagacctgaaggacaaagtctgtgctcagtcaaataaaggatttgtcgtcattaatcaaaagggaattgatccattttccttagattctcttgcaaaacatggaatagtagctcttcgcagagcaaaaagaagaaatatggaaagactctctcttgcttgtggtggaatggccgtgaattcttttgaagatctcactgtagattgcttgggacatgctggtcttgtgtatgagtatacattaggtgaagaaaagttcacttttattgaggagtgtgttaacccttgctctgttaccttgttggttaaaggaccaaataagcatactctcacacaagtcaaggatgccataagagatggacttcgtgctatcaaaaatgccattgaagatggttgtatggttcctggagctggtgcaattgaagtggcaatggctgaagctcttgttacatataagaacagtataaaaggaagagctcgtcttggagtccaagcttttgctgatgccttactcattattcccaaggttcttgctcagaatgctggttatgacccacaggaaacattagtaaaagttcaggctgagcatgtcgagtcaaaacaacttgtgggcgtagatttgaatacaggtgagccaatggtagcagcagatgcaggagtttgggataattattgtgtaaaaaaacaacttcttcactcttgcacagtgattgccaccaacattctcctggttgatgaaattatgcgagctgggatgtcttctctcaaatgatgattgaattcaaaatcaacccttctagaagatgaaatttagtacactttacatctgactactattgtgtagcctgagccattctgaatttctacacaataaatgcagtttatgtcttttgggtcttaatagtctcaaaaatatttcatcaaggtataaagaacacaataaatacttttacagtaaaggaa

SEQ ID NO: 257735 - DNA, 1813 bp, Homo sapiens
gtccgcgtagcgctgtggatgttcttgcgagcttgatttccctcattctcatccctgctctgggggtatttctcgcctggtgcaggtggaggagaaaagcctcccctagtagagggccccgggagtgaagctgtggcgcttccccgacccccgacttgtcgtcaaggcttgtttctggtgcaggtgacatcaaactcaccaaagatggcaatgtgctgctcgatgagatgcaaattcaacatccaacagcttccttgatagcaaaagtagcaacagctcaggatgacgtcacaggagatggtactacttcaaatgttctaattattggagagttattaaaacaagctgacctgtacatttctgagggcctgcaccctagaataatagctgaaggatttgaagctgcaaagataaaagcacttgaagttttggaggaagttaaagtgacaaaggagatgaaaagaaaaatcctcttagatgtagctagaacatcattacaaactaaagttcatgctgaactggctgatgtcttaacagaggttgtggtggattctgttttggctgttagaagaccaggttaccctattgatctcttcatggtagaaataatggagatgaagcataaattaggaacagatacaaagttgatccaaggattagttttggatcatggtgcccgtcatccagatatgaagaagcgagtagaagatgcatttatccttatttgcaacgtttcactggaatatgaaaaaacagaggtgaactctgctttcttttataagactgcagaagagaaagagaaattggtaaaagctgaaagaaaatttattgaagatagagtacaaaaaataatagacctgaaggacaaagtctgtgctcagtcaaataaaggatttgtcgtcattaatcaaaagggaattgatccattttccttagattctcttgcaaaacatggaatagtagctcttcgcagagcaaaaagaagaaatatggaaagactctctcttgcttgtggtggaatggccgtgaattcttttgaagatctcactgtagattgcttgggacatgctggtcttgtgtatgagtatacattaggtgaagaaaagttcacttttattgaggagtgtgttaacccttgctctgttaccttgttggttaaaggaccaaataagcatactctcacacaagtcaaggatgccataagagatggacttcgtgctatcaaaaatgccattgaagatggttgtatggttcctggagctggtgcaattgaagtggcaatggctgaagctcttgttacatataagaacagtataaaaggaagagctcgtcttggagtccaagcttttgctgatgccttactcattattcccaaggttcttgctcagaatgctggttatgacccacaggaaacattagtaaaagttcaggctgagcatgtcgagtcaaaacaacttgtgggcgtagatttgaatacaggtgagccaatggtagcagcagatgcaggagtttgggataattattgtgtaaaaaaacaacttcttcactcttgcacagtgattgccaccaacattctcctggttgatgaaattatgcgagctgggatgtcttctctcaaatgatgattgaattcaaaatcaacccttctagaagatgaaatttagtacactttacatctgactactattgtgtagcctgagccattctgaatttctacacaataaatgcagtttatgtcttttgggtcttaatagtctcaaaaatatttcatcaaggtataaagaacacaataaatacttttacagtaaaggaa

SEQ ID NO: 257736 - DNA, 1488 bp, Homo sapiens
ggacgcaggcgggaagtgatcaaggctccctgagtcccacccgagcgctcccggttcagcgcaggaggacgcacgccgggccaggggcctgcaccctagaataatagctgaagttaaagtgacaaaggagatgaaaagaaaaatcctcttagatgtagctagaacatcattacaaactaaagttcatgctgaactggctgatgtcttaacagaggttgtggtggattctgttttggctgttagaagaccaggttaccctattgatctcttcatggtagaaataatggagatgaagcataaattaggaacagatacaaagttgatccaaggattagttttggatcatggtgcccgtcatccagatatgaagaagcgagtagaagatgcatttatccttatttgcaacgtttcactggaatatgaaaaaacagaggtgaactctgctttcttttataagactgcagaagagaaagagaaattggtaaaagctgaaagaaaatttattgaagatagagtacaaaaaataatagacctgaaggacaaagtctgtgctcagtcaaataaaggatttgtcgtcattaatcaaaagggaattgatccattttccttagattctcttgcaaaacatggaatagtagctcttcgcagagcaaaaagaagaaatatggaaagactctctcttgcttgtggtggaatggccgtgaattcttttgaagatctcactgtagattgcttgggacatgctggtcttgtgtatgagtatacattaggtgaagaaaagttcacttttattgaggagtgtgttaacccttgctctgttaccttgttggttaaaggaccaaataagcatactctcacacaagtcaaggatgccataagagatggacttcgtgctatcaaaaatgccattgaagatggttgtatggttcctggagctggtgcaattgaagtggcaatggctgaagctcttgttacatataagaacagtataaaaggaagagctcgtcttggagtccaagcttttgctgatgccttactcattattcccaaggttcttgctcagaatgctggttatgacccacaggaaacattagtaaaagttcaggctgagcatgtcgagtcaaaacaacttgtgggcgtagatttgaatacaggtgagccaatggtagcagcagatgcaggagtttgggataattattgtgtaaaaaaacaacttcttcactcttgcacagtgattgccaccaacattctcctggttgatgaaattatgcgagctgggatgtcttctctcaaatgatgattgaattcaaaatcaacccttctagaagatgaaatttagtacactttacatctgactactattgtgtagcctgagccattctgaatttctacacaataaatgcagtttatgtcttttgggtcttaatagtctcaaaaatatttcatcaaggtataaagaacacaataaatacttttacagtaaaggaa

SEQ ID NO: 257737 - DNA, 238 bp, Homo sapiens
attagaagatccttgtggaacaggaagcagagtggggcaagacaagagagagcatatacccaggggaggagacaagctagggtatcatatctgcttgatggggtgtcagccctgagcagagaaggggatccggaaggagtatgtgggctggaagaaaaaaggaccagggttcctgcagaacttacagaagacacacattgtgtccattttgctcattgcaaccaaatgattaactttg

SEQ ID NO: 257738 - DNA, 308 bp, Homo sapiens
cagcaggaggcctggagtcagccctagctctgtgttggtgtccctctgaccctaagaaagacccccactcttctctgggtctcagttcccatctgtaaagtgagggaaccaggcgagatgattcccaagaatccttccagcctgctgctcagtgatttctgtacatttaaacggctcaggcttagctgacagccactctcctgcctaaggtccccaaggaagcccagcctgtgatggtgcaaattgctctgccttacctgactttgcctgaccttgggcaaataagaaacactctgtctgagcctcca

SEQ ID NO: 257739 - DNA, 429 bp, Homo sapiens
caatgctgttggatataaagactgggtccttggggctgttaggaaattgtgaaataatttgaaataggaggaacaaggttagtaggtgtcctggtattgaagaaagaagggtggggcacaggtgtccagtgtgtctttgccatcagaatgttcttccaccttcaccgcattttgaccactctgtaaattgttgaaaactgataataatgtaaatgattcttatccacagaaatgcaagtaaatctggtgaaatgcactgattgttgtcttgcaaatacaccttttctgcatttcagaattccttattccctttgtgtgtgtatgtgcctgtgtatggctcttggaattctccttgaacccattttaacatctttttggtttacttattcattagtgaattaaataaaagttattcgcaggtaccatttt

SEQ ID NO: 257740 - DNA, 608 bp, Homo sapiens
ttgtcaggaggattcgacgttcagtgcccagggatgtggaggtgatggggggccggggaggagtctcactctgtcacccaggctggagtgcagtttgtgtgatctcaactcactgcaacctctgcctcctgggttcaagcgattctcctgcctcagcctcccgagtagctggaattacagagttcttggagtctctgcggagtccctgggccagatctcacagtgaaagctgcaggatcttccttctgaccccagcagtccccgttgagtccaccgatcccactggaattataaagttgtcagcaagaaagccccagggctgaagtccaagtccgtcgggaacatgccagctaacgaggacgctccccagccaggggaacatggcagtgcctgtgaggtatcagtgtcatttgaggatgtgactgtggacttcagtagagaggagtggcagcaactggactctactcaaagacgcctgtaccaggatgtaatgttggagaactacagccacctgctctcagtgggtaaggacaaccatcctgtgaagttgtgaggagcctgttatgggttaaattgtgcccccaaataaaatatgttgaagtcctaat

SEQ ID NO: 257741 - DNA, 651 bp, Homo sapiens
ttgtcaggaggattcgacgttcagtgcccagggatgtggaggtgatggggggccggggaggagtctcactctgtcacccaggctggagtgcagtttgtgtgatctcaactcactgcaacctctgcctcctgggttcaagcgattctcctgcctcagcctcccgagtagctggaattacagagttcttggagtctctgcggagtccctgggccagatctcacagtgaaagctgcaggatcttccttctgaccccagcagtccccgttgagtccaccgatcccactggaattataaagttgtcagcaagaaagccccagggctgaagtccaagtccgtcgggaacatgccagctaacgaggacgctccccagccaggggaacatggcagtgcctgtgaggtatcagtgtcatttgaggatgtgactgtggacttcagtagagaggagtggcagcaactggactctactcaaagacgcctgtaccaggatgtaatgttggagaactacagccacctgctctcagtggggttcgaagttcctaaaccagaggtcatcttcaagttggagcaaggagaggggccatggacattggaaggggaagccccacatcagagctgttcagggatttccacatatttcgtcacatccacagt

SEQ ID NO: 257742 - DNA, 731 bp, Homo sapiens
ttgtcaggaggattcgacgttcagtgcccagggatgtggaggtgatggggggccggggaggagtctcactctgtcacccaggctggagtgcagtttgtgtgatctcaactcactgcaacctctgcctcctgggttcaagcgattctcctgcctcagcctcccgagtagctggaattacagagttcttggagtctctgcggagtccctgggccagatctcacagtgaaagctgcaggatcttccttctgaccccagcagtccccgttgagtccaccgatcccactggaattataaagttgtcagcaagaaagccccagggctgaagtccaagtccgtcgggaacatgccagctaacgaggacgctccccagccaggggaacatggcagtgcctgtgagaacacctgttgaagtctgcaaaagatgtggtttggagagcttcaggattggtgaacatggaggtgctgggtggatggcacgcccggagaagacgtagaagctctgcgccccttcccacataccttgccctatgtatgtggataggggtgctaggaacatctgctgttctaacatttggtctttgacccttgttcttgacacagagctcctaatcccatgcagtttcctgggtgataggagcatcttttgttctaatcaggctgtttatctggctgttcatctgtgtcttttgtaatattctttataataaaccagtaaatgtaaataagtgttt

SEQ ID NO: 257743 - DNA, 567 bp, Homo sapiens
cgcccccgcccccgccccgcagggcccccaggccgggcgctgggggcgcacaggcatacagattctctctcctcaccacgcggctgctgctggaggatggaggaggggtggtgtcagcaattcaagactgtctttcctaccctcttcagtgcccttccttgataagctgtttaaaccagaaccgtactgtttctggaaaaggtaaacatctattctccaaagggcagtgactttctacctgtgaaaataaaaagtaaacttcagaagaaaattctgaaagaggaatttagagatgttccaaataaaggcaatatagtttcactggaactgaaatgttgccttccaattctactacagaaggcagagtggcacatgtggcacctggtcaggatggactcactaaaggatttaacccagacttctgatcaacaaatattgctgctacattaactgattcgcaacaaagaaagaaaatatcatccagttgattttattatttaaatatgggctcaaatcttaaatctgacaaactaataaataaatatgtctgaaaagtaaatagtaaat

SEQ ID NO: 257744 - DNA, 433 bp, Homo sapiens
agcaaagtacaaagaattggtaccatataggatgctgtacactgactactattagatgtcactaataaaaagataaataaccctcatacatacttttgagtaacttgtggatcaaagaaaaaatcatcatggaatgaaggaaatactcagaactgaataacagtgatgtttttggcaagtacctagagtgatcctcacaaggttcatgttacagtagaaagaaaggctgaaaacccaataagccaagtttcttacttaagaaatcagaaaagtaacaggagaataaacacaaagaaaatagaaaaaaatagtgaagatcagagaagaaaataaattttaaaatgacacactagagacccacagaccaccagttggttcagaacaggattgttctgaaaaaatgaggaatgtgaattcagacacagaagaaatt

SEQ ID NO: 257745 - DNA, 141 bp, Homo sapiens
actgcctataacataagccccgtgaaggcaggcatcttgcgcatcgttcattgcgtggcaccttgcccatgcatgatgaaaaactcagagatgcacgggtgttttcctgaaggcacctgccagtggaagccccctggctca

SEQ ID NO: 257746 - DNA, 271 bp, Homo sapiens
tgcctggcccatgctgctctcttgacagcaagtgctctctgtgtcccattcagatgtccccagagagtcctgccttgggtcatgcagccattgtattaaacaatgaggatccccgttctcattccacaccacctctcaggctgcggctgacgtctttgcaggcagctgccctttatgtagccccaagttgtccaatcagctgtgaccagggtggcagggtcatgtggtttaaaaaagcaaagcttgggtaacacagataccttgtctctac

SEQ ID NO: 257747 - DNA, 453 bp, Homo sapiens
gaagatattccatttacaatgaattcctcaaagagctccaaatatccacaagcagattctacaaaagcagtgttttaaaactgctctatcaatagaaaggttcaactctgttaattgaacacacacatccaaaggagtttctgagaatccttctgtctagtttttatttgaagatatttctttttccaccataggcaacaaagcgctccaagggaactcttgcagattctaaaaaaagcgtgtttctacactgttctatcaaaagaaagtttcaagtctgtgagttgaatgcacacatcccagtgaactttcggagaatgcatgggtctacttttcatgtgaagatacccgtttccaacgaattcttcaaaaagttccaaatatccacctgcagatactacaaaaggagtgtttaaatgctggtctatctaaagacagattcaactctcttag

SEQ ID NO: 257748 - DNA, 197 bp, Homo sapiens
tgcacacaaaaatagaaaaattagccacgtatggtggtgcgagcttgtagtttcagccatttgggagggtgagctgggaggattgcttgagccctggaggtcgaggctgcagtgagctgtgatggcaccactgtactgtcagagtgagaccctgtctcagcaaaaaaagaagaaggaaaaggagaaggagaagaaga

SEQ ID NO: 257749 - DNA, 499 bp, Homo sapiens
taggcctttactaagagaccttgtgggcagatggtctagagggacagtgagccccttagcgttgaacagtatgtgtattcaataatgcagctcctcgtggtattgattagtaatcatagccaactacttatgtagcacttaaatctcaccacaacaacatgaaatgggtatcattcttattattcttaatctatatttaaaagaggttaagtgacttctccagtgatatatagtttaccagtaataaagccaaaattagaattcattcagcttgatgtgaatctgtgttgttaaccaccacagcacactgcctttcagcaaaggctgattaaagctgcaccaagtctctaagtgtgtacagcccatcagaatctcgacactgtgtttgacaagcatgggacgtgcagttaaactggggaagaaatttctttctcatagaagagatccttgtgtgtgaaaattagaactatctgaataaattagaatcaacagaaattct

SEQ ID NO: 257750 - DNA, 650 bp, Homo sapiens
tctagtagagacagggttttaccatgttggtcaggctagtcttgaactcctgacctcaagtgacccacccgcctcagcctcccaaagtgctgggattacacgcatgagccactgcacctggctaacaagtgctattttttagttcccattatgtgccatggactgcacatcatatacatttttgctaatccttacaccaaccctacacaatagatatttttatcctaatgttagagataaggaaactgatgctcagagagcttaagtgacttacccaagatcacacagctagtaagtgacagagtgagaatcagatctgactgcactcaggtctgacggactccgaattgcctcctcttgccactgggcaatgggcctttgagttgttccctcacatgtctgtgaggccagaccctgagtctgagattctggggtcccctcagtgctgccagttccttagtccctaagactgttaagaccacagagcccatggccagtgaatccagcaggggaataaatatgcagatgatataagacagcaaaaatcagcccagggctgggactggaaggccctggtttacggaatgaaccccgtcttctttggagctacagcctccgtcctgctctgccttctctcggcttttatcccg

SEQ ID NO: 257751 - DNA, 633 bp, Homo sapiens
tctagtagagacagggttttaccatgttggtcaggctagtcttgaactcctgacctcaagtgacccacccgcctcagcctcccaaagtgctgggattacacgcatgagccactgcacctggctaacaagtgctattttttagttcccattatgtgccatggactgcacatcatatacatttttgctaatccttacaccaaccctacacaatagatatttttatcctaatgttagagataaggaaactgatgctcagagagcttaagtgacttacccaagatcacacagctagtaagtgacagagtgagaatcagatctgactgcactcaggtctgacggactccgaattgcctcctcttgccactgggcaatgggcctttgagttgttccctcacatgtctgtgaggccagaccctgagtctgagattctggggtcccctcagtgctgccagttccttagtccctaagactgttaagaccacagagcccatggccagtgaatccagcaggggaataaatatgcagatgatataagacagcaaaaatcagcccagggctgggactggaaggcctgagtgaggaaaggaacctgctctctaggagtcaggacaccccggtcctggccctgactca

SEQ ID NO: 257752 - DNA, 357 bp, Homo sapiens
aggatccatctcaaaaaataaataaataaaaataaataaataaataaataaaagaggctccgtgcagcatttgggcctcttgctcttctgtcttcagccatttcaggacgcaatgtttcctctcagtaggacgcagcaacaaagtactatcctggaaggagagacagggcctctcaccagattctgaacctgcctgcaccttgatcttggacttcccagcctctataaatataagaaataaatttgcattctttataaattactcattctgtggtattgtttttatagcagcacaaacagactaagagaacaggtctctccttttcacatccgtgagaagtctctcaaattcctaga

SEQ ID NO: 257753 - DNA, 173 bp, Homo sapiens
gagaaggaaaaggcccaggagggaaagaggaagggtgggcagagatgggagattggccggcagagtgtggggctggcccctgcagaggagagcaggaaggcagagggctgggaggaagagggtttcactgtagggcagttttcttcttttttttctttttctttttttttttt

SEQ ID NO: 257754 - DNA, 431 bp, Homo sapiens
aatttgaaaagactgacatctttcagggtctgaccacctggaattataaatcagttaaaatctttttcacatctccaaataggtggaaactatataacatacttctaaataactcatgtgttaaagagaaaaacaaggaagcggggtgccgggggctcaggcccataatcccagcactttggaaggctgaggcaggtggatcacctgaggtcgggagtttgggaccagcctgaccaacatggagaaaccccatctctactaaaaatacaaaattagctgggcgtggtggtgcatgcctataatcccagctactcgggaggctgaggcaagagaattgcttgaacccgggaggcagaggttgcagtgagcagagatagtgccactgcactccagcctgggcaacaagagcgaaaccccatctcaaaaaaaaa

SEQ ID NO: 257755 - DNA, 431 bp, Homo sapiens
ggctttaccacaataaaacattataaaattaatcacagaaccaaaactctaaaaccattttttaaaattgtataaatttaaggagtgcaagtgcaattttgttacatgggtatatggggtaggagtgaagtctgagcttttagtgtgtttatcactggaacaatgtacactgtatccactaagtaatttctcatcaaccttccccctcccacccctcacccttctgagtctacagtgtcttatcattttacactctttgttcatgtttacgcattatttatttcccatttttaagtaagaacatgcagtatttgattttatgtttctgaattggaaaactataaaactcttagaataaaagataacaataaatctttatggcctgggatttggcaatagtttcttagatatggcaccaaaagcacagtgat

SEQ ID NO: 257756 - DNA, 344 bp, Homo sapiens
taagcctagatatcagagttaaaatctgttctcttagctggatccaagtatgagagtcatcatctcacctttgagctgtgaccatgtatgtgtcacaatacacctgtgggcaggaaccagacataagagtcatatcacctgggtgctgggctcaacttatagaaggcattgtgacagatctctgggttcatcacctaggagatgtgactctacactcccagctgggccaagccccactgaagattgtgacatattaatgagcccataaactatgtgacatgactctgctccctggcctaagccaagattaaaggggacattgagacataatgctttgcctagca

SEQ ID NO: 257757 - DNA, 378 bp, Homo sapiens
taggcttttaaaagcaggactagttgtgccctgccctcaggggtccctgattcagtaggtctggagtgggaccagcaaccttcttaggggatgctggtgctgctcttctggagccacactttcagaaccattgctgtaagatccacagatcatgataatgataatggtgatgagagatcatgccagtgacagtctttctcttcccttcttcattctgtctttacattggagctcagttactgtcttgaaagtgtggtctaaactttaatcctgctgccaacttttgatgactacttgtatctatagctcaaagtccaaattctttcatgtggtgcttgaagccatcttccacctttggaaggcactagtcattctcca

SEQ ID NO: 257758 - DNA, 604 bp, Homo sapiens
ctcacctggaaactcctcacacaattcagtgatggtttagcaatttcattataatcatgaaacaacagacaccatagcactagtttaatattaactttccttattatattttcattcatattactgtcatgcttttttgaaactgattattctgttttctacagcttcctaacaggttaggaaagcacacatggaagttagcactgtataattctttatttaaagcatataatttgatagcatgtgaaatttagatgacaattcttaagtaaaactaatcataaaaattatatctgacatttatttttatgtgcagattgtgtactcagatgttttacattagtgatttttttaagttatcacatcagccctaagaggaaggtattcctactttccttattctgtaggtaggaaatctgaggatttgacaacttgagttgtttgttaatgtgatactggcgggaagtaataaggctgaatctaaacctcttgagacagactccacagtccataaacttaccactaattaagaaggctggcaatttgggatataatttttttttgttctgataatcatagtaaatatttaccgagaatcagcatt

SEQ ID NO: 257759 - DNA, 162 bp, Homo sapiens
gctgagagctgggcctggctggctgtgggcttctacagagtagttgcagccctgtgcacaggcagggggggtgtcaccgactcgcatgtgggcaggtctttgctgcgcatcaggtgctttaagcttcggaacaactgtgcaggattctattttagtattctg

SEQ ID NO: 257760 - DNA, 462 bp, Homo sapiens
cctttgcgtgactgactctcttatctaccaccgctacaggctgaaggttgcactattggcttccctacttttgaggttttgggactccgactggcttcctggctcctcaccttgcagatggtctattgtgggacctcatcttgtgatcatgtctcagtatgttgctcagactggtcttgaactcctggcctcaagtgatcctcccacctcagcctcttgagtagctgggactacagttgcaagccatcctgtctggctagttatctttaattaatgacatttgttaaagtaacacaaaaatcctagaaacatttgcctgttgaaactttctgataatttgaatgaagtaaagtttggagtctctgtctcattgaaaatactcaaggttaatataataaaaacagcaaagcagtaatgcataaaagaattattagaagtctaataaaattatttggacctcca

SEQ ID NO: 257761 - DNA, 899 bp, Homo sapiens
caatgattgagtcagtcatgtgtatgtaataaggcctccataaaaaccgaagaggatggggtttgcagagcttctaggctggtgagcacttggatgtgctggaggcatccagagggtggagcacgtggagagggcatgaatgctcagtgcaccttccctcataccttgccttatacagcgtttccatctggctgctgttgagttttattctttataacaatatgctaaccctaagcaaagttttcctgagttctgtgagccattctagcaaatggtggaacctgagaaaggggacatgggaatctctgacttacagccagtcagcccgaagcacaggataccaaaatcatcataccagagacatgaatctccctcatttggcatcccaggaggcctggatcagtttcactgtgaatgctccgccgctcaaccacacaagcacccttcctccaggcccaggggatactgcagaagaggctgaaggttgcactattggcttccctacttttgaggttttgggactccgactggcttcctggctcctcaccttgcagatggtctattgtgggacctcatcttgtgatcatgtctcagtatgttgctcagactggtcttgaactcctggcctcaagtgatcctcccacctcagcctcttgagtagctgggactacagttgcaagccatcctgtctggctagttatctttaattaatgacatttgttaaagtaacacaaaaatcctagaaacatttgcctgttgaaactttctgataatttgaatgaagtaaagtttggagtctctgtctcattgaaaatactcaaggttaatataataaaaacagcaaagcagtaatgcataaaagaattattagaagtctaataaaattatttggacctcca

SEQ ID NO: 257762 - DNA, 1222 bp, Homo sapiens
caatgattgagtcagtcatgtgtatgtaataaggcctccataaaaaccgaagaggatggggtttgcagagcttctaggctggtgagcacttggatgtgctggaggcatccagagggtggagcacgtggagagggcatgaatgctcagtgcaccttccctcataccttgccttatacagcgtttccatctggctgctgttgagttttattctttataacaatatgctaaccctaagcaaagttttcctgagttctgtgagccattctagcaaatggtggaacctgagaaaggggacatgggaatctctgacttacagccagtcagcccgaagcacaggataccaaaatcatcataccagagacatgaatctccctcatttggcatcccaggaggcctggatcagtttcactgtgaatgctccgccgctcaaccacacaagcacccttcctccaggcccaggggatactgcagaagaggctgaaggttgcactattggcttccctacttttgaggttttgggactccgactggcttcctggctcctcaccttgcagatggtctattgtgggacctcatcttgtgatcatgtctcagtatgttgctcagactggtcttgaactcctggcctcaagtgatcctcccacctcagcctcttgagtagctgggactacagttgcaagccatcctgtctggctagttatctttaattaatgacatttgttaaagtaacacaaaaatcctagaaacatttgcctgttgaaactttctgataatttgaatgaagtaaagtttggagtctctgtctcattgaaaatactcaaggttaatataataaaaacagcaaagcagtaatgcataaaagaattattagaagtctaataaaattatttggacctccaactatagcaacactgattaatgactgctttttaattaattggaagttgttcaatcatcgtgccatttcatttcacctgagagtttttataaaagggtcagagccaaaacatatgctagttcaatttgcaataaggtatacttaagcaatttcattcttcttggcagggcaagtgtgggctattcatttctcatttattcacggtgatgatattccctgttcagctggctagtgtgatcaaggaagacagtcttaggcattagaatatgaataaagtttacttttaagctgtgcattcaaacaaaataaaaacctatgattacc

SEQ ID NO: 257763 - DNA, 466 bp, Homo sapiens
gggcgggccgtctggcccgcgagttagttttgaaagccctgcggctgaaggttgcactattggcttccctacttttgaggttttgggactccgactggcttcctggctcctcaccttgcagatggtctattgtgggacctcatcttgtgatcatgtctcagtatgttgctcagactggtcttgaactcctggcctcaagtgatcctcccacctcagcctcttgagtagctgggactacagttgcaagccatcctgtctggctagttatctttaattaatgacatttgttaaagtaacacaaaaatcctagaaacatttgcctgttgaaactttctgataatttgaatgaagtaaagtttggagtctctgtctcattgaaaatactcaaggttaatataataaaaacagcaaagcagtaatgcataaaagaattattagaagtctaataaaattatttggacctcca

SEQ ID NO: 257764 - DNA, 609 bp, Homo sapiens
ttcaagcgattctcctgcctcagcctccctagtagctgggactacaggtgcgtgccgccatgcccagctgattttttgtatttttagtagtgacagggtttcattgtgttagccaggatggtctcgatctcctgacctcgtgatccacccgcctcagcctcccaaaattctgggattacaggcgtgagccaccgcgcccagctataaagagaattttaaaatgccacttctttcttaaaaccaaatcacataagtacaattctaacacttatactaagcgagtgatttccatcctcctttggaattctctgcttctagaattgtttcccatatgcttaggatgacaaagtattatggatagaacttcactataacaatggtatctggggataaagataataactacatttaggttttccacaataaaatgtatttttcatcatgatatatcttttactgcccctcaacccaacaatttgacctaaatggctgcatgggcaagaatttactattagttagtcatgtttatttacactttgtcttattctaaaaaagatgaaaagctaagaatcattcaggggttttacggtagtaagacttataaattta

SEQ ID NO: 257765 - DNA, 467 bp, Homo sapiens
accttgcacaactccataccaaccatgtctttatggattacatatgggaccagaattgactgcagtacaacctgagtcttggcaaagtaccctgcaattcctcctgcagcaggaaaggataagcaagctggtgaagagatgccatgggcagttcccacccacctccctaccttgtggaagatgaccacaaggccatttctcattcgtctctttagtttcagttgagcacaggacttttgaccttgctcccttagggttcaactgcagacttctttgtgagtatacctatttggctaaggggtagagctgactcctcagtagcagaacgacctaccacctgtgccatctgtcatctggcctctctgttcagtgtcattctatggaattagagatgcagggagctgacaccatacaggtgatgcttatgttttttgtgtatgtaataaaatgtctgactgtatttgact

SEQ ID NO: 257766 - DNA, 459 bp, Homo sapiens
cgcatctccactctcaagttacctttcccattattgactgagctcctgccacaatactttgttctcatttcctcaaaaaatgtcaagctctttcctgcttcagcccccatatggtgccccctcctcctgaaatggttccccatacttttcacatagatttcttccactcatttgtcaggtttcagcttaaatgtcagcaaatcaaagaagtcatttttaatctctctttaaataaagtggacttcctcctcacatttggtaactatttcaaccccttttttccttcatatcacttggcatgattggtaatccttatcctattgtgtttggtctgtcttcctcactagaacagtctccataatgcccatcagttgtactcatcactgaattccctacttaaaaaaaataaggcctggtaccttttgctaaatgtttattcaataaattaaatcatggatg

SEQ ID NO: 257767 - DNA, 693 bp, Homo sapiens
gtaaaatatgctgattaattacttttattttggtaacacaacaataaatacatgcctctttgacattttaaacagctttactaaggtatcattgatagaaaataaactggacatatttaaaatatgtgacttgacagttgtgacatagatttttactcatgaactcatcaccataatgaagataatgaacacactcatcatccccaaaattccctgttgtcctgttgtaatatagctcctatccaatggtgcccccttcttgaaactcctaatttactttctgtcataaatttgtttgcaatttttacgattttacaaaaatggaataatgtattctgttgtctggcttatttaactcagcataattatttgaaggctcatctgtattgcagcacgtgtcagtggtatattcctttttatttctggagtagtattccattgtgtggataccagagtctgtgtatccatctacctgtttgtaggcatagatcccttcatttttattacctttcatgacgtttggtctcacaatcccgatattagtaactcctttctgaaaaagtatttcaaaagctaaattctctattctctccagatcatagagaggaaaatgacctctcaagaaaactcagggacagaattaggatatttataacaatagtaatagtctgatgatacacatagcaccaattg

SEQ ID NO: 257768 - DNA, 409 bp, Homo sapiens
ggctaatgtgggaggctcacttgagctcaggaagtcaaggctgcagtgagcaaagacggtgccactgtacttcagcctgggtgacaaaatgagaccctgtctcaagaaaaaaataatcacttttattgagctaatttatatatacctatttaatcctcagtggccctaggaagttgggtctgcatcaaatcttcttagatttgaccataatcaagctgccaactcctccttttctatgcctactatgtgccaagcttagtgctaggtattttactgacattgtctcatgtcatcttcagaaccaccttaggaattaaaagccagtatccttattttgctcaggaggcagaagagttactcagcagctcaatcaggggcagagttgggatgtgaacccagtcctatccac

SEQ ID NO: 257769 - DNA, 423 bp, Homo sapiens
ttccccacttgggaggggtaactggcttccataagaggcctggcaggcaggccccttgggatgtcccggagtgtgtggcatttatgatcagtgccaccccagaagcaggccccttacgcctccctggatcatcactgcaaaaccctctgaccaacatcctttgccatgagcctggggcaggtcctccccgagagcatcagagccccaacatcatttgcggggttctctgtcattgacctaggacgcggtgaactggactctgtgtaaggcagtgtaccccaatgtttcctggggtggaggtgttcatccatccgaatgcttcttttttagcatctgccgtgtgcacagagacactcagagccctgtgcttggtcgggaagtacctgtgatgtgggatgcctatgggagctttggataagagat

SEQ ID NO: 257770 - DNA, 501 bp, Homo sapiens
gcgccaccacgcctggctaatttttgtatttttggtagagacgggattgcaccatattggccaggctggtctcgaacccccgacctcaggtgatccacccgcctcggcctccaaaagtgctgggattacaggcgtgagccaccgcgcccggtcagactctctcgtttctaggagggacggtcttggaggctccaaggagaaggcgtcgcctggccccaggaagcgccctggtgaggcgtccctccatttccccatctcctgcggggccctcccagggcgggctccacgcctgccccgcgcgcctgtgtaggagcctcgaggcgggcggggttccagcgcgcagccggccgccctcaaccgctcccagcatcggttgccggtggttcggggcagggagacgacgcagcgcgagcggaaagggcggttacccaacggccttagctctcatggcgtcctccgtggtgttacctaaaaataaagttatttgtgattagaaggtaa

SEQ ID NO: 257771 - DNA, 352 bp, Homo sapiens
tgtttcccacctccccccttccctgcaagcaaattaaacaacaacagtagcagcatcagcagcaaaaccccaaacccaatcctaaccaaaccacttactgaaagagatttgtagtggtgagaaaaagagacccaactgaggaatcatttgggaaccgcaggtatggtgccatttaaaaactggttctttctggtgttatttctagaacttgtgtttgcaaacagattagaattctgggctcttgtcagcctaatggagttctttatactgaagggtggcctggggtgtcctctgttaacatttatttctgtaagtattaaagtatattgaaacaaataccctttcacggctc

SEQ ID NO: 257772 - DNA, 675 bp, Homo sapiens
tgttttgtatttttccaatcatgaaaagcacctttgacataatccaaagccagacgtaagaggaaagaacctggatattttaaaaaccaaacagccaaactgattctatcatcccctaataagaagatgagaaaacaagcatagaggttaaaaaagtacccccaaacacgaaacaaagaattgatggccgggatcagatgcttggattctgtgctcaaggcctggatatcttctggtttttaaaaatggtgtgtgtttgtttgtttgtttgttttgagacagtcttactctgtcacccaggctggagtgcagtggtgtgatctcggctcactgcaacctctgcctcccaggttcaagtgattcttgtgcctcagcttcccaagtagctaggattacagatgtgcgccaccacacctagctaatttttgtatttttagtggagacagggttttaccatgttggccaggctgttcttgaacttctgacctcaaataatgcacctactttggcctccaaaagtgcagggattacaggtgttagccactgtgcccaacagtttttaacaatgtttttaaaaaacttattggtattaagaatacatgctcaccagaaagtttgagcatatagaaaagtagaaagaaggcaatcaccactcagaatcagccacttttgttg

SEQ ID NO: 257773 - DNA, 155 bp, Homo sapiens
aaatgctatgttgatgtattacacctcagaacaactatgaacgtgccatctgcagcaggaaggtttattagactacaaatcaggatacagatgttggagggaaagctacgtatgctaagtcataatacattaaagcacattttaaatctatatat

SEQ ID NO: 257774 - DNA, 453 bp, Homo sapiens
tactacgtgaaagtaatgtttaattaaattaaaatttaatcaatgtatctttaaactcaccaagtaaaataaattcctgtgttatcaagtttttacctcttggaattaagctttaaattttctatttcattttaccagtgggttcactggtgattggatcagcaactccaaatatcatgatgtcctttacaaaccttatatattgtccatagtaaagtagttgtcgtaatgaacaagttttggcagaagaaagatttctatggtagtcttttgaaaatcattctaaaatgaagattgtggtaaaagtcctcttatgatggaataaagagaacaacttttattaatttcctgtgcatgtggatattcaaaagtgtatggattttttaaatgatgattctgtaagaactcatagttgattacttagccacctgcaagatattcctttgaggaaaa

SEQ ID NO: 257775 - DNA, 274 bp, Homo sapiens
gggcgcggaggttacagcccatcgccgagccttacccgctcgcagtcccggttcccgagctcctgccgccgtcgccctgtggaggacacccctgccggccccgcagtccctcctcgacttgcgctggcttcggccgtcctggaactcgagctcgttcccccctccgagccttttgcccttgcggttcccgctgctgggaacgaccttgccctcagccgcctggctggtccctgcgccgctgcagtgcgaatgtcgccttctcaggggccctttc

SEQ ID NO: 257776 - DNA, 372 bp, Homo sapiens
taactgttcatgtccattttgagacatcagttcttgattcctaccgcataggcatgctgtcttcctcaataaggtgaagcccgtaggcttcttggaagttcgcagaagatttaggtctgtttaagtacctactttccaaagactgttatttggaaagacaccagaaattgtcaattctttattttttacccccctcaggcatagaaattgaatctgaaatggctgatgaataagcaaaggcttataatagagtacatttctatttttagtgtttcaactcttctttaaaatgagtaacattgtttctttaaaatagggagtccattatatgtatcctcttagaaatgaaataaattttttcggactctttgt

SEQ ID NO: 257777 - DNA, 538 bp, Homo sapiens
tctgtaattgtatatgtcatgagagattgcttttaaccttccaatgttcgtggtctcattttcactaacataatcccaactttagctgcgcacaataccacatttcccagcattccttgcatctggatatagctgtattcaaataagccgtgtgaaacttctgggatggctccttaagtgcagttgactcattagggaggtatgtcttttttatttttctacactttgtgctgctgtcctggagtacagacatggtggctagaagcatgaaatcaccttgaaggtagaagtcatgcattgaagttagtaaaagtgaaatgtaagtgtatagtttcctgatgaaaatgggaagcttatgtactagcaacagaatgcttattatgcaggcttcctatatgtaaaagaggacaaattctcattttattaagtttctgaaagtagatttctaaatgctggttctattttttattgaaagtaatggcaaaaaacgcaatgccttttgtaccaacctaatagttaataaacatatcctcaaatg

SEQ ID NO: 257778 - DNA, 478 bp, Homo sapiens
cttgatctcttagtccctgtgattcaggaaattgtattaatgaatttatggtcaatactactgactaggatgctttcaataacatagtttaaaatgtagtcacacttatagctagaatggtgaaacaaaagtttgttctccttaaagatttaccttgttaagaaatagtttctgatggctcggcacactggctcacacctgtagtttcagccttttgggagaccaagacaggaggattgcttgaggacaggaattcaagaccagcttgggcaacattgcaagaacccatctctacaaaaatttaaagaacaaaacttagccaggtatggtggtatgcgcctatagtcctagctactcaggagggagaggagggaggatcacttgagcccaggagttcaaggctggtgctaagattgtgccactgtactccagtgtgagcaatagagttagaccctgtttcttaaaaaaaaaaaaagtc

SEQ ID NO: 257779 - DNA, 261 bp, Homo sapiens
cgcctggctaatttttttttttttgtatttttagtagagacggggtttcactgtgttagccaggatggtctcgatctctgacctcgtgatctgcctacctcggcctcccaaaatgctgggattacaggcatgagccaccatgcctggctgagtttctagacttatagcatgggtggctggatcagtaacaatccataccgatcatttaagtgcttaagacagaattccatttctatatctaaatcgtcatctgtctctact

SEQ ID NO: 257780 - DNA, 465 bp, Homo sapiens
cttgggctaaaatggtccgtggaagatgtaagcagggctgctttcgacttcttaacgtcacaagtaacagaggttttttttcttctttttctgcctctcttggtgcaccacagctaccaagtaaacaaaaagtcccaacaagcagtaattatagcggcagctgccccagtgatgcgaacataaatgcaaagaccttcaagcagcaggaaaaaaagacaccatgtccgagatgtaattttccgagctctttacaaatttatgtcacagactaaggctttagcctttgcaaaagcatgcaacctgaaccagactgtcttgaatctccagtccagaaaatgtcctcttttctctctgtcacatctttgaagcgaatccacgcacatcttctccccaacttcttaaagcttgtgtttgttttctcgtaactcattttgattctttaaacttggatgtcatgaactagaa

SEQ ID NO: 257781 - DNA, 410 bp, Homo sapiens
gttaggtataaggtgtttcaaaaaaggaggagagtgggactgaatgttgggcaaagctgggaagacgtctcttgtagaacggtgacatttgagctggagtttttcaggcagagaagcacacggacaagggcatgtggaggagactgtgcagaggaactgtctcaaagcctgcagcctgtttgggaaacagataaatttgtggctgaaatggtgtgtagggtgaagtggttagccgggagtctggagaggagagagaaagaatttggtaatccaagctcaggactgagtgaagttggtagcaactctgtgttaagatagctggttgaggccgggtgcgaggctcacgcctgtaatcccagcactttgggagaccgaagtagacggatcacttgaggtaaggagtttgagac

SEQ ID NO: 257782 - DNA, 505 bp, Homo sapiens
gatcgtgccacagcactccagcctgggcgacagagcgagacactgtctcaaaaaaaaaaaaggagggagccaggtgccgcggctcatgcctgtaatcccagcacttggggaggctgagacaggcagatcacctgaggtcatgagttcgagaccagcctgaccaacatggacaggttaaaaatacaaaattagctgggcatggtggcacatgcctgtaatcccagctactcaggagtgtgaggcaggagaattgcttgaacccaggaggtggaggttgcggtgagctgaaatcgcgccattgcactccagcctgggcaacaagagcaaaactctgtctcaaaaaaaaaaaaaaaaaaaaaagttttaatgtttgaatgactttactcacagcttacattttctaatttggctgagtccccatcactttctgtttactgtacactgaatctctacctcactcatttatgctgtttacctagctcctggaggcaattgagttgtgatc

SEQ ID NO: 257783 - DNA, 374 bp, Homo sapiens
tagctgggcgtggtggcgggcgcctgtagtcccagctactcaggaggctgaggcaggagaatggcgtgaacctgggaggcggagcttgcagtgagccaagatcgtgccactgcactccagcctgggcgacagagcgagtctctgtctcaaaaaaaaacacaaatattcatataaggtggacaagggggccacagttatgaaacataactttagtgtttcagattcctctaatcaaagatgtcattaacaggccgggcgcggtggctcacgcctataatcctagcactttgggaggccaagacaggcggattgcctaagctctggagttccagaccagcctgggcaacatggtgaaaccccatctctactaaaat

SEQ ID NO: 257784 - DNA, 2140 bp, Homo sapiens
tgcctgctgtcatcgttccgtgggccctgctgcgggcacgctctcggcgcatgcgttttttatgcgggattaagcttgctgctgcgtgacagcggagggctaggaaaaggcgcagtggggcccggagctgtcacccctgactcgacgcagcttccgttctcctggtgacgtggcctacaggaaccgccccagtggtcagctgccgcgctgttgctaggcaacagcgtgcgagctcagatcagcgtggggtggaggagaagtggagtttggaagttcaggggcacaggggcacaggcccacgactgcagcgggatggaccagtactgcatcctgggccgcatcggggagggcgcccacggcatcgtcttcaaggccaagcacgtggagactggcgagatagttgccctcaagaaggtggccctaaggcggttggaagacggcttccctaaccaggccctgcgggagattaaggctctgcaggagatggaggacaatcagtatgtggtacaactgaaggctgtgttcccacacggtggaggctttgtgctggcctttgagttcatgctgtcggatctggccgaggtggtgcgccatgcccagaggccactagcccaggcacaggtcaagagctacctgcagatgctgctcaagggtgtcgccttctgccatgccaacaacattgtacatcgggacctgaaacctgccaacctgctcatcagcgcctcaggccagctcaagatagcggactttggcctggctcgagtcttttccccagacggcagccgcctctacacacaccaggtggccaccaggtctgtgggctgcatcatgggggagctgttgaatgggtccccccttttcccgggcaagaacgatattgaacagctttgctatgtgcttcgcatcttgggcaccccaaaccctcaagtctggccggagctcactgagctgccggactacaacaagatctcctttaaggagcaggtgcccatgcccctggaggaggtgctgcctgacgtctctccccaggcattggatctgctgggtcaattccttctctaccctcctcaccagcgcatcgcagcttccaaggctctcctccatcagtacttcttcacagctcccctgcctgcccatccatctgagctgccgattcctcagcgtctagggggacctgcccccaaggcccatccagggcccccccacatccatgacttccacgtggaccggcctcttgaggagtcgctgttgaacccagagctgattcggcccttcatcctggaggggtgagaagttggccctggtcccgtctgcctgctcctcaggaccactcagtccacctgttcctctgccacctgcctggcttcaccctccaaggcctccccatggccacagtgggcccacaccacaccctgccccttagcccttgcgagggttggtctcgaggcagaggtcatgttcccagccaagagtatgagaacatccagtcgagcagaggagattcatggcctgtgctcggtgagccttaccttctgtgtgctactgacgtacccatcaggacagtgagctctgctgccagtcaaggcctgcatatgcagaatgacgatgcctgccttggtgctgcttccccgagtgctgcctcctggtcaaggagaagtgcagagagtaaggtgtccttatgttggaaactcaagtggaaggaagatttggtttggttttattctcagagccattaaacactagttcagtatgtgagatatagattctaaaaacctcaggtggctctgccttatgtctgttcctccttcatttctctcaagggaaatggctaaggtggcattgtctcatggctctcgtttttggggtcatggggagggtagcaccaggcatagccacttttgccctgagggactcctgtgtgcttcacatcactgagcactcatttagaagtgagggagacagaagtctaggcccagggatggctccagttggggatccagcaggagaccctctgcacatgaggctggtttaccaacatctactccctcaggatgagcgtgagccagaagcagctgtgtatttaaggaaacaagcgttcctggaattaatttataaatttaataaatcccaatataatccc

SEQ ID NO: 257785 - DNA, 3612 bp, Homo sapiens
  misc_feature (2098)..(2099): n is a, c, g, or t
tgcctgctgtcatcgttccgtgggccctgctgcgggcacgctctcggcgcatgcgttttttatgcgggattaagcttgctgctgcgtgacagcggagggctaggaaaaggcgcagtggggcccggagctgtcacccctgactcgacgcagcttccgttctcctggtgacgtggcctacaggaaccgccccagtggtcagctgccgcgctgttgctaggcaacagcgtgcgagctcagatcagcgtggggtggaggagaagtggagtttggaagttcaggggcacaggggcacaggcccacgactgcagcgggatggaccagtactgcatcctgggccgcatcggggagggcgcccacggcatcgtcttcaaggccaagcacgtggagactggcgagatagttgccctcaagaaggtggccctaaggcggttggaagacggcttccctaaccaggccctgcgggagattaaggctctgcaggagatggaggacaatcagtatgtggtacaactgaaggctgtgttcccacacggtggaggctttgtgctggcctttgagttcatgctgtcggatctggccgaggtggtgcgccatgcccagaggccactagcccaggcacaggtcaagagctacctgcagatgctgctcaagggtgtcgccttctgccatgccaacaacattgtacatcgggacctgaaacctgccaacctgctcatcagcgcctcaggccagctcaagatagcggactttggcctggctcgagtcttttccccagacggcagccgcctctacacacaccaggtggccaccaggtagggagggccagatcccttccagtcttctccatggggaagagatgcttctgggccttttctccagacattgcttgtggggctggggtcacctccccaggcatccttttctcagcccagtgcctgccagccctcttcctcgcaggtggtaccgagcccccgagctcctgtatggtgcccgccagtatgaccagggcgtcgatctgtggtgagacccctgtgggtggtcaaagggtaacatggctcatggatttctgctaggctctgaggtctctgagctgtttggtggtcttttccctggtgggagtttaggcttccttaagggtgtcttccctggttggggtattctgagcactttggggttggggttcctcactatgatgttttcgagctgggtaggggccaggtgggatgagaatggtggtcccaggtgggaagctttctgggctagatggggaggtggtctgagccgatatgtgctggagttagatcctaggatatggcatctctgagctggtcagaggcctgtgtccttggacatgaaagctctgagcttgttttgcagcaagaagatagttggcagtgcccatgggtctgagatttggggcaggtttgcaggtctgccccagaagtgtcctagagcaggagtctccgagaagtcttggaacagctggggctttgctctgggttctagggttgagggctttgagggttcagggactgggcctctggacgtgaggctccagggctggcttgtggggccttgccctggagtgcagtgttagagctgctctgtgggtgggtctgtggtccatggtgggagatctctgacctgcttggggctctgtgtccacaggtctgtgggctgcatcatgggggagctgttgaatgggtccccccttttcccgggcaagaacgatattgaacagctttgctatgtgcttcgcatcttgggcaccccaaaccctcaagtctggccggccggtttgtaggggcccttggtgaggtgggtgtggggcaggtttactccactcccaacagcaagtaaccactccctcccctgaaccttctctctcctggccccaaccccccttgatggacagggaccactgtcctggcccaactcagggcttcctccttcctgctgtcatttgggttggggtagatcctgtcctttgtcccttttcaccccagtacacacatgtgcagtgtctcagcaagctgtgcacagagtcgtcatctgagagggcaaggggatggatgaaggaatacaggggtgggtgagnnaatgaatgatgggtcagggagacacatggatgggagagcaccccccatgtgagtgtgtgttaggggctgagagttgacagcagagagcatggcaagggtcgggaactactctcattgtaccctgttccttctccctggcccaggagctcactgagctgccggactacaacaagatctcctttaaggagcaggtgcccatgcccctggaggaggtgctgcctgacgtctctccccaggcattggatctgctgggtcaattccttctctaccctcctcaccagcgcatcgcagcttccaaggctctcctccatcagtacttcttcacagctcccctgcctgcccatccatctgagctgccgattcctcagcgtctagggggacctgcccccaaggcccatccagggcccccccacatccatgacttccacgtggaccggcctcttgaggagtcgctgttgaacccagagctgattcggcccttcatcctggaggggtgagaagttggccctggtcccgtctgcctgctcctcaggaccactcagtccacctgttcctctgccacctgcctggcttcaccctccaaggcctccccatggccacagtgggcccacaccacaccctgccccttagcccttgcgagggttggtctcgaggcagaggtcatgttcccagccaagagtatgagaacatccagtcgagcagaggagattcatggcctgtgctcggtgagccttaccttctgtgtgctactgacgtacccatcaggacagtgagctctgctgccagtcaaggcctgcatatgcagaatgacgatgcctgccttggtgctgcttccccgagtgctgcctcctggtcaaggagaagtgcagagagtaaggtgtccttatgttggaaactcaagtggaaggaagatttggtttggttttattctcagagccattaaacactagttcagtatgtgagatatagattctaaaaacctcaggtggctctgccttatgtctgttcctccttcatttctctcaagggaaatggctaaggtggcattgtctcatggctctcgtttttggggtcatggggagggtagcaccaggcatagccacttttgccctgagggactcctgtgtgcttcacatcactgagcactcatttagaagtgagggagacagaagtctaggcccagggatggctccagttggggatccagcaggagaccctctgcacatgaggctggtttaccaacatctactccctcaggatgagcgtgagccagaagcagctgtgtatttaaggaaacaagcgttcctggaattaatttataaatttaataaatcccaatataatcccagctagtgctttttccttattataatttgataaggtgattataaaagatacatggaaggaagtggaaccagatgcagaagaggaaatgatggaaggacttatggtatcagataccaatatttaaaagtttgtataataataaagagtatgattgtggttcaaggat

SEQ ID NO: 257786 - DNA, 2112 bp, Homo sapiens
tgcctgctgtcatcgttccgtgggccctgctgcgggcacgctctcggcgcatgcgttttttatgcgggattaagcttgctgctgcgtgacagcggagggctaggaaaaggcgcagtggggcccggagctgtcacccctgactcgacgcagcttccgttctcctggtgacgtggcctacaggaaccgccccagtggtcagctgccgcgctgttgctaggcaacagcgtgcgagctcagatcagcgtggggtggaggagaagtggagtttggaagttcaggggcacaggggcacaggcccacgactgcagcgggatggaccagtactgcatcctgggccgcatcggggagggcgcccacggcatcgtcttcaaggccaagcacgtggagactggcgagatagttgccctcaagaaggtggccctaaggcggttggaagacggcttccctaaccaggccctgcgggagattaaggctctgcaggagatggaggacaatcagtatgtggtacaactgaaggctgtgttcccacacggtggaggctttgtgctggcctttgagttcatgctgtcggatctggccgaggtggtgcgccatgcccagaggccactagcccaggcacaggtcaagagctacctgcagatgctgctcaagggtgtcgccttctgccatgccaacaacattgtacatcgggacctgaaacctgccaacctgctcatcagcgcctcaggccagctcaagatagcggactttggcctggctcgagtcttttccccagacggcagccgcctctacacacaccaggtggccaccaggtctgtgggctgcatcatgggggagctgttgaatgggtccccccttttcccgggcaagaacgatattgaacagctttgctatgtgcttcgcatcttgggcaccccaaaccctcaagtctggccggagctcactgagctgccggactacaacaagatctcctttaaggagcaggtgcccatgcccctggaggaggtgctgcctgacgtctctccccaggcattggatctgctgggtcaattccttctctaccctcctcaccagcgcatcgcagcttccaagctcccctgcctgcccatccatctgagctgccgattcctcagcgtctagggggacctgcccccaaggcccatccagggcccccccacatccatgacttccacgtggaccggcctcttgaggagtcgctgttgaacccagagctgattcggcccttcatcctggaggggtgagaagttggccctggtcccgtctgcctgctcctcaggaccactcagtccacctgttcctctgccacctgcctggcttcaccctccaaggcctccccatggccacagtgggcccacaccacaccctgccccttagcccttgcgagggttggtctcgaggcagaggtcatgttcccagccaagagtatgagaacatccagtcgagcagaggagattcatggcctgtgctcggtgagccttaccttctgtgtgctactgacgtacccatcaggacagtgagctctgctgccagtcaaggcctgcatatgcagaatgacgatgcctgccttggtgctgcttccccgagtgctgcctcctggtcaaggagaagtgcagagagtaaggtgtccttatgttggaaactcaagtggaaggaagatttggtttggttttattctcagagccattaaacactagttcagtatgtgagatatagattctaaaaacctcaggtggctctgccttatgtctgttcctccttcatttctctcaagggaaatggctaaggtggcattgtctcatggctctcgtttttggggtcatggggagggtagcaccaggcatagccacttttgccctgagggactcctgtgtgcttcacatcactgagcactcatttagaagtgagggagacagaagtctaggcccagggatggctccagttggggatccagcaggagaccctctgcacatgaggctggtttaccaacatctactccctcaggatgagcgtgagccagaagcagctgtgtatttaaggaaacaagcgttcctggaattaatttataaatttaataaatcccaatataatccc

SEQ ID NO: 257787 - DNA, 2398 bp, Homo sapiens
tgcctgctgtcatcgttccgtgggccctgctgcgggcacgctctcggcgcatgcgttttttatgcgggattaagcttgctgctgcgtgacagcggagggctaggaaaaggcgcagtggggcccggagctgtcacccctgactcgacgcagcttccgttctcctggtgacgtggcctacaggaaccgccccagtggtcagctgccgcgctgttgctaggcaacagcgtgcgagctcagatcagcgtggggtggaggagaagtggagtttggaagttcaggggcacaggggcacaggcccacgactgcagcgggatggaccagtactgcatcctgggccgcatcggggagggcgcccacggcatcgtcttcaaggccaagcacgtggagactggcgagatagttgccctcaagaaggtggccctaaggcggttggaagacggcttccctaaccaggccctgcgggagattaaggctctgcaggagatggaggacaatcagtatgtggtacaactgaaggctgtgttcccacacggtggaggctttgtgctggcctttgagttcatgctgtcggatctggccgaggtggtgcgccatgcccagaggccactagcccaggcacaggtcaagagctacctgcagatgctgctcaagggtgtcgccttctgccatgccaacaacattgtacatcgggacctgaaacctgccaacctgctcatcagcgcctcaggccagctcaagatagcggactttggcctggctcgagtcttttccccagacggcagccgcctctacacacaccaggtggccaccaggtctgtgggctgcatcatgggggagctgttgaatgggtccccccttttcccgggcaagaacgatattgaacagctttgctatgtgcttcgcatcttgggcaccccaaaccctcaagtctggccggagctcactgagctgccggactacaacaagatctcctttaaggagcaggtgcccatgcccctggaggaggtgctgcctgacgtctctccccaggcattggatctgctgggtcaattccttctctaccctcctcaccagcgcatcgcagcttccaaggctctcctccatcagtacttcttcacagctcccctgcctgcccatccatctgagctgccgattcctcagcgtctagggggacctgcccccaaggcccatccagggcccccccacatccatgacttccacgtggaccggcctcttgaggagtcgctgttgaacccagagctgattcggcccttcatcctggaggggtgagaagttggccctggtcccgtctgcctgctcctcaggaccactcagtccacctgttcctctgccacctgcctggcttcaccctccaaggcctccccatggccacagtgggcccacaccacaccctgccccttagcccttgcgagggttggtctcgaggcagaggtcatgttcccagccaagagtatgagaacatccagtcgagcagaggagattcatggcctgtgctcggtgagccttaccttctgtgtgctactgacgtacccatcaggacagtgagctctgctgccagtcaaggcctgcatatgcagaatgacgatgcctgccttggtgctgcttccccgagtgctgcctcctggtcaaggagaagtgcagagagtaaggtgtccttatgttggaaactcaagtggaaggaagatttggtttggttttattctcagagccattaaacactagttcagtatgtgagatatagattctaaaaacctcaggtggctctgccttatgtctgttcctccttcatttctctcaagggaaatggctaaggtggcattgtctcatggctctcgtttttggggtcatggggagggtagcaccaggcatagccacttttgccctgagggactcctgtgtgcttcacatcactgagcactcatttagaagtgagggagacagaagtctaggcccagggatggctccagttggggatccagcaggagaccctctgcacatgaggctggtttaccaacatctactccctcaggatgagcgtgagccagaagcagctgtgtatttaaggaaacaagcgttcctggaattaatttataaatttaataaatcccaatataatcccagctagtgctttttccttattataatttgataaggtgattataaaagatacatggaaggaagtggaaccagatgcagaagaggaaatgatggaaggacttatggtatcagataccaatatttaaaagtttgtataataataaagagtatgattgtggttcaaggataaaaacagactagagaaacttattcttagccatcctttatttttattttatttattttttgatggagtcttgctctgttgcccaggctggag

SEQ ID NO: 257788 - DNA, 2911 bp, Homo sapiens
  misc_feature (1305)..(1306): n is a, c, g, or t
tgcctgctgtcatcgttccgtgggccctgctgcgggcacgctctcggcgcatgcgttttttatgcgggattaagcttgctgctgcgtgacagcggagggctaggaaaaggcgcagtggggcccggagctgtcacccctgactcgacgcagcttccgttctcctggtgacgtggcctacaggaaccgccccagtggtcagctgccgcgctgttgctaggcaacagcgtgcgagctcagatcagcgtggggtggaggagaagtggagtttggaagttcaggggcacaggggcacaggcccacgactgcagcgggatggaccagtactgcatcctgggccgcatcggggagggcgcccacggcatcgtcttcaaggccaagcacgtggagactggcgagatagttgccctcaagaaggtggccctaaggcggttggaagacggcttccctaaccaggccctgcgggagattaaggctctgcaggagatggaggacaatcagtatgtggtacaactgaaggctgtgttcccacacggtggaggctttgtgctggcctttgagttcatgctgtcggatctggccgaggtggtgcgccatgcccagaggccactagcccaggcacaggtcaagagctacctgcagatgctgctcaagggtgtcgccttctgccatgccaacaacattgtacatcgggacctgaaacctgccaacctgctcatcagcgcctcaggccagctcaagatagcggactttggcctggctcgagtcttttccccagacggcagccgcctctacacacaccaggtggccaccaggtggtaccgagcccccgagctcctgtatggtgcccgccagtatgaccagggcgtcgatctgtggtctgtgggctgcatcatgggggagctgttgaatgggtccccccttttcccgggcaagaacgatattgaacagctttgctatgtgcttcgcatcttgggcaccccaaaccctcaagtctggccggccggtttgtaggggcccttggtgaggtgggtgtggggcaggtttactccactcccaacagcaagtaaccactccctcccctgaaccttctctctcctggccccaaccccccttgatggacagggaccactgtcctggcccaactcagggcttcctccttcctgctgtcatttgggttggggtagatcctgtcctttgtcccttttcaccccagtacacacatgtgcagtgtctcagcaagctgtgcacagagtcgtcatctgagagggcaaggggatggatgaaggaatacaggggtgggtgagnnaatgaatgatgggtcagggagacacatggatgggagagcaccccccatgtgagtgtgtgttaggggctgagagttgacagcagagagcatggcaagggtcgggaactactctcattgtaccctgttccttctccctggcccaggagctcactgagctgccggactacaacaagatctcctttaaggagcaggtgcccatgcccctggaggaggtgctgcctgacgtctctccccaggcattggatctgctgggtcaattccttctctaccctcctcaccagcgcatcgcagcttccaaggctctcctccatcagtacttcttcacagctcccctgcctgcccatccatctgagctgccgattcctcagcgtctagggggacctgcccccaaggcccatccagggcccccccacatccatgacttccacgtggaccggcctcttgaggagtcgctgttgaacccagagctgattcggcccttcatcctggaggggtgagaagttggccctggtcccgtctgcctgctcctcaggaccactcagtccacctgttcctctgccacctgcctggcttcaccctccaaggcctccccatggccacagtgggcccacaccacaccctgccccttagcccttgcgagggttggtctcgaggcagaggtcatgttcccagccaagagtatgagaacatccagtcgagcagaggagattcatggcctgtgctcggtgagccttaccttctgtgtgctactgacgtacccatcaggacagtgagctctgctgccagtcaaggcctgcatatgcagaatgacgatgcctgccttggtgctgcttccccgagtgctgcctcctggtcaaggagaagtgcagagagtaaggtgtccttatgttggaaactcaagtggaaggaagatttggtttggttttattctcagagccattaaacactagttcagtatgtgagatatagattctaaaaacctcaggtggctctgccttatgtctgttcctccttcatttctctcaagggaaatggctaaggtggcattgtctcatggctctcgtttttggggtcatggggagggtagcaccaggcatagccacttttgccctgagggactcctgtgtgcttcacatcactgagcactcatttagaagtgagggagacagaagtctaggcccagggatggctccagttggggatccagcaggagaccctctgcacatgaggctggtttaccaacatctactccctcaggatgagcgtgagccagaagcagctgtgtatttaaggaaacaagcgttcctggaattaatttataaatttaataaatcccaatataatcccagctagtgctttttccttattataatttgataaggtgattataaaagatacatggaaggaagtggaaccagatgcagaagaggaaatgatggaaggacttatggtatcagataccaatatttaaaagtttgtataataataaagagtatgattgtggttcaaggataaaaacagactagagaaacttattcttagccatcctttatttttattttatttattttttgatggagtcttgctctgttgcccaggctggag

SEQ ID NO: 257789 - DNA, 2274 bp, Homo sapiens
tgcctgctgtcatcgttccgtgggccctgctgcgggcacgctctcggcgcatgcgttttttatgcgggattaagcttgctgctgcgtgacagcggagggctaggaaaaggcgcagtggggcccggagctgtcacccctgactcgacgcagcttccgttctcctggtgacgtggcctacaggaaccgccccagtggtcagctgccgcgctgttgctaggcaacagcgtgcgagctcagatcagcgtggggtggaggagaagtggagtttggaagttcaggggcacaggggcacaggcccacgactgcagcgggatggaccagtactgcatcctgggccgcatcggggagggcgcccacggcatcgtcttcaaggccaagcacgtggagactggcgagatagttgccctcaagaaggtggccctaaggcggttggaagacggcttccctaaccaggccctgcgggagattaaggctctgcaggagatggaggacaatcagtatgtggtacaactgaaggctgtgttcccacacggtggaggctttgtgctggcctttgagttcatgctgtcggatctggccgaggtggtgcgccatgcccagaggccactagcccaggcacaggtcaagagctacctgcagatgctgctcaagggtgtcgccttctgccatgccaacaacattgtacatcgggacctgaaacctgccaacctgctcatcagcgcctcaggccagctcaagatagcggactttggcctggctcgagtcttttccccagacggcagccgcctctacacacaccaggtggccaccaggagctcactgagctgccggactacaacaagatctcctttaaggagcaggtgcccatgcccctggaggaggtgctgcctgacgtctctccccaggcattggatctgctgggtcaattccttctctaccctcctcaccagcgcatcgcagcttccaaggctctcctccatcagtacttcttcacagctcccctgcctgcccatccatctgagctgccgattcctcagcgtctagggggacctgcccccaaggcccatccagggcccccccacatccatgacttccacgtggaccggcctcttgaggagtcgctgttgaacccagagctgattcggcccttcatcctggaggggtgagaagttggccctggtcccgtctgcctgctcctcaggaccactcagtccacctgttcctctgccacctgcctggcttcaccctccaaggcctccccatggccacagtgggcccacaccacaccctgccccttagcccttgcgagggttggtctcgaggcagaggtcatgttcccagccaagagtatgagaacatccagtcgagcagaggagattcatggcctgtgctcggtgagccttaccttctgtgtgctactgacgtacccatcaggacagtgagctctgctgccagtcaaggcctgcatatgcagaatgacgatgcctgccttggtgctgcttccccgagtgctgcctcctggtcaaggagaagtgcagagagtaaggtgtccttatgttggaaactcaagtggaaggaagatttggtttggttttattctcagagccattaaacactagttcagtatgtgagatatagattctaaaaacctcaggtggctctgccttatgtctgttcctccttcatttctctcaagggaaatggctaaggtggcattgtctcatggctctcgtttttggggtcatggggagggtagcaccaggcatagccacttttgccctgagggactcctgtgtgcttcacatcactgagcactcatttagaagtgagggagacagaagtctaggcccagggatggctccagttggggatccagcaggagaccctctgcacatgaggctggtttaccaacatctactccctcaggatgagcgtgagccagaagcagctgtgtatttaaggaaacaagcgttcctggaattaatttataaatttaataaatcccaatataatcccagctagtgctttttccttattataatttgataaggtgattataaaagatacatggaaggaagtggaaccagatgcagaagaggaaatgatggaaggacttatggtatcagataccaatatttaaaagtttgtataataataaagagtatgattgtggttcaaggataaaaacagactagagaaacttattcttagccatcctttatttttattttatttattttttgatggagtcttgctctgttgcccaggctggag

SEQ ID NO: 257790 - DNA, 2437 bp, Homo sapiens
tgcctgctgtcatcgttccgtgggccctgctgcgggcacgctctcggcgcatgcgttttttatgcgggattaagcttgctgctgcgtgacagcggagggctaggaaaaggcgcagtggggcccggagctgtcacccctgactcgacgcagcttccgttctcctggtgacgtggcctacaggaaccgccccagtggtcagctgccgcgctgttgctaggcaacagcgtgcgagctcagatcagcgtggggtggaggagaagtggagtttggaagttcaggggcacaggggcacaggcccacgactgcagcgggatggaccagtactgcatcctgggccgcatcggggagggcgcccacggcatcgtcttcaaggccaagcacgtggagccgagggtgggctggcagtgtctgccttctatcctgcagactggcgagatagttgccctcaagaaggtggccctaaggcggttggaagacggcttccctaaccaggccctgcgggagattaaggctctgcaggagatggaggacaatcagtatgtggtacaactgaaggctgtgttcccacacggtggaggctttgtgctggcctttgagttcatgctgtcggatctggccgaggtggtgcgccatgcccagaggccactagcccaggcacaggtcaagagctacctgcagatgctgctcaagggtgtcgccttctgccatgccaacaacattgtacatcgggacctgaaacctgccaacctgctcatcagcgcctcaggccagctcaagatagcggactttggcctggctcgagtcttttccccagacggcagccgcctctacacacaccaggtggccaccaggtctgtgggctgcatcatgggggagctgttgaatgggtccccccttttcccgggcaagaacgatattgaacagctttgctatgtgcttcgcatcttgggcaccccaaaccctcaagtctggccggagctcactgagctgccggactacaacaagatctcctttaaggagcaggtgcccatgcccctggaggaggtgctgcctgacgtctctccccaggcattggatctgctgggtcaattccttctctaccctcctcaccagcgcatcgcagcttccaaggctctcctccatcagtacttcttcacagctcccctgcctgcccatccatctgagctgccgattcctcagcgtctagggggacctgcccccaaggcccatccagggcccccccacatccatgacttccacgtggaccggcctcttgaggagtcgctgttgaacccagagctgattcggcccttcatcctggaggggtgagaagttggccctggtcccgtctgcctgctcctcaggaccactcagtccacctgttcctctgccacctgcctggcttcaccctccaaggcctccccatggccacagtgggcccacaccacaccctgccccttagcccttgcgagggttggtctcgaggcagaggtcatgttcccagccaagagtatgagaacatccagtcgagcagaggagattcatggcctgtgctcggtgagccttaccttctgtgtgctactgacgtacccatcaggacagtgagctctgctgccagtcaaggcctgcatatgcagaatgacgatgcctgccttggtgctgcttccccgagtgctgcctcctggtcaaggagaagtgcagagagtaaggtgtccttatgttggaaactcaagtggaaggaagatttggtttggttttattctcagagccattaaacactagttcagtatgtgagatatagattctaaaaacctcaggtggctctgccttatgtctgttcctccttcatttctctcaagggaaatggctaaggtggcattgtctcatggctctcgtttttggggtcatggggagggtagcaccaggcatagccacttttgccctgagggactcctgtgtgcttcacatcactgagcactcatttagaagtgagggagacagaagtctaggcccagggatggctccagttggggatccagcaggagaccctctgcacatgaggctggtttaccaacatctactccctcaggatgagcgtgagccagaagcagctgtgtatttaaggaaacaagcgttcctggaattaatttataaatttaataaatcccaatataatcccagctagtgctttttccttattataatttgataaggtgattataaaagatacatggaaggaagtggaaccagatgcagaagaggaaatgatggaaggacttatggtatcagataccaatatttaaaagtttgtataataataaagagtatgattgtggttcaaggataaaaacagactagagaaacttattcttagccatcctttatttttattttatttattttttgatggagtcttgctctgttgcccaggctggag

SEQ ID NO: 257791 - DNA, 2344 bp, Homo sapiens
tgcctgctgtcatcgttccgtgggccctgctgcgggcacgctctcggcgcatgcgttttttatgcgggattaagcttgctgctgcgtgacagcggagggctaggaaaaggcgcagtggggcccggagctgtcacccctgactcgacgcagcttccgttctcctggtgacgtggcctacaggaaccgccccagtggtcagctgccgcgctgttgctaggcaacagcgtgcgagctcagatcagcgtggggtggaggagaagtggagtttggaagttcaggggcacaggggcacaggcccacgactgcagcgggatggaccagtactgcatcctgggccgcatcggggagggcgcccacggcatcgtcttcaaggccaagcacgtggagactggcgagatagttgccctcaagaaggtggccctaaggcggttggaagacggcttccctaaccaggccctgcgggagattaaggctctgcaggagatggaggacaatcagtatgtggtacaactgaaggctgtgttcccacacggtggaggctttgtgctggcctttgagttcatgctgtcggatctggccgaggtggtgcgccatgcccagaggccactagcccaggcacaggtcaagagctacctgcagatgctgctcaagggtgtcgccttctgccatgccaacaacattgtacatcgggacctgaaacctgccaacctgctcatcagcgcctcaggccagctcaagatagcggactttggcctggctcgagtcttttccccagacggcagccgcctctacacacaccaggtggccaccaggtctgtgggctgcatcatgggggagctgttgaatgggtccccccttttcccgggcaagaacgatattgaacagctttgctatgtgcttcgcatcttgggcaccccaaaccctcaagtctggccggagctcactgagctgccggactacaacaagatctcctttaaggagcaggtgcccatgcccctggaggaggtgctgcctgacgtctctccccaggcattggatctgctgggtcaattccttctctaccctcctcaccagcgcatcgcagcttccaaggctctcctccatcagtacttcttcacagctcccctgcctgcccatccatctgagctgccgattcctcagcgtctagggggacctgcccccaaggcccatccagggcccccccacatccatgacttccacgtggaccggcctcttgaggagtcgctgttgaacccagagctgattcggcccttcatcctggaggggtgagaagttggccctggtcccgtctgcctgctcctcaggaccactcagtccacctgttcctctgccacctgcctggcttcaccctccaaggcctccccatggccacagtgggcccacaccacaccctgccccttagcccttgcgagggttggtctcgaggcagaggtcatgttcccagccaagagtatgagaacatccagtcgagcagaggagattcatggcctgtgctcggtgagccttaccttctgtgtgctactgacgtacccatcaggacagtgagctctgctgccagtcaaggcctgcatatgcagaatgacgatgcctgccttggtgctgcttccccgagtgctgcctcctggtcaaggagaagtgcagagagtaaggtgtccttatgttggaaactcaagtggaaggaagatttggtttggttttattctcagagccattaaacactagttcagtatgtgagatatagattctaaaatggctaaggtggcattgtctcatggctctcgtttttggggtcatggggagggtagcaccaggcatagccacttttgccctgagggactcctgtgtgcttcacatcactgagcactcatttagaagtgagggagacagaagtctaggcccagggatggctccagttggggatccagcaggagaccctctgcacatgaggctggtttaccaacatctactccctcaggatgagcgtgagccagaagcagctgtgtatttaaggaaacaagcgttcctggaattaatttataaatttaataaatcccaatataatcccagctagtgctttttccttattataatttgataaggtgattataaaagatacatggaaggaagtggaaccagatgcagaagaggaaatgatggaaggacttatggtatcagataccaatatttaaaagtttgtataataataaagagtatgattgtggttcaaggataaaaacagactagagaaacttattcttagccatcctttatttttattttatttattttttgatggagtcttgctctgttgcccaggctggag

SEQ ID NO: 257792 - DNA, 447 bp, Homo sapiens
ctgggaaagtgtctgtaggttccactctctctaacatgggaagtgatgccagagggaaaggaagaggcaaggcagatgccgctgaggttggtgctgtagtggacatagctcaggcaggatgtgaatggggctagggctctgggagtaaaacagctctgggaagatcagaaacatgtgttaacatgaacagttatacttctttcctttatttctgttttgattttctgtggaacttaaaaagcctttcagaaggtattggaaatgtatttatgcttgggccatagctttcttgcttttgttttttccctagccttattgagatataatttgtatacaaaaaccttcacataattaatgtatacaatttgatgagtttggacatatgtatacacttgtattgtattaccaccaccacagtcgagataataaacatatctatcacctcca

SEQ ID NO: 257793 - DNA, 3161 bp, Homo sapiens
  misc_feature (603)..(603): n is a, c, g, or t
  misc_feature (2245)..(2245): n is a, c, g, or t
atcaagaccagcctgggcaagtttgagagaccctgtctgtgttagttcattctcatggtgctatgaagaaatacccgagactgagtaatttgtaaagaaaagaggtttaattgatgcacagttccacatggctgagaaggcctgaggaaacttataatcatggtggaaggcacctcttcacagggtggcaggagagagaatgagtggcaagcaaagggggaagccctttataaaaccatcacatctcatgaggactcacttactatcatgagaacagcagggggaaactgcccctgtgattcagttatctccacctggtcccacccttgatacctgaggattattacaattcaaggtaagatttgggtggggatacagaaccaaaccatatcactgttatctacaaaagattttttaaaaagtagccaagtgtggtggtatgtgcctatggtcccagctactctggaagctgaggtgggaagaacttttgagctcaggaggtcgaggctgcagtgagccatgattacaccactgcactctagcctgggtgacagagcgagagaccctgtcccaaaaaaacaaaaaacaaaaaaaaaccccaanctaaaaaatttatatacaaaaacctcagcatatttgtcaaataactgtgtcagtgagttcttaagcattttgttttcatataatataaaatattttatttcctgctgtctttctatgtatacaaataaccaagttgctagtttctttgttgtatgagcttttatgtaatttatggcatttccatttgtatgtagctgtaatgaactttgtctctgctttgttccttaccatggaaatgggttttttccccctcagatggattcagacaatagttctgggtggtaagtctccatgtaaggagttagcccttctatttacaaaggctgtccttaatttcataggtaatgtttctggaagttcagccattgacagaatgttataagagaaggttcttatcccacagagctttattatacattctctaatttcattttgccttatcattaatatatttttagtgtgttatacatgttacttatattgacttttcctttaacatttaaatagtgttgatgcaggatttttcttggcccctttgctgggctcgcaggagcaggtgccccatttactcagcctgccaggccgcatctggcttgcactccagtgtggatcccacagctgccacaactgcacactcagcccccacattcagtgggtcccgagttcttgtcccatgtccaagaagaatgaggtctcactgacaattgaagggtgatgaggacagagaattttattgagtgatgaagcagctctcagtctagagaggggacaggaaggtggtctctcactcgaagttgggtcatctccctcagtgtggctggatctggggtttttatgggcacaggatcgggggggcccatgggccacaggtagtattggaaaaggcaacatttgattggttaaaaagcattattcagaaagaaccagttgggaaagagcaggcaaacagaaatagaagttctctctctgggtcatgggtttcaggctgtttttgacttgaaggtggggtttcaccctgtctgactaggatttttctgcttcctgcctctatcagtgttgattgacttaatatttagtgagcttccatttgagcctaaagatgttatattaaatctaatgatttttatttgcatctagattattgcttatcatgtgtcagtacttctttcctgagtccatacttctttcattttttttctttttttgagatgaggccccactctgtaacccaggctggagagcagtggtgcgatcacggttcactgcaacccctcgagcctgggcacctgctcgcctcagcctctggagtagctggtactataggcacacaccaccacgcctagctaatatttctattttttgtagagatggggtttcaccatgttgcccaggctggtctcgaactcttggactcaagcaatccacttgccttggcctcccaaagtgctgggatttacaggcatgagctactgcacctggcctctattcatttttatatacagtgttgtgagtactaattttcaaatatttgttaacctgaaacccttcaaaagggttgaaaagttatctaaaagtacagttatctactacagatataggtggagaagcttatggtggaagaatgctagcagctacagccttntgaacatctcttcattttatcatctatcgtgtgaaagagatcttctatcgtttgaaagggatctttaatctttcctgtgtttgggtatcttcgaagggctaggccatacatagaacagggtaggagaaaggaggtaagtaaggtgaaaggagaaacagatttgtttgacacaagtgttgtagggactgatactttgttaccctcagttgtgtaacatgttgcttgattctgttgaagaccctgtattccgggtgttcattgattttttttgggatacttccttgacgatctgtatgaagcaccctaagagaacatgttagaacatgtagtttctctaaaaattccactttgaatttttggaagactgctatgtattagtcaaaaaatattttagataaatttctttcccctgccttcttattctttgactaattagtcaaatgtatacaaagggtgtcttcctgtatttgaaccaaccaaaaacacacatctgaactgtcagctaaggggtaggcttggtgttatgatcaattagaggagtcttgcttctagaacaatacccactagaacaataaaaaatccaagtctttttttagaactgttgatatgatttaaaagataagattaatgggccgggcgcagtggctcacgcctgtaatcccagcactttgggaggccgaggtgggtggatcatgatgtcaggagttcgagaccagcctgatcaatatgatgaaaccacatctctagtaagaatacaaaaattagccaggtgtggtggtgcgtgcctgtaatcccagctactcaggaggctgaggcaggagaattgcttggagccaggagacggaggttgcagtgagctgagattacaccattgcactccaacctgggcaacagagcgagagcaagactccatctc

SEQ ID NO: 257794 - DNA, 435 bp, Homo sapiens
gtaagtacaacattgatagagggcccctgtccctcaaagactctaagtctatgctatgtagaaaatgcagtgtttcttatctagtaaggtgatcctctcttagaaaaagaaatgatcttgcacaggctctcaggcttttgtaatcaagactccttccagccacaacacctctaattacagggtttttggcatcctgattgtcccccaatgtactatgtgtaggggcactgtgggggtgccctataatttgtcaagcttattatcttgctctggcacacagaatacactgaatcaatttttaaggtctctttcaaaatgtgtctacgtcatctaaaacccataaatattaaaatcatatgcactagaaacagttaagatgtttaaattttccagaacacagagacttaggaaacaggcaagacacaacatgaaagc

SEQ ID NO: 257795 - DNA, 521 bp, Homo sapiens
tcttgaaagatatgttcaagttgttcttcaaaatgttattgatttcgattcctccaaacaatgtataagagtaccaatgtctacatgctcttggtacaatatatgactcacaacatgtatttttatttgatatacaaagagcttttatcaatcaataataagagaaaacctgctttggtgacatagtgagaccccatccatacaaaaaaaaaaaaaaaaaaaaaagccaggtgtggtgatgcatgcctgtagtttcagctacttgacaggctgaggtgggaggatactcaagcccaggagtttgaggttggaaggacagatgtcccagtagaaagatagttcttcacaaggacctgtgcaggcagttcagaaggcaaataatacaaatgacctataaatatttggaacaaaaaaagttaactgaaaaaaagcaaaacaaacaaacaaaaaacacctgaatagtgatgaaagaaatgtgaaattgaaactgtgaaataccatttttttccatcgaattagtt

SEQ ID NO: 257796 - DNA, 283 bp, Homo sapiens
cattgtagtaaaacttgttactgggcttgaatgaaccaagtgagctattgtgtgaacatggcagagagatgccatgggagaaaaaaattttgagaaagttatgaatctctaagcaagactttctggtcttgctactaacttttcttttttttttttcttcttatactttaagttctagggtgcagtacaccaacatggcatatgtatacatatgtaactaacctgcacattgtgcacatgtaccctaaaacttaaagtataattaaaaaaaaaagaaatggga

SEQ ID NO: 257797 - DNA, 383 bp, Homo sapiens
accagggctgggaagattacaggaaagcaggcaggagaaagagaaagatggaggggaaaaaggaggacccaggttccccggggcagcagtcctgccttcggccacatggacagattttcatcgccatcgagacgcagggcagattgctcggctaatgagtacatgtcactgcgctgctgctgctgctgacttgagtagtgagtgatgtcatgctggctgcccagccctgctataatgcaactgtcagggccccgtggggaaaacttggggagaaatacgagaagtctaaaaagcagcaaaaggcccagtcaagtgaagggaaatggaattacagtcatgctgaaagcaggcacactggagaattaaaacactttgttttggaa

SEQ ID NO: 257798 - DNA, 410 bp, Homo sapiens
gatttctctggcttcaaacagaaacaggcataagggaggatgcaagaagactgaggaaagattatggtattaacccaggagagagtcattctcaccagggctagattgagtgcagtagagattggaaaaaagagatatttggtaaataaaattgaaaggacttcatgttagatttggaaaggaagataatacacaataatatagtataaatatatggtggtcccattctctgagctaggaaacactgatttgggagaaaataacatgaattaaatttttgatttgttgaatatgaagtaattttgataatttaagagaaatgtcaagtagacaattggtttcagatttcagagaggtggctatcatgaacataagaagagaagatagtctaagacagaaatttgaggaac

SEQ ID NO: 257799 - DNA, 472 bp, Homo sapiens
cttttcagaagataggatgaaaggatatatatgggtaggagggttttataatgagataaatccatagatcttagtatatagtataagaataaatcccagaactgaaagatgtgagattgtaattgatcttagaaggaaatcaatagataatttctggaacataaaatgatatggtagtataaagcatgttattaggaaataaggatattgatcctagaataaatggctaaagaagttgaaaatggtagcctttagaaattggggatctgtagtggataggagagggaactgctgacttttcttgtaagcctcgtgaaactatttgacttttaaaacatatacattgttatttttattaaatcagaatttatattgtccttcacctcaaaaaagtaagaagaaaaaaatacatttggcaaatactgactaaagaaaagctagtgttgatatggacaaaatataattccaggac

SEQ ID NO: 257800 - DNA, 394 bp, Homo sapiens
gcactatccaaagaatgtcttgaccttggacaaacatctcatcttggaatttttcttgggctctggacacctgggaaacagcttgtaaagaccaaattctgttgtagaagtggagaacttcaaaaggagaatatgagatatcttgggattattgcctctggtttctaataaactgaattatgttgataatgcctatcccaggctctgtggtctgtagaaggaagagtggatgaggagtaaagagatactgagcttcagtcctgggttccaggcactgtagcttggtgatcaacagcccaaactccagattcacattgggtggcctcttgctcatgtgaccttagaaaatttacttaactttctgagaagcctcagtttctgaatctgtaaaatg

SEQ ID NO: 257801 - DNA, 96 bp, Homo sapiens
gatttggggacagtctagagaaagaagaaatgaggaaaggctaaactgctgtgctagctgctcacaactaaggggaatcagttcctactctggacc

SEQ ID NO: 257802 - DNA, 413 bp, Homo sapiens
gctgtggtgtattagatccactattataaaaccatgctcctgatgtagtgaggatttcttgttgtttcggcacaaattcatacccacataaccactttgtcctccttgtttgagcgtaatgacactcgacctccacaacgagcacagaactttgtttggcaatatgaacagttatggccacatccatcagcaaactttgttttgtggcagataccacaggttggcgcatcacccttctgttcttgctgttgctgtgattcttctcccatcttctttacctgctctttatacatttcaaactgctgatgcagttttttgagcacggactgctccttctcctcttctttcttctgcctatccatgacggccaggatgattttcctctcctcctccgtgaggtggctgaggtcagc

SEQ ID NO: 257803 - DNA, 417 bp, Homo sapiens
aaatgatagctatgcatgtatatgaaatggcaattagtcactttcaacatctaaatcacatcctaacttttattatggttatttgtgtccatgttttaagccctcacttagattatgtgttcttaaggtattgttaaatattaatttggaattctgcacagtgcctagaacacagaataaattctcaggtctacagaacatttcaaagcaacatctggcaaatgatcttaaacctcaacagagtgaaaaaagaaacacataatagatatgtttgcctttaaattactattgcaacttcaaaaagacacagatggtaaaaatttctgaagtttctgaagtaaaaatttttttcttctactcatttttgttctaaacatatcttaaaagattaaacagacttcagaaagtagaacttat

SEQ ID NO: 257804 - DNA, 430 bp, Homo sapiens
ttttaaaaaaatctcttaagtaaaagaaaggttaagagaacaattataaaaataaggaaaactttaatcaaataaaaacttatttggaatttacccatgaaacaacaaagtaaagcaaaaatcaaattcagtaaaactgctttctattaagagacatactatactctttgattaaaatgaaaaccagacaggaggcaacaaactacagctttgagtaatgacagaaatagaaagatatggaaagagagatagagacacagctagggctatagagaaaagaaagagtaagagaaataaagcaaaaccgccagaaacatgaggaaagctactaaaaacatggggtctacaaattcaactccaagcatctcttatttactatttaatattcaaatggcctagtactaagaaatgtgaaaagtctctatctttt

SEQ ID NO: 257805 - DNA, 741 bp, Homo sapiens
caccaagaggttggtgttaaatcattcaggagaaatctcccgccaagatccattgacctctcaccaggccccaactccagcattggggattgcatttcaacatgaggtttgggaagagacaaatatctaagctatattatctgtcaaagaccagttatctatatttatatgagtctatttctgggctcccacttcttatccattgatatatttgtctattctttcaccgataccatcctgtcttgattactattgctttactctttgagcatttaaatattatatgcttgttatagtatttataaatgtttgtaatttcctattttgatttccttctttactctaagacttactgataaatatgtttttaaaactatacacatacaaattttagaggctttcacttgttaacttcttatatgttatttgcttctgcaattttttgagattttctgtgtagcttatttaatggtcagtttttgtggacacttcacaagaaaaatgacgcatcttaaaaaattattctattagaagcctactttttaaaattatgattgatagtcctttataaattcctttttttgttattgctttccaattctacttccttactggtaatgtgtattgggtatccatctttcttgaatatttctcagaggtaaatgttgataaataatccaattgcatactctcttgccctggatagtagttgatttagggatataaatatagcccagtgct

SEQ ID NO: 257806 - DNA, 499 bp, Homo sapiens
caacccctaacccattttgtccccttagtcctgtccccatcccctcattctcaaagcaagggagtcatggccccatctgggatgtggggttggggggcacagctgtggagagctgggtggggtgggtgtgggggtccctggcacccagcccagagcaatttggtaaattagaggaaatacagcctctcttcctgtgccccctgttgaatactagccgcctggggtggttgggctgggagccaggctcctgggtcctgcctgggactgagggaggagggcactgggagtctggactcctggttcccagagaaggactggagtccgcactaggggcttccagaaggggtgagggtccagacaaggaagggttctctcctggctgtcatgctcctgtctggttgccatggtagcgcaggcctcgtccaccccacagacagccagggcgggggaaaggtccaccacccctcccctgcctcgaggccacagcccgtcccctctg

SEQ ID NO: 257807 - DNA, 357 bp, Homo sapiens
taagcattggggtcttgctctgttgcccaggatgggatgcagtggcacagtcgtaactcactgcttccttgaactcctgggctcaaacagtcctcctgcctcagccttccaaatagctaggactgcaggcactaatgaggcacttttatgaattattcattgagaggtttcagtgtgctaagttaaatcataaaagctctttcaggccttaatttcccctctgtccttccttccccttctcctcccccagtggatcacataacaaacattaagggtctgtaccagccatctttcctaaattactcttcagcaaaattgtgggaacaggattccaccacctcctaagaatgagagttg

SEQ ID NO: 257808 - DNA, 694 bp, Homo sapiens
caggcagttagggacacagcagtgaactaaataggcaacaatccttgcctttgtggcactgacattgcagagggggcaggcagacaatgaatgagcagacaggtaatagcagtggtatattagatggtggtatgtgatggagaaaaacgtagcaagaaaggggctgagggagtacaggatggctgtcagagaaggcccgtggagaagatgacatttaaagcatatgatagagccagaactgcatcgatctggggcaggagcatttcgtgcccagggtacagaaggcacacaggccctgtggggaagctgtcaggtgtattctaggagcttcagggaggctgctggtgtggctggagcccggtgaaatgggcagagtgtgctgaggatgaggtcagagaggagcaaaccctttgagccttacaggccatgcctggaacttgggcttttactgtaagtgagatggagcctctggagatgaacagagcttggacaggatctggcttaagttaaaaagatcatgccatgtggacttaggttgtatgaaagtctcttaaggtactggtgagaacatagcacttaataaatgttagctgtcgctattattaagcttattaaaacatagtggggagaggggatcccagagtggtaagtggtttcctgtaatgcatgttacacttcagctccaccagcttct

SEQ ID NO: 257809 - DNA, 483 bp, Homo sapiens
catcccttgaggctctgggatgatgtcagtcacagtattctgcctgccctcttgctgcagccataaccacgtgacccggacctggccagtcgtggccagtcatagcacaccatttccctgcctacagaggggttcaaagtcttaggttcctaactcaaggagaggtgccaggacccaactccactgccagataaagaaagcctgtctgtgtttgaagagaatgaaaccaacacacaaagaaaagtataaaaagcagagccaagatatagaaatatttctactacagcattttagtacttggatttagcagtacctttggattcaccttcagccttttgagtcagaagagatgaacagatttgcttttttaaaagttattttgagatgatttatttcataatagagtcttacacaatgtctaatagtatatcaaaccaaatgctatgcaattgcatgaaataaaaggctaactcgcattaatct

SEQ ID NO: 257810 - DNA, 335 bp, Homo sapiens
atattttttctcactgctaaatttggctaaaaaaaaaaatgggtatggggaaagttcgtcatgttaacaattgtaggctgggtgtggtgtaacgcctgtaatctcaccactttgggaggccaaggcaggaggattgcttgagatcaggagtttgaaaccagcctggggaacatgccaaaaccccatctctactaaaaatacaaaaattagctgggcatggtggtgcacgcttgtagtctcaactactcaggaaattgaggcaggaagatcgcttgagccgagatcatgccactgtattccagcctgggtgacagagtgagaccctgtctcaaaaa

SEQ ID NO: 257811 - DNA, 403 bp, Homo sapiens
ctcagatacccttttcgagaaaaattaagatactttgaaaaagattcataatcagaaatattatctagtttaacttttttgaatggagagattttataggctggcaacgggagcttctgacttttcttctgcatgagcactgatgatggagggagtgactgtgtttgagtgaattttaggtagaagaaagggagcctggtaacaacaaactgtgagactggttgtattacgttacttgttaatccttctgaaggagagataccagggcctctgccctgcatccttccatgctagaaatattcatagttggaggaagcaagaaatgcagcccttgagcacgttggatttttttttaactattgattttgaaaaaaaaattgtttttgtaattatgagtaccagg

SEQ ID NO: 257812 - DNA, 682 bp, Homo sapiens
aatttataagattcatagaaatagacaatgcaaagagttccctgaggacaggaaccacatctgtattgttcacttctgtaacccagtgctttgcccatattagatgcccagaaaataacaattgagtttatgaatgacctctgatatctctacatccttaattcagtcttatttttatccactaaaatcatgagattagtgaaattgtttaagcacgtaaggatagttttactgttaatttagattttaccaataagcaagagtagtactattgctggatttatatgggtttgatataattttataatccaaaagaaagattggaaagggatgacaagttggttaattcattcttaactgaaagatagtggatagcatagcacataaaagcactggactctggagtaaaactgcctgtatttcagtctcggctatgtgatcttggtcaagttaccttacctctttgtgtattagctttcacatgtaaaatgggaatggcagtaataacacttccttataaggtataatattgtacattttgtgaggattaaatgagttaatacaaatataacactatattattatattgatgttgttagatgttattattgaaattgctaaattatttgatagttttacccaaagttgagattagtcttgatcacttataaataatttttat

SEQ ID NO: 257813 - DNA, 399 bp, Homo sapiens
gaaaactgaggataaattcactcttttgtatctatgaaacatttataaaaattgaccaaatttcagggtataaggtacacctgaatacatttcaaaaagtagaaacaggtggggcatggtggctaatgcttgtaatcccagcactttgggaggcggaggtgagtggatcacttgaggtcgggagttcaaggccagcctggccaacatggtgaaaccctgtctctactaaaaatacaaaaattagctgggcatggtggtgtgtgcctgtattctcagctactcaggaggccgaggcacgagaatcgcttgaagctgggaagtgtggaggttgcagtgcgtgagatcgtgccactgcactccagcctgaatgaaagagtaagactctgtctcaaaaaaaaa

SEQ ID NO: 257814 - DNA, 464 bp, Homo sapiens
ccacatactacatgattccatttatgtgaaatgttcagaagaggcaaacctacagagacagattagcggttgccaaggctgagaggtttgggtaaaatggggagtaactgctaataggtaagaaattcctcatggagtgatgaaaatcttctaaaactgactgtggtgacagtggtaatactctatgaacatagtaaaagccactgaactgtacactttaaatgggtgaagcgtatggtacatgaattatatttcaattcaactttttttaaaaaccctcctttgagttaattctgctgggcaattaggtttggttaccactacacagttgtgtctcagcacacttacagaggcaccctcgggatgcccagatcaaagacataaaaaaaaaatacaggcaattttcatctaactgtgacaccatgcaaaggcacttatgagagccctgcaagggtagaaggaaa

SEQ ID NO: 257815 - DNA, 362 bp, Homo sapiens
caatttagaaaatgaagctaaaagaggtcatctaagggaaatcgtttcctaacattttgatcccgcatgcctatcagcagagaatgttttgagcatgtactcctaatgtgtgtacatttatttaaacattctatgatggaaaattcttaatttgtatactatttactgttctactttttaaaactttttaaaatcaattttattgaggtatgatttacatacaataaaatgtacccatttaaagtgtatggaggccgggcgccatggctcatgctgtaatcctagcactttgggaggccaaggcaggcggctcacttgaggtcaggaatttcaccagagatggtggaaccccatctctacta

SEQ ID NO: 257816 - DNA, 485 bp, Homo sapiens
agcaggtagtacatcccaggctgtgctagaggtagatttgttttttcacgtttgatctgtggctggtggccacctttgttgatttgggcttacgagtttcatagtagccagtcttagaaaattgggggagtaaaattttgaagtaaaaaaaaaaaaaaaatgacaagggaaccaaatgctccttctccccttagtacattttcattacttaatgaagttttatctcctatgtaagaatatcaaaattgtagtttgggtctccagtagagatgtcttttgattaacttataaacaactggccacccagaagtttcctttgcatagtcaaccaaagctatggctttgttctttggagcttatatactgcatgactccattgatacaaataagacagcaccttggtttcccagggatgttttcattcagaggtcctgtctcccaggaaagcagtagaaccagtgacagcattcaacagccacactgca

SEQ ID NO: 257817 - DNA, 255 bp, Homo sapiens
acttcatagaaggaatggaaattctacctgtttcctaaagaactacagaggtgtacaccaaacggagggcaaatgctgttaccactcatcgtgcaagacttttgaggcaatttggacatagacaagtgatgggaaaattgaatcattatatggctcatgacagtgttgaaaactcaaacatccaaggacctgtacctttgctaagtgccatgcatatgttgctgataaagatgcaataaatactcttttgttaaa

SEQ ID NO: 257818 - DNA, 118 bp, Homo sapiens
tcaccctatacatgccatgaagcctctcccagaatgtcctcctctttatgcctcgctcagttcatgagggtacagggttaaggacagtttttagtcctccttttgcagtaaccctgag

SEQ ID NO: 257819 - DNA, 655 bp, Homo sapiens
gtcagccattctggaaaaaaacaacacccaccagtgtttgttttctcaaaatcctaggatatatttctcacttctaagagaagtaaatggtgtctgtttatagtgacctagctttatgacagctgcacatccccatgcatttctcctttttgagaacagtcctaattaaaatatactattctgttgttcctgtaagtacatttgaatttgtgaaaatatgcaaaatagatcaccatattcagatggctcacaagttcttagtgctttcatctttcttgaaaatatgtttgttgtttattatgggatgtgtgttatggtgccaagcaggtggctgaatttcaaggggaacttgtgttgaatgctactgtatagaagacatacatgcagtaaggaagtttatacaaacctttgtaaagttgttcctttgggcttttatggtgctatacagcatgctaagtctccaaactgagctgatttgtattcctgacgtcatcctggaaccacgtggaggccaagcctagtaaaaggaaaatgagtactaggtggtcactagttccttctctgaactctgatggtacaaagtgcctgaaccatgtggcagcccgtgtttagtgtctataaccagaaatcatggtgattgatgcatgcaaacctt

SEQ ID NO: 257820 - DNA, 444 bp, Homo sapiens
tgtagaacagtgattggtacatagcaagtgcccaaatattaagtaaataaatgtttgaagacaaaattccaatcctgaataaccctctgtaatagctggcaggggtagtaagcgttataggcatttctttggggtgagtgatgacagataagggtgataattgaactagaccttaaaagataacagggatttttatagtagaagaaaaacattatcatcagtaaaattttagtactagctaattattaaatttttttttgtaaaatttattcatttatttaatttttttgtggagatgagggtctcactctgttgtccaggctggccttgaactactggcctcaagcagtcctcctgcctcagcctcccaaagtgttgagaatcactgcatttggccttaacatgttttagtcttttttaaaaaacatcaaaacctgtcttttt

SEQ ID NO: 257821 - DNA, 309 bp, Homo sapiens
gattggcagtaaagtcctagtgatggacaacgcggcagtggggaaagtgacagccgtggctagatcatcagatgtgtctgtagaatccggtgtgtccctgtgaacatccgccagcagtaaccattcacattatttcaaaaacctgcattattaggttgaaaatgggtaaatcggggaaaaagccagcacttatccagctattcctctgtgaactaacccatgcataacaaacagatttttttaatggaagaattccagctaggacccgagcagctgggatcttcacactgaccgtccatgctgtgaacg

SEQ ID NO: 257822 - DNA, 444 bp, Homo sapiens
aaagaccatccaaccctgccaaaggcaaaaggattaaggataaatgaaagcaagataatgtagaagaactacttagctgctgggtttttggagatgagtgatttttttttgtagggagaaattatgaaacacattgaaatggacaaaaaattactgaatgtcttcaatgaaaaaacagccatagtttggcacaccgtcccgggcattctgttgctagaggggctgtccgcttttctttgtggtgctctgcacaactcggtaagacccctcgtattgttatcttacccttccttgggaaaagccattttgcatcgatttgtaaattcattccccagtcctgattcaacaatatagatgggtgctttaaattctgcttagagctggttctaacagcttactggtccccgggttaatgagtaaataaattttttacacgtgttcatt

SEQ ID NO: 257823 - DNA, 691 bp, Homo sapiens
taagacctgccagaatgctagtcctgagagtgtcagacaaggaagaaatccctgggcctcttcccctcacctggcccttggatttcatggagcagccacttagcattgaattgcactaccctgagctaaacgtgtctgtgctttctaagataagagcttgatccctttcttctgtcttaagacagcacctcctgaaaagaatcgaagttgtcacaactctcaattattttttaaatactgcatagattgagttttggtttattactaacccttcccaaaattgcatcggatctaaaactactagatctcatcccattcccatgtaaattaccacagaccgcagtaccggggctggagcggagtgaagctgtctgctgtaagaggagtggccatgtgagggcatggagtcattagtctcacaaacacactttggactgaagaggatcatttctttttgttcgtgaggtcactgtccgggcctctcatatcacgaccagacggcgggtctccatcttctttgactcctgtggccctcgctgctttacacaatctgttctataaggttcaggtgttttcaagttggaaagatcataaatactcaaaattgttttcaagttagcaaattcttttaacagtcttttatgcaaaaattgaattaataaaataatattttgtaaagaaaaaaaaaaga

SEQ ID NO: 257824 - DNA, 225 bp, Homo sapiens
gtctcagtccaggtgacaggacagttcccccaccaaggtacctcctgcagccaggttgtagggcctcctttcagggagtcagagatgagggggtagaggctctgactaccatggcctcaggcagccagcttgcttggaaagctcctgggctgaacggatgtgtgtgcccaccccgcttagtgggccgaagaggatcagcagccagacaggggccctgaaggaggg

SEQ ID NO: 257825 - DNA, 182 bp, Homo sapiens
tctaagaggattttgggatccatattaaatgtaacatgtcaaaagctgttgcccggtgcctggctgatggtatgtattcaaaacaccttctcttccttaaagaaacgcttatacactgttggtgtgagtgtaaattagttcaaccactatggaagactgtggcgattcctcaaagacctaaa

SEQ ID NO: 257826 - DNA, 813 bp, Homo sapiens
ctaactacctgcctccctaagtcccaattttctcaactattaaatggtaaccaccacgctccttgcagggtttgcctggtaagcagcaaatacacaagaaaagtcaagccaataaatagttgtgtggttaccactatcttccagttggagcaaggtccagaattaggttcaaacgtcatacagctaaggaagaaagcaagctaggcttcaagcccagttttgtctgactccaaaagtatgtccttcaccactcatctaccctatttactagacaacactaaaaactcgccatctcattttttaacctctgccttccacctccagtctggactggctcagagtccatgttctaaaatgtactttgatgtgaccaaacagaattcagttataagggggcagggaggaatgggtagagaattgtgtgccccttgaaattcacctgactgaaacatggattgaggagaagactttagatagtgtgaccctgagcaagtcccttcacttcttcaaacttctatttcctctactgtaaaatggggaaatgatctcagactgcctgtaacatgaaacagttgggaggtaacaaagatgaagtactgtacttaacaagctcaccattatagctgggacccagaatgcccagtgaccaatgaggccatctgccaccaagccaattatcatctgcccaatatatattcccatgtgtggcatacagaatattgctggaaggaaacacaagaaaatgggaacagaaaggtaatcaggtactggggtcagcagtgagaagtatacttctttagctatatacccttt

SEQ ID NO: 257827 - DNA, 670 bp, Homo sapiens
attcattaaactgtactttagaatacacaatacacttttgagactttcaattttgccttgtaaagcagcattaagatttttctcctgtaatttgttcagtaaattttattaggtcttcctccgaccctcactagggagaagatgaagaacactcagtgagtaaagatacagagcagggaaggtgtcattgacaatagaagacaagttgatcattcagatagcaaaggactgggagcatgggttgtgattcatggagcctaaagcatgacagacagtatattttaagggagatagtgaaatttatggttcttgcacatgggatagatagttgccacctatggagcaccattggtattaggtgagagtgcccattttaaagtccagaatgccaagtcctgtgtaactagtcaaacgagagggttccctgatcccccttgcaagacgtgtgacaggggtgtggcttctctggccactgctgttgctcccccttatgggaaggggagcatgcagacagtcaggggcaggaaccgggatgagggcttttggactctggccccagggtagcatctaggggtgggtgcctgcagctcccgaagccccagcgggtatgctgcatactcttttagctctgcaatctgcagatggcttaagtgttaaccagctcagtgcc

SEQ ID NO: 257828 - DNA, 528 bp, Homo sapiens
ttttttcagtgacagggtcttgctctgttgcccagactggagtgcactggcatgatcatagctcgctgcagcctcaaattcctgggctcaagtgattctcccacttcaccctcccaaagtgctgggattaccggcatgagccaccgtgcctggccagattttgttttttgattaccttttgacatatactaactagattttcatctacagcatacggttgagaagataagttcaaagtctggaccaaaatgacaaagaggaaacaaagaggaaagtcttgaccaatagaagagattgctcctaatctggctttgtctgatatttgtggaaccctaggacagcaatctcactgaggacgtctcttgaaatttaacaaacaacaacaaaaaaaggcagaaagcaaaaaagagagagagaaatactcaaaatctcttccttatcttactaggttgttaagaaaattaaaggtggcgatacagctaaaaacatcttgcaaactgtacttgtcaagtgcttgtccaagttaca

SEQ ID NO: 257829 - DNA, 484 bp, Homo sapiens
aggcccggtactgtggcagcgctatttcacgggctgtgtttctgtggttgctcaggacgatgaggctgtaaggtgggcctccccggctccaggctccagttttgtcttcatgtgaagagcctcagggcacatactgaccaacatgaccaaagtgagcatcaagccttacactcagaaagtatatttatttgaataaaatatcactgttagacactttgggaggctgaggcaggaggatcttttgagtctggaagttcgagaccagtctgggcaacgtagtgagacctcatctctattaaaaatatggatagataaatagatagataattactgttatatttttgtatattggagttctatgtaagattctatttacaaaagcattcactgataaaattgaaagtttgcaggcattaatttttatatcactatacagaaatatggattttggaaaaatggatagctcttaactgagtaaagtggg

SEQ ID NO: 257830 - DNA, 116 bp, Homo sapiens
ccctagggatatatcagattaaggtctatagaaaacaactccaattgaagggttttaaaattatgtcattggtagggggtaaccctttgatagaaagcacaggtgcctgattaaaa

SEQ ID NO: 257831 - DNA, 443 bp, Homo sapiens
agtcatggccatcatgagcatgtcacagtgcagcagagattttgtttatggccagttttgcggccagttgatggccagatttgggggcctcttcccaacagcccacagccagacctagactccattcagattggttttgatcagcatgtagaaaatgggggagttgagtgtggtatacaaaatgggggtgttggccaggcgtggtggctcatgcctgtaatcccagcactttgggagtctgaggcgggtcgatcacgaggtcaggagatagagaccatcctggctaacacagtgaaaccccatctccactaaaaaatacaaaaaattaggcaggcatggtggcgggtgcctgtagttgcagctactcgggaggctgaggcaggagaatggtgtgaacccacggggcggagcttgcagtgagccaagatcacaccactacactc

SEQ ID NO: 257832 - DNA, 368 bp, Homo sapiens
accaagagcttctgagggacagggcagttccctaattctttacactccctgaaggcacctgttcaaccagggcagatggggtccagaagattcccatcagtaactgagccttccctcgacaaagaggaggtggggtaaagctggttttgtggggaggcaggctctagaggatgaggatcagaacagagcaggagggtgggggtggagggaaaaagaaacagaaaaacgtgcaagtcataaagcagcagggagccctgcaagtcattagataattaatcaaagtgaaaaatcagaaagccagccttggctgccattatggggttgcagctgtttttggagtttgattgaataaaatctttatgaagttc

SEQ ID NO: 257833 - DNA, 705 bp, Homo sapiens
ggtggtaatacctggtgcagagcttgagtctggccagcgggtcaggctcttgctagatcagcaccggaggtggaagactggtacattttacatactttgggaaaaaaaaacgttgctgaagttactagaaaagagacagttcttctgctgacaactcttcaggaaataattttctacctccttaggattcgaagaccagttcattcttagtgtcttctgaaataaaattagaatggattgggatgatgaatattctcataattcttttgacctacattgtttgttaaactcatttcctggagacttggagtttgagcagatcttcagtgacattgatgaaaagattgaacaaaatgctgcaagcataaaacattgcattaaagagatacagtccgaaattaacaaacaatgtccaggtgtgcagctgcaaacaacaactgactgctttgaatggctaactaactataattacagtacatctgaatcatctttcatttctcatggagacttgataaaatttttcaaaacactgcaagatttgttgaagaatgaacaaaatcaagaagaaatgacattggatttactttgggacctctcctgccacagcagcgtttcattcccatcaaccctaagtggaacatctttccatttcctctctaggacgtctcttcattctgttgaagataattcctctatggatgtcaa

SEQ ID NO: 257834 - DNA, 758 bp, Homo sapiens
ggtggtaatacctggtgcagagcttgagtctggccagcgggtcaggctcttgctagatcagcaccggaggtggaagactggtacattttacatactttgggaaaaaaaaacgttgctgaagttactagaaaagagacagttcttctgctgacaactcttcaggaaataattttctacctccttaggattcgaagaccagttcattcttagtgtcttctgaaataaaattagaatggattgggatgatgaatattctcataattcttttgacctacattgtttgttaaactcatttcctggagacttggagtttgagcagatcttcagtgacattgatgaaaagattgaacaaaatgctgcaagcataaaacattgcattaaagagatacagtccgaaattaacaaacaatgtccaggtgtgcagctgcaaacaacaactgactgctttgaatggctaactaactataattacagtacatctgaatcatctttcatttctcatggagacttgataaaatttttcaaaacactggtaaaatgaatttttattttatcatggagtgggatgagtaaacagggaatacaactcattcaatttctatacgtaaatatttatttgagtgaccatattagcctgccatacataggggtttgtgtttttatgttcctatatccccaacataatccactgagctatttgttttaatttttaactatgatttttatcaataaaataaaattttatataaatggagata

SEQ ID NO: 257835 - DNA, 369 bp, Homo sapiens
tttgtattcagagccgaactttttactgaagatcagctgcttagagggtgagatactgcagatgacaaggcatatgcagtataattgtctaggagtcaataaatatctttgagtaaactcatgaatgaatgtaaagattatacattctttatcataagagttatttcatggttttatgatacttcatatctaatgtatctttactgaggggaagcttaatgccccaaccacagagatgctcaagaaaagttccatcttttcttgaaaatagaaacccaacttcacacatattttactcaaggactacaaaattaagaagaaagcaggtaaagaaaatggcagtaattagcttgcaagtaggatttaaaa

SEQ ID NO: 257836 - DNA, 2086 bp, Homo sapiens
ctgagaaagacttttttaactttcaatagagcagttcaccgatagttgcctgggaagacactgagctccaggccgttagaggtattcaaactgaggcgggatctagaccttaagttccaaatattacataattaagaaataacttaatttttaaaaacaggctataaatccattttgtcaggtgtaaaacagtcaaattgaaagtcactgttttcaagcctacgttatcagatacacaaatgacaactacctgtagctggggagaacatcttcacatgccccataaactccattttggcaaaagaaaaggcccagggaggaaacacacttgcagtgaccaaacatgcaatgaagaaaaaaaaaaaaaaaattctgacaatctaaaatctttttgctaaacttcagtgtagctgaaattgtcattatctctcctattcatatttgaccaacagacttcttactgaccaccaactgtgcaaagcattagagacagattgatcaaaagacaaccttcactgaaaggagcgtctagccactgaagtccaccactctgtagcataagtgctgtaagagatcagttattatacaactgaactcctcaactgttttcttctaagagttttatagtttaagcacttacatttaggtctctgatccatctggagttcatttttgtatgtggtatgaggttggggcccaacttcattcttttgcatgtagatatccagttataccagcaccatatgtaaagtggctgttctttccccactgaatggtcttggcacccttgttggaaatcagttgaccatggatgtatgggtttatttctggactctcaactctattccatggatttacatgtctacccttattccagtaccacattgttttgattgctatactttgcagtaagttttgaaatcaggagttgtgagtcttccacctttgttctttttttttttttttcaagattgttttaactatttgggatcctctgaaaattcatatatgtgttttggtatgtttgtccatttctgcaaaaaagatcattggaattttaatagatgttacactaaatctgtaaaacgacttcaagagtattgccatcttaacaatattatgtcttctaatccatgagcacaggaagtcttttgcttagttagatcttctttaatttctttcagcaacgttttgtagttttcagcatacaagtcttgcactactgcggttaaatttattcataagtattctattttttgatgctattgtaaactgaattgttttcatagttacctttttgggttgttcactgctagtgtatagaaatgcaactgatttttgtgtggtgagcttgtatcttgcaactttgctaaaatttgtctattagctttaacaattatttcatggattttttaggattttttgtgattaacatgtcatgtgtaaacagagatagtcttacttcttcctttgccatctggatgccttttatttttcttgcccaattcttctggctagaatttccagtacaatgttgaacagaagtggcaacagtagacatcatttatcttgttcctgctactgggaggaaagttttctctttcaccactgagtatgatgttgctgtgggttttttatagattccttttataagactgaagttctcttattttcctacatgttgagcatttttctcatgaaagggtataagattttgtcactttttgtgcgtgtctactgagcttttttccccttcattctactaaaatggtacattacattgatcttcgtatgctgaaacacctttgcattcttggaataaatcctgcttggtcatggtatataattcttttaaaaaaatgctgctggattttgttggctagtatttttgctgaagaatttttatctatattccgaagagatcttggcctctacttttcttatgaaatatgtgtctgactttggtatcagggtaatgcttacctcatagaatatttattcttttaatttttgggagagtgtgaggattcacattaattcttctttagttgtttgatagaatcaccagtgaagccactggccctgg

SEQ ID NO: 257837 - DNA, 500 bp, Homo sapiens
tctcttcacaaataatttgactataaggattacattaaaatttattcattcaacaaatatttcttgaataccgctgtggtatatgagaagtcttctaagcagtgatgagtaagatagataaggcccttttctttgggagtgtaaatttctagaaaaacttctgtaggaaactattaccgagacaatgtactttaaaatccaaaaggtagggccgggcatggtagctcgagcctgtaatcccagcactttgggaggctgaggcaggcagatcacttgaggccaggagtttgagaccagcctggccaacatggtgaaaccctgtctctactaaaaaatacaaaaatcagccgggcatggtggcacacgcccgtaatccagccactcgggaggctgaggtggaagaatttcatttcttgaacccgggaggtagaggttgcagtgagcctagatcaaactaccacgctccagcctgggcaacagagtgagactctgtctcaaaa

SEQ ID NO: 257838 - DNA, 460 bp, Homo sapiens
gacaaatgtatgcgaccagggcagaggctgtagatgattcatatttccaattgggagggaggatcgcttgagcctgggaattcaagaatgcagtgagctataatgatgccattgcactgcagcctgggaaacagagcaagaccctgtctctaacagagaaaaaaaaaaaaggatgagaggtgaaataaacatgattaaatttatccaacatatgaatgctacaaaaactattgtataaacatgctttttaaagatgaaagccatgtgtccacatcccatttataaactctcattgaatcctaagtcccagcatttaagatcaattgtaagttctgtttattggccagacgaggtggctcacgcctgtaatcctagcactttgggaggccgaggtgggtggattgcttgaggtcaggagttctagaccagcctggtcaacatggtgaaaccccgtctctac

SEQ ID NO: 257839 - DNA, 336 bp, Homo sapiens
gtggaagtaactgataataaacctgatttaattaggcctaaaaagttttatttgttacctgttagtcaccatattttaacccttctttggccatatgtagaattagctgctgtccctctaccaaccttaagagatatgaaagtggggaaatggaaactcatcccaagaggacagttgaggttcatttgatgaaggagacagaaagctttgggttaaagattaagtgatccctttgcaaattaattcttatactaaggtactgtgaacatgggtcagttttcaagggtttctttaggtttaataccataatactaagatttcagtagcatgattatt

SEQ ID NO: 257840 - DNA, 483 bp, Homo sapiens
aggtgtgagccaccgtgcccggccaactttctattagtattacacttaattgggtgaacagtatgggagcctgactgtctgggttcgagtcttggcagtgacctaccctttctagtgggggtaagaatggtacccaccatcctgtggttgttggaggttgagtcaatgtatacaaagctgttttgtgagctgttattactgttaatcataattatttgacatgagacattattcgacagctgtaaacactctcctcatcactttcctgcctccttagttagaggggtggaggtgactacagctcctaggctgtagtcattttatttctgtctccaacttttcccctcaggagcgattttgattataatgtaggctagctccaattcagatcaagaaaaggaggtccaagtgtgcattgactttaaaatgtctaatgaaacttgattcctgatagataaatatattaaaatgtaatataactca

SEQ ID NO: 257841 - DNA, 316 bp, Homo sapiens
tatatatatatatataaaaccaatgttttactggcttaggagtcatcttttctcttaggttgatttttaattctaagtctcagaaaataatttatctattttgtgttggtcattgagggccagcactcctgacgtaaaagggtgagaaggtaggatggtggtgtatgatgacagattacttaatagttataatgtacattgagtgatggataccctaaaagccctgactttaccactatgcaatctatgcatggaactaaattacacttgtacccaacacatttgtataaataaattaaaaacatccactatttgg

SEQ ID NO: 257842 - DNA, 541 bp, Homo sapiens
taacttttctcatatcctatggtctgaggcttgtgagaggtaaacaacagtgcaatatggtgaaaactgaatgtgaaataggcctctttattttttaattttaatttaatttaattttaagtttcaggatacatgtgcggatgtgcaggtttgtttcataggtaaacgtgtgccatggtggtttgccgcatctatcaacttatcacctaggatttgagccccacatgtattagctgtttatcttgatgctctcctttcccctgccccccaacaggacccaggaacagaaaaccaagcaacacaggttttcacttgtaagtgggagctgaatgttgagaacatatggacacatggtgaggaacaacacacactgaacacctgttggtgggggtagagggagggagagcatcaggaagaacagctaatggatgctgggcttagtacttaggtgatgggatgatctgtgcagcaaaccactgtggcacacatttacctatgtaacaaacttgcacatgtacctctgaacttaaaataaaagttg

SEQ ID NO: 257843 - DNA, 449 bp, Homo sapiens
gctggctggaggactctcaggtcctgcttctatactcagaagaggcacttaatggagagaatgaagtcacgtgcacaacagtgataggaatggaaagactttgaaataaatatgtcttttaacaaaaagggagatctcactctgtgtccacccagtgctaagttctgtgcctaagagatgcagaatgtgtaagacatggcctcctgtcttcaagaagtgctttcttcttgagggcatttaatgaccaacagtgatccatggaacaccagaaagaataatttaaaaatggacacacagaagggcccagcattcacctttcagttgtttgtgtgttttaatagactttatgtttcagatcagtgctaggatcatagcaaaattgagcacaggtacagagatttcccatatacctcctctccccacacatgcgcagctttccctgctatcaa

SEQ ID NO: 257844 - DNA, 435 bp, Homo sapiens
ccagccagcgtgaggagtgcacagtaagtgcttaaaatagcaagtgaatccttaggctctggaaaatatggttacgtgattaatgtaaccagagttagagatgaaataacattaaatattttatatatatagaaacttgcctacacacacataaaattccctattagttgtagttgaggtttagtcatgttgaatcgataaaaaatgatttagagcggatggtttcaaaagctggttgtgctttcagtcttccataaagaagttaaaattaattttaatatgttgatggtgcttattgatgataatattcataataaatatccatcggaaaaattctccggcacatctgtgtgacagagaggtcaagaatgttaatgacgatcaggactacaaaatgcaatccagtcaattactttaattaaatctaaaactact

SEQ ID NO: 257845 - DNA, 833 bp, Homo sapiens
aaaatctgtaattattaaaaattttccatttaattgttacataccaaacaattgtattagtattgttaatactaaaaactgataatagttagctaaatgggcactcatctcctactatgtcaaggtttcaagacattaaaatgctctaaaaacctagtgaaattactgtttcaattatctgttgtaatgaaaaattattttaatttctaatatatgccttttttgagccaggcattgtgctaggaactggatgtagactatagcaagatacttatgtccacattatttaataggggaaaacacaggctgtaaaaatggcaggtgaggcatttatggggaactgttgcagtacagagagagaggtgcataactcaggctgaaatggggcagagggacagagaaatttcgttagagtagaaattaggtgaataaggagcagaatagaaaaggattccaaacagtgaaaactcagaaatacttggtagcctgtatgcattaaaggatgggttttgcttgggggaaagggagggaaccaagggtagaactctgaagagttgaactaggaaaggctaggaggttttctcaaggctttggggaaaatgctgaaaatgttttagtagagtgacataaaagtttgtattttagtatgtttaccttggaaaattgtggaattggtttagagggggtagataccagagtgtgaaatactggtgaagggactattaaagtaatccacagaatttgtttaaaggatatagagggagagtcagcttagattgactcgcaggttccagatgagtgactacatttgagaggagttaatcaggctaggg

SEQ ID NO: 257846 - DNA, 405 bp, Homo sapiens
aaaaaaaaaaaaaaaaaaaaagatggaaagagtagagagacagagacagagacaaagaaagatacagaagagagaaacagacacaaaagaaaaagagaagcagtaactcagaggatttaagtaaatgaatgagtgaaggagttagaccaactcagtgaatgaatgagtgtgtcatggggtcacagatgaacacatgacccaagctaagcccacgagaatcaatcctgggacttttactgaaattctcagaaagaggcacttttttttttttttttaaataaaccctagggtggtaggagatacctgcagctatgggggatccttttatgcccatgaggggagagcctggctgagagtgacactaacacagaatgagaaataaacatagttgcaacaccctcagca

SEQ ID NO: 257847 - DNA, 203 bp, Homo sapiens
agcaaaggaagaataacaatcagagatatctgcatcttaattagaaataattagtccctaacaaccagggacttgtgatttttgaaatgtattcttaatgttttgtgctctgcttaaaaagtcatgactaatgtccaaatcacaaggaagcattgagatttagactttaacagtggttcttaatgcttgctcactgcacccat

SEQ ID NO: 257848 - DNA, 384 bp, Homo sapiens
agaagtggccgaagcagaagtggggtcctcatgggcagctgggcccaaaagtgtccccagtcttggcccctcccagagatcaccaagatttggggcagtaaggaggaagaaaagggtgaaatgcttaaaagggcatcattaatccttcaaagcaatctatgaacatgatggtcattaagtcattaataaaaccctagcacttcctcagcggtaactttataaagcacttggaatattatacagctgtgaataactccaggggtgtgcaattttttgagggggggcaggggacagagtcttgctctgttgcccgaactagagtgcagtggcgagatctcggctcactgcaacctccgcctcctgagttcaagcaattctcctgcc

SEQ ID NO: 257849 - DNA, 108 bp, Homo sapiens
cccacatcatttcacaccagcacccactccctactgccactctgagtcctgctggcttctttccacccctggcacttgacaggatctgtcccctgacatagcctctgc

SEQ ID NO: 257850 - DNA, 398 bp, Homo sapiens
ccatttcagtttaagattccctctgacttatctaattgttaggctctcttcaccttcagcctgagaaatgggcaccatcaatttctcctttctcacccagcttcacacccaggccctccagactcagtgggtgtctgacacctctacagctggagtccttcagcaatgggccccctgggctcagcagatattttgagctggccatttcttctgtgagacaatcttgtgttttctcaggaattcccctgcagaagatctctgagtacaaacccatgcccagtgatgttgcctctgcccagctacttacaagaccattcctcggcccatccagggctaccaatctgtttatgtaatttgtgccatgaataaaggtaccagacaattgagtaagtggaggc

SEQ ID NO: 257851 - DNA, 661 bp, Homo sapiens
tattttacaagtcactaatattgcttatacaaagaaatattaaaccattaacctttatacctttcatctctccaatatgaatatggttattaaaccataaaaattgaataaatatacgtgtataactgccaacccagagatacacgggatacttatttggcgggaatgaaaattgtttattccacttaactttttagactcatggatactgtggtttagttcctatctgatagctggaaagcagtcaccacagatgtgtaattcattatatttttttgtatgttatttcataagtagtataattcactgtgacttctagtaaatgttagaaaataagactaggtgaagtgtagtgttaatgaaacttccttttgcatatagaagagtttaattattagagattattaatgaaaaataggttttgaaattcaattttccatctttaaagtctggttttgagtaaagtaggttagcttcataaaactaatatctagaattttaaaaatacaaataattgaaatcattgcatttgtgaaattttcattcaacagttttatattaaaatgtaactcctgaacatctggtgttttatcaggtattatggaagtgaagtaaacatcacagaccctggtttcaatctgtctaaaatcttatttaaaaa

SEQ ID NO: 257852 - DNA, 599 bp, Homo sapiens
gatgaaatagccctcacacatggcatgctgttaagcaaactaggtgtctttgtatcttgactgtgccatagtatacaatacaaatgttttgagtctatgtgtgctgaattcgaggttggtgagtacaaacttgcttccagtttgttgacttgcctagcatagcattaaataggaactatttctcattgaatgtacaataattaacttatgcagcacagtcatttaagtttaaagtgttttacccttccccttcccaaagttagaacacacacacacacgagaaagataatgtatggcaaagtcaagattaattttaggtttctgtgctcagacagtaccatggcattccagccagcatgactgcacaggcacagagtttttccagcaaatatcattaagtactttatttttgcatcacaaaaatttcaatacttaattttgcttaatcttgaaattaaagggttcatttaaagggaacattttttaaaacccttcaaattctaatctctactgcaatttaattgtttggagagtgacatgtcttatgagctaattaataatttattaaaattaagtggtgataagtttattaattttgg

SEQ ID NO: 257853 - DNA, 936 bp, Homo sapiens
  misc_feature (98)..(98): n is a, c, g, or t
  misc_feature (122)..(122): n is a, c, g, or t
  misc_feature (278)..(278): n is a, c, g, or t
  misc_feature (283)..(283): n is a, c, g, or t
  misc_feature (292)..(292): n is a, c, g, or t
  misc_feature (302)..(302): n is a, c, g, or t
  misc_feature (315)..(316): n is a, c, g, or t
caaatggtgctggagcaattggacattcatcggcaaaaaaacggaccaacacagactgtaattttcacaaaaattaacacaaaatggatcacaaatanacatgtaaaacacaaaactataanacttctaggaaataatatagaagaaaatctaggtgaccttggacttgattaatttttatgtctaacaccaaaagcatgatccatcaaaaataaatgtgtaagttggacttaaaattcctggctgggcatggtggcactttgggaggccgaggtggntggancacttgagntcaggagttnaagaccagcctgnncaacatggcaaaactggctgggcacggtggctcacacctgtaatcccagcactttgggaggctcaggcaggtggatcacttgaggtaaggagatcgagaccattctggctaacacggtgaaaccccgtctctactaaaaacacaaaaaattagccgggcgcggtggcggggcgctgtagtccagctactcgggaggctgaggcaggagagtggcgtgaaccaaggagcgacttgcatgaccgagatagcaccactgcactcggctggcgaagagcggatcgtctcaaacaacaacaaataaaataaaaatacactaatgcatatgatagtgtacagtacacatatcttatataatgaccaagccaagattgatgcttaccacctactggttgccaagcctttcatttgcattgcttcttctttccacactgacttgtgcacattttgagttaaatgctcacaggaatggtgtctgctttttttcttttttcaaatatctaaaacatacatttttcttgtgcagtggttatttaatataccataaataaatatatctgatacttaataagttatccataacttattagctcctttaaaaagcaaaactggctgggcacggt

SEQ ID NO: 257854 - DNA, 341 bp, Homo sapiens
gtggtaataaaagtactgacatagcgaccctggaaattagtttgcatatcttcagagcgtgccttcctctttgccagtagattatacagtttgaaaattgacagttccccaaatgtggcctttctctttctcttcctctccctcactctccacaccatcccgtctctttcttatccacaaacatgaacaatttgattatcagtttaaattaccagggtcaaactatcaatattatagtgaccatgagtaaaccatatatattttttccatatatgcagtaatgaactgagagttaacattttcaatgactgaaagcaggcctctagtgaccgccggcgttt

SEQ ID NO: 257855 - DNA, 693 bp, Homo sapiens
tcaattgatgcaccaaagattaaagtgctataaataaagaacaacttcagagaaactcatgctagtaaaatgaaaagccagtgacgatcccagatagtgtggctctgcaagcttgtgggtcttccttgtctacgtggccatctcttccctggactgtgagcacattgtgggctgctcttgggcttaaattgtccctatgcagtgtccctagaacacaaagccaggcacaggatggaggctatttgattattttaaaacactttctgaattgaagagagccaaataggacataataaaacgtagaaaacaagaacaaaagcaaagatctctaagtcttaagtggaaagaaacaatctcaaattctcagctggtctgtttacacttatttaacccagatgcttccatgaggagcaggaattgggcaggtatgtaatgctgcccaagggacagatggtctcagggaccacatttgccaaagcatgacttcattctcaccccacatcggggaagtgtgagtaggaaaggattcttcttcattaggttttgaagcacaaaataaagatctatctgacaggatgtgacttccctcttaaagcttgaaggaaggttcccaacaagtttgcttagttatttggaacatttaaagatggaatattatccttcgtatagacagagaggtgattggggaaggtg

SEQ ID NO: 257856 - DNA, 230 bp, Homo sapiens
ctaaataccgcagaggtgattgagtctcatagaaagctctcgtgactttgcactgtcatatccgtagccaagcattggttgcagcagatgagcaagtgtggtgttggcacaaacactgaaatgttcattcatgttaaggagcagatcaaagtgaaacaacaaagagttggggcaggctgcagccttagtgccatgagcggcttctttgttgaactgggtagtagtttttc

SEQ ID NO: 257857 - DNA, 334 bp, Homo sapiens
cttgggaatactgggagatggtctggatgacctgttggattcatcccatccattcgaaatctgtcctgtccccgtcccaacctcctaggcctctagaatccctaatttttctgtgccttgggggaaactgtatagggaatggaaagaatataggtagtggttaagagttaaggttctggggccaaataacctggatttatttgaaccttgacttgtggagttactgctggtgaactttcttacttctctctggaaataataacagaatctagctcatggtagtgtgaggcttaaatgaaatatatataaaatgcttagatgacatgataccaat

SEQ ID NO: 257858 - DNA, 373 bp, Homo sapiens
tgagctctgtggtctggcgggaaacctgaggtccgctgcgctccctgctcagcttggctaacgatgccagcgccggctagtacgcaaggtagcctggaatttctcagcccctgacctcgacagttgactttcagagactctcagcatttagcccggtgagcgggggcgatgaaagtgattccagaatggactggtgcagccagagtcacccttgggagccttttcctgccacctttggttaaaaccatgggcccctgcacccttaaattgacttcaatggagaattctgtttctgggccaggttcccgcttactgagatttaccagtcgttgcttggatgaagcattggcaataaattttgagaaaactatca

SEQ ID NO: 257859 - DNA, 302 bp, Homo sapiens
atttcttttctgtgtgtaaatagttgttttgttctttgggacagggtcttgctttgtcacccaggcttgactatagtgccataatcatgactcactgtagccttgacctcacaggctcaaactaccctcctacttcagcttcccgagtagctgggattatgagtgtgcaccaccacacgcagctaatttttttctttttttggatagagacagggtgttgcccaggctggtctctacctcctggcctcaagcaatcctcctgcattggcttcttaaattactggcatgagccaccatgcctt

SEQ ID NO: 257860 - DNA, 417 bp, Homo sapiens
ggaacagtgtgaatcacttgcctcacagcacagtgctgtgtgtataataagaacttgataaatgtttagtggagatgagttaatgtcatgaatgggtaagtatagaaatttaaaactgtaaagaatcttagtgatgggccgggtgcggtggctcatgcctataataccagcactttgggaggctgaggtgggcagatcacctgaggttgggagtttgagaccatcctggccaacatggagaaaccctgtctctactaaaaatacacaattagccgggcgtggtggcgcatgcctgtaatcccagctactcgggaggctgaggcaggagaattgcttgaatccaggaggcagagattgtggtgagctgaaatcaggccattgcactccagcctgggcaacaagagtgaaactccatct

SEQ ID NO: 257861 - DNA, 477 bp, Homo sapiens
agagtgacagatacttatttcagatgagctgtcatggaaaagatgctttatcttttacatatgaatttctcggacatatagaagatgaaagaaatgatcattttgcactcactgtggattgcttttcattttaacccatctgacacatactgggtggctggttgccctgaagtaaagcagttctgaagctttcagacttgtgtctgaactgatctgatcccaggaaattgctctatcttgattattctgttgtcagcctgatctggcaactggctcaatgagcctgactgtaaggtaggtaggtagctagcgagaggagtggttgagagaattgattgattgaaaatctcatctggaggttttacttaattagaagagatttagaagggtccatgttatcatacagtaattccagtccatggtgctgagacttttctaggttgagttttcagaatattaaaaattgtttaacaatca

SEQ ID NO: 257862 - DNA, 479 bp, Homo sapiens
gccgtgggcttactgtcagtgctaaggcccctgagccccagccccgaagagagacctctggcctgcagcagcccccaccttgctgaagaaccaatcctcggcatccttgcggttcttctctgccatcttctcatactgctcacgcatctcattcaggatgcggctcaggtccacacctggggcagcgcccatctccacattgatctcaccgcccacctggcctcgcggggcgttcatctcctatggaaaaaggggatgtggatgtgcgcatctggacccatcctgatctctcactcccaagccttcccccacgaggtgaccccactccccacaaggacccctcctttgttcttcctctgctctatctgaccctctaaatgatttttattcatctgctcagtattgcctccaccatcagactctatctcccccattagaccaacggctctccaaaataaaatctaattattaggcctatg

SEQ ID NO: 257863 - DNA, 460 bp, Homo sapiens
aaaggaaaataaaattaaaagagaaaagcaagttttcctgttttaggctgtctcatcccaaaaagcagtaacagacacagcccaggcccaggcaaggtcctgataacacaatctaagaagtcaagacccaaaaggaatgtgctctggagactctcccagcactccccaacataaggataagaaaaacaaattcctcttttagccctttaccccttctccataaatattttgcaagttttctaagttcctgtttctcctttgatgcagctgcaaagtcacaagctatgctagagattatgagacctgtcactgtttaattaactgtctttgttctgcttctgtaagcttgcttataaaaatcaagccctgtctttgttccaggctcagttttttggatgtgaaaaaacctggatccactgagctggtgtacaccttaataaaagtcctcctgtaacaccta

SEQ ID NO: 257864 - DNA, 697 bp, Homo sapiens
cacactagcagtgttaatttagcctgcagaactacatggctactggctgttgttcatgtcatcagggaacatacattttccctttcgccattctgggccaaagtggaggcatgtaagttttctggtaacattttctgtgggtcagatctttttctcattttccatgcattgaggacatcgtcctttggtatatgtactttatgaagggtttgccctttatctccctgtttttggtgatttttcttttgcagtagtagaaaaataatggtgtgtcttacaatcaaaggcgccttagataaaatatagtatatctttactttaaagaagagaaatttgacccaaggtgagtttaattaaactgacaaagacataacagacacagctattaagtactagaagaagaagaatgtaagtccaaatagtctatagccactgccattagtgaatttatgaaactaaatatttaatcttaaaaattacattataacttagaaatatccttatattatgctttttttaaattttttatttatttaattttttttattattatactttaagttttagggtacatgtgcacattgtgcaggttagttacatacgtatacatgtgccatgctggtgcgctgcacccactaactcgtcatctagcattaggtatatctcccagtgctatccctcccccctccccccacct

SEQ ID NO: 257865 - DNA, 225 bp, Homo sapiens
ttttgcattttgttacattttgttggctgatgggtacattgtcaacaaagctgtgccgggattgcagcagtttgagcagggagggtgtggggtgggacctactgcataaacagagattttattagtggatagttctctgaatatagccttgaaactgtaaccacccaacgggttcttcttgcctgacagccgatttatcaggacaggagaattgcaatgtcgacg

SEQ ID NO: 257866 - DNA, 188 bp, Homo sapiens
tctgctgtatcctcacatacagtgaagtttccatacaccttggttgaatgaatgtcttcatgagcagctacagtcttagggaaaacatgtagcttattaaggtggtgacagagcttccacttaaatccaggagatcccttgcccttaaatcctctgctgtctgctctgcgcagttgagggtttcatca

SEQ ID NO: 257867 - DNA, 293 bp, Homo sapiens
tgggcatcagtctccccctctgggaaatgggtatgaagacattggaagagtctcctgaaccgtggttaatttgtgccaagagaggctgggctgaaaggaggtatttgtcttcttatgtaatgtggtattatataatgctagattgcatatctatatgtgtaattatatctgtctttaagatacagactggcccaattcaagtgttagaactcttagtctaatcaggcctgtcttaaaggaggatcctgtcctggagagagtgtgccaagagtaatataatttttgccctagga

SEQ ID NO: 257868 - DNA, 484 bp, Homo sapiens
acatgagccactgcgtccggcctaaaaatcctatatttgcaatctatgtgaccacaactgatttaaacccagatgaagataaggtatcaaaataaacctcaggcagactgagctgtgccacaattttaacactaactgatgaaggcaggatgcttctcctgctcagctgagcatcctgtctcccaaactcaaaaaactaaaatcctggaatcttagaactggaagtgacccttgtctttgtgactgtccttgagctctgctacccatgagttttgcctccaaaattgtcccttttatatgaagtaggactctgcgcagccagaattttttgtgttacctctttgtaatcagatagggcacaactggctgagattgttgtcagtatgtgggtgtggctggaaaaaaataccctctgtgaccaatagttctttcttcactgtacacagctttcatactgtttctcatgaataaaacatattcacat

SEQ ID NO: 257869 - DNA, 166 bp, Homo sapiens
ggagtgaaataagactctgtgagaatccttggttgtagatatgtttagtgcacttgctgaagtggcattgttgtctggggtaaatacacaaggtttgttgcctcatgccaaggaaatcaaggacatgaacacatgtggagtgaggttaagagcataggtttaatag

SEQ ID NO: 257870 - DNA, 357 bp, Homo sapiens
tcgagatcttacccataaaacaacacaataatctgaagccacagaggctgcccaccaagaaaggaaggaaggagccctgagaccactggcagttaagaccaaggcctaatgtcacccaaatattggccttttcccattcaagaaacataaactgctaaaaaaaaattagactgaatttgcgttaacagaaaatatactctagagaagtgttttttttaaacaggatattggatagatatattttttaaaaaacaacaacccacctgagacctcccacttttagcataagctgaaaaagacaaagtactagttttattctccagttttggggtgagcaaacaagactgcagatctcga

SEQ ID NO: 257871 - DNA, 345 bp, Homo sapiens
tcacacgcagcccagtgcacatattttgctcattgttaggtaaaactgtatttactaatagctaaagaaaagtcaagaagaataagtaaatgatataaaatcattgacataatatgtatttattgagtacagcatccacctattaggcactaagctaggccatgggatagggaagaggacacagttcttgccccaaggaactcatagttacataagggagaaaaaacaacatgataaaatagaagttgtaaaaccttatacatacaggagcatctgagggcaacacctccagccttcccctcccaaaggcatttatgacattcacgggttccctagagctccttg

SEQ ID NO: 257872 - DNA, 1638 bp, Homo sapiens
  misc_feature (2)..(2): n is a, c, g, or t
gncacggaggctgttttccaatttgattcttattggaaagcataacaaccagccaggcctgtgctgctggagcgggcagttatgtgcagggagacagctggttacggctggctcttggcctcgacggagcttctcagcctcttggagcctctgtcccctcagctgctgaaggaacacatctcctgcacttctcaagttgctgccggtgcgaaggtgactccagattctgcagtttgggctccgtagctgctcagcaaatgtcagcaggtccagaagcaaggctcctcagctgcagagtgaatgcaaatgccccttctgctctcctgcagctgcggcaggtggaagagctgtcgggggtgggaagggggcttggagggataaggatgggctggggagggctcccaaggcagtggacactgtgggctctggggactgcatggctgtggagggggcatgtgctgttgggctcccagcctcttggggtcctctctgtgccaagatagagcctgttaccctccctgagcaggtgtgagcagacacctgtcccctgccctgcatgggaagtgaacgatccactaagtggggaggtcagggtcagatccccggccttcccatgcaggatgactgctcaggcccaggacaatgggtggtcaacagaaaccccatccctgcccatagagggtgcttcccagttcacagtgacacagcctggcctgctcctcttccagccacccaaggcaagacacagagcaggaggctgaggctggtgtgagggaaagggggatgcagcaaggggatacctcaaccttgcccgagctacagacaggtgaggacttctccctcacctggtgttttccactgcattctgaagagcaggtgacacccaccccagggtggatccaggatggatctctgggtttcctgccatctacaatgaccctcctcatttcccctggctagctgccccctaggatggagaatgcatcatggtcactgacacttggcgcccttttccagcctcaatggcctggcagagccagtggggacacagcaataatgtgggtggcagtaataacagcagctgaaccacctgagcaccatcctgacgaggcatagcctgagctctgtgaacagtgaagtccatctggtctctcagtggcctgagagtgactctaactattatcctcattctctgaaggaggaaaacaaggcaaggggatttaaataatttttaaaggtcagataccttcacaaaggctgaagtgggagtcagatgatagtgtctgggtggagaccccatactcttaccctcaactctgagccatctgctatacaacatctatttgctgagtggaaggtgtgtagcctgaaccatgctcacttctggtccagagctctttcctcagggccctgggacattcacgtttagtgtacagtggtatatgtatgctgaattcctacattaggccagccacatagtcagcactgattgctaaaagaataactgaataaggataaatgcttgaggggatggataccccattctccatgatgcgattatttcacattccctgcttgtatcaaaacatctcatgtaccccataaatatatacacctactatgtactcacaaaaatta

SEQ ID NO: 257873 - DNA, 370 bp, Homo sapiens
gaatttaatactttgagcaacagtgcatagtatcttggacaaacactgcaatacaggaatataatccacttacatagataatcaaccctatattttcatataacacttacccagttaatgcaaagtggaaaaaatatatatgtctgaggttacttaatatttttagcatgaaagagtctattaagctgaaccaagaaaattacaccaatctccatattactttgtctaaacacagcaaagttctgtggcagttgtgtttcatagtcctctattaataagtcactccactaaaaagatcattaggcaaacaagaatgccatctgctttaattctataagtcaattctattttatgactcaagtgtttacaa

SEQ ID NO: 257874 - DNA, 736 bp, Homo sapiens
tcccaagtcaagctgccagcagattaggtttctggggaggaatctattcctggcttgcagttagctgccttctagtgatgccctcgcatgaccttgccttgctgtgcacagagagagacagaaatcttgggtgtctcctcctgtttttataaggacatgagctctacaggattaggctattaagggcccacttttatcacttcatttaatcttaattaccttcctaaaggctgtatctccaatacagttacatcaagagttagaacttcaacatatgaattgaggggtgcaaatgagtccataatacaaagtaattaaattgaaaattgtgtctaatttcaagtgttgttcaaaatgtgaatgcttctttggttattgattctactttgtagagacttggtaaattttaactgagaacaacataaattgccttaatcatgtgattttaattggttgtcctatttatctttatatttaggcttcctctgaatttaccctattattatgtatctgggatgtatctgggattcatggttctaacccaaaacttactttctatacttgcttatttaaccttcacattgttcaggacattctagaaaacgtctaatgtttcctttggtacagaaattgcacatacagctgagatgtgcacgattctgttctctcatgttagttgggaagaattttatgagaattgggggtttctgtacttttgattataatgcgtgagcat

SEQ ID NO: 257875 - DNA, 368 bp, Homo sapiens
cttcatccctcaaagcatgattacacttgacctcagcatatgctggcgttcattactgcattcattaatgaatgcaaggaataactcctgaacacttaatgtgtatcaggtgctgtgttcttaagttgtcttctacgatgctctccgtaaatgagcatgttgcccatgctacttccagagccatttctgcggccccgtcttctctcctgggatgcactgatcgcatggtgggctgcatagccccttcaccatccgacgcccctgtccttccagtgtccctgctggccctcttgctcctgctaaggggctggagtaaggtgggtgagttgacactatcattcataaaaatgccactatattagagatta

SEQ ID NO: 257876 - DNA, 1368 bp, Homo sapiens
gactagtaataagcatcctgagtaatgagtggcctgggccggagcaggcgaggtggccggagccgtgtggaccaggaggagcgctttccacagggcctgtggacgggggtggctatgagatcctgccccgaagagcagtactgggatcctctgctgggtacctgcatgtcctgcaaaaccatttgcaaccatcagagccagcgcacctgtgcagccttctgcaggtcactcagctgccgcaaggagcaaggcaagttctatgaccatctcctgagggactgcatcagctgtgcctccatctgtggacagcaccctaagcaatgtgcatacttctgtgagaacaagctcaggagcccagtgaaccttccaccagagctcaggagacagcggagtggagaagttgaaaacaattcagacaactcgggaaggtaccaaggattggagcacagaggctcagaagcaagtccagctctcccggggctgaagctgagtgcagatcaggtggccctggtctacagcacgctggggctctgcctgtgtgccgtcctctgctgcttcctggtggcggtggcctgcttcctcaagaagaggggggatccctgctcctgccagccccgctcaaggccccgtcaaagtccggccaagtcttcccaggatcacgcgatggaagccggcagccctgtgagcacatcccccgagccagtggagacctgcagcttctgcttccctgagtgcagggcgcccacgcaggagagcgcagtcacgcctgggacccccgaccccacttgtgctggaaggtgggggtgccacaccaggaccacagtcctgcagccttgcccacacatcccagacagtggccttggcattgtgtgtgtgcctgcccaggaggggggcccaggtgcataaatgggggtcagggagggaaaggaggagggagagagatggagaggaggggagagagaaagagaggtggggagaggggagagagatatgaggagagagagacagaggaggcagaaagggagagaaacagaggagacagagagggagagagagacagagggagagagagacagaggggaagagaggcagagagggaaagaggcagagaaggaaagagacaggcagagaaggagagaggcagagagggagagaggcagagagggagagaggcagagagacagagagggagagagggacagagagagatagagcaggaggtcggggcactctgagtcccagttcccagtgcagctgtaggtcgtcatcacctaaccacacgtgcaataaagtcctcgtgcctgctgctcacagcccccgagagcccctcctcctggagaataaaacctttggcagctgcccttcctc

SEQ ID NO: 257877 - DNA, 310 bp, Homo sapiens
tggtttcccagaccacactttgagaatcaaggctgatgagacctctgtccccatcaggggaggaggatcccccctctccagcactgacctctattgtgtcctggctatgggtctgtcagcagcacacagagaaccctggcatatccaaatgtggtaattattttctttgcaacacagtgagctgccaggtctccccatgctcttcagtgtgctgggaaggtaggaagacacccagcaggaaggtgacagaggtggctctgggggatggaaaggggctcactgggggatgactggggagggaccagccctc

SEQ ID NO: 257878 - DNA, 1377 bp, Homo sapiens
tacactaaaactactgaattgtatactttgaaatggtaaattgtatgctatgtcaattaaaaaaaagtataggccaagtgcagtggctgaagcctgtaatcccaggctttgggaggccgaggcgagtggatcacttgaggccaggagttcgagaacagcctggccaacatggtgaaaacccatctctattaaaaaaacaaaaactggctgggcgtgttggtacatgcctgtcatcccagctactggggaggctgaggcacaagaattatttgaatccaggaggtggaggttgcagtgagccaagatcacaccactgccctccagcatggtcaacagaacgagactgtcttgaaaaaaaaaaagataaattatggtatttgctttggaattaaataattagtaacttttagtaaggtttggtaaaggtttagtaacctttagttaacccagttaacttctgtgtcttatatttgtctttgtactgaagtagttgaatgccactgacccacagaatgagttgccagagaactggagcaacattctgtttgtgggaaagagaatactctgttactaccttaatattagattcccagcatatcaattgaagggttttaaatagtgagtgatgtgtttcaatttatatttatattatatttacacttgatcttagccaaaaggctgagaaagcgattttatattatatttataaagatcactttagctttctcctggagactggattggtagggacaaggtgacattggtgaacttggttagaaagtcagtcaagcccgtgtgcagtggctcacgcctataatcccagcactttgggaggccaaggcaggtagatcatctgaggttaggagttcgagaccagcctggccaacatggtgaaaccccttatctactaaaactagacaaaccacttagctgggtgtagttggacggttgcctgtagtcccagttgctcggacggctgagcacggagaacggtttgaacccaagagggctcatctgcaggaattggacaattgcccattggaacaagcttgggcacaacagaaaaccgctaaaacaaaaaagggccacagacttgcaacaagaactccccgaacaacgggcccagggccacaaaacactgaaaacccgcaaagagggtcaaaatctatcaacaggggatcatcaaacaactccaaggagccccgacagcactagaaacaacacccctcggacaaatctgaaaatctcagccaatagaaccgatcaccacgaaacaactctgacgaccatgacaaagggagtgactcaccagcagactctcatctgctgcttcctgtttttttttttctcttgtttcagtcttggtctgtacataag

SEQ ID NO: 257879 - DNA, 205 bp, Homo sapiens
caccatcttattttcttcccccagttggccaaatccatcatgaagccaaagggcaaggaaacacctggaggcttcatagaggtcatcctcctggggcccagggcagggtcaagaagggtggatggtggaatagtgaccttggcatggcaagtggaaaataaccaatgagatgatgatcagaggagactgagacaagatggaacct

SEQ ID NO: 257880 - DNA, 645 bp, Homo sapiens
gtggggtaggggaagaggtgagggatagcattaggagatatacctcatgtaaatgatgagttaatgggtgcagcacaccaacatggcacatgtatacatatgtaacaaacctgcacgttgtgcatgtgtaccctaaaacttaaagtataatagtaaaaaaaaccgtatgatacatgtatacaatggagtactattcagccataaaaatgaatgagattctgtcatttgcatcaatatggatggaactgggggtcattatgttaagtgaaataagccaggcacagaaagacaaacttcacatgttctcttatttgagaaagctaaaaattaaaacaaactcaaaaacacttaatctttactggtgcctaggaggtagatgcattagcattcttattttatatatgagaaagctcagatttggaaagattcattaacttattatttaagttataataacttaataacttattatttaagttaaatggcagagccagtcctaaaatgctcctccacctgacttaagagttttgggtcacacctaaccagaaattctaacaaagggaagcaaatgtaaaaacatatgaacataaaacacatgaacatatgaacatgagattcaatgtcacaggcaacagaataagaaag

SEQ ID NO: 257881 - DNA, 357 bp, Homo sapiens
cctacagggatggactggggacatgggggcagatagagccacgtggggaggtggtatgtgtggttagatcacaggagcaagtccaggagggtgtgggaggacaagtccagtgctcagccagggctgcctgtcatggcccaggatggatgtgtgcatctcctgtgaaggatttgcgtctgagtgcctggtactgaaggtaggatggtgccccgatcagggtctataatgaggcatgaaggtatgagatgggcatcagagttgttggtccaagggaaactgacctttttaaagggctctcctctccttatctgatttcatcctcagaacaaccatatgacatagggatcacttcccttt

SEQ ID NO: 257882 - DNA, 318 bp, Homo sapiens
ctcagagtaaggttgaaggtttctgagcaggatggtgatgatttataggtagcactttgaggaatagtaaaggaagtgggatataggaaccagactgaaagcttatagtagagtatacttgatgtgttaagagtcctatgtggagtgggaagtacatacatggaaagttaatttataattgtaattaatgtatctaaagtacatgggaactgaaatgcaagatgattttttgtattatatcctggaacagaagaaagaacattagtggaaaaactgggaaatccaaataaagcctgcagtttgattaatgctgcttta

SEQ ID NO: 257883 - DNA, 1964 bp, Homo sapiens
gtaacaggcaggaagaaagctttctgtactacaccagagggttggggctgtggatttagctactctcacctgaggctactgagcaagctgtcatgcaccatgagacaaagcccaagctgtcccaccaggcagtaagtgtggagaggttcaggcacatggcatagctgctatttcgcacaattttcactacaccagtggtgaccaaatagaagaggttcatccatacacagaacctggtgaagagctggaggcagaaagaagtgtctatgtggagacgcaactgaaacaaaggtggcacagcaactgttccaatcccgtgtctttcctcatggcttcccaggagtttgaggttgaagctattgttgacaaaagacaggataaaaatgggaatacacagtatttggttcggtggaaaggttatgacaaacaggatgacacttgggaaccagagcagcacctcatgaactgtgaaaaatgtgtacatgattttaatagacgacagactgaaaaacagaaaaaactgacatggactacaaccagtagaattttttcaaacaatgccagaagaagaacttccagatctacaaaagcaaactattctaagaactctcctaaaactccagtgactgataaacaccacaggtccaaaaactgcaagttatttgctgccagcaagaacgttaggagaaaggcagcttcaactctctccgacacaaagaatatggagataataaattcaactattgagacccttgcacctgacagcccctttgaccacaagaaaactgtgagtggctttcagaaacttgagaaactggaccctattgcagcagatcagcaggacacggtggtcttcaaggtgacagaagggaaactcctccgggaccctttgtcacatcctggtgcagaacagactggaatacagaacaagactcagatgcacccactaatgtcgcagatgtctggctcagttactgcttctatggccacaggttcagctacccgaaagggtatagtggtattaatagacccattagcagccaatgggacaacagacatgcatacctcagttccaagagtgaaaggtgggcaaagaaatattactgatgacagcagaggccagccttttatcaagaagatgcacttcaccataaggctaacagaaagtgccatcacatacagagacattgtagtgaagaaagaggatggattcacccagatagtgctatcaactagatcgacagaaaaaaatgcactgaatacagaagtaattaaagaaatggttaatgctctgaatagcgctgctgcagatgacagcaagctcgtgctgttcagtgcagctggaagtgtcttttgctgcggtcttgattttgggtactttgtgaggcacttaaggaatgacagaaacacagcaagccttgaaatggtggacaccatcaagaactttgtgaatacttttattcaatttaaaaagcctattgttgtatcagtcaatggccctgccattggactaggtgcatccatcctgcctctttgtgatctcgtgtgggctaatgaaaaggcttggttccaaaccccttatacgacctttggacagagtccagatggctgttcttctattacattccccaaaatgatgggtaaagcatctgccaatgaaatgttaattgctgggcgaaagctgacagcacgggaggcatgcgccaaaggcctggtctctcaggtatttttgactggaactttcacccaagaggttatgattcaaattaaggagcttgcctcatacaatgcaattgtactggaagaatgtaaggccctcgttcgctgtaatattaagttggagttggaacaggccaatgagagagagtgtgaggtgctgaggaagatctggagctcagcccaagggatagaatccatgttaaagtatgttgaaaataaaattgatgagttttaaaaaaaaaaaa

SEQ ID NO: 257884 - DNA, 429 bp, Homo sapiens
aatgataatccattatgagatgcagttgaatttgctaaatctatttcaaaagctctgcttactcaaccatttatagcacatttgacaagtaattttttctatagaagactttaaataaaaaccattgaaatagtgtaagatcctagacccacatactgtctgccatcacacatcactttcctcagtgtctgtcagttgatgtttttgtgtggtgaatgtgaaccagtggcctgaagaaatggagagtaaatggtgatgaggtattgctgtaagttgtgttttctgttataactaagtcttgacttacccatggtaattctttcttacaaaccttccatatatgtgtgctggtttctattcctgatgctgaactgttagttttctaatatttaacttttggcttccaaaactacatgaagttatttttct

SEQ ID NO: 257885 - DNA, 279 bp, Homo sapiens
gaggcagaggttgcagtgagccaagatcacgctactgtactccagcctgggcgacagaacaagactcggtctcaaaaaaaagaaaaagaaaagaaaagaaaaccaagatggagagaggcatagtagtttctaagacactgagctaagaaggaaagaagctttcagtggaagccaagtctgtcttactctgaaatgtgtgttctttccactctttcaggctgccctaatttgctttttaaagaattttgtgacccaaataaatataattggtggcatttc

SEQ ID NO: 257886 - DNA, 370 bp, Homo sapiens
tccacaatcttaagaattaccctctattgccccttgggccccctgtccccagaagcctggtcagccaagactcacatccccaggtggctggcaaccaccagaagtggctttctcagggacactgccatttgttttcctgttcctgttcgctcctgctggaactctagggctgtttttctgccaatattcttttaactgttggaaagaagagcagtaatactcatgagaaccgtcagcccctgcagccacatcctcctttacagtttttacaaaatacacttacacaccatctgatttaatgacaccaacaaccgtacaaggtgttgtcacactcatttagtgactgagaaggattgatatcatggctaga

SEQ ID NO: 257887 - DNA, 580 bp, Homo sapiens
gcacacctgctgtgcagccccattcccaacaggccaccgacaggtactggtccaataaagtggaagatatccttaccagtaacccaacaatcccttctcctagagaaatggaaacacatgttctcacaaagacaagtatgcaaatgcacatagcagcattattcattgtagccaaaatttgaaaacaacccaaatgtccatcagctggtgaatagatccattgtggtacatctatactgtgggatactactcagcagtaaaagggaatgaactattgatacacaaaacattatagatgaatttcaaacacattatgctaagtgaaaggaatcaaatacaaaagactacattctgtatgactaaatttatatgaaattttagaaaaggcaatattacagggaagggaagcagatcagcatatacctgaggctactaagccaggtgaagggcaggttgcaaaggggtatgagaggcttttagcaagtgatggatgtgttctgtatctttattgtggtgacatttacatgactgtatacaattacccaaagtcattaaattatacaattaaaatatatgaatt

SEQ ID NO: 257888 - DNA, 493 bp, Homo sapiens
aacggtgttaattgatctaaaagggcttgattgaaagcatcctaacatttccctttaccttgttttgtttgtttgcctgcttgcatgattatttttttctttctttctttctttctttctttctttctttctttctttctttctttctttctttctttctttctttcttttctttcttttctttctttcttttctttctttctttctttttttctttctttctttctttctttctttctttctttctttctttcttttctttctttccttccttcctttctttctttctcttccttccttccttctctctttttctttcttttaaaaaaccttagcagttcaagttagaggtgtttttttcttctctttttttttttttttttttttttgcctccaatgccaccacatcattcagtctaactattgagcattgcaggtttactcaggggacaattcttgccctccccaccccctgaccccttctttcaaatat

SEQ ID NO: 257889 - DNA, 368 bp, Homo sapiens
aacatgtattaatacaactattatgtattcataataattaaaatcttttaagaaagcaaacaaaagaaataaaataaaccaattaaaaatgggtcaaagatcttaacaccacactaaataaaatatacagatggcaaataagcatatgaaaagacgcttcatatcatatgtcatcaaggaaatgcaaattaaaataatactgagataccactacacacctattagaatggccaaagtccagaacactgacactaccaaatgctgacaaggatgtgtgacaacaggaactctcattcattgctaatggaaatgcaaaatggtacagccactttgggggacagtttggtgtttttttaaaaacaaaaaca

SEQ ID NO: 257890 - DNA, 272 bp, Homo sapiens
agaaacatacaaccccccacatttgaactagaaacaatttaaatcttgaagagtaatagcaactagtgagattacatcacagagataaaatatatctcccaaaacaacaacaaaaatatcccaggaccagatggattctaccaaatctgcaaagaagaactggtaccattcctcccacaacttttctaaaaaaatccaggtgaagggaatcctccctaattatttctacaaagccagtcaccccaataccaaagccaggcattgacataaca

SEQ ID NO: 257891 - DNA, 663 bp, Homo sapiens
aaagtcttaatgagaatcattggtactcaatagaatagtgaattaaatacagccaggggaagacccaagtctcatatttctcttgtatattccaaagttccagtgaaattccaggtaatagaggttatttcccacactgttaaagcaaggttgcagacacttctgaatttcggtcccaatgctgaaggagggcacacctctgtcctggaaaatgacacaggaatgaatgctattcccatgactcattctggtcattcttccagcatcacagaaaccaaaaaatagaaatatagccaaatacatgatttgctatccctcttcttcaggtttcttacctgtttcttatggataataacattgccttaaggattatgatgaaaatatgatatccaagtatgtgtacagttttgaacaaaatgcctagtatgaattggtcaataaataattatttttatttattgaattacatggattctataaataattactgaataattattgtgattccttttattggcagtgctcaaaatgcatccctgtgtgacctcaagtaaaccagtaactttgtgaacctgcagttttatcatttttaaagtgaagaaactagacagattttcattctgacacagaatgtcaggtctttgagacaccagagaatagata

SEQ ID NO: 257892 - DNA, 636 bp, Homo sapiens
cccatatttcagagtatggtttaaatcaaaattggaatagcagatgactcttctgagagcaatttggatatcattcagttctgaagtagaaagagtttgtgggatggaactagcagggatagaggaccactgcatgtggagcctgatgaagtccataaccattgggaagtggcgcgggcgggtgaggttatgaagcagtatcctaggggatggtgtttttcaagttagagataatgacccataggccaggcacagtagctcatgcctgtaatcccagcactttgggaggccgaggtaggaggattgcttgagtccaggagtccaagaccaacctgaacaacatagtaagaccccatctctacaaaaattttaaaaaattagccaggagtggtggtgcacacctgtagtcccagctacttgggggtctgaggtgagaggactgctagagcccaggaagtcaaagctgcagtgagccatgatcacaccactgcactccagtctgggtgagagatcaagaccctgtctcaaaaaagggtggatgacctgaagtcaggaagttgaacccagctggcccaacatgggaaaccctggttttccatccatttttgccggcctggggggcaacccctgtccccg

SEQ ID NO: 257893 - DNA, 433 bp, Homo sapiens
taaaccgcagaggagcacatgctttgcctttctgcatagcaatcttactactgtattttttactatcctgatggatttttttctttaccccaatcttcttgaccatgtgtttttaacttttggattagatgtatctttaagctgcttcaaatcttttgtggaaggagattgggaatagaatagatgaaaaatagagaagtaatttattaagttcaacaaatgccattgttatagataaaatatttatcaaatcttctccacattagcactattaaaaatacttgtgctcagcactatggttgatccttgtaatcccaaaaactcaggaagctgaggtgggagaatcactttaggccaggagctcaaggctgcagtgagccatgattatgccactgccctccagcctggatgagagagtgagaccctgactcta

SEQ ID NO: 257894 - DNA, 531 bp, Homo sapiens
attactgaaaaattgtctactcgcagtttgagctgtgctggttaagggacgatgggttagcctgtctctaggctctgcagcacctgatccagctggaagggcagcccaccacatatagagcccatcattcatcagagatactcactgttccgctacagcccagatgatggtgtgaaaattgctttacattccttctctggagctaaaaagcacagagaagtcctttttccccaagactagtcccattgtcctagcctactttcctctctccccaaggcctttgcagcactttcattgcctactctgtctctgcccacagtcaagtcagggatcccattgctctgcattttcagcttcttcagagcaatgcaatgatgatatgcaaccatgagacacagaagacacagatactgccattttggtgatttaatcctggaagtgggaaactatagcctgaagctaaatcaggcttaacctctgtttgtgtatggtctgcaggctaagaatgatgtttacattttagatgtttca

SEQ ID NO: 257895 - DNA, 755 bp, Homo sapiens
atcaagaaattcaaacatgtccaaaatcatgagatcaaacaactggaaaaactggagaaactgaggcagaagtcaccctcggatcagcaaatgatcgccaggcagagaccagagtgcagagggccgctgtggactccagccgcaccaccctccagctggaggagactgtggatggcttccagaggcagaagctcaaggacctgcagaaatttttttgtgactttgtaactattgagatggttttccatgccaaagcggtggaggtgtattctagcgccttccagaccctggagaagtatgacctggagagggatctactggattttagagccaagatgcaaggagtttatgggcattatgacactcggctgcttgccaacaccagcccccctccatctgttcttcagtctctcgccagccagagtgctcagagcaccatatggagcccaggaaaagaaggggaggagagtgaggacaactccatggaggaggcccccgtggaggacctcagggcactggggcagggaccccataagagagaactgcccacaacagtcagaagaacttagctggccttggatcctcaggtgggctctgctgtgtgccctcaggcaagccacgtgtcctctgagcctcagtttcctcatctgtacaacagggccaatatcactcacttcacaggttgctctgggggatcgctgtgcctggcatatagtaggtgttcaataaatgccctgtgactctcagcttgatcc

SEQ ID NO: 257896 - DNA, 819 bp, Homo sapiens
atcaagaaattcaaacatgtccaaaatcatgagatcaaacaactggaaaaactggagaaactgaggcagaagtcaccctcggatcagcaaatgatcgccaggcagagaccagagtgcagagggccgctgtggactccagccgcaccaccctccagctggaggagactgtggatggcttccagaggcagaagctcaaggacctgcagaaatttttttgtgactttgtaactattgagatggttttccatgccaaagcggtggaggtgtattctagcgccttccagaccctggagaagtatgacctggagagggatctactggattttagagccaagatgcaaggagtttatgggcattatgacactcggctgcttgccaacaccagcccccctccatctgttcttcagtctctcgccagccagggaactctgcaggtccagctgagtagggcaaatgaagaccctgaacatcctcatgccaatcatgagtgctcagagcaccatatggagcccaggaaaagaaggggaggagagtgaggacaactccatggaggaggcccccgtggaggacctcagggcactggggcagggaccccataagagagaactgcccacaacagtcagaagaacttagctggccttggatcctcaggtgggctctgctgtgtgccctcaggcaagccacgtgtcctctgagcctcagtttcctcatctgtacaacagggccaatatcactcacttcacaggttgctctgggggatcgctgtgcctggcatatagtaggtgttcaataaatgccctgtgactctcagcttgatcc

SEQ ID NO: 257897 - DNA, 400 bp, Homo sapiens
gcaacaaacacttgagacttgttgctgccattatcattactgatgttgctgtcgttttattattattattatttagagtgctcagagcaccatatggagcccaggaaaagaaggggaggagagtgaggacaactccatggaggaggcccccgtggaggacctcagggcactggggcagggaccccataagagagaactgcccacaacagtcagaagaacttagctggccttggatcctcaggtgggctctgctgtgtgccctcaggcaagccacgtgtcctctgagcctcagtttcctcatctgtacaacagggccaatatcactcacttcacaggttgctctgggggatcgctgtgcctggcatatagtaggtgttcaataaatgccctgtgactctca

SEQ ID NO: 257898 - DNA, 457 bp, Homo sapiens
tgtgaaggttttttactttgtgagtaacaatagaagagagagctctagagacatgaagccacctggcctaccatctcatcctaacatatgtaggaaaatgcatctcgtttaaatgtgaacaacagaaaaggatttcagttgaatctcatacaagattattacagtgaaaaaagagtagaaacaaccacagaagaggtgaacattgtgtcagataaaaacatttcaaaataaggtaacaaaaaagtagcaacaataatagaaacagtgaaaaaaattataaataaaatttataaacattcagaaatgaaaggattaaaaaagggaagatttgaaaagagaaaaagtaaaacttaggcaagaactggaaataaaagaatattgaaaatgaagacttagttaaaatgagcacaggaatgagtcagcaccatggatactatctgaagaaaaacagatgaaa

SEQ ID NO: 257899 - DNA, 459 bp, Homo sapiens
caaccaaaaggaggggacattgaggcagacagtggtgaggggtggggacatgtggatggaacgagatggccatggactctcctgttgtgaccacttaaaacaggtagaaatacgccccgaggtgggtaaagtgcacagccgactgccaggagggacatggggcacataatctgaacttaaacccttgtagccctgggattctactgaaaatccacccttggacagagtttcaaaacagacattcagcaaagaaggatgcattaagatctcaggttcatcctaaggcccatggaagcacaccaggcctccagggcctgggaaaagacaatagcagagctctgaacatggacaaagctacaacacagtaagaagattacaatatttttccaggctatcatgattttgcaccattttatggttttcagccaacataactcattaaatgtgtaacaaagagta

SEQ ID NO: 257900 - DNA, 539 bp, Homo sapiens
cagaaaaacacacaaagactagttaatcctttgtaaacttctattgccacttctgaaatataaattaaatttttaaaaaattttgtttagaaagtgtcaaaaattgttaataaaaaaagtcactaataggattggaacatgttacttatgttaatagtgcatactttaatgcttaacatcaggttgctataatttaaatgtgttcctcaaagttcatgtgtggaaaacttaatccccaatgcaacagcgttgggaggagaatcccaataaggggtgattaggtcataagggctttgcccttaggaatgcattaatgttgtcattgctagagtgggttaattatcttgagggtaggcttgttaaaaggaagttaaaacccctctttatctcttgctttcccaaattctctctagcccttccaccttctgccatgggatggcacagcaagaaggccctcatcagatacaggcccttcagccttggttttccagtcattagaactgtaagaaataaatgtcttttctttataaattacctaa

SEQ ID NO: 257901 - DNA, 873 bp, Homo sapiens
tccagcccccttaacaaattctatcattagttctgaaaagtgaagaacccttcacttctggaatttccctaaaattttctgatattttgaaacatcaatttcctcctctcctagttttttaccgggaggaccaggatctttccttctcattaattgtccttcattttatgctttgtttcttcatctgtttttaagtaatgtgctattgagtactcttgaaattataatatcattcacataatcttgttaaatagagaaaaataattaacaaatatttttaaccaagtatattgtgtttaaaacaacttctcttccagcatgaagctatacaattggaaacagaaaatatgattttaaagaagaaaataaaagttactgaaaaccatgtgaagcagatcataggaaagatcagtgaagagaggcaggagggcctttggaaatttatcaaggaatttgtaaaatcagaggaaacagaagataacgctcaagtggctgaacaaatggccagtggaaattcttaacttccatgtatgtagcatggatatttgcagatgcatatacattcataaagatacatttcatttcatcagctttaatctctagtaaaattaatgtggtatatgtatcctactcaggatactgaaatacacacatgcgtacacatgattagtttctgttgcatacatatttacaacaatactagttcttaacgtatgttttactttcatttaataatgttcaactttggaaaatacttttgattatttgctaagaataaggaattcagcgctgcttgaatacagctcaaatttgtttatttgccaacacaagtttacatatatgcatttaataaaattttatagtgatttaata

SEQ ID NO: 257902 - DNA, 1137 bp, Homo sapiens
cggccgcgggccacgagagaaagctgcagcaggagctccagaaaatttgcacgtgcagcccccagcagttcaacagactgcacgtctttggaaaagtctttgaagatatttgtaacagttctttgatatttggtgatctcttgaaaaaagttaaggatgaatatgaactctacatggcaacgctcctggagtcccagcctgcagcacagtacgaggctcttctggctcaactcaaggcgctggggcagaggccggtgaagacggcggacatggatctcgccagggaagagctgaggatgctcgtgacagccacaaaagcagccctggagcagaatgatagactcagaagtgaactggagatggaggtggcattgctgcagtctgcaaaggaacgatcagaatcatctgagaaacatataattgatgaaaaccgacttactcttactgagaaggttgaaaagaagaggtgtgaaatactcagtaagtgggatgagatacaagctctggaaaaagaaattaaaacaactttggttcatactggaatttcagatatcactgagaataggattaaaagcatagagcatgaagctatacaattggaaacagaaaatatgattttaaagaagaaaataaaagttactgaaaaccatgtgaagcagatcataggaaagatcagtgaagagaggcaggagggcctttggaaatttatcaaggaatttgtaaaatcagaggaaacagaagataacgctcaagtggctgaacaaatggccagtggaaattcttaacttccatgtatgtagcatggatatttgcagatgcatatacattcataaagatacatttcatttcatcagctttaatctctagtaaaattaatgtggtatatgtatcctactcaggatactgaaatacacacatgcgtacacatgattagtttctgttgcatacatatttacaacaatactagttcttaacgtatgttttactttcatttaataatgttcaactttggaaaatacttttgattatttgctaagaataaggaattcagcgctgcttgaatacagctcaaatttgtttatttgccaacacaagtttacatatatgcatttaataaaattttatagtgatttaata

SEQ ID NO: 257903 - DNA, 305 bp, Homo sapiens
aacgagcctaatggatgaactacaactatgattataatttgcaaggagattagctgccgtgctagccatcgcaggacttaaacaaatgtgctttctcctgctgtttttcaaggtgccttcgtgtaagatattaggtacagtgaaacaattaatagactgatagagctgacttgtaagacaagcttaaagctgaaaaatgtttaaagcgatgtgatcaaagagatagctgcacttgtccctgacgctcgcctgctacatacttcaacctttgtcgaagtaaaatgaatttaaaggtttattacagc

SEQ ID NO: 257904 - DNA, 432 bp, Homo sapiens
ttttttttttttttcttgagatgaattctcactatgttgctctggctggacttaaactcctgggctcaagccagcctcctacttcagcctcccaagcagctgggaccataggtgtgtgccaccatgcccagctagataatttttttaatacgtaaatgtccaaaatataaaaggtgtactcaggcctcagtcctaccccttcatttttattagtttctggtttactcttcctatgtttttttttttgtaaaaatatgtgagtgcatatcaatttccctttattaagtagcataatatgtcttggaagtcaattcatgggttttgctcaccttatttttggggaaggtaaattttgttgacatataacattaaaatgtgtacatgtaagcaaaaagcttggtgaatgtttagaaaatgaatatatctgaataa

SEQ ID NO: 257905 - DNA, 786 bp, Homo sapiens
gtagaggtgggggtctcactatgttgcccaggctggcctcaacctcctgaggtcaagtgaccctcctgcctcagcctcgcaaagtgctgggtctacaggtgtgagttactgtgcccaaccccagtgtgatagaattaagaggtgaggtcttgggggagtgattaagtcaggaggatggagaggaaagtgagctgccttgccccttccaccaggcaaggacatggtatgaaggtgccttcttttgaggcagagaacaggccctcaccagactccaaatgtgctggcaccttgatcttggacttctcacctccaagactgtttttactgtttgccatacattttactgttttcacccagcctaaggtatttttgtagcagcaggaacagactaagacagttactcagccaaggcagtccactgtagtaagagtccatgtatatgaagggcgagaacaggatagaggaacccatggtcagggacccaggacagcaatgacctctccaaggtcccagtgaagcccgtggtcagggtcccagcgacgtcctgtctcgctcagggaggtggtttcatggtggacatgcacacacacctgattgagccacaggttgatgtttggctgtacttaattgtctaggtaataccttaatacagaagtttaaaaactggaggccgtgctgtagctcatgcctgtcatcccagcactttcggaggctgaggcgggcagatagtttgaggtctggagttcaaaaccagcctggccaacatggtgaaacttcatctctact

SEQ ID NO: 257906 - DNA, 368 bp, Homo sapiens
ttttctttcctaagatgggccctggaagggacacccttcgaagcccaaagaatcaaagctactgcaaagcactgctgagagttttgaaagaaatatgaagaaactacatcacgcctggggcgataggctgagatcttcccaaacaggtcagcagttggtctctaaaatattcctgttgccaaggaggcaatgacatcttgtgtaaatcaaaaactaaaaccctaagatatctcatttccattttaaatgcttgggggctaaatatggatgtctagcactcgagaagttcctgtgggattgatttttttcccatcttctctgagccctttgctgagtgtgataagcaggactgcatttcattatcaacc

SEQ ID NO: 257907 - DNA, 462 bp, Homo sapiens
ctggcaagcgcaggctgctacagtatgagatgtaatctgccaaataccacagaatgcaagattttacggattttgaaagaagcaagtgatgattctgtggccacatcaggagagcatgttttctgcatcaataaatctgtgccgaatatgaataaaaaaaaaacccacttggttctacctcaagggctgcttttcaccattgtcccacacataagccagggctggaaaagtacaagagacccggccaggcttgctctcagatctctttgaagtcccccacctgttttcctagctacttggaggccacgatggacttacatttaaactatattagacctcatgcctcagagataggccactgctaagcagcctgagcatttatttaccaattaacttagtccggcattttgagaggtagtgggagagacacggacgcattcaaatgactccccttgagatgtc

SEQ ID NO: 257908 - DNA, 224 bp, Homo sapiens
tatcccaacacttagcatctttataaacacttacgatctcatgcagtgtctgagagtcaggaatccagctgcaggttagctgggtggttctggctcacggtctctggagaagctgcactcaagctctgaaccagggcttctgtcattttgaggcttaactgggagagagaatctgctccaggctcattcacatggtggttagtcggccttgctatgtgttttct

SEQ ID NO: 257909 - DNA, 436 bp, Homo sapiens
aacagtcactgagtgaggcttacagagcgacgctctgtttttcaggaaccaccccctaaaatctccacttttagcagaagactggaaacagaaacatctaaatgttacttggcactgaatgtcttggagtagtctttttggcagtctatcccttgatagactgaaatagccatctttgacaacaaaatgaataaaaagtaaggtttgacctagtcttaattttgatagatccccaaccagtaactttagtgtcacttatttcaaagaaaaggcactctttttttctgctgtgtttttctccatcccatgtctctctctctctctcttttttttttaaaggtttattgtgtttacttttattctttttttatttttgagacagggtctctgttgcccaggctggagtgcagtggggtgatcatggctcactgaaacc

SEQ ID NO: 257910 - DNA, 436 bp, Homo sapiens
ggtggcccctaagaatctgttacccgtgatcacggtgaaacagaaatagatgacagagagcaggggtggtatcttttagaagaaaataggtgaccatctatactgggccagttctatagttagcaagatgacatgggaggagagctatttttctgagctttatgtaacagatgtggttttgtataaatcacacttctgtaaactgaatcctctcttaaatgtactaacggagattgctatttaagggtatcgaatgccaatgtcttctgtgaaatgaataataatctcctaatttggccttagtggcaattcacattttccagaaaaaaatttacttacatcaaggtatacttgtctgagctgagaaactgacttcattcttcacatttccaccatctttattctttgctctcattcttcctttttgttactgttt

SEQ ID NO: 257911 - DNA, 168 bp, Homo sapiens
ccgagttattctccagcttctttgatggacacagaaactggggccctgggaaggggcctacccgggttcatgcagcttagatttcttaactcagattactatttctgccaggccatggtcctgcttgaaattccaccaaagtgagatcttcaaagctctaccaccatc

SEQ ID NO: 257912 - DNA, 467 bp, Homo sapiens
aacaattggacaagaaatatctagacttcagatgattaagtttttagaacaaggtgtataggcattggtgagtggcagacaacaagacagccaactaaaaacaaaatcaggtgtagataattagttctgacattttataatttgtgacaaaatgattttaaaataaagtttatctgtcttagtttgtatcaatgagggagatcccctgaaatgcaaccactcaatccctttgtcagtatttggacaaattaccaaaatatctagccctctaaaggctttaccctatttataaattgtagtttttggcctctgcccagattcggatgttagaaattagcctaaaatctgagtcctcattgaaacagatttaggtagactaactgctgagcctttccaattcacattgctgtaatctattaggtttcattgaatgagacacatgaggatgctataataaaaacctttga

SEQ ID NO: 257913 - DNA, 574 bp, Homo sapiens
acgcgaatagccgtgaataataatatataatgatgcattttatttacgctattgtggaggcagctatgtggagagacacatgtggcacaagatcaagggctgtcaacaaccacatgagtgagcttggaaacagactcccaagttgagcattcagatgagaccacagcccctgctgacagtttgactgcaacctttgagagtccttagccagaggcacccagttaagctgcactaaaatttttgaaccacacagattgtgagataataaatatttgtggttttatgttgtgaggttttggggtatattgccatgtggcaataaatagttaatacattatgtaggtgagaatcctattgtctgatacagtaatatgaagtattgattttcctggtgtgatgtggccattttcaaaaccaatatgtataatgtacacaccctgttgctttaccttcgtcttcaattttcagttcttgcttactcctctttccctgaccttgcacacaaaaaatcatccccactatttttgggattgatctactggcttaaaaaaaataaagctgtacttatcagatg

SEQ ID NO: 257914 - DNA, 609 bp, Homo sapiens
acgcgaatagccgtgaataataatatataatgatgcattttatttacgctattgtggaggcagctatgtggagagacacatgtggcacaagatcaagggctgtcaacaaccacatgagtgagcttggaaacagactcccaagttgagcattcagatgagaccacagcccctgctgacagtttgactgcaacctttgagagtccttagccagaggcacccagttaagctgcactaaaatttttgaaccacacagattgtgagataataaatatttgtggttttatgttgtgaggttttggggtatattgccatgtggcaataaatagttaatacattatgtaggtgagaatcctattgtctgatacagtaatatgaagtattgattttcctggtgtgatgtggccattttcaaaaccaatatgtataatgtacacaccctgttgctttaccttcgtcttcaattttcagttcttgcttactcctctttccctgaccttgcacacaaaaaatcatccccactatttttgggattgatctactggcttaaaaaaaataaagctgtacttatcagatgtaaaaaaaacaaaaaaatgggcttgttgtcctcaa

SEQ ID NO: 257915 - DNA, 748 bp, Homo sapiens
ttcactttgacactaaggcttaccaaggcaaaagcagacaaaataaaggtctttaagaacttaaatgacacggaaactttccaattgcacttcagaataatacattagtcttattgtgacaactagtccttctcatttctcactcacactttcttttttctctgcagcagaaaccacttttattaagtataaatccattctcagtttttgcagtattggccaattgaagggcatctcttcccccaaccaggacctggcccaggggctggcatgtagtggatacaatatgtttgtgtgaaatgaaagaattcaacatagcattcattttgatttactctagatcttttcattaagaaaacattaacggtacaaatgtgagataattataaggaagagaaggtgaagggataccaaataagttttttaaagttatttgtttagataaagttggtctaaaaaataacatgaaactaacaatttttcctttttttattttgagactgagtctcactgtatcgcccaggctggagtacagtggccagtcctagtggtacaatctcggctcactgcaacatctgccaccaggagtcaagtgattctcgtgcctcagcctcccaggcagctgcgattagaggtgcccgccaccacacccggctaatttttgtatttttactagagacggggtttcaccatgttggccaggctggtctcaaattcctgacctctagtgattcacccacctcagcct

SEQ ID NO: 257916 - DNA, 451 bp, Homo sapiens
aagcagagggaagatgacgatgggggaaacacaagggaaaacacagagagaagtaactttgtcacatggctagtaggtggcagggcatgggatgaggagaggctgcagagaagcctcaaagtctgaatgtgagagcagagctagagagagggtgatggaaagttgatgccccatgtgcctggaattacccttcatcaacacagggaatgagagaaggaagagcatgtccaagggatacgatagctcagctttgattatgttgaattgaggtgcctgtagctcatctaagtagagatcagtccagtaagatatacaaaattggaaatcattgatgtgcatttggtagttgaaatctaaccagaggtctttgtaattaagatgtccttggtgatttgagacatgttcaaaagagcagtgtaagatagatgctgctactgcagcggatcaaata

SEQ ID NO: 257917 - DNA, 481 bp, Homo sapiens
ctccagtccatctctacgaagatggaggccattgagctgaaactcagtgagagcccagagcctggcaggagtccagaaagccagatggctgaacatcaggtacaaatagccatgacttcagtttcctacttgattgaataaggcactgttgtgactggttggcctgtcaggcatgtgtttgagacagccaggtgactttttaaaaattttttaaccttatcagttcttccagagtaaacaagggtcctaatggtggtcatttctactactgattcagggagggatctgagaaaaagagagagagggagagagagagagacatgcagaccttgaatctaattaaagaaagctacatgcatttatgttgctttttaactttgattacacaaaatgtgtttccttagagttgccaagttattttgattttgttgtgagccattgttgtaagaataaaatatactccaaatctaccttttctcga

SEQ ID NO: 257918 - DNA, 675 bp, Homo sapiens
gtttatttgtttgtttgtttgtttatttgagatggagtttccctcttgttgcccaggctggagtgcagtggcgagatctcggctcactgcaacctccgcctcctgggttcaagcgattctcttgcctcagtcaccctagtagctgggattacaggcggatgccacgacacctggctaatttttgtttttgtttttgtttttgtttttgagacggagtcttgctctgtcgcccaggccggagtgcagtggcatgatctcagctcactgcaacctcctcctctcaggttcaagcaagtctcctgcctcagcctcccgagtagctaggaccgcaggcgtgtgccaccacgcccagctaattttttgtatttttagtatagacagagtttcaccatgttagccaggatggtttccatctcctgacctcgtgatctaccagccttggcctcccaaagtgctgggattacaggcatgagccactgtgcctggctgagacaaatgttttaacactttggtgtatatccttctacacatatcaaaaatgtgataatatacatacaatttttaacatactgtttacaaacttaacctatcatagacatattaccttgtcggtaaatatagatctacactattttaaattattgcatactttagatgtgccatgctagccccttg

SEQ ID NO: 257919 - DNA, 216 bp, Homo sapiens
acctgcctgttgagagtgcatgtcccagaaagcagccccccttcctgctggacctgcaaggtatgccacccaacttctctctgggaactgtcagtaataaaactgcttctgttattttatgtgttttgttgtcttgcttcctctgtgttttatccgaccaacacacctgaacctaacttctttccaagttagggctctgttagacagtgactatat

SEQ ID NO: 257920 - DNA, 196 bp, Homo sapiens
ttgttcatggaagagccagttttgtttattcatatacaaagtgagtaggcgaagctgagtggggtggcatgtgcctatagtcccagctacttggaaggctgaggcctgaggatcccttaagcctaggagttcaaggttacagctatgagctatgatcacaccactgcctacgcaacagagcaagaccctgtctcga

SEQ ID NO: 257921 - DNA, 651 bp, Homo sapiens
ggtctgggacgccgagagcccggcaacacctcagcccgagcccggcgaggtctctgggctcctggagcgaggtgagcgccccaggccgcggtcctgcgtacgccgggacagccatggcgactgggtcctgctccttcccggccggactgacgcggcctcccaggacccgagcacgtgcgtgatgggcgaggagggcctaggccgggcagaccagtgcagggagccgattcttcccggctcaccgtagacacaggagagagatggcctctccttaagcccaggagaacagaggaaacattaggaaacgcactgagaaacgaaattggcttgatttgtagttcacttatttgtagatcactgacagaagaccgaaaagctcgtagtaaaggcccctctaaatttagagagaggtggcatctcactacgtggcctaggctgatctccctctcctggactcacatgatcctcccaccttggcccttcaacgtgctgagatcgcaggtgtgagccaccacacccggccctgataaaactcatcagtgctttgaaacaagcagctctgaaccaaagaaatcatttgattcaagtaaccattggatcttcccaaggcaatggtgaaagaaaagaaaaaagcagacaaaaaaggggaga

SEQ ID NO: 257922 - DNA, 531 bp, Homo sapiens
ggtctgggacgccgagagcccggcaacacctcagcccgagcccggcgaggtctctgggctcctggagcgaggtgagcgccccaggccgcggtcctgcgtacgccgggacagccatggcgactgggtcctgctccttcccggccggactgacgcggcctcccaggacccgagcacgtgcgtgatgggcgaggagggcctaggccgggcagaccagtgcagggagccgattcttcccggctcaccgtagacacaggagagagatggcctctccttaagcccaggagaacagaggaaacattaggaaacgcactgagaaacgaaattggcttgatttgtagttcacttatttgtagatcactgacagaagaccgaaaagctcgtagtaaaggcccctctaaatttagagataaaactcatcagtgctttgaaacaagcagctctgaaccaaagaaatcatttgattcaagtaaccattggatcttcccaaggcaatggtgaaagaaaagaaaaaagcagacaaaaaaggggaga

SEQ ID NO: 257923 - DNA, 542 bp, Homo sapiens
cagcctgaatttgggagactcaagtgcagttggccaagaatgacagtcatgctttttatccacaggggattaggtgtgttctgatcaagctgagagccttttattctcttttccagatccttcccttgctactggcaagatgtatgcatattccggatcccaggtctgttgtcccctcatgccatgtggaagtttcccaagactatagagaaatgtttagatgtgcagatgccacacactaattcttagagtttctacggccattatgactaaagggatttttgtatactgtttaattttttggttgggtctttgtttcacttttttttctaattgagggggaattttaaattgtaaccgttgttacaccgtgagcagacacagtaccttcaagacaacttctccatccttttggttttataatatgtgcatcctaaggcacccttttcaaagttacttaggtgtcaacctcagtgtacaattctacaatgagtagaacctgcatcacagtgaaataaactggtccagctggtatgattcga

SEQ ID NO: 257924 - DNA, 469 bp, Homo sapiens
cagtggggagggggcttcctggtcacaggtagataagagacaaatggttgcattcttctgagtttctgattagcctctccaaaagaggcaatcggatatgcatttatctcagtgagcagaggggtgactttgaatagaaaggaaggaggcaggtttgccctaagcagttcctagcttgacttttccctttagcttagtgacttgggggcctcaagatttattttcctttcacaaaggcaatatttttccaagttaagtatattgtaacaaatttacagttacactagcagtatttattaaaaaacacatttaacataaaaaggtgggaagaacttaatctgcataagggatgatgctctgaattgaataaaattggctctactaaaaaactcaccaaattgcccctttgtgaaccaatgaaaactttatgatgggtagtaaaatttacttccactatgtagaatgactt

SEQ ID NO: 257925 - DNA, 544 bp, Homo sapiens
tctctctctttctgggactaactggttagactgcggctttgcaggccttcttcccacaagtccttgggaaaaggctgaccatgccagccagccagggtggaatcttctagcagtggcaggtgtctccctgccacatctgcccgtttacctggcccggagcttcaagccaccagcactagtttacctaccgcctcccacactggcctctctgaggactttgccccaaagcacgggagggcacagtgggcagaggtgtgtgtggagggccctaaaggccccaacgtgggaagggaagatgggaggatttctccaggatcacagttgtggcagggcagggcagggctccccacagtgcaacaggcttcctgactggctccaaccacgctcctggggggacactcagggcccagagaactcagcaaagttcccctgacttcactgtgcagccaactccactgcaggctgcgtggcgagttgggggaacagcccaagcgggtctgcatccatccaaccttgggcccaagcgcagctggttagcggccgc

SEQ ID NO: 257926 - DNA, 422 bp, Homo sapiens
cgtcgacaaatgataggttttctccctgtgaagcaaaccacttttatttcttaggccatttatccctccttctgagtatcacttataccaatcagcattttctttggttttcgatctgccttcaaactacatcctcaaattgtagcataaatatttcccagttaagtggagtggggctaaaaagaaacaaaggtgacaaaggactaattcagcttgggacatgggagaatggtaatgccatttacccacatggtgtgtagggaaagggaggtaatcaggaaattgttcagtaagctgaaaagtttggttttaggtgcactgggtttcttcacatgcatgtctggtctttgggagacagccaaataaaggatccctacagacagcaaaagattcaggcctggggctttggtgagtgtcgacgc

SEQ ID NO: 257927 - DNA, 432 bp, Homo sapiens
agcatctttagtcgatatttagacagtgaaaaattaatcagtcatgacctctccgatccttcagaacacacccttaggtcactgcctcattaagaccttcaaatcatttatcgaattttattcaggaaatatctttaccttttaaagtaggatgcatgaggtaagaggatgttcctccccagagcaaaaattggcaccattttagggtttttttgtgtgtgcttttaaaaaaatttactttttactttagattcaggggatacttgtgcaggtttgttaaatgggtttattgtgtaatgctgagatttgggcttctaatgatcccattgcccaagtagcaaacatagtacctaatagaatcaataggtagtttttcaactcttgtccctcttcccccctccccccttttggaatctccactgtttattgttc

SEQ ID NO: 257928 - DNA, 557 bp, Homo sapiens
tgagccagttttcattctttctgataaatctgatatggctggttggccagacaatcacaagccattccattgctcagatttattcctgaaagaaaataaaaaggcatcgatccaagatcactggcacatcttaaaagccttgactccaaggccaaacctttccacagagaagtccctcttaccctttttctttctttcttttcccctcttgaccaaggaaggaaggtggaccactgctatttaaaaaatgctagtgaggcaatgaattgtgctctttctaagtactcttggaagcttgattagagccaccttgagattaatggctatgcacagtgcatattttagacaataaattgaattaggatggcttaaacattgcaatgctttaaagcggtattatttttgtgttatatcaagctggttattaggaaaagttaacatgttcttaaaaatagccataagttttggctttatattatagtgttctgctactgttggatatccatgtatagtttgtaagtgcctaaaacataaatgaaataaatgatcaaaacgga

SEQ ID NO: 257929 - DNA, 721 bp, Homo sapiens
gacttctagaaatactaagtcagctctgcaaggttctatgatacaagatcaacaaacaaaagccaagcatgtttctatgtaccaacaatcaatatctgaaaatacaagaaaaacataatatcatttacaatcactccaacaaaaatgaaatactttagctgtaaatccaacaaaacatgcacaggatctctatgctgaaaactacaaattgctaaaagcaatcagagaaaatctaaggaaatggagaggcatactatgttcatgaattgaaagaccaaacatagtgaagataaagactttccctaaattgatctatacatttaattcaattcttgttaaaataacagcatgtttatttatagacactgagagactcattctgaatttttatggaaaagcagaggaccaggaagagctaaaacaaatctgaaaaaatacatccataaaagtgggaagaatcactctacatgatgctaagagttactgtacaggtattagagtcaccagtttgttgttggtggaggaataagcacagtgatcaatgggacagaatagcaaatgaaagatgcaaagaaacatgcccaattaatttttaacaatatgcccacatttccaaaaatggctttgggaacaactggacaactacaagccacaaaaaatgaacgttgatctaaatctcataccttataccaaaaataaccccaaatagatagtagagttc

SEQ ID NO: 257930 - DNA, 143 bp, Homo sapiens
catctccacttctgaacctctaaaatcacaggtcacagtacttgctacagttgcgggggtatcattctttcttctaggttagcaatacagacagtatgttaatctctgggaaacgcattcagcagaacatcagtcatcaaaaa

SEQ ID NO: 257931 - DNA, 525 bp, Homo sapiens
cagcctgatacaggcctgtagcctcttccggccgtgtgtgctggggaagccccaggaaacgcacatgcccacacagggagccaagtcgtagcatttgggccttgatctaccttttctgcatcaatacactcttgagcctttgaaaaaagaacgtttcccactaaaaagaaaatgtggatttttaaaatagggactcttcctaggggaaaaaggggggctgggagtgatagagggtttaaaaaataaacaccttcaaactaacttcttcgaacccttttattcactccctgacgactttgtgctggggttggggtaactgaaccgcttatttctgtttaattgcattcaggctggatcttagaagacttttatccttccaccatctctctcagaggaatgagcggggaggttggatttactggtgactgattttctttcatgggccaaggaactgaaagagaatgtgaagcaaggttgtgtcttgcgcatggttaaaaataaagcattgtcctgcttcctaagact

SEQ ID NO: 257932 - DNA, 706 bp, Homo sapiens
catttaatgttctacagaagaaaagaacaaacagagcagggaggcagatgtggccacatactggatctacacttaaaacagtgaatggctgctacccccacctcctgcagtaggaacaggaagaaaggaaggatcacctatagaaaactcaccctgaaaagatgtggagacaggactcaaggaggtcccatttccaaatggaagaagtaaaattttaacaggatgaagtctttgacccgaacctaaatacagaccagaattctgagcccaaaaactatctccagcatccggagaagaagcatcatgaaaggggaggagagagctgtttatatataaaataagttgaatttgcaagaaagaaccgactgtctttttctttaaaaattgtaggtagtatcaaagtttttctcctctttacagataaaaacaaaaaggctaacggaatgcagtcgaccgagaactagtttcttacatttccattgagggtatctttctctagatctgtcatttttcagaattttccaagtaataaagtcacaggcttttttgttaggtggctggaaagagaaatgtatttgtcattctgtctgatcttccaaagcatttttcagtgttgtttttgttgctgttatcttgttgaattttttatcagactattattggtatcaccaataaagaggatgttgaattatgtttctaattccaa

SEQ ID NO: 257933 - DNA, 136 bp, Homo sapiens
attgtttaatcctgtggtatagtagaaagaacagctttgaaatttgataggcctagctttcaatgtaagttctgccacttctggctgagtttcactggataagtgatttaacctttctgtaaaatgggcataataa

SEQ ID NO: 257934 - DNA, 816 bp, Homo sapiens
tctcgggacgcgcgcgattgtgttggtaccgggaatcgcgagccgcgtcgactttccttatgtgtctttgatgatgctaatacctgtctggaattcctttcctccccaattcctattgaattttcaaaatataactcactcctgaggggtcttggaataggtgactttagagcaaattccattcctctgtgtatatttccatcatagtaaccactgaattgaaactgttggcttgtttttctctcccataagactaaaagcaccttgagagcaagggtcatggtctgagttttttcgtatattcttttaaagcacaatattcagcacagagtagatgctcacatatttattgaattgaactgaagcagcttaccttggccttccagcatgcttaaatccttattctccatctattctccttcctcatttaatgtagaatatttcttttcatcttctctttattgtagtatacaagggtttcatcttttgattagtttggatttgtcagctggcttttagtgcagtgataaattccaattacattgccaagcggagaccaggatggacgcaagttagcttcgttggatagtttatatggctagtgatagcctgtaatgatactgtttctttttcatttattcagtgtgcctgaatcaagtgttatgctttctttaccaaataacgaaacttgccaggcatagtggttcacacctgcagtgccaactctttgggaggctgaggatcacttgagcccaggagttcgagaccaccctgggcaacatggcgagaccttgtctctataaagaaaaagaaaaa

SEQ ID NO: 257935 - DNA, 346 bp, Homo sapiens
tctgtatctcactgctgctgtgtgctagttcttcagctctctcaggcactacgtctttatgtagaaatggagtaggactcggtttagagggcagtgtgaggaataaatgagtccatatgaggaaataaccttgcacagtgcctaagttgagatcagggctcaataactacaagctaggttttttttttctatttctatcagtttctatgatgtgtcatagttttatttgttcttcctgtgtgtgcttgttttgatttgtcattattgtacattttgttattgttattattgctgttacccaaataaatgtataattatgaggctattggaaaagttagaaaatgaa

SEQ ID NO: 257936 - DNA, 465 bp, Homo sapiens
ccaccttggcctcccaaagtgctgggattacaggcatgagccacctcacctggtcgatgtggaaggactcttaaagcctggctggggctacgggcctggtggcagtaacagcatccaccttcgttatctttttaaggccagtctgtttttctttttagttgtaacctctgtgcctcacatcgtgtgcttcaccaggagtgtgttatgccactctgccagcctcttctaaggccgcagcacacttcccacttgttggaaggggaactggggaaggacacagcctactgaccccatggccccatttatccccccatccacccctccatctgacagcgtacactgagcatctactatgtgctaggctctaaagaatacagacagaacaagaacaaggcagagacgtttccagtcctcatggcacttccattccaatggagaaagtctggcaataaacaaggtgtgtac

SEQ ID NO: 257937 - DNA, 410 bp, Homo sapiens
gaaagcgggtgagcagctgctcagagctctctagaagtcgtcgttcagcggttctgtctgcagattgtgcagtggaaccttgcagagaagcattgggccagctgagagatttggggttcttggtttctgcattagctctacgtggtcgtgtgtctttgattcagccagtaacctttacttaacgtatttaatagtctgagtaaaatgacaagatttgatgtgtggttgtaacttcttgtggttctcaaaacctagattttaggtatgctgttaggtgaccctactgcattagtttggaaccattcttgactatcttgagctcctctggtatgacacacatatgacctaaaagtatttaaatttgaataatatattttcccgttacttcacttaatgagtgtacttcattt

SEQ ID NO: 257938 - DNA, 513 bp, Homo sapiens
aatcagaaggagtggaccttgcctaggccttgctcaaacacagtgcaaaatcatttataagacaatcagcagatctgaccattgagtagctgtatgataatagaaaggattatagattttaaaaatttgtaatagcattgttgagacagaattcacatactgtaccattcactcatttaatgttcacaattcagtggtttttaaattcagttttgcaaccatcactacaatttgagaacattttcatcacctccaaaaagaaacctcatacctgtcagcagtcatcccccctttcttcccaccctagtccctgacaaccactcatcttctttctatctctaggtttgcctattctggacatttcatatgaatgaaatcatacaatatgtgaccttttgtgactggtttcttctgcttcgcgtaatgttttttgatgctattgtaaatgaaacggccttaatttcatctttggattgttgactgctagtgtatagaaatacaattgatttttgt

SEQ ID NO: 257939 - DNA, 425 bp, Homo sapiens
ataatttcaaaatcctttcagtcaggcaaatttttacactgagtactttttatttggttttaaaacctaatgatctatacgttgctgaacagtttgttctaccctctctactctttcatattaaattgaattaaataaacaagacacatcaatgaaaaatccaaatgtcaaaatggctgatttttagctccctttggctagaaaatatcagtccatggactccttccaggcgtgcattgccagggcattctgtactgaagcagtgagaagtcttcaaatccatctacaaaacactccagaaagcatctcttaactgaggatgtacagaaagacagtacaaactaaagcatgtgtgtaaagatcgggctcagaaatccttttaaaatctagaagtctaagtgctcatattccaagcacgaaggtgt

SEQ ID NO: 257940 - DNA, 472 bp, Homo sapiens
cctcacccgggcaaggagcaccgtgggccctgtcctccagccctcgcagagcctggctgctggcacatgactctccttgtttcctttttaaaaatacctctctgttcctaaactctactcttgagggagatgacagaggtgccgaggtctgaggcaggcaaggctcaatgcacgcaccactcgcagtaccccccccgcccccagaagagcctccacacctccagggtcatgaagtgctagcagaacctccagcccccagggaaagcctgtatttcagaaaaggggccctggtaattatctgggcaaacatcatctcattggggcctggaaggcaacctcctcaacacagttctgattagtaccaggcaaagttcatactcttaagtgctggtccttaacctgaaatctcctaaaaggacaatgaagtgttgcatggatctcctccgctgaaatattaacctgtgcactgaaa

SEQ ID NO: 257941 - DNA, 387 bp, Homo sapiens
tgagatataacctacagttaatttttttaacagaagtttaagtagctcatgttccaattaccactcaatttcttactttggggatatttataagctgattttaaaaggtcatgattagaggtagcctaaatattactggttttaaaataacacaattcttagtttcataaatgtttgttctcttgtctgttagtgtactgatcgaaacatttgaatgcaaaagtaccttcaaagatgttgtcaaaataaacttggaataagactgcaaaaattttgatggagcaactgccagtaatgtatgctgtatgtaaaagctaatttttgctctgtttagaagtttgatgggattaaagaaacattatgggtgacaaagataatgataacttc

SEQ ID NO: 257942 - DNA, 436 bp, Homo sapiens
tggagacccattagaggcattttgcaacccactaataagtttcgaaacccgtggtttgaaaagcactaagcacattatcactcattcagtcaccaaattcttgctgtgccagatactgtacagggcacaggggacacaacactggaaaggacaccgtctctgcccgccgggagcccactgtctgcagtgaaaaacggtgtctcccacaagctgacaaatgctacgacaatgatcctgccctctgtcaataccctttctccgctctctggatagctttttccctaagacgagtggaaaattctcaaacggtttctcagcacagagcctggtctcacaggggcctcctgagggagctcgagttttagatgatggaggcagatcaacagtgaagagatcaagagaggaaatgcagaaactggttctagacctggcactg

SEQ ID NO: 257943 - DNA, 671 bp, Homo sapiens
gcaattcctttgcacagagagaatatgtacatatattttgtcccatcaaagatgacttcaaaagtcctcctccaatttgctttgagaaaaaatagcctttaagctgagattaagaagggaaaaacttccgataaaagggagtatttttcaaaaacttgcaagtgactgcaaagccagttaacacagaaaaccttgtcaccttaagtatgccatttgttatcacacatgccggaatacatctattcatcttcttttaattgcttagctgcgctagaaatacaaagcagctcactgaagcagagactgtgaaagaatattttgtcatggaaactttgaaaacatttcaaagcaggagctcttctctggttaaatgaaaccttctagctgtttcttgggcattgtgtttggctgataagagtctagaacaggtcttctctctgtgtggcttttgcttatatcttcttgtgctcacggatggctgataaaattcctgcaattttccaagtagagtttagaagagtagcaggttattctttcttcctcttctcttgcaaaatgacaagtgagatgatccctgagtaaggaggtaaatactggttaccactctgtgtgtagccaagatgaatcttggggcatttttgaacccatcctccctctgaagaattttgctg

SEQ ID NO: 257944 - DNA, 365 bp, Homo sapiens
gaggttgcagtcagccgagatcgcaccaatgcacttcagccagcctgggtgacagagtgagaccctgtttcaaaaataaataaataaataaaatagaattctgaattttatttttaataattattttctaaaaagaatgtcttgttttctggagctgttgaatttattgaattgacaaaaattatgtacaagagggtacaacatgatgagattgaagtatgtatacattacaaaatggctagatcaagctaaataacatatcacctcccagacttatttttttatggtgagaacacttaaaaaatctactctcttagtgatttccaagtgtatgatatgttgttattaactataggtaccatgtt

SEQ ID NO: 257945 - DNA, 491 bp, Homo sapiens
acgctgctccagagaactctgctctacattgtcagaaaccagctttcaacttgggttccaggatgaagacatgtggaacagaacccgaacttgaacctcagctttggcatccggcttaacctttgccaaggccagcctgcagaacccagccaggagtagctaaaccacagtcaacctgcaaatccatgaaggatatactcagagaagaatcacgagtgccaagagagaccatgaggcaaactgctctccattgaaggtataccagcctacccttcgtgagctaaacacaacctcactcttgccagcattgtaactgactttttaaatctagtaatctgcacttctttgatgccatgaagtcagtattattttcatgtcttggccatcttaagttcctgttttgtgaatattctattcctattccttgttataaaggttttcagagttaagacatgttaaatagaaattattttggaaggttctgtgattca

SEQ ID NO: 257946 - DNA, 396 bp, Homo sapiens
tgttttgaccaatagactgtgaggattaacagtcatattcatattgacttgaagcactgagagacctggcaagtttctgctctccaccagcagagtatgctccaggtagctgcttttccctcttcagcttgggttccaggatgaagacatgtggaacagaacccgaacttgaacctcagctttggcatccggcttaacctttgccaaggccagcctgcagaacccagccaggagtagctaaaccacagtcaacctgcaaatccatgaaggtgaaatacatatttgtgtatataacccactgcggtttggagacaattatgcaacattatcacaacaaaaaacccaatacacccttagaaccatcctgatccacaaattacttcatggagtcttacc

SEQ ID NO: 257947 - DNA, 332 bp, Homo sapiens
aagggtgaggtgtgaggggtcccgtggcccggctcggggtcacttcgccggcagtgacatttttctgggtgccctgcaaggccctcgggcgacttgcctgggagtgctgctcgccaggactacgagcgagcccatgtttgcgcggctctgacccagcccttagtccgcgaggatccccggcggcccggccgtggctgctcctgcagtttctaagagatgggcgggagcaggtgggctctgagtggaggtgagggggtcaggacattttctgctgccattccggcgtctggcacggtgggctgagacttgcgccgcccctttttgggcagggg

SEQ ID NO: 257948 - DNA, 470 bp, Homo sapiens
cccttgcagtggacttgatgaaagcatctcacggaagaaagagctagtgattgtgcatcaaccacttgcaatgtcatttcacggctgcacctgtcaggcaagacacttccacactctgatctcacccctttctctcacctccccaatcctggatgggaccaagccaacagctatggagtgggggtagggccaagacagaataagagaagacactggccatgtcaccccccaactatatgtgttccagactaaggcttgcccaggctgaaggagggaaggtgctttaaactggggaggacattggagttttaatacttggtcagaaagactctcaattactgaaatgagactcttattgttgtgaaaagggaacaggaaagcgatagggcttgctcaggacaagaaataacttatctaggaggaggacttcaaagggcagtgggaaaataaacctgtattctgcttacaaa

SEQ ID NO: 257949 - DNA, 178 bp, Homo sapiens
ggaaagaaatttttttgtgtaagatataagtcttgataaggcttcagtagcaatctgaaaatctcagcagctgaaagcagcaaagttgctttcttgctcaagctaccatgtccaccacaggttggtaaaggggctttgttcattgtggttcactgcgttccagcctagactccatctc

SEQ ID NO: 257950 - DNA, 436 bp, Homo sapiens
aaggagtttgctcagggccacctgagaccacggtggccttcttcccttgaggtttttccaacagtcactcattcgtggaccaaaagcaggccttgcgggaagcttgattctaagggcagtgaagacaggagagcctggggttgagactacaaagcagtgtgagcactcaaggaacctcaagtgaggcaaaggaaagcctgggagaactaggccagggaaggggaattacctgtggctttagggaaagggaacggaagaaggtgcagcttggcagaggggagggcggggagcgtgccgcgtttgccaggcttctcttaccaccctgagttttgctgcttctctcacagagtgacaagtttgatatgaggctccattagataaggggtctggtctggagctgtttaattattctttgatgtgtttggcagattttgta

SEQ ID NO: 257951 - DNA, 533 bp, Homo sapiens
agtggggtcaaatgggatttagaactgcattttcaaacctggtaccttaattctattctaatgaggtacatatttaaaggtaaaattcattaaaattaaaaattcaatctaaaaatttagtttcttagtctcatttcatgtgcttaacagttaccaaactagacaacattggtttataaaaattaccaataattacagtaagtcttgccttagattaaaagctgctctgatcctacttacaaagattaaaagcaagtctaaaagcaacaaactgttttcaaataatatcattatatttcatgaaaaaataaaatatatatattagaatacaaaatattcagcaccccaaaaagtaaaatttacattgtctggcatccaagaaaattctccaggcaaataaagaagcgagaacatacaatccataaggaagagaaaaatagtacaaacagactactatgttcaagaaagctgaagaaaacctatacactttaagtaaggacaaggagatataaaacgtctaacagatcagacac

SEQ ID NO: 257952 - DNA, 108 bp, Homo sapiens
  misc_feature (39)..(39): n is a, c, g, or t
gggtcgacacggccgtgtattactgtgcgagagatccgnggatactatggttcagggagtatcgcttttgatatctggggccaagggacaatggtcaccgtctcttca

SEQ ID NO: 257953 - DNA, 116 bp, Homo sapiens
  misc_feature (116)..(116): n is a, c, g, or t
gggtcgacacggccgtgtattactgtgcgagagatagtttaacagtagagatggctacaattccttacaacactactggggccagggaaccctggtcaccgtctcctcagggagtn

SEQ ID NO: 257954 - DNA, 80 bp, Homo sapiens
  misc_feature (80)..(80): n is a, c, g, or t
gggtcgacacggccgtgtattactgtgcgagagatactactggggccagggaaccctggtcaccgtctcctcagggagtn

SEQ ID NO: 257955 - DNA, 384 bp, Homo sapiens
acagctgcgggtctgagcagaagggcccttaagtactgaacatgctaggactatgaccaggaaatcttaactaaccctgaaagtcgttggctaaatgtaatcattggcactgttctattgtggcgcagtagataattagttctcatctgtggttgtattcttatcagagagttatggagggacctgttatcaccaatcattatgttaatagagataatttatgtgcagctcaaatatcagtgcttggctccctaaggtaagcactctcaataggctctattagtttagtccataagatttattttttctaaccacatttcttttccatgtggtatgtggtgaaaaacagagaaacaataaaacccaagaagtcttaaaaaaaaa

SEQ ID NO: 257956 - DNA, 752 bp, Homo sapiens
tggggcccacccctagagattatgattcaataggcctgcggtagggcccaagaatctgccttttgagcaagttccaaggtgatggtgacactgctagtctgaagccaacatttgagagcttctgatctgtatcagaattattctggctttttcatggttttcttgctttgtgtggttaaagtaatgccacctactggacataattgagaagaactctcagtagaaacttaaaacatttttttttaaatgattaaattctaagggtcctgtcgagagcttgaaaattcttgtccttttgacaaattgggaacagacagagtatttttattgtgacacaagaatatcaacttgtttgtaggatttcttttttaagtaaagaaaacattaaaaatattctcccttctgtttatagttaaatgcataagagcaatactgacactaagtgctgccaattacttgttgtactctcaatttcatgaaagaaaggaacatatcttggtacaataagtgcaaaaattctttctctttggtcctatgtattcatctagacaatgagaaaaggtgagataatctcaacaagtagtctctaatgttctgtgattctgcccaaaagacatttcacttagcttaacctcagaaggagaaagaatctcatttagaatgaaagcctgttctctgacattatacaactctttcattttataaatactaacctatgtgactcttacccctgcagtcatattctgaggtac

SEQ ID NO: 257957 - DNA, 256 bp, Homo sapiens
cagtctatgttttagcaactgttttttaacgtttggttgtgacattttttaacaacagccattgttcaattgttaaactatgtttggatttgaggtctgaatgagctgaattcaaaatatgggactttttattagaaaccctggtaaagtggacactggggaaaaagcccaagatttcatgtgtttgatttattgactatgtgcgtcaacagcctgcttttaattctcagagtaaaataaaaatactcagaatcta

SEQ ID NO: 257958 - DNA, 513 bp, Homo sapiens
tttgtttctttctcttgggggttggctgaatgtattagtttcctggggctgtcataacaaatgactgcaaactgggtggtttaaaaccacagaaatttattatctcacagttctggaggcaagaggtctgaaattcagcagagtcacactccctccacaactattacggggacatctgttccctgcctcttccagattccaatgacttgtgggtactccttggatttcttagcttttggtcatgtcactccaattcttgcctgtaccttcacctggctttttcctgtatgtgtcccaaatctccctctgcctttctaaggtgatttgtcattggatttatggcccacccagataatacaggatggtatcctcatcttaagatccttagttacatttgcaaagaccatttttccaattaagataacatttataacattcacatattctgagaattaggacatgagcatagcatttggggggccaccatttaacccactaatggaacttcttgaa

SEQ ID NO: 257959 - DNA, 244 bp, Homo sapiens
gcagtggcccctgggagtcttcatggctcctctggcagaaagtacctggaggcatcagctcatggacctggagcatatcagcaaggaacagagataaactgtaccgcatcaccaccctggcactactcatgagaaactttcccaaccattatgcttggttgacttggccggaaaggagttaacacacaacatgtgaggagtacactgagtagggagctgtgttcttgggtgacctgtgggtatc

SEQ ID NO: 257960 - DNA, 512 bp, Homo sapiens
acacagtctccaccagcccacctgcttttatggtcaacagccctacctgaatttccaacattgccttttgacccaagaaacacctatcacctgaaatctagggttccagacaggcatcaacaggaaaccactctcttcaatgccctgtcttttctggcccacctaccactgcttctgcagtcacctccactatagtaagcagaccctcttcagacttggcatccaagcctgccttttactctgatgaaatcaacatggataccatgcccatttccccatctgttatcttcctgtctctccctgcaatgttaacagctgtttccctttgaagaacctggcagcccccagaaatccttcctacttaacctctactgcagccctggaacccaatgacagcaccactcaggcagcttttgggaatttgactcccccatgtccacctttggcatctgctatggtttgaatgtgtcaaccaaatttcgtgtattaaaaactcaatccccaaattcata

SEQ ID NO: 257961 - DNA, 691 bp, Homo sapiens
ttcttagagcttgccatcacaccacacggggtcatttacttatcacctactccgcgctagagtactatgctaagtgcggaggacgcaaaaattaatgtcaaagataatccttgttcacagtattctgtctagcttaagaagagttcttagttgaatgaaagctaattctaacaacttgtgtgcacttcttttgaataaaaaccatcaacttatttgaattcttaagtttcctcctaaactccaacatttcaggaggaagaggtcacattctagtcatctttgcaatctcaaacccaaaggaagcctaacttggtacagtgcatggcacattcaatgtctgttgaatacaagtaaagctcatactacctagtctatttttcagtatctcttgagttaatgacctggttaacaagtcagagtcacagtcccaagggcaacaactttttaaaggctcccctaacgtacttcaggatccctgactgagagtggctgactatggcagtatatgggcatactaatcactggagaaataatagcgagaaataaccaaggaaaagcactactctccaaaaacattaaaaaaaaaaaacaactgaacaactagtaagaaagaacgctggatctgagcaccctgtaagtcgcttccccgtgggccgggtaaaggttttaaaacccgccgcctccaggaaga

SEQ ID NO: 257962 - DNA, 315 bp, Homo sapiens
gtatctcgttcgaatgagcgattctctaataatacatgatgttgagcatatttcattcgcttatttgccatcaatatattttcctcagtgaaatgtctgttcagatctcctgcccattttttaactggattatttatcttttttttttctttttgagttttaagagttctgtggcgtgctcataccagttctttattggatacatgttttgtaaatattgtctcccagtcttggcttgttttttaaatattaactatgactttcttagagcagaagttttaatttttattaaattcaacttataacattcttcta

SEQ ID NO: 257963 - DNA, 332 bp, Homo sapiens
ctgcctttgggactctctcaaaggtctagccttctgttgcgttttagacagattggcatgaccaacttattctccatctgaagtcaccttagtgtgtatgtgaaatctgtctctaccatgactttgggagactgtagaggccaaatactaaaaagataacaatggtagagtggtagcaaatcaagaaatggcaatcttcaagcagaagttagctaaccatatgtatccctgaatgctgtagaatgagtagagatctttattgatctcttaggtatcttccaagcataaacactgattttaattccttcaaagtaacacgtggaacgccaaaa

SEQ ID NO: 257964 - DNA, 364 bp, Homo sapiens
agggttggtgcctttctggtgtttgagagtgaagcaccctcaaatgggagtgtctgatgacacctgggagaactgggaggcagggagaccaggacaggtgagcccatttctgccaatgggctggtttttgtcccctcaggccaaaccctttcttcaaccagagcagccaggcaaggcttcccagggcagggcagagcagaccctaatatgagctaggttcccctagtgctgatcagtttcctgtatgtagggaaggaagaggatgtcagaggcccatgggccagagagctcacccactctacccttgctccaggtagcgcccctcttggaaatccccgcccccaaacatccttcatccctgaga

SEQ ID NO: 257965 - DNA, 526 bp, Homo sapiens
gagtgtataccctgagttcactcagtcctatttatgctgagttgcctcaggtgccttggtcctatccaaggacagcagtgtgatctctgttttggtacagtgtatttttcttagcctgcaacagacaacttaactatactggctatggttttacagcattatttacctccatgattggtagaatgccttctctgctcactcatctggtttacagtaggccaggttggagttatcacagtagagcaggttaagtgtggtgcagagagttggattttcaaggttagcttgaacttttattactcacagagtggtagttggtttaattagaaaactactcctttgtgggccagttagttttgctttgttctctggccacagactttaccttatgtcaggcacatgatttcaaagatctgcatctatatcaggggtcagcaagggacagcctgcagaccaaagccacccgcagcctccttttgtgtggctggctaggtaagattgacttttaattttataaaggacttta

SEQ ID NO: 257966 - DNA, 430 bp, Homo sapiens
taaacagagttgagaaactggataaataaataaattaattaaattgtcacagggctgagagaataattttgaaaatgcaacttacacttccagtgcagaaacagatcaagggaagtactgcttgcttggtgtgagagggtataccatttggtggtgtgaatatttttttttttattctgccttaaaattgtggatttggaaagggagggcagatggagggagagaggtactggcagattaacctgtgttagaaccttttggccagttacttgtttaatgtgagtaggctttgccctattatctactcaacaaaagctccccaaaacaaaacgatgtggaataaagttacaaggctttggagtgggaataaaactcttaacagtgggtaatttttactggggagaaaaacaaggatcagagaaaatcaagt

SEQ ID NO: 257967 - DNA, 672 bp, Homo sapiens
aataaaatctttattgtaaagaaagttagaagcaagaaacattaacattttttataactacaatttgtataaaagctttctctgtgatctttagtttttctttcttcctctgaaaagctgaatagtgtttaattaaactctcaaaagtatcaagtttttgtctataaaatggcaaaactggctatgatgaaataaactgatatttgctatttctaataaaagcatacaatatatttttctttcttaccagattcaaataatatttaacgccaacatattagtccaagtcctatcatcagtcagatttatcagaaaggtatgaaaacccatgcttactataaggaccaaaatagcctaattcaatactactttgaaaacatggggatgatgttactacgtaattgttttaagtacaataaccactgatcacatttgaactctcaggatacttcaatatttcttttggacaactatgacctgtttagtaaattacccccaaatactttaatatagttttacaaatcgccccaatgccagagacccagatcaaaaagaaaataatggtatgggtcagattcacagaataagcactaacttttatgcaaactgaaaataaagattttatctaaaagttatttggggaaaataagcagactttatcaagaattagag

SEQ ID NO: 257968 - DNA, 392 bp, Homo sapiens
aattataagtttctatccaggttacctcaaagctgtttctttttggtaacatttgttattggaaataattttattgttacagtcttgtcccagtgtgtaatgacatgtgcaaaagggtattcataacagcatcaaaagaaaggggaaaagcatagcagtttatcagtagagaactggataagtgaagttaacacattgtagtggtgtatgccctctagtcattacaaaaaatgaattaggcaggtgtatctgttaagatgtagtaatgtccaggcttgacgcagtggctcacccttgtactcccagcacttcgggaggctgaggtgggcagatcacctgagcccaggagtttgagaccagcctggacaacattgcaaaaccctgtctctgca

SEQ ID NO: 257969 - DNA, 420 bp, Homo sapiens
gcagcagctccaacacatttgcattttagacaaaaagaaggaagaagagggaaggagaaaaagcagcctgccccctcatcccgagttgagttagctctctttaaagagtttttttagatgccccacccgaccacttttgtttctaattcattgcccatacctatcttcaaggaaggctggaaaagttaggactttagctggacacattgccgcccccaacaatatgggggataaaggcaaaggggaggatggatattgggtaattaattagcagtctctcccatggtatgtaaagcacctagcaaatagaaggtactacatgaataataactgttattatttaattcattcttaaagctatttgagggaggctttatcaccaaggctgctgaccagcccggcagccagtgttccctggtc

SEQ ID NO: 257970 - DNA, 297 bp, Homo sapiens
tttttttttgtattttagtaaagtcggggttgcaccctgttgcccaggctggtctcgaactcctgaggtctggcaatctacctgcctcagcctcccaaagtactgggatgacaggcgtgagccaccacacccagcttatgttattcttttacactcccaattgacctgtcatcaattgtaagacatcccaattttagggatgttaaatatgggggttgtgccttttaggattgagcccatcctatctaatacttgggcagctgatacagaatattggtgagggtatatggaattaag

SEQ ID NO: 257971 - DNA, 325 bp, Homo sapiens
gaccttaaatatattctcccaactatttgcatggctggtaagtgtaacatttgcattttctttttaaaccataataaggagaattaaaatcctatgattaagcatttaagataaaatttaagggccatggttattcattaggaaagtaccacgtacttaaaattcaatcagatttcaaatggacttctttttttctatatacaattgcatgtcatagacttgacatttctgtctatcttctgtgtctttccaacgtggtttataagattttattcacacctgtagcattttagggaaggaagaataaatttttccaagtttagta

SEQ ID NO: 257972 - DNA, 422 bp, Homo sapiens
atttaagacaagaaacagagtaatggaggactagaggaacaaaacagtcataaaacttatagaaaacaaataaaatggcacatgttaactgaccttgtcaataattacaataaatataaatgatttaaattctccaatcaagtgatgtaaagtagtaattaacataataatttaataaattaaaataataaggctttttccagaaaaaaagcatttatattcagacataataggttgaaagtaaagtgtgaaaaaatatatataatactaacaagtacgaagcaaaagctgaaatggctatagtgatattaatttaaattgactttaagagaaaaaaatgttaactacagtcaagaaaggacattttatattaatcaaagggccaatcccttaaaaatagaaattataaacgtacttgcacc

SEQ ID NO: 257973 - DNA, 262 bp, Homo sapiens
  misc_feature (11)..(11): n is a, c, g, or t
  misc_feature (67)..(67): n is a, c, g, or t
  misc_feature (72)..(72): n is a, c, g, or t
ggcgaaggctngacccagacggaacagtagcatctatctcccaggtcagggggccaaaggcgccggnccganggcaggatctaggcttacagaaataactcggttaggtattaaaaagccggggggcgggggaagaggctgtaattttatctcttcccgagtgcccctctctttacaatttgggccttacctggtgactatgtgtacttgagtcactcattgtgggccaaacaacctcaagatgcaatttctttcaaaggta

SEQ ID NO: 257974 - DNA, 138 bp, Homo sapiens
ccattgatgcctcttctctagattccgccattcgttaggagttgcaaagctgtggtattctcattctagcattgctcctttccttcttgggaatgcttctgtagagagaaactacctctctccaggatgcttttttct

SEQ ID NO: 257975 - DNA, 2765 bp, Homo sapiens
  misc_feature (49)..(49): n is a, c, g, or t
agtgcagtatctcatggaggtgtttggatgtctcttcctgtggggggtnccaaagcccatgtctcttggcattttctttcagattctatcagccctctctctttctctcctgtctctctctttcattcatacactgagtcattcagagatggcttctctccaactcggagctgcaagtaattctggatctggtcacacacacaaagtccccagagttgccaatttatctagttcatctgtgcctgttcaagatgatgtaactaaacatttaccttcagggaggtgtttccaaagaattttcatcgatatatagaaatcaagagaaaatccatactatcaccaaatcaagagaaattccatactatcaccagttggccaactttccaagtctagtgcagaaatccaaggcacctcacacctagagttcctatacctctgagactccagaggaaagaacaagacagtgcagaaggatatgttagaacccactgaaaacctagaaggttaaaaaggaagcataccctcctgacctataagaaaattttcagtctgcagggggatatccttgtggcccaagacattggtgttatcatttgactaagaggaaattatttgtggtgagctctgagtgaggattaggaccagggagatgccaagtttctatcacttacctcatgcctgtaagacaagtgttttgttccaattgatgaatggggataaaacagttcagccaatcacttatggggcaaagaatgggaatttgaagggtctggtgcctggccttgtcatacgtaaacaagagaggcatcgatgagttttatctgagtcatttgggaaaggataattcttgcagcaagccattttcctaaacacagaagaatagggggattccttaaccttcattgttctccaggatcataggtctcaggtaaaattaaaaattttcaggtcagaccactcagtctcagaaaggcaaagtaatttgccccaggtcactagtccaagatgttattctctttgaacaaatgtgtatgtccagtcacatattcttcattcattcctccccaaagcagtttttagctgttaggtatattcgatcactttagtctattttgaaaatgatatgagacgctttttaagcaaagtctacagtttcccaatgagaaaattaatcctctttcttgtctttccagttgtgagacaaactcccacacagcactttaaaaatcagttcccagctctgcactgggaacatgaactaggcctggccttcaccaagaaccgaatgaactataccaacaaattcctgctgatcccagagtcgggagactacttcatttactcccaggtcacattccgtgggatgacctctgagtgcagtgaaatcagacaagcaggccgaccaaacaagccagactccatcactgtggtcatcaccaaggtaacagacagctaccctgagccaacccagctcctcatggggaccaagtctgtatgcgaagtaggtagcaactggttccagcccatctacctcggagccatgttctccttgcaagaaggggacaagctaatggtgaacgtcagtgacatctctttggtggattacacaaaagaagataaaaccttctttggagccttcttactataggaggagagcaaatatcattatatgaaagtcctctgccaccgagttcctaattttctttgttcaaatgtaattataaccaggggttttcttggggccgggagtagggggcattccacagggacaacggtttagctatgaaatttggggccaaaatttcacacttcatgtgccttactgatgagagtactaactggaaaaaggctgaagagagcaaatatattattaagatgggttggaggattggcgagtttctaaatattaagacactgatcactaaatgaatggatgatctactcgggtcaggattgaaagagaaatatttcaacacctcctgctatacaatggtcaccagtggtccagttattgttcaatttgatcataaatttgcttcaattcaggagctttgaaggaagtccaaggaaagctctagaaaacagtataaactttcagaggcaaaatccttcaccaatttttccacatactttcatgccttgcctaaaaaaaatgaaaagagagttggtatgtctcatgaatgttcacacagaaggagttggttttcatgtcatctacagcatatgagaaaagctacctttcttttgattatgtacacagatatctaaataaggaagtatgagtttcacatgtatatcaaaaatacaacagttgcttgtattcagtagagttttcttgcccacctattttgtgctgggttctaccttaacccagaagacactatgaaaaacaagacagactccactcaaaatttatatgaacaccactagatacttcctgatcaaacatcagtcaacatactctaaagaataactccaagtcttggccaggcgcagtggctcacacctgtaatcccaacactttgggaggccaaggtgggtggatcatctaaggccgggagttcaagaccagcctgaccaacgtggagaaaccccatctctactaaaaatacaaaattagccgggcgtggtagcgcatggctgtaatcctggctactcaggaggccgaggcagaagaattgcttgaactggggaggcagaggttgcggtgagcccagatcgcgccattgcactccagcctgggtaacaagagcaaaactctgtcc

SEQ ID NO: 257976 - DNA, 557 bp, Homo sapiens
aagctattctaaaggggccatttccttcacaagtactggtggattaaatttgaacaataaaatatttaaattatgtaaaacctaatgtgagttcatgtcctttgtagggacatggatgaaattggaaatcatcattctcagtaaactatcgcaaggacaaaaaaccaaacaccgcatgttctcactcatagatgggaattgaacaatgagaacacatggacacaggaaggggaacatcacactctggggactgttgtggggtagggggaggggggagggatagcattagaagatatacctaatgctaaatgacgagttaatgggtgcagcacaccagcatggcacatgtatacatatgtaactaacctgcacattgtgcacatgtaccctaaaacttaaagtataataataattaaaaaaaagaaaatagtcttaattcaataggtagagccagcaaaaaagggcttagttagacacacattctgcaaacctcaaacctcttttactgtcatgcagctgagcttcaaatgacaacctgcctttgagttttgtaatca

SEQ ID NO: 257977 - DNA, 530 bp, Homo sapiens
ctttacaccacctttcctccactgtcttggtcttgctgaaaaccaacattactaacattactgtgcagccaccatgatttgtagctctctcatgatggagtcatctgctctgcccacatctctggaaaaagataatgggcttggccttctcccctgcccctcctgcacctcctgcacctccgacatctctcactcttgagctgagttctgcagggcaagaggaattgtccaggtttgcaaggatgtggggtgtcagaaggaaggaattttggcagaggggtgaacgagggtcaaagggtagatgatggaaacagtgtgatacatttgggacccgagggccatcaggcaagttaggaggagtggtaggaatggagagtgaagggagggagggaggcaggcactcagattactctgctgaagggttgccttgcctttgagtgataaggacctatcagggttaagttccaaagtggtgcaataagataagcatttggaaggattcttaacctctcagacccttagttccttta

SEQ ID NO: 257978 - DNA, 464 bp, Homo sapiens
ttttattacagaactcatattcagagattccagtgtgttaaatagctctaggctaatcttgggccgctctgtgctaagggcaatggttttcatcataggaaaacatttttttttttactccagagatttttttaagctctcccaagtgctcccaacttcctgtctgttcagctgcaaatatcaggcccttaatggctggagagggagagtctatttttaaagtttttactgaatatctccccactgtcaggtgctgaacgaatttggcttgtcattagatctaaaatacccacaggggtttagtgtaacttttaggtatgaaattgatcaggtttgattctgagaccgtctggtgatccttctggaaggccacttgcttgcttagctgtgtgtgagatcataggtcagggctgggctttgttttgcatgggcttttgacattaatttccacaaaagcagcctta

SEQ ID NO: 257979 - DNA, 411 bp, Homo sapiens
gtatcattctcccgacctcacagagaccttttctgaccactctttttttttaaagtacatgcctcctgccccaccttttatatgttctctgtgtttctttcagaacacttgttactatttgtaattgtattaatgtgtatttgtgtgtgtgaattttctctgactcctccaataagcaggaagtctcatgtagatagaaatgatgctagtctaattcatacatttatctccagtacctttgacacaggaagtgtttgataaatatttgttgaacgattaaataaaccattctctttcaaaaaatgcaacttgtgtattctcttttagtctgcctcgttttcttctaaagttagctagtagtaaaatgtaattgtatgttgcagtatttgttttacgaagatgttgacaatc

SEQ ID NO: 257980 - DNA, 464 bp, Homo sapiens
agaaaaatattttggaaaatattttgttgtgtttaatttgatcctgaaaagttgacttaaagaaatactgatccctaaagaaaacttacgatagcagaatctgtagtcagttaattttgatgtggcccaaaacagagtcatttaaataaaaaaaaatcctgataaaatagttttggtgaattaaaaataagagttgatgagctagaggctgggcatggtggctcacatctgtaattccagcactttggcaggccgaggcaggtggatcacttgaggccaggagttcaagacccacctggccaacatacaaaaagtagccaggcatgggtgaggcatgtctgtaataccagctactcaggaggctgaggcaggagaatggcttgaacccaggaggtggaggttgcagagagccgagatgatgccactgcactccagcctgggtgacagagcaagactctgtataa

SEQ ID NO: 257981 - DNA, 271 bp, Homo sapiens
cccccactttaatgtagttccaggattactctgcagagtgaaatccccgatgtctaatgaggcctgaattacttttaaatgtcttctcacattcgttacattcatattctctccttccggtatgaatttttaggtgttctacaaggattgagcttcgactaaaggttgcaccacaatagttacactcatagggtttctctcctgtatgaattcggtggtgctcattaagagatgaactctgactgaaggacttcccacattctttacattt

SEQ ID NO: 257982 - DNA, 617 bp, Homo sapiens
ggtaaagaaagaaagggtagatgaggtgtgccttccacctcacctaaatgaatactgtttgttttttgtttttccttccagattagactttgggggatttcttatatagaataaagggcttgattatatgtagcctctatcctggagaaaggttatgtaatttggactatgtaaaggaagttgacttctttacagcttcgtttcagtatcctaggaggtgggattcatttttctatcttaagttaacctaaaggagagatgccacttgtggtgatggaggttgttaaaaacctgaatttccctgcttcattctccagtgaagagcttaagaaaatgaggctttggatattttggcagaagtgtctgaaatgcacctgatttgccattatacccaccatcaaaagcaacatggccctttgggtattagtgcaagattagcctaagaatagagtagatctctacctggaagagggtgaaacatggctctctactgatttgggttgtactctgaaggccctttgtaatgggtttctgcctctttgtatttcacttaaaaaatcttgatggatatttggcagtctgttaagacctgcttctggcttggagcaggtattgat

SEQ ID NO: 257983 - DNA, 628 bp, Homo sapiens
gcaaaatcagcatagaagggacacagcttagggtaatgaaaaccatctatgacaaacccacagccaacattatattgaatcgggaaaagatgaagcatttcccctgaaaattgtaacaagacaaggatgcccactttcactgcttttattcagcatagtactggaagtcatagtcaaagcaatcagacaagagaaataaataaaagtcattaaattgacattatttctttaaaagaaacatagattcctctccacattttgggacagttaagtacattaagtaatttattaaatttttgttttaattatatgttaacacaagattatatgaaggacaatattgttaacatcatttctatatagttaaaaagcaatatgacacaacatgaagacaagattcttctcatactgtggcatcaattgacaactccatatgacttttgttcaaaaacgtacgtccagaagaacaatgtccctttataggacacaattataaaccatattttacttatttgctttacataaaacaatgtacataatgtatatctgaatttacttttattttaatgataaaatattgttaaaactttgtcactgttattttatatttctatggcatatggtctca

SEQ ID NO: 257984 - DNA, 139 bp, Homo sapiens
attgtgtatgtggttctcagttgacaatggaaatggccccgtaaccttttcctgttggcagcggacagggagaggctctcctggcttcctgcactctgcacacacatgtgtgtacacacccttgctcttgcccagttcc

SEQ ID NO: 257985 - DNA, 455 bp, Homo sapiens
ctttattcccatcctgccataggctactccccatgaggttcctgcaggataaatgtgcacggggggtggtggaggcaggactttggatgcagatccctgagggcctaggactgaaacccccagccctgaactgccctattcttcctatgaaccacagaaagaggcagctcctctcagcctttttctttccatgcccactgttgaatctttgccttcacttttcaaacaagcaaagctgtggctgatgccatgtcctcaaacatgacccattcctatcagcacacccctttagagggcccatcacagacaaggaagaaggcagacagggaggaatatgcttccctgactatcaaaagctgtttcttttccactggaaagaacttactggatcacttctgaaattaattattgtcattagaacagtatttaccaggcattaaatgttagacattatt

SEQ ID NO: 257986 - DNA, 399 bp, Homo sapiens
gaaaagttgtagcatattaatattttggtattatatattcctctatcactaaagaggtaggttttaacctcaatcattcctctttgccattacaaatagagatgacaaattagagtatcaaacaaaccactgtatttaatttacatgtcaagtatgagatcctatcacttatgccaagtcaggtactttaatgtgtttataaaatcattactatgaaaagtaaaagaaatggataatgtccagcattttgacttatagaaaacttgccctgaatctgcaacttctgaagggaaaatactgtcaccattgctaatctcacttgaagcttccacagatttttttgttccaaaagggaagaaaagtgaaattaaattttgaataaagttcataaagaaatgt

SEQ ID NO: 257987 - DNA, 416 bp, Homo sapiens
gcaaaaagaggtactagaaatatctttcatcaatagaattttcctaatgttcctactctgcttagaaacctacagtgatttcctattagcactcatgtgaattacaaacagctcccctgacttctctggtcctgtgacttcttgctttcatcaactcccagcaaacttaactgttggtttctacctaattgtacttcccggtttctacctcattttcaggaagggcacatcagccagtctttgctgcttccctcccttagtcatatggttgctttacctgactcctgggcacagacctagggccttctgaagttttatctttaaaagccatataaaagctcctcttaagggggagtaccaaaagggaggaatagaactctaatttaccattcagtgtctgtgacttgttgagattt

SEQ ID NO: 257988 - DNA, 421 bp, Homo sapiens
agttttagaggatgttgtgggaagttacaagtacagttggccctgtgtatccgtggattccacatctttggattcaagcaaccacagcctgaaaatattaaagaaaaatagatgtttatatctgtactgaacatatacaggcttttttttgttattccctaaacaacacagcagaatttatagagcatttacattgcattattataagtaacctagagatgatttacagtgtacgggaggatgtgcgtgggttacacgcaggcatttacaccagggacttgagcatcctggattttggtatcggggagtcctggaatcagtcacccctgtcccacaaaggaccattgtgttcaactgtttttgatcaacataatggcaaattgtatgactcaatagaataaaaaaagtgcttggaacaagt

SEQ ID NO: 257989 - DNA, 377 bp, Homo sapiens
ctgaaaatatatccctgtgccctaactatagtactatagtataaaattatactatagtataatttttttcacaattacaaaaagcaaaattcaccctaagagtttccacatttgcatatgtgaataggcttaaagattcccccacccccattactaaaatccaatttctgaaattttctcttatgagtcttagaactggacatgggagttcagaaagcctttgaccagtgctagggaaaatatgaatattgcctttgtagttttgccaacactcatattaaggaaatttggaacctagtggggttttagttcacgtaaggagcaagaaaaaacaatcccatcaaaaagtgggctaagaacatgaatagacaattctc

SEQ ID NO: 257990 - DNA, 381 bp, Homo sapiens
aagccctatgtatgtatggaatgtggaaaagccttcactagatccacaggacttattttacacatgcgaattcacactggagaaaagccatatgaatagacgaagtttcatcatgttgtccaggctggtgtcaaactcctgacttcaggtgatccacccaccttggcctcccaaagtgctgggattatggacgtgagccaccacacccgcccttgaaatactgtttctaaaaggtatatggaagaacaataggcaaggataatcaagacccagctgataaaaaaggtggaagaacttgccctaatgaatatcaagattaaaactatagtaattaagatgctgttgcattgtacacagacaactagactattggtacaaaat

SEQ ID NO: 257991 - DNA, 887 bp, Homo sapiens
gcaggccccagagcctgaaaaacaaggtatcaggcagcagagtttaaagatggtgacatagtcagaaagttagtagtggactccttcaaggcaaaaagctgaagaaattagtctgaaaatatgaatataaaaatctatccatacccttggttgacaattaaactataatgtgagaaaggaggacaatgtcttaagaacttaaagacaaaagagaagctggaaagtacaataattatatagagattcagtaggcagagtttggagtttgaatccagaagtttaattttttttgcaacacagaaatcattcttcagaggagattagagaattcagagcttctgtataatgtacagaatccaaaaagagaaattaaacaaaacaacaacaacacacataaactcacaaaaaacactatgcatgtaaggaaaataagaaaatgtgacttatatttaggaaaaaagaagtcatcaaatgaaattgactccaagatcacccagatgctaaaattagcagaaaatgacattaaatcatctgttattaatatgactaaaagctttaagaattatgtgtaaatgatgagaaaaaatgaaaattcccaacatagaaattggttgaaactacaaaaaaagaatcaaatagaaattccacagtggaaaatatcatagctaaaatatcaaattaattgtatgacattaaaagtagattggaaatgacaaataaggaataaatgtacttgaaattagattaatgaatttacttaatttgaaaaagaaagagagaaaagactgaagataaatatcagacttgcagaaacctataggataataataagtagtctagcatatgtgtaactgaagtttcagaagaaaacaaagaaaaaataaaac

SEQ ID NO: 257992 - DNA, 481 bp, Homo sapiens
agaggaccagaccaggcagaggaacattttgtttcatatgaactgtggctttgacccccaaactgcaaggaggaacttgctgggccaagctgcagcggcgctgtcttgctggagtggggacctagagtcagagaaaacccacaggctcctctgcccattctcctccatctgcacacgtctcagcctcggaccctcaccactccatggtgaggaaggccatggccaggggaaactgagtttcatccaatgtggagaggagcgtttgtccagagagacagatttgccacaagctaggcttacttataatgctccaccctacagaaatgggaccccaagtacccaatcttccctttaggagaggcaggcaggtgggtgagcagcagatgtagtttccatttccctgggggtttaattttccaaactttgtctttttttttttttttttttttttttttttgagacagaatctcaactctgtcac

SEQ ID NO: 257993 - DNA, 545 bp, Homo sapiens
agaggaccagaccaggcagaggaacattttgtttcatatgaactgtggctttgacccccaaactgcaaggaggaacttgctgggccaagctgcagcggcgctgtcttgctggagtggggacctagagtcagagaaaacccacaggctcctctgcccattctcctccatctgcacacgtctcagcctcggaccctcaccactccatggtgaggaaggccatggccaggggaaactgagtttcatccaatgtggagaggagcgttgtcctagagcagggcaactcccaaactgtgacctctgatcatcgtcccttccagcttgctggagtgtccagagagacagatttgccacaagctaggcttacttataatgctccaccctacagaaatgggaccccaagtacccaatcttccctttaggagaggcaggcaggtgggtgagcagcagatgtagtttccatttccctgggggtttaattttccaaactttgtctttttttttttttttttttttttttttttgagacagaatctcaactctgtcac

SEQ ID NO: 257994 - DNA, 477 bp, Homo sapiens
cgcttgcagacctttggagttagatgaccaagactggagagagctggctggaaaccatcagggaagtcaggtgtcgtccagcaggaatagcgagaccacgacatctcagccaagcatcatctctcagaggacccaagccccgcagcctccctccgactccctttttattctcccctctttcctgttccattcctgtgtctcaggccccctgctcatgagccattccacaacagctcctaccattcaaggagcaactgacctgaccgctacacgagcccctaccccgtggtctttgcccgtgccgctttcctgctttggggtacaagccagaagtccttcataggccagatactactatgtcctcccaaactggcgtgtaggcaaagaaattttgttcaagaaagtcactagctgccttggtttctctccaaaattatagagatcataaaacagagatgcttaaaaattcaagggaaa

SEQ ID NO: 257995 - DNA, 705 bp, Homo sapiens
gcgggctgagccatgtggtcatgggccaaggttcacacaggagtgcagagtgatttgcagtcagttgggagtgattacacagtgtttctcatcgataggcaggagggagccttgatgggataatgagatgcagctgatggaaaatcacagctgactgtcgccagtgagcaagctcgcacagccctacagtgctgcagtcgagtcctccccactgcaaagagcaggagaaaaatctgtggaattttaatactaagccaccccacagtgccaagggaaattgactggagggtccaccagttgagtagcagataattgggtaagaacaggatagaggggattcctctggacaaaccacaaaccctgccaggatagggctccaaatagctttcctaaaaagagagagcagcaatgcacaggcagcccctgggaaagggctaaaatgcagggtactaacgcatggggcccctttatcttgcctggccccagcaaaacaaaaagagtttctttgcctccgtgcattacctgtgcagggttagaaactgccaaggagtgttttcctcactgtgctcaatgagagaatctgtttaagctatgtttccatagatcagttcactaagggccaacttgagccctgtttaccctcctgtagtcaacgaaagacagctgtttgcttaaattgaggtctccttcttccatgacagtcat

SEQ ID NO: 257996 - DNA, 429 bp, Homo sapiens
attaattctgcaagcaaggcactggtgtaggtactaagggaacacatgcagcagaacaaacccgaggcactcctcccaaggaacttacagtggaagtcccaagttgtagctgtcagtgcccagtctccaaaactcaaggttattcgtagctctggatgtacccgtccttgctcccttcacattcagacataagggcatcacacacacagggtggcttcggtattccgtcccctttctgccttatctctccaagactttgcatgtgctttggcctctggacagcccagaatggagatgtgcaccccagtgctgcttttatttttgcttgccccacctcctcccgtggaaatgattaagtgttttatctggcatttctgtgattttttggttagttaggattaacttttattaaaagaagaatccatgtct

SEQ ID NO: 257997 - DNA, 259 bp, Homo sapiens
ggaagggtgggtaatggctgagtgtcctaaggaccggggtgctctctcctgaccttccctggactcctgctgtgccctggctgagccagaccactgctgagtgcttgctcactggccacctggagcttctgccccactgcctctgttatcctgtctgcccagcttctgtcctcagttcaacccccagcaccccccttgccctaccacccctcccatgccccaccacacacagacaaatgtcacaggacccactgttcct

SEQ ID NO: 257998 - DNA, 685 bp, Homo sapiens
ccagtccttggaatgaaatgaaatacatgaaagcttcttggacaaaaagttctaatgtgataattcaactgtgagatttctattgatgcttaaaaatccatttgcccaaaatgtaaaaatggaggcagaatatggggactgtggttaattggaaccatctgagtaaactataaattaaagatatataaatatgatttcaggttttatttttaaaaatatcaaaaacaatttcagtccattgaccaacttaaattcagtccaacccaaaccctgcatagcataatgatctgaggtttgtgtataagcaagcaagattcgagtagacattcatctgtgtctttgtatttgcccattacctccacttttagtgttttcccttttccctctctagccaattgtgaaatttctttcattctcctagattgtataaatagcgcatcttctctgaaacctcccagcctttatcccccatcccctgaccttcccctttgcctcccagcaacacagttgtcattctaccctcaatgtgcccattgaatttacccagctgcacttaaaacaactttctcacagtattgtatttccttgtttgcatatccatattatacccctctaccctctctagactataagtgctttgaaatagcatttaactcagcctcgtgtgtgtgtgtgtgtgtgtgtg

SEQ ID NO: 257999 - DNA, 575 bp, Homo sapiens
ccagtccttggaatgaaatgaaatacatgaaagcttcttggacaaaaagttctaatgtgataattcaactgtgagatttctattgatgcttaaaaatccatttgcccaaaatgtaaaaatggaggcagaatatggggactgtggttaattggaaccatctgagtaaactataaattaaagatatataaatatgatttcaggttttatttttaaaaatatcaaaaacaatttcagtccattgaccaacttaaattcagtccaacccaaaccctgcatagcataatgatctgaggtttgtgtataagcaagcaagattcgagtagacattcatctgtgtctttgtatttgcccattacctccacttttagtgttttcccttttccctctctagccaattgtgaaatttctttcattctcctagattgtataaatagcgcatcttctctgaaacctcccagcctttatcccccatcccctgaccttcccctttgcctcccagcaacacagttgtcattctaccctcaatgtgcccattgaatttaccctatagcaccccctctaccccctctagagca

SEQ ID NO: 258000 - DNA, 413 bp, Homo sapiens
caggcccattacgttcattttggagaacatatcagcaaaacacccaagtcaaaataactatagtttgtctgccagttgttctttcaaataaaaacagtgttccatgaacaaaagtgggtagttcaactcaaaatgagtctttgcggctgggtgtggtggtgcacatctatagtccaagagatattctggaggctgaggtaagaggatcacttcagcccacgagttcggggctgcagtaagctatgattgtgccactgcatttcagcctaggcaacaaagtgagacctcatctctaataaataaataagcaaacacacacacacacacacacacacacaacgagtgagtgtcatccttgaaacaatcatcgtatactggtacacagcagaatgtttatttatatttcccatttg

SEQ ID NO: 258001 - DNA, 537 bp, Homo sapiens
gccagcctggctatgcggcccccacctgttcctgctactcgggtgcggccttcacctgccaggcccttccccgctagcttggggcaagcagagttgcatccagtggaaataaagccgttccaggattattgaaaactgagtagcaaccttgggggtcctgggtcatcacatactcccccaaatggaaggtccttctctggcatcaattcccgtctcaaggccccgccttcaacctacggtggtcctcccctgagtaagggtcttcaggctctatcacgctggatgcctaagccttgggagcaacagggcctccttgagaagagccttcccgccgggcagaggagcttgggtcccgaggggacaaggaatctgggttgccctcatccccagagcttgtatatagattataaatatgtaagggggaaaggggtgggttgggaggggttgtagggctggagacccacttcccctcctccccgttcccctggtcccctgtctctggggatgtttgttaacaaagagtaataaaatgattta

SEQ ID NO: 258002 - DNA, 324 bp, Homo sapiens
ggtggagtcttccgcacccagcgcatcgaccttcaccagcaggcctccccaccagatgtcctccgctggatgcctaagccttgggagcaacagggcctccttgagaagagccttcccgccgggcagaggagcttgggtcccgaggggacaaggaatctgggttgccctcatccccagagcttgtatatagattataaatatgtaagggggaaaggggtgggttgggaggggttgtagggctggagacccacttcccctcctccccgttcccctggtcccctgtctctggggatgtttgttaacaaagagtaataaaatgattta

SEQ ID NO: 258003 - DNA, 675 bp, Homo sapiens
gggtgaccctgtctctaaggggtaaaaaaagaaaatctgacacatgctataacatggataaacctcaaagatgttatgtgaagtgaaataagccagtcatcaaaggatagatactgtatgattccacttacatgaggtcctagagtagtcaaatttatggagatggaaagtacaatgttggctgccaggggctggagggagagggcaatggggaattactgtttcatatgaagagtttctattttcaagatgaattctggagatggatgatagtggtggttgcacaatagaaatacttaatgccagtcaatgtacactttaaaatggttaaaatggtaaatgttatgtttatgtgtattttacaattttaaaaaccctattttttaaaataatgcactgaaaccatcagctttacattccttagagcagtggttaacacagccatgacttacttatgcagcatttgcagtgactgttaaccataaatactgctgtatctttgctctagtgtcatgcaatactccaacacaccatcttgagtggcccagaccatcttcactgttaggaaggaaggtctcatttccctgacaagcaatcttcccatccctgtctcctgctggttttatctttccttctctccgcagtgcatcttccttggaaaggaaaaattcatta

SEQ ID NO: 258004 - DNA, 2504 bp, Homo sapiens
  misc_feature (2)..(2): n is a, c, g, or t
  misc_feature (5)..(5): n is a, c, g, or t
  misc_feature (7)..(7): n is a, c, g, or t
  misc_feature (1541)..(1541): n is a, c, g, or t
  misc_feature (1589)..(1589): n is a, c, g, or t
  misc_feature (1601)..(1601): n is a, c, g, or t
  misc_feature (1608)..(1608): n is a, c, g, or t
  misc_feature (1611)..(1611): n is a, c, g, or t
  misc_feature (1621)..(1621): n is a, c, g, or t
  misc_feature (1627)..(1627): n is a, c, g, or t
  misc_feature (1637)..(1638): n is a, c, g, or t
  misc_feature (1647)..(1647): n is a, c, g, or t
  misc_feature (1662)..(1662): n is a, c, g, or t
  misc_feature (1681)..(1681): n is a, c, g, or t
  misc_feature (2046)..(2046): n is a, c, g, or t
  misc_feature (2089)..(2090): n is a, c, g, or t
  misc_feature (2106)..(2106): n is a, c, g, or t
  misc_feature (2144)..(2144): n is a, c, g, or t
  misc_feature (2157)..(2157): n is a, c, g, or t
  misc_feature (2182)..(2183): n is a, c, g, or t
  misc_feature (2190)..(2192): n is a, c, g, or t
  misc_feature (2197)..(2197): n is a, c, g, or t
  misc_feature (2201)..(2201): n is a, c, g, or t
  misc_feature (2223)..(2223): n is a, c, g, or t
  misc_feature (2229)..(2229): n is a, c, g, or t
  misc_feature (2264)..(2265): n is a, c, g, or t
  misc_feature (2271)..(2271): n is a, c, g, or t
  misc_feature (2289)..(2289): n is a, c, g, or t
  misc_feature (2294)..(2294): n is a, c, g, or t
  misc_feature (2326)..(2326): n is a, c, g, or t
ancgngnttctacgccgccggtcgccaggagagtgaatacagctagggacgtgaaagaacggggaagataaccgaagggtggtttgagaaacccaccaggccaactgggaattagaattgattcaaaactccattgatcgcctgacctccataagctcctactctgctgcagttgagtgctgccacttaaatcctgcagtcccgagatccggttataaccaatgcatttagatttttcatttcggtggcaacaatcttcattgtaagttctgtcctacagagaagtgtggtgatcaagctcttcggagatactgggactcctctcacaaatatgcttcttagagacaaggcctcactccattgcccctaggccaggcctggtgagtgacagcagccctggtgccccagcctgctagggcaatgtgtcacccagaggcttcaaggcccttctcaccatggtacccacctcctcgaagctgcctcccaaagccctctagctgctgctgcagccacaacaagtgccaccaccaggggccttccagctgccagtgcaggctttccagagccggggactggggaacctgcagtcatcacctcagcaattctggtggcagccaggccagccagggcagcgatgatgaccgtaatgaaaagtgggatgacagctccacactggtggatgagttgagaacaccaggcagaggcatgtacctggtctttgatggttcagtggacctgcactaccattgcagtgcaaagtgcaagagttgaagcttggaaaccttcacctagatttaggaagattcagggaaaagtctggatgtccacgcagaagcctgctgcacgagtggaaccctcatggagaatctctaccagggcagtgtggaggggaaatgtggggttggagcccccacacagagtcccactggagcacttcctagtggagctatgagaagagaaccactgtcctcctgacatcataatggtagatccactggcagcttgcactctcagcctgaaaaagctacaagtactcaaggccagcccttgagagcatctacagatgctaaaccctggaaagccacaagtgtggtgctgcccaaggctttgggagcccaccccttgtaccagcacgcccttgatgtgggataggaggtcaaaggaagttattttggagctttaagatttaatgactgctctgcttggttttggacttgtgtaggcttgtagcccctttcttttggccaatttcttccttttagaatgggaatgttgatccaatgcctatacccccattgtatcttggaagtaacaaacttgtttcttattttacagggtcataggcagaagggactagccttgtctcagataagactttggactgtggacttttgagttaatgctggaatgagttaaatatttgcaggactgttgagaaggcatggtagtttgtttgtttgtttgtttgtttgtttgtttgtttgttttttgagacagagtctccctctgtcaccaggctggagtgcagtggtgcgatcgcngctcactgcaatctctgcctcctgggttcagatgattcccctgcctcngcctccccagtngctgggnctncaggcctccntcaccntgcctggctnnttttttgtntttttgtagagatgnggtttcaccttgttggccnggatggtctcgatctcctgaccttctgatctgcctgcctcggccacccaaagtgctgggattacaggcgtgaaccactgcacgcagccggtagtattttgaaatatgagaaggacatgagatttgggagagaccagaggtggaacaatatggtttgaatctgtgtccccgcccaaatctcatgttgaattggaatccccagtgttggaggtaggacctggtggaaagtgattggatcatggggcggtttctcattaatggtttagcactatccccttagcgctgttcttgtgagagagtttgcatgacatctggttgtttaaaagtgtgtggcacctccccccacacttcctcctgctccagccncgtaagacatgcctgtggccgggcgcggtggctcacgcctgtnntcccagcactttgggnggctgaggtgggcggatcacgaggtcaggagatcgagnccatcgtggctancacggtgaaaccccgtctctactannaatacannnaattngccnggcacggtggcgggcgcctgtngtcccngctactcgggaggctgaggcaggagaatggcgtgnncctggnaggcggagcttgcggtgngccgngatcgcgccactgcacttccgcctgggcgaangagcgagactccatctcaaaaaaaaaaaaaaaaaaaagcaaagacgtgcctgctacgctttcaccttccaccatcattgaaagtttcctaaggcctctccagaagccgaatagataccagcatcatgcttcctgtacagcctttagaaccatgagccaattaaacctcttttctttat

SEQ ID NO: 258005 - DNA, 2583 bp, Homo sapiens
  misc_feature (1620)..(1620): n is a, c, g, or t
  misc_feature (1668)..(1668): n is a, c, g, or t
  misc_feature (1680)..(1680): n is a, c, g, or t
  misc_feature (1687)..(1687): n is a, c, g, or t
  misc_feature (1690)..(1690): n is a, c, g, or t
  misc_feature (1700)..(1700): n is a, c, g, or t
  misc_feature (1706)..(1706): n is a, c, g, or t
  misc_feature (1716)..(1717): n is a, c, g, or t
  misc_feature (1726)..(1726): n is a, c, g, or t
  misc_feature (1741)..(1741): n is a, c, g, or t
  misc_feature (1760)..(1760): n is a, c, g, or t
  misc_feature (2125)..(2125): n is a, c, g, or t
  misc_feature (2168)..(2169): n is a, c, g, or t
  misc_feature (2185)..(2185): n is a, c, g, or t
  misc_feature (2223)..(2223): n is a, c, g, or t
  misc_feature (2236)..(2236): n is a, c, g, or t
  misc_feature (2261)..(2262): n is a, c, g, or t
  misc_feature (2269)..(2271): n is a, c, g, or t
  misc_feature (2276)..(2276): n is a, c, g, or t
  misc_feature (2280)..(2280): n is a, c, g, or t
  misc_feature (2302)..(2302): n is a, c, g, or t
  misc_feature (2308)..(2308): n is a, c, g, or t
  misc_feature (2343)..(2344): n is a, c, g, or t
  misc_feature (2350)..(2350): n is a, c, g, or t
  misc_feature (2368)..(2368): n is a, c, g, or t
  misc_feature (2373)..(2373): n is a, c, g, or t
  misc_feature (2405)..(2405): n is a, c, g, or t
cgccactgcactccagcctgggcaacagagtgagactccatctcaaaaaaaaaaagacacatcaaagactaacaaaccaaatccttacattagaagaagtagtgaaataaagatactaaagatccagactcagtgcacttcaaactttttgaaatagctattctaacagatgtgaggtgacatctcattctggttttaatttgcatttctctgatgattattgaacttgggcttttgttcatgtactttttgctcatatgcatgtcttctttgagaaatgtctatatcaagtcctttgctaatattttatagtatttgttttcttgctgttggactgtttgagtttttatacatttgtgatattaatgcattatcagacgtatagtatagaaatgttttctgtcatgcagatgcttcttagagacaaggcctcactccattgcccctaggccaggcctggtgagtgacagcagccctggtgccccagcctgctagggcaatgtgtcacccagaggcttcaaggcccttctcaccatggtacccacctcctcgaagctgcctcccaaagccctctagctgctgctgcagccacaacaagtgccaccaccaggggccttccagctgccagtgcaggctttccagagccggggactggggaacctgcagtcatcacctcagcaattctggtggcagccaggccagccagggcagcgatgatgaccgtaatgaaaagtgggatgacagctccacactggtggatgagttgagaacaccaggcagaggcatgtacctggtctttgatggttcagtggacctgcactaccattgcagtgcaaagtgcaagagttgaagcttggaaaccttcacctagatttaggaagattcagggaaaagtctggatgtccacgcagaagcctgctgcacgagtggaaccctcatggagaatctctaccagggcagtgtggaggggaaatgtggggttggagcccccacacagagtcccactggagcacttcctagtggagctatgagaagagaaccactgtcctcctgacatcataatggtagatccactggcagcttgcactctcagcctgaaaaagctacaagtactcaaggccagcccttgagagcatctacagatgctaaaccctggaaagccacaagtgtggtgctgcccaaggctttgggagcccaccccttgtaccagcacgcccttgatgtgggataggaggtcaaaggaagttattttggagctttaagatttaatgactgctctgcttggttttggacttgtgtaggcttgtagcccctttcttttggccaatttcttccttttagaatgggaatgttgatccaatgcctatacccccattgtatcttggaagtaacaaacttgtttcttattttacagggtcataggcagaagggactagccttgtctcagataagactttggactgtggacttttgagttaatgctggaatgagttaaatatttgcaggactgttgagaaggcatggtagtttgtttgtttgtttgtttgtttgtttgtttgtttgttttttgagacagagtctccctctgtcaccaggctggagtgcagtggtgcgatcgcngctcactgcaatctctgcctcctgggttcagatgattcccctgcctcngcctccccagtngctgggnctncaggcctccntcaccntgcctggctnnttttttgtntttttgtagagatgnggtttcaccttgttggccnggatggtctcgatctcctgaccttctgatctgcctgcctcggccacccaaagtgctgggattacaggcgtgaaccactgcacgcagccggtagtattttgaaatatgagaaggacatgagatttgggagagaccagaggtggaacaatatggtttgaatctgtgtccccgcccaaatctcatgttgaattggaatccccagtgttggaggtaggacctggtggaaagtgattggatcatggggcggtttctcattaatggtttagcactatccccttagcgctgttcttgtgagagagtttgcatgacatctggttgtttaaaagtgtgtggcacctccccccacacttcctcctgctccagccncgtaagacatgcctgtggccgggcgcggtggctcacgcctgtnntcccagcactttgggnggctgaggtgggcggatcacgaggtcaggagatcgagnccatcgtggctancacggtgaaaccccgtctctactannaatacannnaattngccnggcacggtggcgggcgcctgtngtcccngctactcgggaggctgaggcaggagaatggcgtgnncctggnaggcggagcttgcggtgngccgngatcgcgccactgcacttccgcctgggcgaangagcgagactccatctcaaaaaaaaaaaaaaaaaaaagcaaagacgtgcctgctacgctttcaccttccaccatcattgaaagtttcctaaggcctctccagaagccgaatagataccagcatcatgcttcctgtacagcctttagaaccatgagccaattaaacctcttttctttat

SEQ ID NO: 258006 - DNA, 430 bp, Homo sapiens
  misc_feature (2)..(2): n is a, c, g, or t
  misc_feature (5)..(5): n is a, c, g, or t
  misc_feature (7)..(7): n is a, c, g, or t
ancgngnttctacgccgccggtcgccaggagagtgaatacagctagggacgtgaaagaacggggaagataaccgaagggtggtttgagaaacccaccaggccaactgggaattagaattgattcaaaactccattgatcgcctgacctccataagctcctactctgctgcagttgagtgctgccacttaaatcctgcagtcccgagatccggttataaccaatgcatttagatttttcatttcggtggcaacaatcttcattgtaagttctgtcctacagagaagtgtggtgatcaagctcttcggagatactgggactcctctcacaaatgtatgtctcacagttatgatgaatggtgtatctcctggatcttcctcagttgagtatgttttaaaggaaaaatacactttatcattcaaatctttcaaa

SEQ ID NO: 258007 - DNA, 1552 bp, Homo sapiens
taattgcatcaattctccccgttgcttactgtagcacataaagtgcttcaagatttgtacttcccctaccgttctagcttactttccttccgctcctcacgtgtcctgtattcaagtcttactgaacattctccatcacatctgagacttttcacacctccctcccacacccagcctactgggtggactcaggcatattccctaagacttagttcaaatactaatgactctgtgaaatttctgtctgctttccttcccaaggtaggattaagtgcctctccactagctgccctggtctccaccattctatgtccacacttctaagacagtatgttgttaatactgttttgtagtatcatatattgtagttgtctgtataaacatcttcctttataatatttctcactttatactacttcttcagaaaaaaggattatatattatttcacctttgtagcctgagggcttagcacatcgcctatcatttctatgtagtaaaagaaaactataactttcaggacttagaaaacaacagctattctaagaagtgtctcttgcccaaccagagaaggtataagtctcttaaccagtagtctgtaccattttccagaccctgaggaactgctatactggctattcagtttgtcctacccgttggacaaacattaaaaaacaactttttttcttaagaatcaaactttctgtgcttcccaactccctaaaatgccttaggatttttccacttagatttagtttgcaggttaagttataaatgtctacaaaacaactgctttgcaggaaaatccctgaccccctaagaatgatctctctcactgttccagacagtccattttataaggaagtgacatacctcctcatcagcactcccctcagtatacccaataatacaatcttaactccattattgagagtcaaaagacttgagacgttcaacttatttgagcctacatttccttaactataaaaagacaggtatatgaacaactacctcccagggttattgcaaggattcatttcttaagaacctattatactaagggctggtcatggtggctcatgcctataatcccaacaccctgggagactaaggcaggaggaaggatagcttgaggtcaggagctcaagaccagcctgggtaacaaagtgagacccccatctctacaaaacatgaaaaaaacagctgggtgtggtggcacatgcccgcagtggtggcatgtgcctgcacgtgcagtgcagctacccgagactggggtgggaggatccattgagaccaggagatcaaggctgcagcgagctctgatcactccactgcactccagcctgggtgacagaccgagactctgtctttcaaaaaaaatttttaactaaaaaaattttaaaagaacctaatgtgcacactaggcactgttctcaatcagtgctggtgatgtggcagtgaatgacacaaactccctgatcctgaaaagcttttattttacccagtgtggagttgtgagaaataaatgagcttacccaaataaaatgccagatc

SEQ ID NO: 258008 - DNA, 345 bp, Homo sapiens
tagaggtcaggacctccccctgtaggaatctccagcccccagtactgccccgcacccaggagcacgtgagtactcgtcaactgacataaatgagagtggagatatttcagctgctctgtgtgttctggaggagtgtttcccaaagcacgcagatcacctgaggaatgcaggttctgattttggagtctggggtgagccctgagattctgcatttccaacacgttccggggacggacggggaagggtgctgacgctgcccggcccagggaccacacttggagagcctcggacctggaggacaggaaaaccagtgcaaacgttttctattgcagcttgctgtcacac

SEQ ID NO: 258009 - DNA, 1628 bp, Homo sapiens
  misc_feature (1500)..(1500): n is a, c, g, or t
ctttacctggctcattcatttctcctgtcataaattgataatttcaatgtcctccaattaacccaacacttgggcacttagttcctagacttcctcacttagttcctagacttcctctgattgaatgtcctcatccttcacttcggccttagccatttggctcccatggtcatattctagcctcattgtatctctatagaaatgcctcttccagttctttgcccatttttgaatcaggttggtttttgttgagttttaggagttttctatatattctgggtattaatcctttatcagatatgtgatttccaagtattttatgttgggttgcctttttactgttgataatgtcctttgatgcacaagtttttaattatgaagtccaatttgtctacgttgttgttgttgttccctgctcactcttttggttttataaccaagaaatcactgccaaacccaatgccatgaggctttccttttttttccctttagagacagggtctcactctgtggcctaagctggagcacagtgacgtgatcatggctcactgcagccttgaactcctaggctcaagtgatcctcccacctcagcctcctgtgtagctgggactacaggtgtgtgccattaatttaaaaaaatttttttatagagatggggtctcactatgctgcccagtctagtcttgaactcctgggctcaagcaatcctcccaccttggcctcccaaagtgctgggattacaggtataagccaccacatgctcctcttgagttttatagttttagttctgatgcttaggtctttggcccactttgagttttgcatatggtattaggtaagggtccaacttcattctttttgtatgtggctctctagtttacccagaaccatttgttgataaaactgtcttttcccccactgaatggtcttggcacccctgttgcatattatttgaccacacatgcaagggtttatttctgggatctgtattctattccattggtctatatgtctgtcttttatgccagtactgcactgctttgattaatgtagctttgtaataacctgaaataaaaaaatgtgagccctaaagctttattctcaagactatttcggatatttggggatcccttgaggttctatatgaattttaggctatattttctatttctgtaggaggaaaaagtcatttggatttttacagggattgcactgaatttgtaggtcactttggatagtatcgaaatgttaacattattaagtcttctaatccatgaacatgggatattgttccatttgttttctttcatctctttcagcaatgttttgtggttttcattatacaagtctttgcctcagtgattaatttctaagtattttattctttttgatgctattttaaatggaattttaaatttcttttccatggtcatggtagggtttacacgcagggattgagggtgatgtgatctgccactggtgactgtgatacgtggcantcatggtctggcctccagtaatctttctcttttgcctatgcagtaatttgagcctgctagtgcacctttgatctcactggggacattgcctgttggatcggatttgtcagggtagtcttccgtcctct

SEQ ID NO: 258010 - DNA, 1419 bp, Homo sapiens
  misc_feature (973)..(973): n is a, c, g, or t
  misc_feature (1011)..(1011): n is a, c, g, or t
  misc_feature (1290)..(1290): n is a, c, g, or t
  misc_feature (1330)..(1330): n is a, c, g, or t
ctttacctggctcattcatttctcctgtcataaattgataatttcaatgtcctccaattaacccaacacttgggcacttagttcctagacttcctcacttagttcctagacttcctctgattgaatgtcctcatccttcacttcggccttagccatttggctcccatggtcatattctagcctcattgtatctctatagaaatgcctcttccagttctttgcccatttttgaatcaggttggtttttgttgagttttaggagttttctatatattctgggtattaatcctttatcagatatgtgatttccaagtattttatgttgggttgcctttttactgttgataatgtcctttgatgcacaagtttttaattatgaagtccaatttgtctacgttgttgttgttgttccctgctcactcttttggttttataaccaagaaatcactgccaaacccaatgccatgaggctttccttttttttccctttagagacagggtctcactctgtggcctaagctggagcacagtgacgtgatcatggctcactgcagccttgaactcctaggctcaagtgatcctcccacctcagcctcctgtgtagctgggactacaggtgtgtgccattaatttaaaaaaatttttttatagagatggggtctcactatgctgcccagtctagtcttgaactcctgggctcaagcaatcctcccaccttggcctcccaaagtgctgggattacaggtataagccaccacatgctcctcttgagttttatagttttagttctgatgcttaggtctttggcccactttgagttttgcatatggtattaggtaagggtccaacttcattctttttgtatgtggctctctagtttacccagaaccatttgttgataaaactgtcttttcccccactgaatggtcttggcacccctgttgcatattatttgaacgccaaacgaagccanttgggcgagaaagggggggttatataagctcatatccnctcgggggcgcaaaattccgttggagttagatttaccataagttgttcgccaaggtcctgggggcgttcggtaaggttaccttgggttccaatggcgtaccgttctctgtaaggttgggccgccaaaaggggcttaacccgttgggcacctggcctgttgcagtctaaagtggtaaggcctcttgggtaaataagccgtggaaagttaacagagagacactgggtggaagggccccccgttaaaaaggcccttttttaactttccctttcccaaaaggnaaacgttttttttcagggatcatttttggggatcccttgnaggttctatatggaattattagggctatattttcttattttctgtaaggaggggtcgatttgggattttttacagggcatttgcactgg

SEQ ID NO: 258011 - DNA, 525 bp, Homo sapiens
gcttaaaagcagctccaattatggccagtctgaaatataccatattgatataaattgaaaataaaataattatgctctagttcatcagtattcagagtattaagaatctcaatcacattcagtggttaagggggtgggatattctctattagctcttctatgttttcaggcaaaaaactgattgtggctcagtcttatgaaaagtggaacttttcaaaggaaacttctaacgaagctccttagccatggctgatttctagtccttcgcaatccccaaacaagtcctatacagaaatttttgaccaggcattgaccacaccagtgtcagcatttacataaatatcataattatttcatacaatatgaattagtgtaaaacaccaaatcaaccatgttgtgctgtgctctgttatatcctcatggtttggtagaacctaaggactatgcaatcagtgacaaagtaaaagactgcctggaaaacaaatggtttactgagcaaaagggggtttatttttgatttgcatt

SEQ ID NO: 258012 - DNA, 350 bp, Homo sapiens
gactccgatagtaaccggggcagcgtcatcctggactcgggccacctaagtacagccagctccagcgatgacctcaagggtgaggagggtagcttccgtggctcggtgctgcagcgggcagccaagttcggctcactggccaagcagaactcacagatgattgtcaagcgcttttccttctcccagcgtagccgggatgagagcgcctcagaaacctcgacgccctcagagcactctgccgccccctcgccacaggtggaggtgaggactctagagggacagctggtgcagcatcctggcccaggcatccctcgaccagggcaccgatcccgagcccctgagctagtgac

SEQ ID NO: 258013 - DNA, 583 bp, Homo sapiens
tacacactcctccccaaaccttttctccccatgcctgacttatctgaggtccacttggactgtttccctgctttcctggccacacagttcatcactcttctatctgtgcccccaaagtgttttcattaaggatgagacctttttttctcatgagctcctcaagggtggggactgtatcatttctgtctccttttttctttctcagttcctgacatttagtgggaactccgtaaataccgtctgaatgaacaaatatctaaaatctgaggctcttgaagtaagtccatcctcggatggatggtttatacttggagacttgcttttgcttctctgtgaatgcatgctcagctgagatctgctggtgcaggtgtttctatagcttccttagcagtggtgggaagcccagcagcttaagatgttagcttctgatgcagggtttactaactctccacgtactctgtccctgagtttctgtttattgtttgcctgtgattctctttggtgccatcccacacggtgttgtcacaaccaaccctttgttttaattgaacgtcctgcgctactcctgctctaactctgacta

SEQ ID NO: 258014 - DNA, 431 bp, Homo sapiens
cttccaagacaaatgaattccagttctgaacactgggagtgcacctgcttgtcggatgtggtgatgggccacatggtggggagtgagggagactcagggcctgtggggcagtcgatgtgggaggactgtcacagagactctcagagggtgcattcagccctgaacagggcaaaggactgcaaggggcaggagcttgggctgacatgcaaggtggctttacacaaggccctttttagagagtgtgattctctgaagcttttcttggcagcttcagtcttgaacctcactggaagggatcctccaaaacatgacccagatggaaagaagtatttctgagtttaaaataactcccctatttggtaatacgggactttatttgtgactttattatttttaggtgtgataatggttttgcagttgtatttaaaaga

SEQ ID NO: 258015 - DNA, 318 bp, Homo sapiens
ttcatctttccccctagtctgtcagcaacacaatctttgctaccaaaaaggggaggggtgtgtgattaagaaaaagggttaaaccaaaaagcatcatcggcacatcactgtcctggaatttcccctgcaacacagactctgaacagggatctgtttacattatctctagatcatcttgacaatatttattctctatttacctaaatgaggcaatatgatgatatttattgctcagaatggctaaatatagacttttcttgagcactcagtaccatagtgggaggctttgctctaatctacatctttaaactgacaagc

SEQ ID NO: 258016 - DNA, 4202 bp, Homo sapiens
gaatgatgaaaaccgaggttggaaaaggttgtgaaaccttttaactctccacagtggagtccattatttcctctggcttcctcaaattcatattcacagggtcgttggctgtgggttgcaattaccatgtctgactcagtaattcttcgaagtataaagaaatttggagaggagaatgatggttttgagtcagataaatcatataataatgataagaaatcaaggttacaagatgagaagaaaggtgatggcgttagagttggcttctttcaattgtttcggttttcttcatcaactgacatttggctgatgtttgtgggaagtttgtgtgcatttctccatggaatagcccagccaggcgtgctactcatttttggcacaatgacagatgtttttattgactacgacgttgagttacaagaactccagattccaggaaaagcatgtgtgaataacaccattgtatggactaacagttccctcaaccagaacatgacaaatggaacacgttgtgggttgctgaacatcgagagcgaaatgatcaaatttgccagttactatgctggaattgctgtcgcagtacttatcacaggatatattcaaatatgcttttgggtcattgccgcagctcgtcagatacagaaaatgagaaaattttactttaggagaataatgagaatggaaatagggtggtttgactgcaattcagtgggggagctgaatacaagattctctgatgatattaataaaatcaatgatgccatagctgaccaaatggcccttttcattcagcgcatgacctcgaccatctgtggtttcctgttgggatttttcaggggttggaaactgaccttggttattatttctgtcagccctctcattgggattggagcagccaccattggtctgagtgtgtccaagtttacggactatgagctgaaggcctatgccaaagcaggggtggtggctgatgaagtcatttcatcaatgagaacagtggctgcttttggtggtgagaaaagagaggttgaaaggtatgagaaaaatcttgtgttcgcccagcgttggggaattagaaaaggaatagtgatgggattctttactggattcgtgtggtgtctcatctttttgtgttatgcagtggccttctggtacggctccacacttgtcctggatgaaggagaatatacaccaggaacccttgtccagattttcctcagtgtcatagtaggagctttaaatcttggcaatgcctctccttgtttggaagcctttgcaactggacgtgcagcagccaccagcatttttgagacaatagacaggaaacccatcattgactgcatgtcagaagatggttacaagttggatcgaatcaagggtgaaattgaattccataatgtgaccttccattatccttccagaccagaggtgaagattctaaatgacctcaacatggtcattaaaccaggggaaatgacagctctggtaggacccagtggagctggaaaaagtacagcactgcaactcattcagcgattctatgacccctgtgaaggaatggtgaccgtggatggccatgacattcgctctcttaacattcagtggcttagagatcagattgggatagtggagcaagagccagttctgttctctaccaccattgcagaaaatattcgctatggcagagaagatgcaacaatggaagacatagtccaagctgccaaggaggccaatgcctacaacttcatcatggacctgccacagcaatttgacacccttgttggagaaggaggaggccagatgagtggtggccagaaacaaagggtagctatcgccagagccctcatccgaaatcccaagattctgcttttggacatggccacctcagctctggacaatgagagtgaagccatggtgcaagaagtgctgagtaagattcagcatgggcacacaatcatttcagttgctcatcgcttgtctacggtcagagctgcagataccatcattggttttgaacatggcactgcagtggaaagagggacccatgaagaattactggaaaggaaaggtgtttacttcactctagtgactttgcaaagccagggaaatcaagctcttaatgaagaggacataaaggatgcaactgaagatgacatgcttgcgaggacctttagcagagggagctaccaggatagtttaagggcttccatccggcaacgctccaagtctcagctttcttacctggtgcacgaacctccattagctgttgtagatcataagtctacctatgaagaagatagaaaggacaaggacattcctgtgcaggaagaagttgaacctgccccagttaggaggattctgaaattcagtgctccagaatggccctacatgctggtagggtctgtgggtgcagctgtgaacgggacagtcacacccttgtatgcctttttattcagccagattcttgggactttttcaattcctgataaagaggaacaaaggtcacagatcaatggtgtgtgcctactttttgtagcaatgggctgtgtatctcttttcacccaatttctacagggatatgcctttgctaaatctggggagctcctaacaaaaaggctacgtaaatttggtttcagggcaatgctggggcaagatattgcctggtttgatgacctcagaaatagccctggagcattgacaacaagacttgctacagatgcttcccaagttcaaggggctgccggctctcagatcgggatgatagtcaattccttcactaacgtcactgtggccatgatcattgccttctcctttagctggaagctgagcctggtcatcttgtgcttcttccccttcttggctttatcaggagccacacagaccaggatgttgacaggatttgcctctcgagataagcaggccctggagatggtgggacagattacaaatgaagccctcagtaacatccgcactgttgctggaattggaaaggagaggcggttcattgaagcacttgagactgagctggagaagcccttcaagacagccattcagaaagccaatatttacggattctgctttgcctttgcccagtgcatcatgtttattgcgaattctgcttcctacagatatggaggttacttaatctccaatgaggggctccatttcagctatgtgttcagggtgatctctgcagttgtactgagtgcaacagctcttggaagagccttctcttacaccccaagttatgcaaaagctaaaatatcagctgcacgcttttttcaactgctggaccgacaacccccaatcagtgtatacaatactgcaggtgaaaaatgggacaacttccaggggaagattgattttgttgattgtaaatttacatatccttctcgacctgactcgcaagttctgaatggtctctcagtgtcgattagtccagggcagacactggcgtttgttgggagcagtggatgtggcaaaagcactagcattcagctgttggaacgtttctatgatcctgatcaagggaaggtgatgatagatggtcatgacagcaaaaaagtaaatgtccagttcctccgctcaaacattggaattgtttcccaggaaccagtgttgtttgcctgtagcataatggacaatatcaagtatggagacaacaccaaagaaattcccatggaaagagtcatagcagctgcaaaacaggctcagctgcatgattttgtcatgtcactcccagagaaatatgaaactaacgttgggtcccaggggtctcaactctctagaggggagaaacaacgcattgctattgctcgggccattgtacgagatcctaaaatcttgctactagatgaagccacttctgccttagacacagaaagtgaaaagacggtgcaggttgctctagacaaagccagagagggtcggacctgcattgtcattgcccatcgcttgtccaccatccagaacgcggatatcattgctgtcatggcacagggggtggtgattgaaaaggggacccatgaagaactgatggcccaaaaaggagcctactacaaactagtcaccactggatcccccatcagttgacccaatgcaagaatctcagacacacatgacgcaccagttacaggggttgtttttaaagaaaaaaacaatcccagcacgagggattgctgggattgttttttctttaaaga

SEQ ID NO: 258017 - DNA, 965 bp, Homo sapiens
gagacagggtttcttgctcttgttgcccaggctggagtgcaatgcccaccacaacctccgcttgccgggttcaagcgattctcctgcctcaggctcctgaggagctgggattacaggcatgcgccaccacgcccggctaatttttgtatttttagtagagacagggtttctccatgttggtgagactggttttgaactcccaacctcagctgatctgccctcctcggcctcccaaagtgctgggattacaggtgtgaaccaccacgcccagccaaaaacacattcttctttctacttgttattcccttcgtgcatgcactcatccccatgcatgccgagggcacatgttctggaaggcccctgggagccacatggggttcacgacctcaaaactgaagccctcagagggtatttgattcattaggtggggtaagacatgaacctaagaagaacgactccttgaaagaaaatgaggtaacaggaaaggaattcactgatacatgtcaggaacccagagctgcctgcgatgtgggtgggattcggcactgggaaaccttgtgtgtgggtccttcggggaaagtgggagttgactgccgttgagcgggtaggaaagtgccttccaggtacaggcagcaggagtggtgattgtcttggtagaggatgggtgaactgcaaatagagttgaaggagctgggctgagtagttgggatttcactccccgggtgattggtgggacccagcagggccagtcctgggcttttcctatggcaagtaactcaagagctgcaggagcagatgttgttaagccagagaggaaacaccaaacatggatccctatctctagcgagtgtgccctgtgactgtggagggtggaggggagtcacgccagagggaggtgctgtgttggggccagaccggagggttacatcctgagcaggagaggagggtcgacgcggccgcgaatt

SEQ ID NO: 258018 - DNA, 1313 bp, Homo sapiens
gagacagggtttcttgctcttgttgcccaggctggagtgcaatgcccaccacaacctccgcttgccgggttcaagcgattctcctgcctcaggctcctgaggagctgggattacaggcatgcgccaccacgcccggctaatttttgtatttttagtagagacagggtttctccatgttggtgagactggttttgaactcccaacctcagctgatctgccctcctcggcctcccaaagtgctgggattacaggtgtgaaccaccacgcccagccaaaaacacattcttctttctacttgttattcccttcgtgcatgcactcatccccatgcatgccgagggcacatgttctggaaggcccctgggagccacatggggttcacgacctcaaaactgaagccctcagagggtatttgattcattaggtggggtaagacatgaacctaagaagaacgactccttgaaagaaaatgaggtaacaggaaaggaattcactgatacatgtcaggaacccagagctgcctgcgatgtgggtgggattcggcactgggaaaccttgtgtgtgggtccttcggggaaagtgggagttgactgccgttgagcgggtaggaaagtgccttccaggtacaggcagcaggagtggtgattgtcttggtagaggatgggtgaactgcaaatagagttgaaggagctgggctgagtagttgggatttcactccccgggtgattggtgggacccagcagggccaaatcctccagtggggcctgatgggcagaggagagacttggacacccttaagagacgaaatgaatcttcagaggttcagccattgcttgcaatgtcatcttctgggctcatccctgcactccaaccctggacattttctctggtcttttctagtggccaccatctggatgattacgactctggaaatctctgtccatcatccatttttttgcctcctctgtgaacgagcaggtgtgatggcctgaaaacagagagggagaaggctgagtgtaccagggcaggggaagcgcttcctggaattacgtgtcccaggacaaaagtgaaactgccttcgctgactcataggaaagtttgaaaatatcatgtttcgcctatgcctgggggatctttgtttttggcataagccgaacagattgttccaggccagaaaaaaactaagccaaaccaaaacaacagaatgacttaattatgtaccagcaccctttaaaattaattatgcttgctttctttttgtccccctcaacttttagtttaagttctgaggcacatgtgcaggatgtgcaggt

SEQ ID NO: 258019 - DNA, 899 bp, Homo sapiens
aaattgattctctcacaattctggggggcagatgtctgaagtccaggtgacagcagggccacgctccctctggcagagctgggaattctgcggtctgtgacagcatcgctccaatctctctctgtcctcatctgtcctctgcacatctgtgtctcaaatctccaggatgatctcatcttaggatccttaattatgatctataaagatgctatttcccaacagagtctcattcacagcgaccggggttaggatgtggacatgtcttttctgggcgatacatttcaacctactacaggcagttacctgaaggagtaactgaaggagaggggttcagaatcctccagtggggcctgatgggcagaggagagacttggacacccttaagagacgaaatgaatcttcagaggttcagccattgcttgcaatgtcatcttctgggctcatccctgcactccaaccctggacattttctctggtcttttctagtggccaccatctggatgattacgactctggaaatctctgtccatcatccatttttttgcctcctctgtgaacgagcaggtgtgatggcctgaaaacagagagggagaaggctgagtgtaccagggcaggggaagcgcttcctggaattacgtgtcccaggacaaaagtgaaactgccttcgctgactcataggaaagtttgaaaatatcatgtttcgcctatgcctgggggatctttgtttttggcataagccgaacagattgttccaggccagaaaaaaactaagccaaaccaaaacaacagaatgacttaattatgtaccagcaccctttaaaattaattatgcttgctttctttttgtccccctcaacttttagtttaagttctgaggcacatgtgcaggatgtgcaggt

SEQ ID NO: 258020 - DNA, 628 bp, Homo sapiens
tgtaaaatacagatgagggaatagaagctggtgagactagaaggcaggaagaaacccaaaagagtatgactgtgaacactaaaggaaaaggtgtttgttttcaagaaggaaggagttgaacaagtgtcagtggtacctagaggtcatgtataaggtactgagaagtggaaagtagctattgtgcaatatttaacgaaaagacatccttaatggtcttaatgaaagtagtttcagttaagttatgacaaataaaagccaatgattcaaggaataaatagcaggtgagtaaatagagaaatgaagatgagactgtttttctaagaaggttagtatggggagaggatggaaaatggaagagatagccagtaattggactgagcatggtggctcacacctgtaatcccaacactttgggaggcggaggtaggaggatcacctgaagtcaggagtttgagagcagcctgggcaacgaagtgagaccccatctctaccaaatatttgaaaaggctgggtgtgatggctcacacctgtaatcccagcactttgggaggctgagacaggtggatcacttgagcccaggagtttaagaccagcctgggcaacatggtgaaaccccgtctctaccagt

SEQ ID NO: 258021 - DNA, 284 bp, Homo sapiens
ttctaagaaacctggcattatcagattaaaaaaatttaaacataaaatttgccatgttagccattttgaagtgtacaatttagttccattaagtatattcacaatgttgtgtaaccctcaccactagctagttacaaaactgtttcattgcgaacaaattctgtactcattaaacagtaacttcccattcccccactacttccagcctctgataacctctattctctctctatggattcatctattctggatatttgaatataaatgaaatcataaaatatgtg

SEQ ID NO: 258022 - DNA, 433 bp, Homo sapiens
gaatcacattttatgatgcaaatggccctgggaggaattgtgttccctgtatcccagatcctttctccttttaaaaatctcattttcagtgtcttgcatgtaacattttaaaagttatttttattgtttttgtttccatagagaaaagccttattgtagaagttacaaagcttgcatgaccaaatcacaaaagaaatttagttctaaaaagtaacaaaagaaaatgagggaatcttttaatttttttttttttaagtttaccattggctttggggagaaaaatcacaaaagattaggctacatggtctgcaagccttcaaagagaaaaaacagttcttttaatacaggtctagtaactaattaatattttgaaattttacaatgtgtataatctccagctattacaagaaatagtttattgtgagcctctcag

SEQ ID NO: 258023 - DNA, 532 bp, Homo sapiens
ctctaagtttcctcaacacagctattttgaattctctgtctggaagatcatatatctctgtttattgggattagcccctggtggtttatttagttcactgggtgaggtcatgttttcctgggtagtgttgatgctagtatatgttctttggtgtctgggtattgaagagttaaggatttaatgtagtcttcactgtctgagcttgtttgttcttttccttcttgggaaggctttccaggtatttgaaagtacttatgtgttgtgttctaatctgtatctgtttttgtgggcaacccaagcccagtaacacagtggttcttgcagacttacagaggtactgccttgatggtcttggacaagatccagaaaaattatttggattaccaggcaaatacttgttcttttccctttctttctcccacacagagtctcttcctgcactccaagccacttataggtgggggtagagtgacacaagcagaagaaagagtaatgagcttgaagacaggctatttgaaagtacacagagaag

SEQ ID NO: 258024 - DNA, 670 bp, Homo sapiens
ctgctcttttgtcattgacatcatgtgacactcatcagtgttataataacggaattttgccaatagtttattccatttttctttctccaatcatttataggtccttaacttagtggatgactttacaagcttctcctcagttgtgcaatatttttactttagaatgtgtttgctagaagacatgcatctaaatgatgactgtaatctcttatcctcgggggataaaattaagaagacgtcctgaaaaagttattctcttacttggtcttaaaaaaaacaagtcactagaaatatcactatacaagatctcctgctcaacatcagtaagctgcccttgataaaacaaacgtcctgcatgaaaacattgcctgtctccatgattttaacattatatgtcaaactatagccccaatcaattttctgaaaagtagctaaacaagctgggcgtggtcatgaactatagttctagctacttgggaggctgaggaatggcttgagctctgggcacaagacggcattgcgtgatgatcacgcccatgaatagccactacactccagtgtgggtaacatagcaagatgctgtttctttaaaaaaaaaaatttgtttaaatagctaaaagaatcaaatgcctattataagtagcaaatgaacatgctaagatgaaatgat

SEQ ID NO: 258025 - DNA, 318 bp, Homo sapiens
cagtaggaaaaggccaaatctattccattgaatacaatgacattgttactcttgcttcttgcacaggcgcagtgcaggactgctccgagcacgcctacgcgcgcattttctccccttcctctccctctttccactttcctctccctttttctcctctcctttccccctcccaccacttggtctttcagtctttcagtcagttcgtttaggtctctccttccgacccccacccccagctcctctccctttccttttccccctccccctttcctttcccgtctcacgcgccaggccgcttgcacatgcgcattaggtaca

SEQ ID NO: 258026 - DNA, 456 bp, Homo sapiens
ttttttttttcttgctttctttctttctttgaaagacaaggtcggccgggcttggtggctcatcctgtgtataacgcttataattttttaagcactgtttttcttttaaagagccttaggtcctggaggcattgggtgtggtatgttccagaaacagaatattcccataggcctttcatttctattctattggatcacagtgtctacctggggcagcagtcactctgatccccatccacctgcagcgacatctccagggttcactttcacttacaatcacagagggacaccctgcaggatgctatcagtaggggaaaggtcacacagacagaatgctaatcagcttcctcacttttcttagaagaaccctaggagagaattacaagcagaatctacatagaaacaattccaatgccccttgaacagaagagttgaaggagttcagtgcttaaatgt

SEQ ID NO: 258027 - DNA, 531 bp, Homo sapiens
tcccatagaaagggatacaagaggccgaaaggcattccaggccacaagaaagaatagccttttggaaagattcttggttcactttttccccagacacctcccctgcccaggggctgcagggacctctggcttaagaatggccattgctccagctggaagatagcacctggactggctcagggctagacagaggagacggggagcttcaggtggtatcacaggccagataggggatcctgccatgacctatggatgcctcacagagcacttgtctttgtttggatggcttttgaaggtgattattattttgaaggattgattattctaaagggacagacttccctatccctactccgctgcatttacggcaaaataaacttgaaaaagaaaaaacccactcatctgactccagatcctatcagttttccctgtgcctcttcctccagccatggcttagaagggtaaaagttcaagctatctcagatatctgaagaaaagcccactgtccccccaaccctaatatttgtatag

SEQ ID NO: 258028 - DNA, 412 bp, Homo sapiens
ttaaacttgatttggtttggtttagcttagctcctagcattgaatcagtgttgttttctgatttactgcaaccctactctgttgttttgcaactctacagcccttaggtacattataaaacttccatggggttgacctagaaacccaacaatatgacattgttctgtggggaaacacatcctaatctcaattcactgactgataaatgttctagcaggaatacttggctccctaggtgtctgcaccatgctgggcacatagaggtgctccaccccaggacaaagttatttcattgagttggcaaattgaggagaaacaggaattctataagtcattgaagaaatccatcatcgaatgatgcttttttgacaagaagtaatatcactgctgttaataactgtgactccccaga

SEQ ID NO: 258029 - DNA, 471 bp, Homo sapiens
ctactgctgtctatatggctggtaccagtgtcttggtccaaaatgaagaaatgcatgagttattagcctcttcttgaggtttcttagaactttagggcattaaaaagtccttcttcactagtgtataaacatttgtataaacatgcttagtgtataaaaatatgtataaacatgtttagtgtataaacatgctcacttgtctcctatctgaaacaaaacgaaaccagccaacaaaccctaaggctgtttctccacgtcgaatttctctctacccttggcagggcacagtggctcatgcctgtaatcccggcactttgggagtctgaggcgggcggatcacttgaggtcaggaatttgagaccagcgcctgtaatcccagctactcaggaggctgaggcacaaggttgcagagagccaagattgcgtcactgcactccagcctgtgcgacagaggtagacttcatcttaaaa

SEQ ID NO: 258030 - DNA, 235 bp, Homo sapiens
aacaaagaggttgaagtaccccaacatcaagttcagctttctaactttttccagaagggctaataataccactaatgatatgatagtaatagaggcttactatgtgtcagtgtacttccctactctacggttaaagtgcatggctctggcctccaggagagttggagtagggcctctgggagaagagcagaagtgacctgattctaaactcctacagctgatgctgatccttcgt

SEQ ID NO: 258031 - DNA, 386 bp, Homo sapiens
gatcacttgaggccaggagttcgagactggcctgggcaacatgacgaaatcctgtctttacaaaaaaaaaaaaaaaaagttaataaaaaattatcaacaggcagcaagtggtgggaaaaaataaaaataatttaaaaaaataaaaaattagccaggcatggtggtgtgcatctgtaatcccagctgctcaagaggctgaggcaggaggttcgcttgagccaagatttcaagaccagccttggcaacatagcgagacattgtctctactaaaattcaaaaaaattagctgggcatggtggtacatgcctgtagtcccagctacttgggggactaaggcagaagaatcccttgaaaccaggaagtcaaggctgcagtgagccctgatc

SEQ ID NO: 258032 - DNA, 284 bp, Homo sapiens
  misc_feature (27)..(27): n is a, c, g, or t
gatcactctggtagccagtgcagaganatccagtgcagagagggtaacgttggagcaagagaacccagtggggctcctgagatactgcctgacaccagattgtgaggcctgaattaagctggtgacagcagagatggagggcacagatacgaaatatatcaggaagtaaaatcagtaggaatcaataactgctgaaatattatagggagaaaggaatgggggtggcgtgtagtcaaagacggtggtcggcactgatgggccattccacctcccttttgctccag

SEQ ID NO: 258033 - DNA, 365 bp, Homo sapiens
gaatgtgcacgggcgttgtggaagctgagataggagtgctgacctctgcctggcatggctgagccctccctgaaagataattgtgttatgtagataaaacttaatgggttgtgttcattcagcatgtattattatacactatatggttcagtgtcctgaccatactataattttgtcattcgtttctgatattgaaggagcgctaggcactgtgctaagtcatagggatgtaacagtgagcaagagacaccatcccgccatcaggaagcctgtattatgttggaggggtggataataaaacaaagatgtgaaccacatacttacagtgtaagaggtgctttgaaggaaataaagatattcatata

SEQ ID NO: 258034 - DNA, 726 bp, Homo sapiens
gcactttgggaggccaagaagggcagatcacttgaggtcaggagttcgagatcagcctggccaacatgatgaaaccccatctctactaaaaatacaaaagttagccaggcttattggcatgcgcctgtagtcccagctacttgggaggctgaggcaggagaattgcttgaacctgggaggcagaggttgcagtcagctgagatcgtgccactgcactccagcctgcacgacagagcaaggcttcatctcaaaattaattaattaattaattaattaaacattaagaaagcagggtaagtaggtggagagtggctagcgaaggagctatttctgatcataggccggcctttataaaatgacttttcagcaaaaacatgaattaagtcacggtttgagccacgagaagatatatttgaggctgaaggaggaggaagtgccaccaacctgacataggaatgaactggactcagcaaaggagaaggcctaggatggggacagaatgagggggaaattagcaggctatgaaatcagtaaggaaggcaggggcagttccatgtgcagccttacaggtaagacgtcagctgttgtgataggtgtgacaggaaacccatggaggattttaagcagggcagtgacaaactgtgactcacattatcttagcttgcaatagagtctggacttcaggttctgtgactgtcgccctttcttttattctcttgagttgtg

SEQ ID NO: 258035 - DNA, 445 bp, Homo sapiens
taaaattactccatgcttgttgctttttattagtatgaagatttgactgaatactagtcttcatatttaaccttttcccaaactggagatatgaggtgttgggttccctttattctataagcaggggtgcccctcattattatttcaacaattagaatctgggatttatctgtcctggaattcatgtaagagctgagcctccaaaacctgctccgtggactagaaaagcatgagacggtcattggaaagaggatgacctttttgatatacctaagattcagtgcttctcaatgttttaatgactcacgggggcgtctgtgaactgtctgtagaagacgacctttcaaactaatccccccacgggagccctacctagctcacggctgcaggcttcatgtagccccgcgatggctggcaaacagtcacaagctgttgtgttcccctt

SEQ ID NO: 258036 - DNA, 686 bp, Homo sapiens
aagaaatcaacttctgtacttgcattgctgtactttttcagtgggaggaaggtggagttcatatcctagagctgttagagttactccaactaattggtctttattgtgtttcattctttccttgtatttccatgttttattcacttttttcttagcttcttattttctttagattttttaattgacacaataatttctttttttattatactttaagttctgggatacatgtgcagaacatgcaggttcgttacatagccatacacatgccatggtggcttgctgcacccatcaacccatcatctacattaggtatttctcctcctctagtccctaccaccaaaaggtctcggtgtgtgatgttctcctccctgtgtccatgtgttctcattgttcaactctcacttatgagtgggaacatgtggtgtttggttttctgtccttgtgttagtttgctgagaatgatgctttcgagcttcatccatgtccctgcaaaggacatgaactcatcctttttatgactgcatagtattccatggtatatatgtgccacattttctttatccagtctatcattgatgacacattaatttctaaaactcacaagtttattagaagaaaaataatagaaaatatgtgctatataagtatatgggccactttcccctattttttatttttttttg

SEQ ID NO: 258037 - DNA, 339 bp, Homo sapiens
aagtcaagtggctcagtatctctctgtctcactcttgagccaatcaaccctacttcacacaagtcccgaatctaccctaccccttatcttagagaggcacatggagggcagaagaaagaaccaagcagaatggggcttgagtttgggccttgtcacttgctagatgcctgccttcgggataaatccgatgacttctgtatcagtttcttcatcttaaatgagaatcatagtgcaacctcacagggtcattaggaagattagatgaaatcatgcctcttaagtgcctggcacactacaagtacttaataaatgtagctatttttattagggtaataagta

SEQ ID NO: 258038 - DNA, 378 bp, Homo sapiens
cgtgggacaggccctgagcccaggtttgcagcagatgttctcactgatgtcagtacctctaaggttactcccctgggtacaattttataaaatctgtattgagattaaatgttggcgataacttaggtgaagagcttatttcctcatgtgtgcataaattcttcactgaagaagacggaccggaggctgtgctgtggagtacccaaggactgggcttgcttgaatctgacccgactacgccaaatgcctgctcttccttccggttcatgtttatcagctcgtatcaaacacagacccactcatttgcgcacaatcctttcagggaataagatgttgtatttttataattaaaagaattaaaagctataaaacaaagca

SEQ ID NO: 258039 - DNA, 1799 bp, Homo sapiens
atttcttttggatttaagctctggactatagcgcttaacataaacaacaacaagaaaagtatcgtggtagccttgcctatgagcctgcagtttttaatttgtctgagtcctggacctcagcctagatgtaaccttgctctgttgctgtcctctagaggcctggcactgtggactcggtgttgtctagcagagaggccttgaggaagtggcccagcagtgtgcttgcgtttccaaggattgagctcaaggagatggaaaacaaactgcctatggagacccttgtagaagaatgtggagagaatagagaaaggaagtgcaagttaaaagaccagtcagacaaagaagaaggcaccagagatatctcatcacccaaaagacttcgagatagacaagctttgttccctgccaaagtgacaaatgtcagcttgctggaaaagtttgaacgaagtgagagtggtgggaagattatgacccctgaaagcttatcatatccaagttgtctgaaacacgacagtgagatgaagccccaaacatctccagcttgccaggatcataacaaggcaggacagatgaaaagtctggctactagagaacagaatcagaaaaatgctgcctataatcttggagttgctgaagctataagaaaccacaagaatgagaaaccggaattttatatttccttcctatttgacaaacggccactcagtcctgcgcttaatgctcttaagcaagaggaatattcccggagtctcctgaaacaaatggataacagacaggaaaacgaaataaagcaaagacaatacagagagttgatggaccgcctggaacaagtgcaactcacagaggaacttgctgcgcaaagagcgaaatttttaaaagataagatggaagaaacacagtgttacaagagagctttggatgcacagataaagaacaaaccctctcggctgcccccctttgagccagactcctctgagcccatctttggtaagaatgagggtgaactgatggtggaaaagcaaaagcgagaacaaaattacatgaaacaccagctggaggcagctgctaaccacaagaggaaagccatcctgcatcaactagtggaccagaggcgggatttgcaaatgcttcagaggacacaaagagagcacttggcagacagaaccgctgagctggagcgagtaaatagagtcaaccaatgcttacaggaggactgggaaaggagtgctgcgatgaagaagcagcgagacctggaggacaaggcttttgaacgggcttcagacaagctgtttctcctagaccagtgtgagaagtatcggcgctgcaagcaatgccagaggcgcacctccaacgtgggcgagagcaacctgtggcccctgaacaagttcctgcctggctcccggttgcttgtgtaaaactcaaagtttggctcttcgtttcccggggaaagtttttatcttttacatgtttgggggtgattgtgaaactgcgtatttttacctcagagaaaaaaatcattgtttaggtttggtgctttcattagattgcttgttaagcccttattgaattcactcctgctttcctcccacccccaattatttcctatactagtttctgatggcagtgaaggtgtctgaatggtcctgagggctagaacctgctgcacaggggctgggaatgggatccagcttcattatggctgctggggtgctgctgacccagccctgctgctgctccatgactttgtgtacaaaacttttttcatctgtaatgaatagtggcaataataaatatttttt

SEQ ID NO: 258040 - DNA, 881 bp, Homo sapiens
agtcagttactactgcctctttatttctgcttttagttgcttttgtcttcctctttgtctccactccctctcctgcccttaactctccagaggcttctggcctcctgggatagttcattgtaagtcctctcaactctctgctgttgttagctgataaccagcaacttaatggttgatctgcctctcaaatactgtctcccaggagctcaacaggtagaggtgtaatccacgtgggaaagcagtcaacagagaggctttggagccactgtctgctggctgtgtgaccttcgcttccaagttgggcctccaggaactccaggaacctgctgatcggcatttgctctcctctcctcagggcttcagacaagctgtttctcctagaccagtgtgagaagtatcggcgctgcaagcaatgccagaggcgcacctccaacgtgggcgagagcaacctgtggcccctgaacaagttcctgcctggctcccggttgcttgtgtaaaactcaaagtttggctcttcgtttcccggggaaagtttttatcttttacatgtttgggggtgattgtgaaactgcgtatttttacctcagagaaaaaaatcattgtttaggtttggtgctttcattagattgcttgttaagcccttattgaattcactcctgctttcctcccacccccaattatttcctatactagtttctgatggcagtgaaggtgtctgaatggtcctgagggctagaacctgctgcacaggggctgggaatgggatccagcttcattatggctgctggggtgctgctgacccagccctgctgctgctccatgactttgtgtacaaaacttttttcatctgtaatgaatagtggcaataataaatatttttt

SEQ ID NO: 258041 - DNA, 167 bp, Homo sapiens
gctatcatttttgttaccgaactgaacttgggtccatttgtctggtgcagcaaagctaaacattcacatgaggattgcagcaagagaaagtgtgacatttattgcagagcacctcgcaaggagaatctgggagctcgtgcttaaaacccaaattcttggatggcttg

SEQ ID NO: 258042 - DNA, 480 bp, Homo sapiens
gatagacattgtgaagaatgggcagtagtgctaatgtaaagaaagaaagaaggctgcatggatgagggattacattttctgtaggacaggaagaagagatctacagatgtataggtataagctctaagttgggataagcaatgatgtagattactaaacaaaatcagatcatgtgtcttatccactgagttctaccttaatgtttttgttttcatggctatattctcaaaatacctgaatttgtttttagagtcatatatttctttgtcttttcttaattgacagttttatatatttctttcatttctttcttgattaccttgagtttaacatcatgtgctatatgggatgaagaaaaagtatgatgtgttttctacctttaaattgcttgcaatctctttaaagatgctgacagaagaaatagtcactcacaataaagcacaagaaatgattgcatgattcatactttagagttaagag

SEQ ID NO: 258043 - DNA, 717 bp, Homo sapiens
tcatacttctaatcccagcactttgggaggccaaggtgggaggattgcttgagcccaggagtttgagaccaggctgggcaacatagtgagaccctgtctgtacaaaaaattaaacattagctaggcatggtggcaggcacccttacgtagttccagctacttgggaggctataaagcaagaggattgcttgagcccaggagtttgaggacaatttgggcaacaaagcaagaccccagttctttaaattctttttcatgatttttaatacgtatatagttcatcatagagataacgctctgagcttttaaattaatggggcctattgttaaacattttctttagtttcccgtgttagcaatatctttgtgcacatccattattattttcttttgataaatttgtagatgtggactcacggaacaatggaaactccacatggtaaggctttggacagatattgccaaactaatcactagaaaggttttattcattttatacacagatagaaaataatacttcatcataatttgtactaaaattatgatgaaattatcaaaattctaagtttttgttactgttaatataaaaaggtcatcctgctggcagaccagaacactaagaaatttctagatctcaagcagataggaacaagtttatatcaagactccactgaggaactctggtgccaacaagtaaataaactagatttagaatac

SEQ ID NO: 258044 - DNA, 242 bp, Homo sapiens
gccctggaaccctggccagggtcctggctggtttgttcctactggaaaaacacaggctgcatctgcagagggcagtgttgttctggaaaattcctagattgcctcatcgcatctgtttccttcctgggcagggctacagtttctagaaaggtgttagatttgtagcaaatgtagctagagcaactcttaatctgtatagaaggaaaggaggtagcatttcttcttttacaaaaggatgtctg

SEQ ID NO: 258045 - DNA, 345 bp, Homo sapiens
cttccaggtgaaataggcagccatctgactgtactacccaaagtctgcccaaatgaggatttcccttcaccactctttgaaggccactcctagtggattttacaccctgaaaacccctccataaactggagactgaaatcgaagaaatggcatttgctgtgttaatagttgcatacctgtagccagtggctgtactgattttctcagtaaattaccacatctggaaccaaagctacagttgtcatcctcacctgattaagtaggtgataatgtacagttattctccagacttatctgagttttgtacaggcccaacaagctaaataaatggccactatggtaaga

SEQ ID NO: 258046 - DNA, 478 bp, Homo sapiens
catctctcaccacctctccccgcttcctattttatgtaaatgacatgtgttttttaggggaaatattagaaaatcagatttttatttttcattatctcaaactcatacctaggacttatttttttggggtcgggggcagtgtgtctaactgtcacccagactggagtgcaggggtcactgcagcctccacctcctgggctcaagcaatcctcctacctcagcctcccaagaaactgggactgtaggtgtacaccaccacgcctggataatttttttaaatttgttttagtagagatggggtcttgctctgttgcccaggctggtctgaaactcctgggctcaagcaatcctcccaccttggccacccaaagttttgggattacaggtgtgagccaccgcacccagccacctaggacttcttaattcaaataatttactccatccacccccaagactgaaggcaggccgcacccatttc

SEQ ID NO: 258047 - DNA, 521 bp, Homo sapiens
agctgtgtgtatgtatgatacgcatatattcacacgtgtacacatttgtttatattataggggtgtgtgtgtgtgtgtgtgtgtcagtatgaatgtgtgttcatatgtaccctatctctctctccatgaaaaagcatagaggcagcagcactccagttgccataagcacacctggtgctcagatcttggtttataaataatatttctctctaaaggaatcagagctccttggtgaaacagcagatttctgaactagaacaagggaattacaagattagtatggagtaaccttgtactagaaagtaagggggttctcagttaatgatgaaactcgtcaaatggcttaggatagaacatgtctaggaacatttgagcatcaaaacaaataatactaattgagtaaagcaggaatgcatgagcccatgttgatgatgataaaggaaaaataaaatatatggggttaagtggaaatatctttcttaaagtaaaataacaaatataaaagggataatgaaattaga

SEQ ID NO: 258048 - DNA, 702 bp, Homo sapiens
ttttatattttccatgaagcatcatcttttgtcatttcagttctcaccaagcctcccatccagctctacgcatatctacaaaatctccaaacactcttgatattttgcagtcaataacccattcaaatatcaccacttccataaatgctttctcagacttcctcacttaccttccctcctataaaactgatcacccacttgctcctttgtgccacctcaggaccctgcacagagttctgtcacagcacctgtaggatttcactataattgttttgtttagttgtctcccttcctgcagaggttgtacatcattgtaactggccgtagcaggctaatgtgaccccatgaaaacatgttcacattcatgttcatgttcattatatggcaaaagatgtaattaagactttgagatgtggtgtatatcctggattatcccgatggggtctgaatacaattacatgtaccatcctaagagatagggaattttgggacacaagagaagaagcagatgtgaagatgcaacaaagagagatgtggccacaagccaaggcatgccaacagccaccagaaactagaagagtcaaggaatggattctcctacagagtttctggaaaggggggttgctctactgacattatgattttggacttctggcctccagacctcagagcgaataaacttctattgttttaagccaccaa

SEQ ID NO: 258049 - DNA, 781 bp, Homo sapiens
attcctaggtcaaaacaaagcataaacaatcaacgccaacagaaaaatcttccgaagaacaattacaagaagtaactcaggaaattttcccaagaggcaatccagaagagtttgagtttcgatcagcttgtaggactgagacaggagcagaacattgctggaagaaattcacaatacagaccaggatgaagttatttccccaaaagagaggttcgaggcaagtggtcagctccccgttgaaaatcattgtagcagacaaataccgggaatgtaataaattggagaaaagtttgtctctgggcacaaagcctgttgtacctctgagggacaggccaggaaagagagccagtggatggaggatgggtggctgaggctttccatgtgagtcatatctgagtggacatcgggcagttaccagtgggacaaagccccatggatgccatgtgtatgggaagtctttcagcaagaactcacaccttacttggcatcagataattcatactacagagaagccctgtgtatgtattgaatgtggggaaaaaaacacaactcaagccttatacatcatcagaaaattcaccatggatggtgaaaccctatctctactaaaaacacaaaaattatctgggtgtggtggtgtatgctggtaatcctggctactcaggaggctgaggcagaagaattgcttgaaccagggaggcggaggttgcattgagctgagattgcggcactgcactccagcctgggcgacagagtgagactccatctcaaaagaaaagaa

SEQ ID NO: 258050 - DNA, 560 bp, Homo sapiens
gctgtttcacccaaagctcttaggattccttatgtctccccttcccaccttatacttgtttcacccaggaaagagcctctgtcatgcccatcgtctccttccctcctgaaggctcagtatctggttaattacatgacataggaattacttaccatctattttggctatttccatacacattctgagaacaaaataaaagagctcttctccatgcccctctcataatttcttcccatgcccttttttggggaaggcaggccagtcaaagcagtgatggctttgatcagagcaacgagcagatcatgatttattattgccggagtagacagtgggctacattagaggactgcttagacgcatgcttattctagctgctgggagcacctggctgccagttcccaagttcctctccatggggaattgcagctccaaggtggcctcctggagctgcctaactccgccttcactgaaaataaggtgattgaactgtaaagctgaaatcctctgcagtcatgtctcctccagagtcttcaaggtcactcccactttttttctagaca

SEQ ID NO: 258051 - DNA, 614 bp, Homo sapiens
gctgtttcacccaaagctcttaggattccttatgtctccccttcccaccttatacttgtttcacccaggaaagagcctctgtcatgcccatcgtctccttccctcctgaaggctcagtatctggttaattacatgacataggaattacttaccatctattttggctatttccatacacattctgagaacaaaataaaagagctcttctccatgcccctctcataatttcttcccatgcccttttttggggaaggcaggccagtcaaagcagtgatggctttgatcagagcaacgagcagatcatgatttattattgccggagtagacagtgggctacattagaggactgcttagacgcatgcttattctagaaaaggctgaaggaagaaagaaccacccctttccctcctcttctcagctcccttctgctgggagcacctggctgccagttcccaagttcctctccatggggaattgcagctccaaggtggcctcctggagctgcctaactccgccttcactgaaaataaggtgattgaactgtaaagctgaaatcctctgcagtcatgtctcctccagagtcttcaaggtcactcccactttttttctagaca

SEQ ID NO: 258052 - DNA, 577 bp, Homo sapiens
ctacacaaaaattaaacatatttgtatttcaagatgtagcgagctgtcgtggccagttcatggccactttgggaagacatttattaggaggaagcaagatggcactaaagcgtgggagaggacagaagctggagccgtcatgggtgcagaataaggctggcccggaagagtggctgggtggggtcacacctggtagttcagatatcttttgctatcgattttctaattttctaagatgaagtgttaatgtcccagcgtgtggatggtgcctccggatggacaattcaggttgcatgccccagacctcgtgattgggactggccagaacagacaagaccccatcagcaggatggacaagaccccatcagcgggatggaccccatggaaaaaaaaaaaatctaggaactaagacacgattgggcaggaggctgggaaacttactaggaaggatcaaggttgactttgccaccatgacctagccacgaacacgatgggaagaaggctgtggagtggggctgtgggcagtgcctcccggggccctgaatgaagcaagcttggagagggagctggtgtgtgg

SEQ ID NO: 258053 - DNA, 89 bp, Homo sapiens
cagagggtcatccagtgcggacagccctgggggtctggcctccttggtattgtgtcctggaaggaggccctgccagaggcccccagctc

SEQ ID NO: 258054 - DNA, 453 bp, Homo sapiens
gtgctaccttggctgggcagtgaaggttaaggaggatttgagaagtggcaaatgggggaaaggtgttcaggaagagagaacagcacgaacaatgacagtgagctgggaaacaggctggcgtgtttggggaatggcaattaaacaggatggaagaagatggcactagaaagttagcttggggacagattgtatgccaggtgaaagagtttggattttaacctgtcactctgtgataggctgatcacataattcatcatccaaatgcgccacttttgagagttaatgggcatgctacccagatagaataaccaaacactcagcagaaaacagcactgttccaggccaacagaggcatacagtcacctagctttgggaaacctctaaggactaacactcatcaaatttgtttattgtagagggaattctggcagcaatgtggattggaaaaaagag

SEQ ID NO: 258055 - DNA, 282 bp, Homo sapiens
cccatgcgctcagcttcccctgagccaactggagctggagctcattcatctgtcacacccctacactctgcaaggaggaagggtgtggtcctccccattcctcatcgactcttccagggtttatctctgccctcaaaacccacgaaggtggggtgcggtgactcatgcctgttatcccagctctttgggaggtggaggcaggcagattgttggagatcaggagtttgaaaccagcctggccaacatggcaaaacctcttctctactaaaaatacaaaaatta

SEQ ID NO: 258056 - DNA, 393 bp, Homo sapiens
caaactatggttattcagacttgagtccttggcagatactgtcttgaatgaatgaagtgacagtatttgttgccactgataaaatttatgcttttaagattggaattttggccaggcgcggtggcccactcctgtaatcccaacactttgggaggccaaggcgggtggatcgcctgaggtcaggagttcaagaccagcatggccaacatggtgaaaccccatctctactaaaaatacaaaaattagccagacatgatggtgggcacctgtaatcccagctacttgggagactgaggcaggagaattgcttgaacctgggaggcagaggttgcggtgagccaagatggcaccactgcaactccagcctgggtgacagagtgagacttcatctca

SEQ ID NO: 258057 - DNA, 305 bp, Homo sapiens
agcaggacccaaggactcaggcagtggcttttcaggtgtgtgggccgaggactggggagtcggtgaattctggggcccctggggtggccgttcaggaactgcagcagctccccccaccacagatgctcgctgcctactgaagcggccacgtgtttgaatgaagagcagttagaggaacgcttgcaagagaatgtgtttattacctgaggttatgacaatacagaacatacaatgttttctgtggaaaatgtgatactacagaggaaaaggtcactttaattaaatggcaattagaagtaacagca

SEQ ID NO: 258058 - DNA, 359 bp, Homo sapiens
cagatgcacgccaccacgctcagctaattaaaatcctgagctcaagcaatcctcccaccgcaggctcccaaagtgctgggattacaggtatgaaccacttcacccagccagtactggttacttaattgtgataaataaaccatattaatgtaagatattaacaatgagggaaatcgggtgcggggtatatgagaactctctatgctatcatcacaatctttcaataaacctaaaactattcaaaaatggagagtttattttttaaaaattacgcatacaaatatgctttgccagcagggtgcggtggctcatgcctgtaatcccagcactttgggaggctgaggcaggaggatcacttg

SEQ ID NO: 258059 - DNA, 281 bp, Homo sapiens
atataacaacttctagctggattttaaggtacccatcacgctaactaacaaatgacagtgggtcaggatgctaattcacagcacgtcagcacatcaatttgccagaagtttgtttgtgtaaggaaacaacttcataattgttccctcagatactacatgccaaaaagacaccttctataaatccttctacacacgttaactcagtgtcttaaaatgttttgccagatgtttagaaagtacatcaacagcctgggtgacagagcgagactccatcccccccc

SEQ ID NO: 258060 - DNA, 361 bp, Homo sapiens
atcggcaagtctgtcccaggagggcccagaagccacatctacaaggctcactgacctctttggatggaattgaaggaaaacaagctgcaggccaggaatagctagacataagtacaaggtacacccagacaggacctggcagcctctcaaagcagtgtgggccaactgcagaaagccaggcaccagacagcacttcctggagtccgtacctccgtgccatcctatggaaagagaaataggggaagttctctaagtaactcacatccgtgagcgctcctgattgccctctggagagtccaggctgaattaaagaggagctggattcgatgcttgaaaatgaattccgtgctttactttcctc

SEQ ID NO: 258061 - DNA, 742 bp, Homo sapiens
tactggatcccttgggctgcaggaattcggcacgagattatttctgacagacttaaaaatatttattaattgatttaaagtaaacccattacatgttcaggtataacatatttttatgaaaaataattataaaacaaaaacttagtaataagaatagcattattttctatttttgaaaatctacttaatatttcatttcatagtagatgactggattctggattctcattcattatgttgtaatatcccacatcagtagcccccaaaactgcactgcatacactcatgagagaacgagagtagaaaggtaagtaacaacgtagtatcgtgaacatagttttaatgtcgtgaacctcctgaaaaggtctcaggtttcagggtttccagaccacattttgagaaccgttgttctagtggggtttgaaatcagagggacaaaagttgtgcacattttaaatttaaaagacactttcaactgccttccagaataccagtttacactcccatcaccaatataggccaaccccgccctacttctttaccaatgtttaatactttcagagttttaaatttgccaatcttaatggttaaaatgccatctcattgttttagcttgtagttccctatttacactgggatttcatgagacacacatttctgggctcactgtgacacttggcggtgtctggtgactgccccctccctccccagtgcccacctttttctttggcctgggatgttt

SEQ ID NO: 258062 - DNA, 483 bp, Homo sapiens
ggaggggattcttcagagttccctgtaactagatgacatttcacttattacagctgatataatattttttattatcacttatgtttttagattttcaaagtttcttcctttgtaaattcttacatcatattcctgttctcttaaaattctacaatttaacacctttaatgttacttctattatagctttttagcacctccttttatgctcgccaatatgtatacgattgtgaaagtaaaacttggcaattactgagttaatgtgatgtgtgtagaggagacagactacaccacctgatttgatttcaaaatgaatcttcatttagtcctcaaagagttattaaatgatgctgttagtcactagttattgaacagcggcttattttcttgaaatgtattcagaataagattcttttctcaaatatttcatttaattaggttctttgatagtatttgctttaaataaaatgttttcaaattaaaa

SEQ ID NO: 258063 - DNA, 5027 bp, Homo sapiens
aaagcgacaccttctacgctgggtggccagtttccatgtggcttggtgtgggagcagagacgggacagtggggcctgtccttgttcatccactccctgcctgtgctggttgcagcctcagagcaggcgggagatgttcttggggcttaggctcctggcagagcacatagcaggagtttgtggggtctgaggttcctgtcccagggttccccgattctgtgcctggcctattaatctttctctggggagcccagtgcccactgccgagcaggctcctgccatcccccatgggcgggtgtgtctgaaggagaatgggatcccggcacggtcttggtttctaacatctcggggtgtgttttggaggcaggcgggagtcatggatgtagatgctgaaagagagaagataacacaggagatcaaggagctggaaaggattttggatcccggctcctcgggctcccacgtggagatctcagaatcaagtctcgagtcagattctgaagcagattcactgccttctgaggacttggatcctgccgatcccccgatctcggaagaagaaaggtggggcgaagccagcaatgacgaggacgatcccaaggataaaaccctccctgaagacccagaaacctgcctgcagctgaacatggtctaccaggaggtcatccaggagaagctggctgaggccaacctgctgctggcccagaaccgggagcagcaggaggaactcatgagggatctggctgggtccaaaggcaccaaggtgaaagacggcaaaagcctgcccccaagcacatacatggggcacttcatgaagccgtatttcaaggacaaggtcacgggcgtggggccacctgccaacgaggacacacgagagaaggctgcccaggggatcaaggctttcgaggagctccttgtgaccaaatggaaaaactgggaaaaggccttgctccgaaagtcagtggtgagtgaccgcctgcagcgattgcttcagcccaagttactgaagctcgagtacttgcaccagaagcagagcaaagtctccagtgagctggagaggcaagccctggagaagcagggcagggaagccgagaaggagatccaggacatcaaccagcttccagaagaggccttgctgggaaacaggctggacagccacgactgggagaagatttccaatattaactttgaaggcagccgcagtgcagaggagatccggaagttctggcagaactcggagcaccccagcatcaacaagcaggagtggagcagggaggaggaggagcggctgcaggcgatcgcggctgcacacggccacctggagtggcagaagattgcagaggagctggggaccagccgcagcgccttccagtgcctgcagaaattccagcagcacaacaaagctctgaaacgcaaggagtggacagaggaggaggaccgcatgctcacgcagctggtgcaggagatgcgcgtcggcagccacatcccctaccgcagaattgtctactatatggaagggagagactccatgcagctgatctaccgatggaccaagagcttggatcctggtctgaagaagggttactgggccccggaggaagatgctaagttgcttcaagctgttgccaaatacggggagcaggattggtttaaaatccgggaagaggtgccaggtaggagcgatgcccagtgccgagatcggtatctcaggagattacatttcagcttgaaaaagggtcggtggaatttaaaagaagaggaacagttaattgaattaatagaaaaatatggtgtcggtcactgggcaaaaatagcttctgagctgccccatcggtctggctcccagtgtctgagcaagtggaagatcatgatggggaagaagcagggtctccggaggcggcggcggagggcccgtcacagcgtccggtggagctctaccagcagcagcggcagcagcagtggcagcagtggagggagcagcagcagcagcagcagcagcagcgaggaggacgagccagagcaggcgcaggccggggagggtgacagagcgctgctgtccccacagtacatggtcccggacatggacctgtgggttcctgccaggcagagcaccagccagccatggagaggaggggcaggggcctggctgggaggccccgctgcctccctcagccctcccaaggggtccagtgccagccagggcggcagcaaggaagcttccaccacagccgcggctcctggagaggagacgagtccggtgcaggtccctgccagggcccacggccctgtcccgaggtctgcccaggcctcccactcagcagacactcgcccggcgggcgcagagaagcaggccctggagggtgggaggcgtctgctgacagtgcctgtggagaccgtgctgagggtgctcagggccaacacggctgctcggagctgcacacagaaagagcagctgaggcagccacccctgcccacctcatccccaggggtcagctctggtgacagcgtggcccgatcccatgtgcagtggctacggcacagagccacccagagtgggcagcggcgctggagacacgctctgcaccggaggctcctgaaccgcaggctgctgctggctgtgaccccttgggtaggggacgttgtcgtgccctgcacacaggcttcccagagacccgccgtagtgcagactcaagcggatggcctcagggagcagctgcagcaggcccgcctggccagcacccctgtgtttaccctgtttacccagctgttccagatcgatactgccggctgcttggaggtcgtccgagagaggaaggccctgccacccaggctgccccaggctggtgctcgggacccaccagtgcatcttctgcaggcatcctcaagtgcccagagcaccccaggccacctcttcccaaacgtgccggctcaagaagcctcaaagagtgccagccacaaagggagccgaagactggcgtccagccgggtggagcgcaccctaccccaggcgtccctgctggcttcaaccggcccccggcccaagcccaagactgtgtcggagctgcttcaggagaagcggcttcaggaggcccgtgccagggaggccacccggggcccggtggtgctcccgtcccagctgctggtctcctcgtctgtgatcctccagccccctctaccacacaccccacacggccgcccagccccgggtcccaccgtcttaaatgtaccgctctctgggcctggggcccccgcagcagccaaacctggcacttctggctcctggcaggaggctgggacttcagccaaggacaagagactctccaccatgcaagccctgcccctcgctcctgtcttctcagaggccgagggcacagcccctgctgcttcccaagcccctgccctgggccccggccagatctctgtgagctgccccgagagtggtctcggacagtctcaggcccccgctgcatcccggaagcagggcctgcctgaggcgccaccctttctccccgcagcccccagccccaccccactgcccgtccagcccctcagcctgacgcacataggagggccacatgtggcgaccagtgtccccctgcctgtcacctgggtgctcacagcccaggggcttctccctgttcctgtaccagctgtggtgagccttcccaggccagcagggacccctggccccgcagggctgctggccactctgctgcctcccctgactgagactcgggcggcccagggccccagggccccagcgttgagcagctcttggcagcccccagccaatatgaacagggaaccggagccttcctgcaggacagacaccccagctcctcccacacacgccctctcccaaagtcctgcagaagcggatggcagtgtggcctttgtccctggagaggcccaggtggccagggagatacctgagcccaggacgtcctcccacgctgaccctcctgaagcagaacccccttggtccgggaggctgccagccttcggtggtgtcatcccagcaactgagccaagggggacgccggggtccccctcagggacacaggagcccagggggcctctgggcctggagaagctgcccctgcgccagcctgggcctgagaagggggccctggacctggagaagccgcccctaccccagcctgggcctgagaagggggccctggacctgggcctgctgtcccaggagggcgaggcggccacacagcagtggctggggggccagcggggggtgcgtgtgcctcttctgggcagcagactgccctatcagcccccagccctgtgcagcctgcgagctctgtccggtctcctactccacaagaaggccctggagcacaaggccacctccctggtggtggggggcgaggctgagcggccggccggagcactgcaagcctcactggggctggtgcgggggcagctccaggacaacccggcctacctcctgttgcgggcgcggttcctggcagccttcaccctccctgcgctcctggccaccctggccccccaaggcgtccgcaccaccctctcagtaccttcgagggtgggctctgagagtgaggatgaagacctcctgagtgagctggaacttgcagacagggacgggcagccgggctgcacgacagccacatgccccattcagggagccccagactctggtaaatgctctgcttcctcctgcctggatacttctaatgaccctgacgacctggacgtgctcagaacccggcatgccaggcacacccggaagcggaggcggctggtgtgagcagcaggacaagcactttctcagaagcccgtggccctgctgacgagagacagcccacccccagcctgcaagagaggcagccagaggccaggtatctgctggccgctgactgaccaggtccgcagtgaacagaggcgggcctgccgactgactgtgtggcatggagcatggctgttccccaagtgcacacctgaacacttggaggaataaagttctgtttttaattgtggaaaaaaaaaaaa

SEQ ID NO: 258064 - DNA, 1847 bp, Homo sapiens
aaggaggaagctggttcctggcctgcccagttgcgtgtagattctgcagaagtggcctccctttggggcagtgtggaaaaggggagaagagaggcctcattctcgtgcaggagcctccggccatcctgatgctgcccagccaggtggccttgtctgagcgagaagctctgggatggacgctgacccggctctgagccgcacacgccacacacacgtgtgctcccagggtgggccatgggcacagtggagggtggtggctgtgtttgtctctggatttctggggtcccaaaggtccctctctgctgtcacctctctgagtgtccttggggagagttttccaatctctgtaggtgaaaccatgtttggaaccctggaaagcatgtggagctggggcccccagagaggcctcctcccctggtgccagggtgcccacttgcagcagctgggaggctggcctccctgagaaaccaccagaagcaggcagcctcagctggacctgtgggcctgtcatagggagtgtggcagagggccttccatctctccccagggttgtgtctcgcaagtccctgggctgaagtgtgggaggaagcaatgtccaagagttggggaggaccccggccagccaggggaagaggccctctgtgccccatccatgtacagcctcctgccctgcctgggtgtgatggctgtcccatgggggagtgggaggcccaccagagggatggcttggatggggtcagagcccccgagggagggagtgcacagtcacgtgtggccccaggagtgcctggagcagctcccgcctgagctgagggtgccctgtcccaagtgggacactcacccacagggcccctcctcactcccgtcccttccccgtccatcatggctcgggggtgtcactcttgtccccactgcctggattttctttcagggagccccagactctggtaaatgctctgcttcctcctgcctggatacttctaatgaccctgacgacctggacgtgctcagaacccggcatgccaggcacacccggaagcggaggcggctggtgtgagcagcaggtgagtcctgagtggggaggccactgccctacaacccaggggacagagtggtgtccagatggcagggggccttggcctctgctcggctctttggcgctcacagcaggtgtgctgggttaggtgggcaggtccagggtcatggaggccctccagggggagaagcatttaacccacatccttcctgctggccacccatgcctcgggccttggcaccactgtgcccctgaccataggctcattccctgcctttggggtctgggctcctccctggccgctgtgctctggtggtgccctgttcccgtgcattgctgcgtcgtctcccagcttgtaaaacgatcaccatccccaaccgcagccaccaggctggctcttcactgctggagccctggtgccctggcctggcccttggcgcatgtgggtcaggtttaccaagcagactgggcgtggccggcgctggggtggtcttggttcctgtttgtctgtcccagccctgcttggggtctggctggggtcaagggcaccccccacctggtgttcctgtgttccaggacaagcactttctcagaagcccgtggccctgctgacgagagacagcccacccccagcctgcaagagaggcagccagaggccaggtatctgctggccgctgactgaccaggtccgcagtgaacagaggcgggcctgccgactgactgtgtggcatggagcatggctgttccccaagtgcacacctgaacacttggaggaataaagttctgtttttaattgtggaaaaaaaaaaaa

SEQ ID NO: 258065 - DNA, 461 bp, Homo sapiens
gctaacggtgctcgcgggtggatgctttggttttgttccagttgggcagggccccagtcagcctccagcagggagagccacgccaaggacgggggagggcgtttctctttgttgttgggtgttttgggctcccgggtctgtgctaatgaccctgacgacctggacgtgctcagaacccggcatgccaggcacacccggaagcggaggcggctggtgtgagcagcaggacaagcactttctcagaagcccgtggccctgctgacgagagacagcccacccccagcctgcaagagaggcagccagaggccaggtatctgctggccgctgactgaccaggtccgcagtgaacagaggcgggcctgccgactgactgtgtggcatggagcatggctgttccccaagtgcacacctgaacacttggaggaataaagttctgtttttaattgtggaaaaaaaaaaaa

SEQ ID NO: 258066 - DNA, 3308 bp, Homo sapiens
agtctcctagaacagcaagcctgtcctggggaagaatctttggatgaaggcatttcgcatggggttggctttgcaggtcactgggcaaaaatagcttctgagctgccccatcggtctggctcccagtgtctgagcaagtggaagatcatgatggggaagaagcagggtctccggaggcggcggcggagggcccgtcacagcgtccggtggagctctaccagcagcagcggcagcagcagtggcagcagtggagggagcagcagcagcagcagcagcagcagcgaggaggacgagccagagcaggcgcaggccggggagggtgacagagcgctgctgtccccacagtacatggtcccggacatggacctgtgggttcctgccaggcagagcaccagccagccatggagaggaggggcaggggcctggctgggaggccccgctgcctccctcagccctcccaaggggtccagtgccagccagggcggcagcaaggaagcttccaccacagccgcggctcctggagaggagacgagtccggtgcaggtccctgccagggcccacggccctgtcccgaggtctgcccaggcctcccactcagcagacactcgcccggcgggcgcagagaagcaggccctggagggtgggaggcgtctgctgacagtgcctgtggagaccgtgctgagggtgctcagggccaacacggctgctcggagctgcacacagaaagagcagctgaggcagccacccctgcccacctcatccccaggggtcagctctggtgacagcgtggcccgatcccatgtgcagtggctacggcacagagccacccagagtgggcagcggcgctggagacacgctctgcaccggaggctcctgaaccgcaggctgctgctggctgtgaccccttgggtaggggacgttgtcgtgccctgcacacaggcttcccagagacccgccgtagtgcagactcaagcggatggcctcagggagcagctgcagcaggcccgcctggccagcacccctgtgtttaccctgtttacccagctgttccagatcgatactgccggctgcttggaggtcgtccgagagaggaaggccctgccacccaggctgccccaggctggtgctcgggacccaccagtgcatcttctgcaggcatcctcaagtgcccagagcaccccaggccacctcttcccaaacgtgccggctcaagaagcctcaaagagtgccagccacaaagggagccgaagactggcgtccagccgggtggagcgcaccctaccccaggcgtccctgctggcttcaaccggcccccggcccaagcccaagactgtgtcggagctgcttcaggagaagcggcttcaggaggcccgtgccagggaggccacccggggcccggtggtgctcccgtcccagctgctggtctcctcgtctgtgatcctccagccccctctaccacacaccccacacggccgcccagccccgggtcccaccgtcttaaatgtaccgctctctgggcctggggcccccgcagcagccaaacctggcacttctggctcctggcaggaggctgggacttcagccaaggacaagagactctccaccatgcaagccctgcccctcgctcctgtcttctcagaggccgagggcacagcccctgctgcttcccaagcccctgccctgggccccggccagatctctgtgagctgccccgagagtggtctcggacagtctcaggcccccgctgcatcccggaagcagggcctgcctgaggcgccaccctttctccccgcagcccccagccccaccccactgcccgtccagcccctcagcctgacgcacataggagggccacatgtggcgaccagtgtccccctgcctgtcacctgggtgctcacagcccaggggcttctccctgttcctgtaccagctgtggtgagccttcccaggccagcagggacccctggccccgcagggctgctggccactctgctgcctcccctgactgagactcgggcggcccagggccccagggccccagcgttgagcagctcttggcagcccccagccaatatgaacagggaaccggagccttcctgcaggacagacaccccagctcctcccacacacgccctctcccaaagtcctgcagaagcggatggcagtgtggcctttgtccctggagaggcccaggtggccagggagatacctgagcccaggacgtcctcccacgctgaccctcctgaagcagaacccccttggtccgggaggctgccagccttcggtggtgtcatcccagcaactgagccaagggggacgccggggtccccctcagggacacaggagcccagggggcctctgggcctggagaagctgcccctgcgccagcctgggcctgagaagggggccctggacctggagaagccgcccctaccccagcctgggcctgagaagggggccctggacctgggcctgctgtcccaggagggcgaggcggccacacagcagtggctggggggccagcggggggtgcgtgtgcctcttctgggcagcagactgccctatcagcccccagccctgtgcagcctgcgagctctgtccggtctcctactccacaagaaggccctggagcacaaggccacctccctggtggtggggggcgaggctgagcggccggccggagcactgcaagcctcactggggctggtgcgggggcagctccaggacaacccggcctacctcctgttgcgggcgcggttcctggcagccttcaccctccctgcgctcctggccaccctggccccccaaggcgtccgcaccaccctctcagtaccttcgagggtgggctctgagagtgaggatgaagacctcctgagtgagctggaacttgcagacagggacgggcagccgggctgcacgacagccacatgccccattcagggagccccagactctggtaaatgctctgcttcctcctgcctggatacttctaatgaccctgacgacctggacgtgctcagaacccggcatgccaggcacacccggaagcggaggcggctggtgtgagcagcaggacaagcactttctcagaagcccgtggccctgctgacgagagacagcccacccccagcctgcaagagaggcagccagaggccaggtatctgctggccgctgactgaccaggtccgcagtgaacagaggcgggcctgccgactgactgtgtggcatggagcatggctgttccccaagtgcacacctgaacacttggaggaataaagttctgtttttaattgtggaaaaaaaaaaaa

SEQ ID NO: 258067 - DNA, 2352 bp, Homo sapiens
tccccctgtgcccgcagcggatggcctcagggagcagctgcagcaggcccgcctggccagcacccctgtgtttaccctgtttacccagctgttccagatcgatactgccggctgcttggaggtcgtccgagagaggaaggccctgccacccaggctgccccaggctggtgctcgggacccaccagtgcatcttctgcaggcatcctcaagtgcccagagcaccccaggccacctcttcccaaacgtgccggctcaagaagcctcaaagagtgccagccacaaagggagccgaagactggcgtccagccgggtggagcgcaccctaccccaggcgtccctgctggcttcaaccggcccccggcccaagcccaagactgtgtcggagctgcttcaggagaagcggcttcaggaggcccgtgccagggaggccacccggggcccggtggtgctcccgtcccagctgctggtctcctcgtctgtgatcctccagccccctctaccacacaccccacacggccgcccagccccgggtcccaccgtcttaaatgtaccgctctctgggcctggggcccccgcagcagccaaacctggcacttctggctcctggcaggaggctgggacttcagccaaggacaagagactctccaccatgcaagccctgcccctcgctcctgtcttctcagaggccgagggcacagcccctgctgcttcccaagcccctgccctgggccccggccagatctctgtgagctgccccgagagtggtctcggacagtctcaggcccccgctgcatcccggaagcagggcctgcctgaggcgccaccctttctccccgcagcccccagccccaccccactgcccgtccagcccctcagcctgacgcacataggagggccacatgtggcgaccagtgtccccctgcctgtcacctgggtgctcacagcccaggggcttctccctgttcctgtaccagctgtggtgagccttcccaggccagcagggacccctggccccgcagggctgctggccactctgctgcctcccctgactgagactcgggcggcccagggccccagggccccagcgttgagcagctcttggcagcccccagccaatatgaacagggaaccggagccttcctgcaggacagacaccccagctcctcccacacacgccctctcccaaagtcctgcagaagcggatggcagtgtggcctttgtccctggagaggcccaggtggccagggagatacctgagcccaggacgtcctcccacgctgaccctcctgaagcagaacccccttggtccgggaggctgccagccttcggtggtgtcatcccagcaactgagccaagggggacgccggggtccccctcagggacacaggagcccagggggcctctgggcctggagaagctgcccctgcgccagcctgggcctgagaagggggccctggacctggagaagccgcccctaccccagcctgggcctgagaagggggccctggacctgggcctgctgtcccaggagggcgaggcggccacacagcagtggctggggggccagcggggggtgcgtgtgcctcttctgggcagcagactgccctatcagcccccagccctgtgcagcctgcgagctctgtccggtctcctactccacaagaaggccctggagcacaaggccacctccctggtggtggggggcgaggctgagcggccggccggagcactgcaagcctcactggggctggtgcgggggcagctccaggacaacccggcctacctcctgttgcgggcgcggttcctggcagccttcaccctccctgcgctcctggccaccctggccccccaaggcgtccgcaccaccctctcagtaccttcgagggtgggctctgagagtgaggatgaagacctcctgagtgagctggaacttgcagacagggacgggcagccgggctgcacgacagccacatgccccattcagggagccccagactctggtaaatgctctgcttcctcctgcctggatacttctaatgaccctgacgacctggacgtgctcagaacccggcatgccaggcacacccggaagcggaggcggctggtgtgagcagcaggacaagcactttctcagaagcccgtggccctgctgacgagagacagcccacccccagcctgcaagagaggcagccagaggccaggtatctgctggccgctgactgaccaggtccgcagtgaacagaggcgggcctgccgactgactgtgtggcatggagcatggctgttccccaagtgcacacctgaacacttggaggaataaagttctgtttttaattgtggaaaaaaaaaaaa

SEQ ID NO: 258068 - DNA, 2319 bp, Homo sapiens
aacttacaaagagctcatacaggccgggcatggtggctcacgcctgtaatcccagctgttccagatcgatactgccggctgcttggaggtcgtccgagagaggaaggccctgccacccaggctgccccaggctggtgctcgggacccaccagtgcatcttctgcaggcatcctcaagtgcccagagcaccccaggccacctcttcccaaacgtgccggctcaagaagcctcaaagagtgccagccacaaagggagccgaagactggcgtccagccgggtggagcgcaccctaccccaggcgtccctgctggcttcaaccggcccccggcccaagcccaagactgtgtcggagctgcttcaggagaagcggcttcaggaggcccgtgccagggaggccacccggggcccggtggtgctcccgtcccagctgctggtctcctcgtctgtgatcctccagccccctctaccacacaccccacacggccgcccagccccgggtcccaccgtcttaaatgtaccgctctctgggcctggggcccccgcagcagccaaacctggcacttctggctcctggcaggaggctgggacttcagccaaggacaagagactctccaccatgcaagccctgcccctcgctcctgtcttctcagaggccgagggcacagcccctgctgcttcccaagcccctgccctgggccccggccagatctctgtgagctgccccgagagtggtctcggacagtctcaggcccccgctgcatcccggaagcagggcctgcctgaggcgccaccctttctccccgcagcccccagccccaccccactgcccgtccagcccctcagcctgacgcacataggagggccacatgtggcgaccagtgtccccctgcctgtcacctgggtgctcacagcccaggggcttctccctgttcctgtaccagctgtggtgagccttcccaggccagcagggacccctggccccgcagggctgctggccactctgctgcctcccctgactgagactcgggcggcccagggccccagggccccagcgttgagcagctcttggcagcccccagccaatatgaacagggaaccggagccttcctgcaggacagacaccccagctcctcccacacacgccctctcccaaagtcctgcagaagcggatggcagtgtggcctttgtccctggagaggcccaggtggccagggagatacctgagcccaggacgtcctcccacgctgaccctcctgaagcagaacccccttggtccgggaggctgccagccttcggtggtgtcatcccagcaactgagccaagggggacgccggggtccccctcagggacacaggagcccagggggcctctgggcctggagaagctgcccctgcgccagcctgggcctgagaagggggccctggacctggagaagccgcccctaccccagcctgggcctgagaagggggccctggacctgggcctgctgtcccaggagggcgaggcggccacacagcagtggctggggggccagcggggggtgcgtgtgcctcttctgggcagcagactgccctatcagcccccagccctgtgcagcctgcgagctctgtccggtctcctactccacaagaaggccctggagcacaaggccacctccctggtggtggggggcgaggctgagcggccggccggagcactgcaagcctcactggggctggtgcgggggcagctccaggacaacccggcctacctcctgttgcgggcgcggttcctggcagccttcaccctccctgcgctcctggccaccctggccccccaaggcgtccgcaccaccctctcagtaccttcgagggtgggctctgagagtgaggatgaagacctcctgagtgagctggaacttgcagacagggacgggcagccgggctgcacgacagccacatgccccattcagggagccccagactctggtaaatgctctgcttcctcctgcctggatacttctaatgaccctgacgacctggacgtgctcagaacccggcatgccaggcacacccggaagcggaggcggctggtgtgagcagcaggacaagcactttctcagaagcccgtggccctgctgacgagagacagcccacccccagcctgcaagagaggcagccagaggccaggtatctgctggccgctgactgaccaggtccgcagtgaacagaggcgggcctgccgactgactgtgtggcatggagcatggctgttccccaagtgcacacctgaacacttggaggaataaagttctgtttttaattgtggaaaaaaaaaaaa

SEQ ID NO: 258069 - DNA, 4572 bp, Homo sapiens
aaagcgacaccttctacgctgggtggccagtttccatgtggcttggtgtgggagcagagacgggacagtggggcctgtccttgttcatccactccctgcctgtgctggttgcagcctcagagcaggcgggagatgttcttggggcttaggctcctggcagagcacatagcaggagtttgtggggtctgaggttcctgtcccagggttccccgattctgtgcctggcctattaatctttctctggggagcccagtgcccactgccgagcaggctcctgccatcccccatgggcgggtgtgtctgaaggagaatgggatcccggcacggtcttggtttctaacatctcggggtgtgttttggaggcaggcgggagtcatggatgtagatgctgaaagagagaagataacacaggagatcaaggagctggaaaggattttggatcccggctcctcgggctcccacgtggagatctcagaatcaagtctcgagtcagattctgaagcagattcactgccttctgaggacttggatcctgccgatcccccgatctcggaagaagaaaggtggggcgaagccagcaatgacgaggacgatcccaaggataaaaccctccctgaagacccagaaacctgcctgcagctgaacatggtctaccaggaggtcatccaggagaagctggctgaggccaacctgctgctggcccagaaccgggagcagcaggaggaactcatgagggatctggctgggtccaaaggcaccaaggtgaaagacggcaaaagcctgcccccaagcacatacatggggcacttcatgaagccgtatttcaaggacaaggtcacgggcgtggggccacctgccaacgaggacacacgagagaaggctgcccaggggatcaaggctttcgaggagctccttgtgaccaaatggaaaaactgggaaaaggccttgctccgaaagtcagtggtgagtgaccgcctgcagcgattgcttcagcccaagttactgaagctcgagtacttgcaccagaagcagagcaaagtctccagtgagctggagaggcaagccctggagaagcagggcagggaagccgagaaggagatccaggacatcaaccagcttccagaagaggccttgctgggaaacaggctggacagccacgactgggagaagatttccaatattaactttgaaggcagccgcagtgcagaggagatccggaagttctggcagaactcggagcaccccagcatcaacaagcaggagtggagcagggaggaggaggagcggctgcaggcgatcgcggctgcacacggccacctggagtggcagaagattgcagaggagctggggaccagccgcagcgccttccagtgcctgcagaaattccagcagcacaacaaagctctgaaacgcaaggagtggacagaggaggaggaccgcatgctcacgcagctggtgcaggagatgcgcgtcggcagccacatcccctaccgcagaattgtctactatatggaagggagagactccatgcagctgatctaccgatggaccaagagcttggatcctggtctgaagaagggttactgggccccggaggaagatgctaagttgcttcaagctgttgccaaatacggggagcaggattggtttaaaatccgggaagaggtgccaggtaggagcgatgcccagtgccgagatcggtatctcaggagattacatttcagcttgaaaaagggtcggtggaatttaaaagaagaggaacagttaattgaattaatagaaaaatatggtgtcggtcactgggcaaaaatagcttctgagctgccccatcggtctggctcccagtgtctgagcaagtggaagatcatgatggggaagaagcagggtctccggaggcggcggcggagggcccgtcacagcgtccggtggagctctaccagcagcagcggcagcagcagtggcagcagtggagggagcagcagcagcagcagcagcagcagcgaggaggacgagccagagcaggcgcaggccggggagggtgacagagcgctgctgtccccacagtacatggtcccggacatggacctgtgggttcctgccaggcagagcaccagccagccatggagaggaggggcaggggcctggctgggaggccccgctgcctccctcagccctcccaaggggtccagtgccagccagggcggcagcaaggaagcttccaccacagccgcggctcctggagaggagacgagtccggtgcaggtccctgccagggcccacggccctgtcccgaggtctgcccaggcctcccactcagcagacactcgcccggcgggcgcagagaagcaggccctggagggtgggaggcgtctgctgacagtgcctgtggagaccgtgctgagggtgctcagggccaacacggctgctcggagctgcacacagaaagagcagctgaggcagccacccctgcccacctcatccccaggggtcagctctggtgacagcgtggcccgatcccatgtgcagtggctacggcacagagccacccagagtgggcagcggcgctggagacacgctctgcaccggaggctcctgaaccgcaggctgctgctggctgtgaccccttgggtaggggacgttgtcgtgccctgcacacaggcttcccagagacccgccgtagtgcagactcaagcggatggcctcagggagcagctgcagcaggcccgcctggccagcacccctgtgtttaccctgtttacccagctgttccagatcgatactgccggctgcttggaggtcgtccgagagaggaaggccctgccacccaggctgccccaggctggtgctcgggacccaccagtgcatcttctgcaggcatcctcaagtgcccagagcaccccaggccacctcttcccaaacgtgccggctcaagaagcctcaaagagtgccagccacaaagggagccgaagactggcgtccagccgggtggagcgcaccctaccccaggcgtccctgctggcttcaaccggcccccggcccaagcccaagactgtgtcggagctgcttcaggagaagcggcttcaggaggcccgtgccagggaggccacccggggcccggtggtgctcccgtcccagctgctggtctcctcgtctgtgatcctccagccccctctaccacacaccccacacggccgcccagccccgggtcccaccgtcttaaatgtaccgctctctgggcctggggcccccgcagcagccaaacctggcacttctggctcctggcaggaggctgggacttcagccaaggacaagagactctccaccatgcaagccctgcccctcgctcctgtcttctcagaggccgagggcacagcccctgctgcttcccaagcccctgccctgggccccggccagatctctgtgagctgccccgagagtggtctcggacagtctcaggcccccgctgcatcccggaagcagggcctgcctgaggcgccaccctttctccccgcagcccccagccccaccccactgcccgtccagcccctcagcctgacgcacataggagggccacatgtggcgaccagtgtccccctgcctgtcacctgggtgctcacagcccaggggcttctccctgttcctgtaccagctgtggtgagccttcccaggccagcagggacccctggccccgcagggctgctggccactctgctgcctcccctgactggacctgggcctgctgtcccaggagggcgaggcggccacacagcagtggctggggggccagcggggggtgcgtgtgcctcttctgggcagcagactgccctatcagcccccagccctgtgcagcctgcgagctctgtccggtctcctactccacaagaaggccctggagcacaaggccacctccctggtggtggggggcgaggctgagcggccggccggagcactgcaagcctcactggggctggtgcgggggcagctccaggacaacccggcctacctcctgttgcgggcgcggttcctggcagccttcaccctccctgcgctcctggccaccctggccccccaaggcgtccgcaccaccctctcagtaccttcgagggtgggctctgagagtgaggatgaagacctcctgagtgagctggaacttgcagacagggacgggcagccgggctgcacgacagccacatgccccattcagggagccccagactctggtaaatgctctgcttcctcctgcctggatacttctaatgaccctgacgacctggacgtgctcagaacccggcatgccaggcacacccggaagcggaggcggctggtgtgagcagcaggacaagcactttctcagaagcccgtggccctgctgacgagagacagcccacccccagcctgcaagagaggcagccagaggccaggtatctgctggccgctgactgaccaggtccgcagtgaacagaggcgggcctgccgactgactgtgtggcatggagcatggctgttccccaagtgcacacctgaacacttggaggaataaagttctgtttttaattgtggaaaaaaaaaaaa

SEQ ID NO: 258070 - DNA, 503 bp, Homo sapiens
tgaagtggtgtcttgtggttttgacgtgcgcttccctgtggctgatgtggagcctcttttcatgtggttggtgactgttcatagaaataggtttttagagaagtgtctgttgaagtcctttgcccatttttgacattacttgtctagttatgactgacttgtaagagttcttcatatgtttcagatataagtcctttatcggacacgtgacttgcaaacgttctctcccagcctgtacactttctacttttttgatggtgtcctttgggacacaaaagctttagcttttgatgaagtctactttatctgtagttttcttttgttgcttgcgcctttagtgtcatatccaagaaaccattaaagaagcttggggcagcagcgggcggcgtctcggcatctaaaacgttctttgcttttcatgtcacgttcaggtatctcaggagattacatttcagcttgaaaaagggtcggtggaatttaaaagaagaggaacagttaattga

SEQ ID NO: 258071 - DNA, 445 bp, Homo sapiens
gttgcaaagcccctgctgtggccagttatgaagggtgcctatccctgcccctgcttctgtcacccagaggccctcccagggaaaggagaatacatgcccagctcttgacacaggcctggtgagaattcaatgtctgaccatcagtacgtcccaggcccacgttcgcatcaaatcgtagaactactgggaggactctcagaggtgtcgtgttaactttcagcgactccccctgaaaggaggctgatttcttcatcaaagcccccagctgaggcttgctgagtggggaagctgtccctgcctgcatggggtctggagctgctttggtaaatggccaaactgtcggcctgcattgagactggccactggacagcctggatacaaaacatgctgttttgtttgttttgtttacctttgaaacaaattaaaacaattaaggctagattta

SEQ ID NO: 258072 - DNA, 412 bp, Homo sapiens
aaggagggcccgccatctcacggcaggtgaagaagacaaggagaaaaagaggccatttttttcctctgatgagcagtacccactctcttatagaacaatccgggctatgcctgggggcctactggttaatcccatcctgtatgggaaatacagaaagaatatcgagcctggaacaaaactgctacaatttattactccctcacatttacctgtatgcactacctgactgaccctcacagcaacttcacacaatgtggactgctaattccactttgcaagtgaagaaactgaggctccgaaaggcggcaaccgcagaggtggatctggttcctgtttccaggcctttgccccttctgttccctcttgtggccagccccccgaaacactaaaaatggaaataactgtcattact

SEQ ID NO: 258073 - DNA, 420 bp, Homo sapiens
cagggagtggcagcctggtgcctgggaggacacacggatccctcaaaacactggagttagcctgtggaaccggcctcttggatctccagcccccaattcccatgcaagtctggcctgcaggttaatggtgctacatcagactcttctgggcagtgcactctgccagccctaaggcactggggagccctggacagacaatggcaggtaaaatgaacaatgagcacctccctaacacaaagacaagcaaaatcacacactgcaggagtccctgacgggctacccaagagaaagtgtgctgcagccagaggaaatagtgccagtcacacacagaagggaatggcagattgcacatctagaagtgagcaggtgtctaccatgcttaaagtgaaaaaaactgctaattattgtaaagggtgtaga

SEQ ID NO: 258074 - DNA, 398 bp, Homo sapiens
gagtttcttactttaccattttggaagtattttttcatatcatctttcagggactagacctgtgggaggctctgctacctttgctttgaatatgtcacagaccggaaatgagaaagatcttggaggagaaaacacaagtgatttctagtggctaagtctgacagtgatatggtttattgctattcacattctgttagccaaaacccaaccatctggccatttccaactgacagaaaaacagaagtggagtttagctgtgtgtgaatgatggagttagtattttcttatgtggatgggggtctccctaataccacctttacacactagctgagaaaaataatatgattatctcaatagatacaatgaaagtatttgataaaattcaacagccattgatt

SEQ ID NO: 258075 - DNA, 410 bp, Homo sapiens
taaatgagttaatacatgtgaagcacttagcccagtgcctggcagatagaaactctatataaggttaaaggtaataatggtggtagtagtagcagtagttatatgaggatttaaatttcttctttcatgccaggcatggtggctcacgcctattatcccagcactttgggatgccaaagcaggcagatcacttgaggctgggagttcagcaccaacctgcccaacctggagaaaacccgtctctactaaaaatacaaaaattagccgggtatggtggtgtatgcctgtaatcccagctactcaggaggctgagacacaagaatagctcgaacctaggaggcagaggttgtagagagccaagatgatgccactgcactccagcctgggcaacagaatgagactgtatttaa

SEQ ID NO: 258076 - DNA, 383 bp, Homo sapiens
atccacccacctcagcctcccagagtgctgggattacaggcatgagccactgtgcccagcctattcttaaagaataattacaaaatgaagattccgaaaccaccacgtaggccaagctatagaatgcctccgagcctgcagttcacattccccgtgcatcttttccctgttacaaacccctcctatcccagaagtaactagtctgctgatatttgtcattattttcttgcctttagtatttctgcatgcattcctaaacaatatagcttgattatgcctggttttgaactttaaattaaaagaagcttactacatatatgtattcttttgtattttgcttcttttacttaatgttgtgggttgattcacctatattgtaatta

SEQ ID NO: 258077 - DNA, 440 bp, Homo sapiens
actcggcttcagacacttatgagcagaacttacctgaaacatgccctgatgtcccctcccccatctcagctgctttccccaggcttcgcttctgcccctgtcactggcgggagtccatccaaaccttgagtctggcgttcaagtctggccgcctcacccctcctcttgttggcacatcagccttgggcccctctccctggcccactgggttcctgcccctttgtcctcaagcccctctactccagaaagtcagcctgaattgcacccttctccccaccccacccacgtgaagtagaatcaagagcaataccgggctccccacctaaaagctggggggttggtttcaagtcttctcagtccgattattcccatctgaactccatgaacagggaactacagcttctcctctgacatcctaaacatctttaactattaggggt

SEQ ID NO: 258078 - DNA, 670 bp, Homo sapiens
tccctaacgctcaagtctagcccctcatttcctggcaagcatcaagcttgattgtgtctgtaacctctcagaagtcagacctcagaagtgtgcttttctgggaaatcggggtcagggaggaaagaaggagggaataaagacattgtaatagatttatatatatcattgtaactcatccacacaacaatcctgtaaggtgtggccactgtactcagaaaactgaggctcaaagagattgagtaacttaccaaaacttcacatgtactaaaagtggagcctagatttcaaacacctgtaagactctgaaatctatattagctcttctatacatgagcctaaaatgcaactgtaaaccaataagactgacttcctcttgaggcttatcactagctctgaatagaagcattcccaaatgctgtctaagcaattgttgcgtcatgggaataagttgataaattctcagggttacatactcctttagatgcactggaacttttctcagtatgtagaatcaagtgtaaggaaaaaggatttgaaggggaaggggagaaataaaacaggactgagccttacacgtgttgaccagaacagataatgtttggattttctttacttttttcccagagaaatcgaataaagaagtttgtttctgttacctaaaatcaactcc

SEQ ID NO: 258079 - DNA, 399 bp, Homo sapiens
tatcactgtccattaagtagctctttattttagagtatgcataagaaatgacatggaagaaactttcttcaaactacagaataagttaacacagtctaggtttgaaaataaacggtgtagagggttaaagtcttaattatataagattttcacatgatacataaacagctgttagatattaatctagaggaactcaggaagcaagaaatcattggggatcaaataaagagcaaaattttcaacaaacaaagtgtcagaagagcctggtatgaaattgaagcaaaaagctggcatctgccaaggtaagaatcttgattaaagttgctcaaattataaagttgttacagtctggaaaatcagctcccagaagcatctgctgaagctgtttaacaggtgggc

SEQ ID NO: 258080 - DNA, 265 bp, Homo sapiens
cctcattcgggtgatgacaaaggcgggacatgcaagttctctaatggacggtaacagaagaaagcagaggtctgagaactgacgtcagggagcagtcaagatcccatcaggctgcccatgtatttcctcttaatatttgacaatgaaaagggtaattaggactcgcagcaaagcagccttgcaatggaatcacttaaactaggccgtgggttctttccacatggaaagggcatatggggtgtagaaccgtgagagtcacgctgag

SEQ ID NO: 258081 - DNA, 413 bp, Homo sapiens
ccctgaagaaagaggccgggtgccctcccaatacctggaggaaaggaatgtccttatctttgaagataaaatgacactgagaataatctgtacaaacaagatgaaactgcctttgcaaaattatgacaataagagaaatctgacatacttgactccatcttgtttctgacctccaagatgtccttggtcattcctgggcataggccaacttaactttgggagaaatttattttttttattttttatttttttgtgatggagtttcactcttgtcacgcaggctggagtgcaatggtggtcttggttcactgcaacctccacctcccgtgttcaagcaattctcctgcctcagcctcctgagtagctgggattacaggtgcctgccaccacgccaggctaatttttattttttt

SEQ ID NO: 258082 - DNA, 287 bp, Homo sapiens
aagtgctgggattacaggcgtgagccactgcgtccagccaaaaagctatttttgaatgtgatctgtgtgaaaataattccctatggtatgacatatgataggcagggatgatgtatctcagaaatcatactcctgtcttgatatcccatcaaatatcaatgtttacatttagcgtttggatgtctggcaggacattaaaaaattggcagagctgtcccacacatgcagaacatctatagcgttcttgcctcctcaaaggtaatcttcatgtgacaacaacaacaaca

SEQ ID NO: 258083 - DNA, 432 bp, Homo sapiens
ataatgataattattacatatagacataattacttcaatatgactctttttctcataaaaataatgacatatttgagtcaggcataatacattttttctgaggttggagttagcaggaaaatgttatcttttatgaataaataattcccagattggttgctacatatcatgattcaaaaagtaaaataattacctggatgtggtgatgtgcacctgtggtcccagctactcgggaggctgagacgagagggtcatttgagcccaggaagttgaggcttcagtgagctataatggccccacttgcagtccagcctaggcaatagagtgagaatctgtctctattaaaaaaaaaataaaatgttcttactagaaaacattatatttagaattttagtgattattccatttataatattatccgtagctaccaaa

SEQ ID NO: 258084 - DNA, 392 bp, Homo sapiens
gagagtgtttgtaacttagttatatattactctcaaatgtacttacttggtgtaggttcacaagaattttaaagcaaaattaaaagagcatcaaacggccgggcgcgttggctcacgcctgtaatcccagcactttgggaggccgaggcgggtggatcatgaggtcaggagatcgagaccatcctggctaacaaggtgaaaccccgtctctactaaaaatacaaaaaattagccgggcgcggtggcgggctcctgtagtcccagctactcgggaggctgaggcaggagaatggcgtgaacccgggaagcggagcttgcagtgagccgagattgcgccactgcagtccgcagtctggcctgggcgacagagcgagactccgtctcaaaaaaaa

SEQ ID NO: 258085 - DNA, 548 bp, Homo sapiens
cagaatgttatggtccagtgaaagtctagagaagaggcacgtcagcagcctgtacacacccagtcacacctgtaacaggaacaggccctaccaactgtgaagccatctcattaacttagacaactgtaccagcaatgtgcacacacatcaggccttttagtaaactgtcaaccccatgattgaagaaaaagcaaaaactttttgaatctagagtctcaggaagaagaacctctagtgcctgaaccagcctgtaatgatggatgcaactgacagtattaacttgacttgggcatacctggagactgaccatgtataaaaaaatgcttctgaatgttcagttttaagctaaaaagtctagtaggggccaatctggtgattattttttatttatgaggaacatcttagccctggtctgtcccatcctgtggcgtggaacacaggccacacaggggattgaggccattccttttttgttaaatgaagtctgacaggtgaaaggttgttcagaaaaaaagtgctaaataaaaatgctatacaaactgcataat

SEQ ID NO: 258086 - DNA, 442 bp, Homo sapiens
gttttggaaatcccaaaattcccttctttttcccagccacagatatgacctcatgagaaaagctgaggtcttagagtcaaatctgagacccagaatagtttgcaagctgtgtgacctagggctagtggctgaacctctctgggcttcctgctccttgatacttacaaggaaatgacaccaccctttccctcccaggtaatttggaaggatttcaatgcaggaaaagtgcctgccttataaaagacttaaaaaaaaaaaaaaaagtgtgctttgacttcttccctgtgcctgcatgggatgggaaggagaacttctcccagaggactggcatggtttgggagcatttctgtttcctattggccccagcggatgggagtcaaaggctgtgagacacagaaccgtggcctgggagcaggaatcaggaagccgttaacgaggaatc

SEQ ID NO: 258087 - DNA, 356 bp, Homo sapiens
  misc_feature (4)..(4): n is a, c, g, or t
  misc_feature (6)..(7): n is a, c, g, or t
  misc_feature (10)..(10): n is a, c, g, or t
  misc_feature (15)..(15): n is a, c, g, or t
  misc_feature (19)..(19): n is a, c, g, or t
  misc_feature (21)..(25): n is a, c, g, or t
  misc_feature (31)..(31): n is a, c, g, or t
  misc_feature (34)..(34): n is a, c, g, or t
  misc_feature (36)..(36): n is a, c, g, or t
  misc_feature (51)..(51): n is a, c, g, or t
  misc_feature (63)..(63): n is a, c, g, or t
  misc_feature (84)..(84): n is a, c, g, or t
  misc_feature (86)..(86): n is a, c, g, or t
  misc_feature (105)..(105): n is a, c, g, or t
  misc_feature (121)..(121): n is a, c, g, or t
  misc_feature (157)..(157): n is a, c, g, or t
  misc_feature (307)..(308): n is a, c, g, or t
  misc_feature (322)..(322): n is a, c, g, or t
  misc_feature (333)..(333): n is a, c, g, or t
  misc_feature (354)..(354): n is a, c, g, or t
gtgncnnctnctctntgangnnnnngtgaantcntncatgggaggagcaangtgggggagganggggtgggggtggggcagaanangaggctgagcagttaatanaggcgctcgaccttanaggaggagagtccgaggtctttattggtagtattcnaatgtggttcatccagagttattttctgtggctgaatggcctactctgaaatccacagggaaaaaacaactcacattcaacccttgagatgctaagttttcttttaaagtaaaggaaatgttataagatttctgaaaccaccaacctttnncgatattgtcagancttctccaacntttccactgcatttgtcagcnat

SEQ ID NO: 258088 - DNA, 226 bp, Homo sapiens
gaaagaaaggagccacatggagctctggaggctgagtggccggcaggctcagtggttgagaggaagctcaccagacagctgtctgctgctgctccatgcttctgcctcagcagcatcacacattacagcagctcatgagccctagacattacctgcatattgttctaaccaggaatatgagttatgtgaaagccaggaatccattatatcattttgttctatttgc

SEQ ID NO: 258089 - DNA, 299 bp, Homo sapiens
atatacatatatagcaaaaaagctggtttaaaaatatcagatggctttgggacatcaactcagtgacaccaaagcatttagaaatgtataataatttgttgcaagtaaaggctgatttcctcgactgttgaagaggtggttttctacaggactgaaactcaggtttcctgagtttcctgaactgtgttgggcagctgttgcccaacgcaattcctgttaagctacacctgctctgtgggccttagatgcctaatttgcttcagggccgaaataataaaagctagaagtggcatgtggta

SEQ ID NO: 258090 - DNA, 453 bp, Homo sapiens
atttctttggggaattgcccccataaacttgtcaatgatttcaccattcttccacccaagctttaccttaaatttgatgcttgtttttgcttcaatattggcagaattcacgttgctctgataggagctcttttcacactgttttgtctttcatccttcttagtgcctcaaattagatactgtgtacaatgtcattacaagttagtaggagtttattttgatgcaaaaatttaaaaattatgcataatttttttgtaatatgcatttttcatgaacttgttgaagacccctggtatagtactgataagtaattttatgtatgactcccttcccctagaaagagccaaatacggctggggtcatgtagactcactagttaagaggcaggactccctggatctgtctgtcattttcccttgggctcaataaaacaggaaattctacagcaaagaa

SEQ ID NO: 258091 - DNA, 354 bp, Homo sapiens
tgaggaatgctgggacaacttttcaaatgtcaattttaaatatatacagaattataccaccagcaataagattttcagtaaatttcccactagtctgttttctgagtccacagacatatatagttcatgaaacaaaattggagccataccacacaaagagttccatatctttttttcttttcatttaacataaagtcattggcatttttcaatgttaccaaatattctgctacagcaattcataatggctgcatttatcagaatagatgtgttataatttcggtggccatgccctgattgttggactttcaagatgtttacgaaaatattactattaaaataacagtgccacga

SEQ ID NO: 258092 - DNA, 192 bp, Homo sapiens
gtatcccatgcacctccccagatttcatctttactcctatctgacatcattgctgttgacactctatgcaccaggatgaaatccaaagatgatatttgagagccccccgacctaagacatgaattattggcttggctgggaatcgaattcaaggtgaattcaatgtgccctgtgcacaggactgctagcatc

SEQ ID NO: 258093 - DNA, 284 bp, Homo sapiens
ctattctctttctctctagcattctggtgtaatttgaagatagtcatgtgatttgaagttttcatgtgtgatgctgggcccctgtcaattctaggagctcccatcctttagttctgggaaaatttcttgaatgattttgttactgatttttttcccctcccatatgctgtgttctctattttggaactcctattcagtcattcaacaaatgttgagtgagattctactatttaacatgcactattctaggcactgggatatttcagtgaataaattagtttaga

SEQ ID NO: 258094 - DNA, 530 bp, Homo sapiens
aaggttcccggtgcgtttggaaggcagaggctcctgggcttgcaggtttgggaaaattatccagaacttggaaaggggtaaaaacatcactgcctgctctttggatcctggaccctcggcacggtgggcctcagagctgatcattccctggggtggggccgtcctgggcactgctgggtgctgagcagtgtccctggcctccgcccactccacaccaggagctcccctagtcgtgacaaccacagaagccccagacgttgccccgtgtccccgaggggccgaatcacccagaggatcagttgtattccagagcctcgaccagcccggccacccgggggtcactttgtggacgcttccctccactcttgccagtgtcctggctctggggttggacgctgcttgggattgacaaatgcggatgagttttgtccctgagcggcaggtgcctccttcctcctgctgcgtataaaactcagtccagtcctgccgttccttagtaaacactcggacgcacctttgacctacagtgg

SEQ ID NO: 258095 - DNA, 528 bp, Homo sapiens
  misc_feature (488)..(488): n is a, c, g, or t
atgagtggctggagccttgcccatcatggagaagccgacctcagggaccccagatttctgaagggaggccgagggctctgtcactcttgtaggtgtgacacggcaaaagtcccagagcatgactgtccctgggaccaggtggactgaggactgatagagcagacatgaccaccaaccaggccacacttgggcctgcgttgcaccttgattgtaatttgcaaggggctgccgaggaagagatgctgaagcacctgcaggaactaggttatttccatagtggtcccgagaccaggtcctgctctcaccaccgcggggaggaagtgagatcttcctgccttgggaggccacccctggatggagctgctgcagcaggcccagcagagaatccgagaactggaggacaaactggagtttcagaagcggcacctgaaagaactggaggaaaagtttttgttcctttttttgtttttctcactagcattcattcngtggccttgatgacttcagtgagccaagaactcgggatag

SEQ ID NO: 258096 - DNA, 394 bp, Homo sapiens
aacagcttcctaagattaagttatcaaatcaacacactttaggaaaaataaaaatcaccattgttgatgagggtaccctaatgggattccaggttctctgctgtggcagcctgtctagagggacatttctgatctgatcaaactccttgaactagtcatcccactggagaaacaaatcccacaggcatcatcagagacgtgcacagacagttaagtacaagggcattttacactgaaatgcattggtacaaagaaatattatgccaccactaaaaatgtttttgaataagagttacagcaagaaaaatgtctgtggtgggctaaaagaaaagcagaatgcaattatattgtgtacacacacacataaaaccaaaataaaatacaccaaaatatt

SEQ ID NO: 258097 - DNA, 394 bp, Homo sapiens
gtcctggagggaaatgtgggaccagggttagtggtacctggtaatcactggtttattccagaactccaggatgaatgggggatgccctactcactactctgatccaaggtataaggggatcaggaaggaatgctttcagctgggcgtggtggctcatgcttataattccagcactttatgaggccaaggcgggtggatcacctgagttcaggacaaaaccccgtctctactaaaaatacaaaaattagctgggcttggtggtatgcatctgtagtcccagctcctcggaaggctgaggcacaagcatcacttgaacccaggaagtagaggttgcaatgagctgagattgcaccactgcactccagctgagcaacagagagagactctgtctcaa

SEQ ID NO: 258098 - DNA, 278 bp, Homo sapiens
taaaacataccgtgtttcagatgtatttagaaaaggcaatatgagcaaatgggaggatatattaaaggcaggaaaaagacaggaaaaaaatattactatggggggctcttttcccagtgaccaccaagcttctgttaggcacattgaatccttgtggatatacttgtaataatggatagaaaattaaattgaaatctaaacccaaataaagttctcttaatttgattttgtcctctggcataccataagacatgaataattaaataatgttacaaatt

SEQ ID NO: 258099 - DNA, 686 bp, Homo sapiens
acattacatctggctctgctgcttactaaatgtgtgaccttaggcaagaatttaatatttctatgcctcagtttccatatctctaaaattggagaggcagtatacactgtattggtccattctcgcattgctataaagaaacacttgagactgggtaatttataaagaaaagaggtttaattggctcatggctctgcaggctttacagaaagcataattctggcatctgctctgcttctggggaggcacaaggggagcaggcttttttcatggcaggagcaggagcaaaacagagcaaagagggaggcgcaacacacttttaaacaaccagattttgtgagaactcactcaccatcaggagaacagcaccaaggggatggcgctaaaccattcatgagaaacccgcccccatgagccaatctcctcccatcgggccccaccaccaacactggggagtacagctgaaaatgagatttggtggagacacagatccaaagcatattccacacagtaaaagttgttatgggagatcaaacaacttttgacacacagagagacacaatcacacaggtgcacattcacaaacatatactaagtgtttataatagataaatttatatatttgataattgctggcgtttaaggatcatgattgaattctaagttgcggtcaggtcttctaggct

SEQ ID NO: 258100 - DNA, 334 bp, Homo sapiens
cacggccatactggatggacctcagcatgaccaggacacatttcagctcaaatcccctgtgccaagaacacattctgccaaggaccaccacctcttcccacaactgtgagtggatttatgtcatcacaggaggtgcaaaaacgtgtggtgaggtaaatgaattgggatgtccttggctgcctgagcaagagggcaactttcctgcctttagaatagagaaaacacagcaggataattaagaggatgagactttggttccaacagacagtggcttctccttccctaaattgcccttattttgtagtaagttataatatgtttattttctaccacc

SEQ ID NO: 258101 - DNA, 207 bp, Homo sapiens
accagtggtattttaaagattatttttttcattgagatgttcttttcttctgtcatgaaaacagtgaacatgtagaaaagtattttttaattagctatacaaatttcttctacgcaggcccactcaaaacagatcaagacttcaccgtgctttatatttgaaagatattaacattgttgtccctggacttttctatcatagcaccta

SEQ ID NO: 258102 - DNA, 597 bp, Homo sapiens
tctgcaaagacactatttccatataaggtcacattcacagctactggggttaggacttcaacctagagggcctgacttctggcccaacacatcatggcccatcccagcatgccccatccccttcctgggtgccccaggcagatcacaggagggcctgactgctgggctttgggctgacattgggatcatctgcctagttagggctgtgaccagactgagataggaggtgggacctgactcctgaggcagggcttgaactctggaccagattacagactagctgaaacaggcaaaagcacccctccataagacacacccactggtgccaagtgagtttgccgttctcatggtaacagctggaaattactgcccctttccatggcaatgacctgaaagttaccaccccttttctagaaatttctaaataacctcctccttaatttgtatatagttacaagtgggtataaatatgtgtgcagaactgcctctgagctgctactctgggctcactgcctatggggcatccctgctccataaggagcagtacctctgctgccactgtgcacagctgcttaaataaaagttgctctctaatac

SEQ ID NO: 258103 - DNA, 121 bp, Homo sapiens
tcgttggctgttgtttaatgggacattcaaaagctttaattgaattcaaaaaggagttatttaagatttggacttaaaatcagcccattcctttattgtgtctctgtacaaactccgtctc

SEQ ID NO: 258104 - DNA, 389 bp, Homo sapiens
ggacattgtagcattgggtccctaagaatgatgttttaaatggttaaaaagttcccagaagacaagtgtgaaatgctgctcacagagtagttttattttttcagcaccttagtaccttctttatttctcttccatagtatgcatgattagagttggcccctactaacaccattcctttgcatgtgtttctaaaaaagtatttcagaaatttctactgaaagtttggggattgatagaatttaggattgcttatttgtatttgcttgatataattcacatattgttgctgtagatgaaagttctataaaagagcatcatgcctattttgcattagctctagaaacattgctgctgtttgaattcactatcttcctccctcctcaatgaga

SEQ ID NO: 258105 - DNA, 305 bp, Homo sapiens
cggaaggcagtacttacaggatgggggtaatgtctacttcacaggcttgctgtgagggccaatgaaatactatacaaaaattatttagcactgtctgtggcacatatagtaatgattcccgaattgggagctcaaggaatagacccaagttttgtgggcctgcagattcagacttttcttatgaaaaaaaattgaatgttataaaatgtttacaaaagtgattatctattgagattaagaaatcacaacaaatcacaaaattttacaagccgcaataccaaaacatcctaaaatcagaatccagg

SEQ ID NO: 258106 - DNA, 439 bp, Homo sapiens
ggagcccttagctctgagcaggacctgaagccatctcagggcttgcaccggtccagatgctgctgcacaagtgctccaggggctcctgccctgccctcctcacttgccccctcacctgtcagggatgtttgattcctggctggcccctcccctacctgacccctgccaaagacctacgccaccccaggctcccagctctgaagcaaacaaccagagaagtcaagcgcctggctccgggccacacagcttgagggactcagagctccagggacagtgcccgggccctgctcaggccttctgcagaggctctgggctcttccagttgactcagctcacagggcccctacacagtaccaggtgaagacacagccccaagaaccctcagggtctgaagccacacatgtgagccgtgggcagaatcctgcattggcctccagca

SEQ ID NO: 258107 - DNA, 630 bp, Homo sapiens
cttaacaatgcctgatctgcctagatttttgtggtcagctcacttagtcttcacggtgcctgtttctgaccttcactctcttcagtcccttctcttcagtcttagcaaaatacttaacctcctgatacttagagaaaacagaagtcatcattagaaattcattcaaattcttcctgccaaacttgtaaacttaattgcatcagtacctggtcgtttcctcaactacttttacttaaatggaagaaatgtcaggctgggcacagtggctcaggcctgtaatcccagcattttggaaggctgagccaggtgaatcacctgattttgtgagtttgagaccagcctggccaacgtggagaaaccctgactctactaaaaatacaaaaaattagccaggcatggtagtgcatgcctgtaatcccagctacttgggaggctgaggcaagaaaatgtcgtgaacccgggaggcagagcttgcagtgagcagagatcgcgccactgcactccagcctgggcagcagggcaagactgtctcaaacccttaatggacaaatcccttggttttggtcacacaaggttttttttgccattccttttgtggaggtccttcttgggcctcagttaggttttggt

SEQ ID NO: 258108 - DNA, 427 bp, Homo sapiens
aaatatttcagtatccatgtgtaaaagataagggttcccttcttaaaagtataatcatgataccatcatgacacctaaaaatattaacaataatatcttaatatgacaaacttggaaaatacatttagatatataaatggcaataaataatacagatttaagtaccactttcactgatattaaaagataaacctaggcacattaaaattttaaagagtttatttgagcattcagtgattcatgaattaggcagcaccagactgcaagtgatttgggctccaccaaaggcgtgcaagggaaaacttttataaggtgtctgtggaagcaggacagagaaaatgtttgatttattaaagtggagagtccctacttagaggtaattggcagtgtctggtaaagactctagatagagattcactggtgcttt

SEQ ID NO: 258109 - DNA, 311 bp, Homo sapiens
  misc_feature (37)..(37): n is a, c, g, or t
  misc_feature (167)..(167): n is a, c, g, or t
  misc_feature (306)..(306): n is a, c, g, or t
  misc_feature (311)..(311): n is a, c, g, or t
gcagaggggagaagcggagagactgcagggtacactnggagcctcccaggaggcctctcctatcccagaagatcccaggggtgtcataggcaggctctaaagtcccagggtttggagcatgtggtcggtgtctctcacggaaggcccccacatgcaaaaacgggacntcaaggtggcatgggtcagccgaagggactcaaggaatcattgaggcaggcagaggggagaagcagcgggactgcaggggatgctggtagcctcccaaggacgactctcccataacagaagtcccaggggtgttctggncaggn

SEQ ID NO: 258110 - DNA, 208 bp, Homo sapiens
tgtgccacaggcctagggaggacaggcatttctgttttcttgcccaaatgctgcatttcccaagaccatcctggcctgccacacccccattctgtgcctataaaaacccccaagaccctagcgggcagaaacacaagttgctggacatcgagaggaacacacaagcagaggaacacacaagcggcgggatgtcgagaaggacccactg

SEQ ID NO: 258111 - DNA, 372 bp, Homo sapiens
attatatatatatatatataaaatatataatcttaaaatatatatatatatggccgggcacggtggctcacgcctgtaatcccaatgtgctaggattacaggcatgagccactgcacccggactaatttttttttttttaagtagagacagggttgcgctgtgttgcctgtgctggtctcaacctcttgggctcaaacaatcctcccacctcagcctccctaagtgctgggattacaggtgtgagccactatgcctggcctccagcgctcattctatggaagatgtcacccaaaccagtgaaaccagtggctcctaaagatggtgatcctttgaggaatttctgtaaaaatatagatttctaagccctgtca

SEQ ID NO: 258112 - DNA, 215 bp, Homo sapiens
tctcccaccccttccctctgctaggctgttctgggcacccactggcatagcatggaactctcctgaaggtgacgccttggtgacagtgtctatactgtggcttcagccactttgcccaggcaaaaccaatatccctgatgcccccaccccattacccttccttccagcccactctcacactcacaatcaacctgcctcctgtgcttgccctaccc

SEQ ID NO: 258113 - DNA, 1153 bp, Homo sapiens
gctacaatggtaagcaagacagaggagacggctgctctgatgaagtcacagttaaggagaggggtcttgtaaacaggtaagtaagataacgtcaaacagcgataggtactaggaaggaaattaaagaccatgatgtgacagtgtgtgacttaagagggcaacatcaaagacagggaagcctttggtctaagaaaaatcaacatattgatctaaagtcatttaccatgtcacttcagtacaatgaaaagattttttaaaattctactgaatattataacttattataactgaataaaccacaaacagagcagatgcctggagggtcttctcaggaaacttggcaatattaggcagctggctggtagaaactccaaggacccagagaccctaatcctgacctcttcctagtatgactaacacatgccactggtgaaaggtacataatattcataatcttggggacaaatctgaggtttcccagaggcagtttataatgtctattacctaaaaacaaattttttaaagttacatttgaataaagccctgaaacataatatttagaaaacactacatttttcttgatttatttttaagaattggtgactcctcaaataatatggcaagttattactcaaaatccaaacagattatccatagaacatttatgaccatttgcacctgccctaatggatagtttctgctgccttcttggcaccattctacaagtcatctccactatgctctatgaatctaaacctgaataatgctggctaaaataaataggaacttacttttctcactaacagaaatctgaggaagacagctactggagttggtctgaccacttgatgccatcaaggcccagactctgtatctttgcactctcccattcctcctcatggcctcaaagtggcggctacaactccagatacaacttcagcgttcaaggcagatgacagaagtaatagtgccagtcacatctgttcttcagcaaacttctgcttctgggtcagacagccactcctaattgcacagaaaactgggaaatgagtatttagcgaaaagagggttcaggatgtggggtcagccaaacaacagtgtctgtcacacactggttgagccaaatatgggaaaccaatgtccaacttccttc

SEQ ID NO: 258114 - DNA, 409 bp, Homo sapiens
  misc_feature (369)..(370): n is a, c, g, or t
agagtttgtgatcatgtgtttttcctctaacccagacatatacgtaggtctaaaactgcacagtgcaggatgtcaaatggcttaaaaggatttctgctgtgactgaaagagtggatctgtgcccttctgggggtgtaggctgaccacatgaataccaataattagacatttccaaaccctcctcacccatcccccagcatgctacagaagcagcaggctggcagaggtccagatttcctaagtgatgggattgttcccccggccaggaatgagaggaatctgcctagattggagatggctttagctactttgcttttcttcgtactcgtagtctttcttcgggagatcaaggaaggaggactgcttganncaagcctgggcaatataacaagaccccagttctaaaaaa

SEQ ID NO: 258115 - DNA, 518 bp, Homo sapiens
ctatgtcataacattaatgacaaataatgagtcactttctaattttctattcagagaaacgcaactctgcaataattagacatcttttattttaagaaatgggcagctgtttctttagttgaattttgatatctttatagttactttgctttctttaaagggcttttctctgtatatatgcatctctttggcagggttgatggcagactgggatactggcatggcaatagtgggaaagaaggaaggaaaaaaagcacaactgaaaaggaaaacctgaagtgttctgaatattagattttaaggtattagttgtttttttaagttttctttttcaatttattaaaaagtagaatatgtaagtattgtgaatatcaggttttttttcagtgattttaaggtaaatgttagtaaaaagaataaatatgtattttgagatattaaaattgtattgcaccacctgacacaatctgttttacttatgttattaatctgttgtgttgtaggtagaaatatagcat

SEQ ID NO: 258116 - DNA, 354 bp, Homo sapiens
tagttcatttattttagatataattaccaaatcagtgttctacttttttcttcaaataacaaaatgctggccgggcatggtggctcatgcctgtaagcccagcagtttgggaggccaaggcgggtggatcaccaggtcaagagttcaagactagcctggtcaaggtggtgaaaccccgtctctacttttagttttaatacaaaaattagccgggcatggtggcagacacctgtaatcccagctactcgggaggctgaggcagagaattgcttcaactcaggaggcgaaggttgcagtgagctgagattgcaacagtgctctccagcctgggcaacagagtgagactccatctca

SEQ ID NO: 258117 - DNA, 423 bp, Homo sapiens
  misc_feature (158)..(158): n is a, c, g, or t
  misc_feature (220)..(220): n is a, c, g, or t
  misc_feature (249)..(249): n is a, c, g, or t
  misc_feature (315)..(315): n is a, c, g, or t
  misc_feature (318)..(318): n is a, c, g, or t
  misc_feature (402)..(402): n is a, c, g, or t
  misc_feature (404)..(405): n is a, c, g, or t
  misc_feature (407)..(407): n is a, c, g, or t
  misc_feature (410)..(411): n is a, c, g, or t
  misc_feature (414)..(416): n is a, c, g, or t
  misc_feature (418)..(419): n is a, c, g, or t
  misc_feature (422)..(422): n is a, c, g, or t
cattatgctgagtgatatctttttttttgagactcagtctcaaaaaaaaaaaaaaaagaagcctcaggacacattggtaaaatttctcacataagtatgacacacctgggccgggcgcggtggctcacgtctgtaatcccagcactttgggaggccgnggcgggtggatcacgaggtcaggagaccgagaccatcctggctaacacggtgaaaccccatntctactaaaaatacaaaaaaaaattagcngggcgtggtggcgggcgcctgtagtcccagctacacgtaaggctgaggcaggagaatggcgtgaanccnggaggccgagcttgcagtgagccgagatcgtgctactgcactccagcctgggcaacagagctagactccatctcaaaaaaaganannantcnncannngnngcng

SEQ ID NO: 258118 - DNA, 541 bp, Homo sapiens
aacataggagccaggactctggccttgcattagtgtgcttttcatattaatgctcaatctttagaaaaacttgaaataattctcgtataattttagccaacttgctcacacacaaaattcttttcgcaagattcatctttcacaaacctacaacttacttaaacctccagttttgtcttatactttctctttttgcattgggattctataaaaatgtgattttctctcttctttattgttttgaccacaaagtcctcagtcatgtaaaagaaaaaaatcactttctcttttcaactttctttgcatcttacttcctttatatgctctataatagaggtttttcctatagcaagtagttttaattatacatattagctataacattgactcttagtgctgcaggtagttagacaggcatgagtggggcaggaaagggctccccacccactaggaacattaggtgctggtttggcaattatcacattgtctctctaaaagtgataaataaaataaataaaacaaaagtgataaaaaagcacca

SEQ ID NO: 258119 - DNA, 783 bp, Homo sapiens
ttttttttgagacagaatcttgctttgtcacccagactggagtgcagtgggaacaatctcggctcactgcaacctctgcctcctaggttcaaacgattctcctgcctcagcctcctgagtagctgggattacaggcgcctgccaccaagcccagctaatttctttttttagtagagacagggtttcaccatgttggccaggctggttggaactccaatggcccctggttcaagaccagactggtctcgaactcctgatctcaagtaatccacccgcctccacctcctaaactgctgggattaaaggcgtgagccaccacacccagtaatgtcctaattttaatattattctggagttacatagaagaatatccttattcttaggaaatacacacttggggtgattgtttacaatttactctcaaatagttaaaaatttatttatttacaaataatttttatatttatatatacataaagagacaaagtgaatgatttttaaaatggagttaggttgagtgcgctggctcatgcctgcagtcctagtactttaggaggccaaagtgagtggatcgcttgagcccaggagttcaagagcagcctgggcaacatggagtaacctcatctctacaaaaaatacaaaaattagccggcatggtggtgtgtacctgtggtctcagctacttgggagggccgcctgaactcgggaggttgtggctacagcgagccatgattgcatcactgcactcaagcctgggtctaaaaaggaaactaaatattaaaa

SEQ ID NO: 258120 - DNA, 520 bp, Homo sapiens
aaggcaataattttgcatattttgcatctttcttagaactttcagtgcatccaggttttattgcattgatcctaaagagaggaaagaagtatgcagggtctccatttttcagacaagagccatttcttaaaaaaaagactactcctgagcttcaagtcagtgacaaaaaaaaagactgcttattgtgacaatagactttagtcatattaaagcaattcaaagtaatttaaaatgtggggaggccaggtgcggttgctcaagcctataatcccagcactttgggaggccgaggtgggtggatcacctgaggtcgggagttcaagaccagcctgaccaacatggcaaaaccctgtctctactaaaaataaaaattagccaggtgtggtggcgcatgcctgtaatcccagccattcaggaggctgaggcaggagaatctcttgaacccaggaggcagaggttgctgtgagcggagatcatgccattgtactccagcctgggcgacagagccagactctgtctc

SEQ ID NO: 258121 - DNA, 329 bp, Homo sapiens
atatagtgagagaacccaaagtctttgctaatatcttaaatcctccaataatatcgctggtgacacgtgggaactcagtcaactacaaagttaaagagaacagtttacacaagactgccctcacttctgataccaattgtgagtttggggagggtcccccaaactacccttaggtttgataatttgctacgaggcctcccagaactcactgaaaattgttacactgatgattagggtttattacagggaaaggataataggttaaaatcagccaagggtctttttgactctctgagcagcaccatgacatttggcaagaacaagcacct

SEQ ID NO: 258122 - DNA, 264 bp, Homo sapiens
tttgggttgaaagttactgagtagtcactatacaaatattgtgctgtatgttctacatcaattatttccaattatttcatttaacctccacaacaagatataaataagcactacactactgtgctcgttttacagagtaaaaaacagtgctgtgcctcaggaaacatttatggctaattgatggaacttggatgtaagcacagactcataatcataaagttaagttactatgaaacaaatttgtagcttatttttcattaaata

SEQ ID NO: 258123 - DNA, 323 bp, Homo sapiens
cagttttcagtctgggaatgtgcactagaattacttgaacagctttataaaaatatttgtgcttggcaggccaagctaagaggattgcttgaggccgagagttcaagataagcctggttgatgtagcaagacctcatctcttaggaaaaaaaaaaaaaaaaaaaaaaaaaaatttagcctggcatggtggcatgtgcctgtagtcccagatacttgagaggctgagactgccggagaccttgagtccaggagtttgcagttacagtgaactatgataatacaactgcacttcatcctagatgacagagtgagaccctatctca

SEQ ID NO: 258124 - DNA, 664 bp, Homo sapiens
ctgatatgcagatgggagcccgtggcaggatgatggcaggataaccgtcagcccaaaagaagcggccacgagacgccgccgagagccccaacttagaagccagagtcaccagcttcctggctagggtctgtccttgagggtcaccagaatgtgaggaaagacccagacaggcaggaaaagagctcagggaaggacatcttaccattggcgtcatcagagataccgcatccacgaatgaagagccagacgctgccagaggggaacgctcagagcaccggaaggagcttttagaaattataaataagcagcacattttaaaaaagccatagaagggctagaaaagaaagttgaggacatctcccagaaaatagaacaaaaagagattaaaaaacaactgggcagtccctgcagaggtcaccctggctggcgcggctcaggatggagggcgggagctgtgtgcctggaggggggagctgaggcacgtcaggatgtgtctccagactgcaagggccacagagtacgaaaaagaccacccagagcaatgtggtcaaagaccatgccttaaaaggttttaggaaacagaatgggtcccacgggagggtggggatgtgaacggcaccagcctggtggctcgggtgccaggccagggccagatgtagcctca

SEQ ID NO: 258125 - DNA, 357 bp, Homo sapiens
aggttggaatgcactccctgaatagcccctgttcatccaaatccagccttcgaaaatctactcctttttcctccatcaagtcttcaaacccatgaagatttgttgtccctaaatatttctcttagagaagcacattataaccaattggctataatgaagtattctggaacgatcaggatttgctgagtattggagaaagatccatccacttagaagaagaattaaacaatcagaagtggacacgacctggaccatcagcccagcactccctcttctgggtgctgctcctctcacatcatccacgtggttccccggcagcagccacatatgcacgatgtgcccacccccagctgaaga

SEQ ID NO: 258126 - DNA, 412 bp, Homo sapiens
gttttttcccttatgtctaatatttttgtaataccacttttataataaacataaatcaacttgaagcagtgtttacaaatgtcatttcttacttgatatgaacaagtttacttttaaaccttatctgagagtcttctataagtgatcttaaatgttctatggagaccacagtattgcttgccttttcacttttaactcaattcctttctcagagcagcatacaattatttaaatataggcacctcatcaaagcacaagttatatgcatttgcctttcaaaattatcttaaaccaggagcagtggttcaggcctataatcctagtgttctcggaggctgaggtgggagaatcacttgagcccaggagttccagaccagcctgggcaacatagggaaaccccagtctctaccga

SEQ ID NO: 258127 - DNA, 3435 bp, Homo sapiens
tcaatgcactgttcaaggatgtttgagagattttctgtcttgcctgaatacaaaacactgtagggaacctcttgtgcttgactttgcacacacacgggatcttcagggtgggtacatttaaaactgacaagtattgccaaattgccccccaacgtagtttttacaccccacctactactctcagtgaaaaatcaggccctttttattttaagggctaaattgctaatccctgtgtgaaaatgggtgttaacaaaataaaaaataaggaaaatatgcaggcttacccaattttgttatctatacattttacagtctctaatacttagcatagctcctttgggtgtctgcccaccacccttctttctgaacgtggggttccctgggctttccttgtttgacttcagacctggatctaatagggatctggaggtagaatcaagacgaatgttccctttggccttaggtgagtcctttgcatctctgaggccctgttgatgacatccagttctctagacctctgcccaaaccagagcaatccctcctcaaatatgctaagcagaaatgcagacaatataagacacactatatttatattttaggagtttacattaccttcccttctgtttggaaaccaacatctctcaaaattaggtatagttaacacagaataccccaaaataccaccattcttcataattccatttccttatttctggattctttcaagggtaaaaaccttgtttcattcatctttggggcagcatttgcctagtatgtggtaggcgcccagtagattttggataaactgacctgattttctgttaatattccaactggattatttctttctcctcttacagaatgaagatattcaaatgttattttaaacataccctacagcagaaagttttcatcctgtttttaaccctatggctgctctctttgttaaagcttctaaatgtgagacgactctttccgcaaaaagacatttacttggttgagtactccctaagtacctcgccttttgtaagaaacagatacactcatgttaaggatgaagtcaggtatgaagttaactgttcgggtatctatgaacaggagcctttggaaattggaaagagtctggaaataagaagaagggacatcattgacttggaggatgatgatgttgtggcaatgaccagtgattgtgacatttatcagactctaagaggttatgctcaaaagcttgtctcaaaggaggagaaaagcttcccaatagcctattctttggttgtccacaaagatgcaattatggttgaaaggcttatccatgctatatacaaccagcacaatatttactgcatccattatgatcgtaaggcacctgataccttcaaagttgccatgaacaatttagctaagtgcttctccaatattttcattgcttccaaattagaggctgtggaatatgcccacatttccagactccaggctgatttaaattgcttgtcggaccttctgaagtcttcaatccagtggaaatatgttatcaacttgtgtgggcaagattttcccctgaagtcaaattttgaattggtgtcagagttgaaaaaactcaatggagcaaatatgttggagacggtgaaacccccaaacagtaaattggaaagattcacttaccatcatgaacttagacgggtgccttatgaatatgtgaagctaccaataaggacaaacatctccaaggaagcacccccccataacattcagatatttgttggcagtgcttattttgttttaagtcaagcatttgttaaatatattttcaacaactccatcgttcaagacttttttgcctggtctaaagacacatactctcctgatgagcacttttgggctaccttgattcgggttccaggaatacctggggagatttccagatcagcccaggatgtgtctgatctgcagagtaagactcgccttgtcaagtggaattactatgaaggctttttctatcccagttgtactggatctcaccttcgaagcgtgtgtatttatggagctgcagaattaaggtggcttatcaaagatggacattggtttgctaataaatttgattctaaggtggaccctatcttgattaaatgcttggcagaaaagcttgaagaacagcagagagactggatcactttgccctcagaaaagttatttatggatagaaatctcactaccacatcatgatagtaaaatcaggatggaaataagagggtgcctgataaatggagtcagtgtggaattgaataccatactatgcccaatactgtttaaactcagtcctcccatattttaaaaggtgtccaaaattccatacacaagggaaagtgatctagcctttgatgttattagcctgcagttggctaggtttttttaatatttgtttttgcttgtaatctcactgagccaaatcagagatcttaaacattcagtcagtcatcaaacattattgagcacctaactatatgacaggcacttttttagagactgcggcttatcctcatcatagcaacctcggtatctttaagttctccacataacagtcaggattctactgaagaagcttttgaagtttgtggtaatcgtctgatcatataaaccacccatttcagagtagtgtttaagtactgtgaccaacactccacttgtctcttaactcagctttcaagacattccttaaccatcagagcagaggaggaaagactcactacctcagaaaaatctcaaagaatagtccaatttcctgcttgccaaagcataatctgccttttggtgcattacttggtcaattcagggttgaggagactgttggggggcatttataatgtatgaaagttaaggaagggggtgaggatgtgggttgggacaggtagtacctaaagaggagcgaagggatttatacaacatttttatcatgttacaaaacagtatcatgaatggcctcctttttagttcaactgtttctttaaaatgcatttactgattaaaaataagaactgaccaatagctccaagtgtcacacaccagaacattaagcctaagtcctcaattcataagttatcattctagacaagtttctttacaatggaatactttctatggaatcattataattctgttgtgtggaactatcaagctaagagtcactaaactttcttgaaaaggttgtgtgaaatatgacagctttctaaattaatttgtatagtcatttaaaattttttcttctctggcaactgtccaactggaatccagatttaaggtgataaaagctctaagtttcttgcagtctttttctcagcttagttccagagagaaaaaagctaattttcctaaggacacagcaagaatattcattaaggatattttctaaaacccacacttgagaaaaccacccaatga

SEQ ID NO: 258128 - DNA, 481 bp, Homo sapiens
catgagaggggagcagtgggaggctatatgttgatggaatgaggggctcctgtaatactttcctgttaacattaaatagttacttctcttaattcctggaataagctagaactccttaaaaattatgaatgttgatattactgaaaaataatgacactctcaaaagagagtagtaataagtaaatcttatctccagatttcacaactctattacttcccttttccatcctatcagggtttaagattttcagcaataatgcatctaaaatactgaatatatgtaaaataccacgatagttatgtctgaaatgatacaatgtctgagatgttcttcaaaagtacacagggtggggagtgtatgggggtgaggatggggcaggattagccatgggctaatggcttgttgggatggggtgatgggtatatggaaattcattatattttattttatggtcaaatttctccacaataaatagttttc

SEQ ID NO: 258129 - DNA, 302 bp, Homo sapiens
ttaaaaattaaaaagacaatgtgacaagctaattgacagacaaagattagtataagaagtcagaattggtaggtagttccacccccaccaataaaactctccctttagaagaaatacagttattcactgcatagtggcattttggtcaacgatggaccacatatattatggtagtcccagaagattataatggagcatatatagaaacctgatatacagcacttgatattggcattgcagatcagttgcggtaatgattgatgttcattattggtactggaacattttgttttccatatgag

SEQ ID NO: 258130 - DNA, 699 bp, Homo sapiens
caaaaaaggaaaattaccattgatccaggttgccatttttaataaaaagcagtaaggtcttaaagaaaatattagcattgaagttcaaccaaataaattactttgtcatcaaaatgaagaatgccagaaagttctctgaaatacaatttttaacaaaactgagaaagcagaggaagtattttttaatattacaaatttttgacaccaacataagaattccatgatatcctaaagagcaatgaacccaggtaatgcagtttctagaaattttaaaacactaccaaataatattgcttcttgcattaagtatagcattggtttgctagaataatcctaacaatgacaatgcaatgtactttaaattggggtcaaaaaacttttttcttaaagtaccagatagtcaagcttttaagctctatgggtcatccacagacacactgcaactatacaaactatatcacccctgttgcaactacacgaaaagcaggaaagcaaccacagaagacagacaatacataaacaaatgagtatgactgtgttccaataacattttattaataaaaacaggcaactggcccatgggtggtaatttgctgaaacttggtttaaattattattagtatctacctttttttaaaagatgatgttttttagggtctttccatcatgaaaattatgtttttatgaaagtgatttggg

SEQ ID NO: 258131 - DNA, 990 bp, Homo sapiens
gacgtcatacagtgaagcaacggaggcccagcaacatggacaatctgcccaggatccacatagctaccagaggggccaccgcagggcaaagtggagatcaaaccccagttgagtatggtcctaaatcctgagtcctccacacagtcctctgtgccgggagaacatgaatgatgaggaatggacccttcccacccatcctgatattatcagatcaggcccttctcactactccttccaatgtgaaatgctccttcctctagagctttatgtcatttctctgcatgaaataagtcctggtagctgctgattaaagaaataaacaagcctcaaacagaaggccaaaatcatagacatcttgggtgttgccagttatccatccagagccggatgggtcagctctttttcttccttaggcttgcagactgcttgctgacttgattctgtttttcagcttctctgagatggacagagaatgaatgtggaaggcagtggaaaagctctccccagcttttgtgtacaaataccaggagaaaaggcagcctaccactcccacataaagagctgtaattactagctacagaatagaattcttttgttgtccagcttttaatgagttttgtaaaaaccatgcagaattaaagtgctctactaaatggtttcaggcagacacacaactaatcaaatttaagcttgcttattttactcaacagggcttgttagatggcagacaagccaagtttttccacataaatcaatttcaagtttggtgttgctgatggatcgctgcttttaaaccaaaaaaaaaaaaaaaaaggataaagagcagaaatgtaacagctgagaatggttacatttaaaaacaaggagaatttgcctgacaacagtacccttattggaacaagtaatcacttatgtaagattatttagataaatttgaaaacaaacaaaaaaaagaaacaacacaaccttgtaacacacatttgaaggtag

SEQ ID NO: 258132 - DNA, 296 bp, Homo sapiens
gaagcatcgaagcgcggcagccatgttcagcgtggcatttcggaaggcttgtcaggggtggagaagcggggcgggttgctgttctttcacctgacactaaagcgccatgccggaagcactgagtctgatacgtcggaaccagtctccaccgtgtggtttggtcttgatttccactggtactctggggtcttggataagtctctggacctcgcctttgtcatttgcgaagtcgataggttccaatagagattttcccagaatcattcaactaaaaatagagaactttttttttttga

SEQ ID NO: 258133 - DNA, 408 bp, Homo sapiens
tgtttcacacctataatgccaaaactttaggaggccgaggcgggaggatcacttgagccctagagttcgagacaaacctgccaacatagtgagacccccgtctctacagaaaatacaaaaattagccaggtgtgccaagtggtgatgtgtgcctggtacttcccagctactcaggaagctgaggtgagaggattgcttaggcccgggagattgagacctcagtgagctgagatcgcgccactgcacttcagcttgggcatcaagcaagaccctggctcaaaaaaaaaaaaaaaaaaaaaagggcaggtatattggatttagtgaacaattggatgtgttatgtatttctgcaacaaaatttttacagtaagcaaacagtgcttttgtggaccaaaaatcaaattaagt

SEQ ID NO: 258134 - DNA, 256 bp, Homo sapiens
  misc_feature (13)..(13): n is a, c, g, or t
  misc_feature (27)..(27): n is a, c, g, or t
  misc_feature (215)..(215): n is a, c, g, or t
  misc_feature (222)..(222): n is a, c, g, or t
  misc_feature (232)..(232): n is a, c, g, or t
  misc_feature (255)..(255): n is a, c, g, or t
ttttttttttttngtatttttagtagngacgggatttcaccgtgttagccagggtggtctcgatctcctgacctggtgatccgcccacctcggcctcccaaagtgctgggattagaggcgtaagccaccgtacccagcagctctcttgttctttacagaagtcttgcaaactagtatcatcctcattttttagctgacaatggtgaggctaagangttaagncaactgcccntgaaatgagcaagtgccagtgcnt

SEQ ID NO: 258135 - DNA, 326 bp, Homo sapiens
gcaaaaaagttatactcttttactttttgtacaactttcaaaagatttttgtaaaagataagtgagtcaaaagcatgctgctactgctttcctatcagctactcacctaattagagacaagtactccatttttctaacatatttaactcttcaaacatttatcatttttcagtcagttagtaagtccttcaccaaatgtttaactgagaattgccgtgtaccagatgctatgggagacacagagttgtgtaaaaacttcccggagttgtcctctgtgaactgcaagctagtaagaaaagaagaagttaatgcaactaactccaaaa

SEQ ID NO: 258136 - DNA, 126 bp, Homo sapiens
caacctcctccactgccccctctccctcagcaacctcctccactgccccctctccctcagcaacctcctccactgcccttctctcctttggactctagatttcaggttccctggccttttttcagc

SEQ ID NO: 258137 - DNA, 404 bp, Homo sapiens
gttttaattgattgcctttaatttcagattataaacgtggttgtcttactgtatcctttattttctattcactaatacagatagatcacacgggaagacaatactttaagggcaaaaagtaaaataacttactagaatttctaaactttatgtttacttttacctactaagggatatctgaaaggtagagacatacttttaaaactttttgcttctggcactatgtaaacattaattcatgtaaactaatgactagcagaatgcctaagatagacatgaacagtctgaaaaagtatttactttcagtcatgtcaagtttcggaaagtgttaacattttgaaagtttgtctatatatcatgtcctttcataattattgtgaaattataagacgatgcttctcctt

SEQ ID NO: 258138 - DNA, 414 bp, Homo sapiens
gtctgaacctgaccatgttttttaggaaaatcctgtgattagcaataaagtaacataaaaattaccaaggcttagtctacgaaaacctaaggtacgtggatcttacatttcccagataaatggggggctttttaaaattgatttttaatattatgttttatgctagcagactggacaaagaaatgtggtacacagacaacatgcgatactacacagccataaaaaattaaatcatatcttttgcaggagaatggatgcgaccagaggctattatcctaagcaaattaatgcaagaatagaaaaccaaaaacccatgttctcacttgtaagtaggaagtaaatattgggtactcatggacataaagatagcaacaatagatgctgggaactaatagagttaggaaggagagagga

SEQ ID NO: 258139 - DNA, 420 bp, Homo sapiens
gcagccctataattaaaaatctgagtgggaggcatactttaattggtaccttgaagcttctaagcacactcaggatcctaaaattgcctctctacaagacacgatctcaaaattaattaagataaacagttaagaaaaaacaagggccaggtggctgacgcctgtaaagccagcactttcggaggctgaggtgggagaatcacttgaggccaggagttcaagaccagcctaggtaacatagtgagacctcatctctacaaaaaataaaaaattggccaggcatggtggcacacacctgtagacccagctactcagaggctgagtctggagtattgtttgagcccaagaggtggaggctgcagtgagccatgattgcatcactgcactccagcctaggtgacagaacgagaccctgtctca

SEQ ID NO: 258140 - DNA, 506 bp, Homo sapiens
tctctcttagcttcagtgagtttccaccaagctatgatactgatgcacttcctcctaaaaataaaggattttgttgcttagaggacatgggccagatgggtcttggcagcatttctcacctagtttcaatgagatttcaccagtgccctcagatacaggtttgcaggttaaggattttgttttgtaggagagataggatagatggttctgagtggctttcaacactgactactattctcttttagccagcagtgagtagcttactcagaattgtcccctatctgtgtgtgtgtgtgtgtgttttgaggtggggtctcactctgttgcccaggccgcagcagtgtatggctggatcacagtttatggcagctttgacctcccaggctcaagtgattctactcgggaggctgaggcgggagaatcgcttgaacctgggaggcggaggttgcagtgagccaagatcatgccattgcacaccagcctgggtgacggagcaagactatctc

SEQ ID NO: 258141 - DNA, 387 bp, Homo sapiens
gagtagctgggatgacaggcatgcaccaccacacccagctaatttttttttttagtagacaaggggtttcaccatgttgaccaggctgttttcaaactcctggcctcaagtgacctgcccatctgggcctcgcaaaatgcacggattacaggcatgggccactgcacctggtcccttctagatttttaaaaatggtttttaacatagtgtatctgtcccctgctacatcttatctgatgtccctcttcttctgtctgttgccttgccatcctacggcagcttcacgtaacttaacaatgctacattgtaaaatctaaggaattctgtgctaagatctctgattattccactaacattctctcatccttcaatttacaatagctttca

SEQ ID NO: 258142 - DNA, 329 bp, Homo sapiens
ttttttttggtcaggggtaaggtgaagacaattcctttgcttctattcagtgatgaacacatgtgctgcaacttacttcctgaattactactaaaagcaccactattctctccctctctttcccaagcaccatcagacattactttttcatatgagttatattgaatgtgccgtttcctgacatgcctaaaagatgcttcaagacatttctttattcacttcccaagtcttcactgttgctagcacacgaaatttattacctcatgggcaaagaccatgctcttacttttagtgaagctctaatcttgctgggaggcatgtgatatatg

SEQ ID NO: 258143 - DNA, 457 bp, Homo sapiens
tgcccctgcctcacccctaccctcccactcttcgcgcgcacaccccggctttcacaataactggatgagcgggcctggcctgcagcgacgacctagtgggccctgcctctccactcccgcggtgatgtaccgttaccaccctcttaaaggagcccaggaaggaggcggacggccccgtcacagagcgtgtagggaaaacacagcacagtgattatcaggacgaaaccaaacaatcggaactccgcagaggtgtagggagatgtgaggagaatgacacagatcaaagagctttttccaagccagtattttccaaaccgcgggttataatctctagcgcattgtgaaattggtttggtagatcgggatcatcaccctccgtttttaataaaattgagaatagaacaaaatagaaaagtttcacagtacatcacgtagtaaaggagttgtttagagaaat

SEQ ID NO: 258144 - DNA, 236 bp, Homo sapiens
  misc_feature (103)..(103): n is a, c, g, or t
cccacatgtacctactcagtccccacaggacaccgatattgcaataatactttcccctgggctacagagagcaggtcagccaggaaatgaatccgggctcccnaaaaggaccgattgctagtaatcttcaaataggactgctactgacaggcaacttgtgaacaaagtaatttgtatctgctgccctgctccagcctggctcaccacagctagttttgtggggtccttaccctttt

SEQ ID NO: 258145 - DNA, 492 bp, Homo sapiens
ccggcggcttattccgagtggaggcctcaaaggaaaacgtgagagagatcacaggcaagcaccccaccattagtccaagactttcaccccacccccaccccatacagatggctgggccgggacacctgcacggcagccacagtctccgcctccgtgcagctctcgggatggggatcacagaatcgggtccaataaggtcatcagccaccctgggcccaaatcgatcaactccaccccacctcaccccatccccagccttaagaacctttttccggacacttttcgctttcgatccccgcctggcgccctatgcctaggaaagtgagcgggtgattcctttctagcgccaggtttcgggtttgccctgctctcaaacctcctcctgccctgcgcacctcgtcgctcaggcctggaacttatgaaaatgtaacccaactcgttgccagaagttgttgctaattagtggataataaacttctgtagccagggcac

SEQ ID NO: 258146 - DNA, 445 bp, Homo sapiens
aattccgggcagctgttttttataaagtggataattcacataattgtgttggggacttccagctatgaagaactgttagaacatttgaaaattagtgttcccaagttgtactgtgatacaaaagcccagtgaattcttcaaacttccacctcttacaggaatctgagaaaaccagataatgtttacatctacgcatggggaaggaaggcttggcagattattggtatcgaaaggaattctttttagttagtttttaaccctacctgtcttgtgaatgtgctatgtacaggctctttgtaagtcttcaaccatgcagcaaaatccatctagccactcaaagattggtaatagcataattgtctaatgtgtgtcttttcaggaaattgaaattgatatgttgtatctccctcatgccaaaattttataaaaatcatttctaagccta

SEQ ID NO: 258147 - DNA, 402 bp, Homo sapiens
gctacccccacccacaggacagtgctggggttgacccgactttggctgcacatttgactggcccctggatcagctctaggactagatgtacccaaaaagatgcccacatccttgcctcagctcctgcctctgcccacccagagagctgccttgcccccatgtccacgatgcagccaccaggcctgggtaagcgtggtgtccgagacgggctggacacccagaagaggagccaggacttgcttggtctgtatcccggctctgcatgcctcagtgtccctgcctgtaaagtgggatctatgggaacccatgtgtgggccgggcacagtgctcacacctgtgaacccagcaccttgggaggccaaagggaggatcctttgagctcgggagacagggtctcgctct

SEQ ID NO: 258148 - DNA, 496 bp, Homo sapiens
atttgggtgcagggggacttaaccttgaccacacgcttcttctgactttactcttaagctgatgatgcaacaacagcaagacagttgatgtttataatcataccaatagccacagtggcctaagaatcagatttcccagaatctctgacctttgccaagtgtattagtttcctatagcttctgtaacaaatgaccacaaatttggtggcttaaagcaacacgtgtattttcttacagttctggaagtcagaagtctaaaatcactttcactaggctaaaatccagggttgtgcttcccatctctcctccccagaggctttagttcgtttctttgcctctcccagcttctagagctacattcttgtgttctttggcccttgggcccttcctctatcttcagagtcagatgcagaataacttgcttctgtccttacattgccttctctctctctagtcaatcttctgcctttttcttgtaagggcacctgtgattgtg

SEQ ID NO: 258149 - DNA, 318 bp, Homo sapiens
ctgatgaagacaggcacaagagagtaagattaagtgaactgaaaacaagaacaaggccaaggacgactgaaggcagggaggtgagaaggagactagcaggaagatgtacagagagcatcaataaggaagtcccaggaacctactagaagcagaccactcatctggctctaagcttcccagcagttggtgctaaaaaggaaatgtgaccgggtggctggttcaacagtgcacgtgagatagaaacaaataggtgtttaggcaaagcagggctcctctgcatcttaacactctcgtctctcaaggttgtgtgatgtaata

SEQ ID NO: 258150 - DNA, 450 bp, Homo sapiens
ttgctcaagtaattggctatagtgattgagagagatggaacatggactcttacagacattactgttgtagtagtcatgttgccttgacagttagatacgacgtctgtttgttgatgtcagtatggaagggttacaacataattaaaagttagaaaataggccagcatggtggctcaagcctgtaatcccagcactttgggaggctgaggtgagtggatcacctgaggtcaggagatcgagaccagcccggccaacatggtgaaacctagtctctgctaaaaatacaaaaaaaattagccaggcgtggtagagcgcatctgtaatcccagttatttgagaggctgaggcaggagaatcccttgggcccaggaggcggaggcgccttgcagtgagcggagatcatgccactggactccagcctgggcgacagagtgagactccagctaaaac

SEQ ID NO: 258151 - DNA, 761 bp, Homo sapiens
gcagtgagaagctgagaaagagctggagggtctggtaggaactcatgtgttctagcttccccattctgcctcaaaggcaaaggggtccctcacttcaactccccaccaccccactaatgactcattttggatggatgcctagttgcttggtctgatggttccttggccccaccatgctagccttgtattcagtcattagggttcgaggtgggggaagcaatggaccacccccacctttgtggagcccattttctcctttgatggttaccaggcccccactcagctctctctcctaccctttgtgctgtgcctgcagcccccgtgcccaagaataccaagcaactggctctggccccctgcccagttcccaggctggctgggtggtggggggaggggactttagatgcggctttgggagaatggcaaaaggggactgcccccccttctcgtatcgtatcaacatcctactggcactaccttcagcatggtctgatgagatcagcaaggccagatctcacctaggctttcaccctatccctctttcatgatccttaggtgagaagtagagaacattcaaggccttccttccactaagataggaactgtggctaagacagaagaaagaaggtcagatgtttgaatggactttctggatttgataaaatgtgacactagtggtaagctcaaaaatggaacttatttccacaatgagtatctatttccttttagtcagaaaagtaaagcatgttttaaaaagtaaa

SEQ ID NO: 258152 - DNA, 227 bp, Homo sapiens
caacaactgtctagtggagatgacagggatgtctgccacctagagggccctctccacattccctagtcctttaagccatagaccttttggaatctgtgaggaatggagaaaatgggctgcaaatggacatgtgatttaagcattaatgtgttgagttgttagtaacggtgtctgtaaagatgtgaaaagtggtgaaacatcattaagggatgtcttaactgctatat

SEQ ID NO: 258153 - DNA, 406 bp, Homo sapiens
gaaggaggtaattcacttggctgatgacaggctgtgaggggctccaggggagagtgctggaaattgaagggagaactgaaggtatacaatccccacctggtgatcactaccttgggcccagcacagaaatgcaacataactttctcctgggaagtatcccttgtggtcctcacacccaaccctcagaaaagcctttagcacgcacaccaacatggcacatgcatacatatgtaacaaacctgcacgttgtgcacatgtaccctaaaacttaaagtataataataataataataataataataataataataataaaatgatactgagttttcactgaggatttcataagggacataggatagattttttttttataatacctaacagacagcattttacttttaaa

SEQ ID NO: 258154 - DNA, 446 bp, Homo sapiens
cggtccacttacttgctggggtagcttgaagcgagagattccagcgttttggggcttggttttctatcttggtctgtctgttcctttctgctgatagagatagaccattctgagttaacggcagcagttgttcaatgggagtgtgagttttttaggcagataaacctgtgaacttgctgggggtcatggcagtatcattctttgccttcttgtcatctacaaggccctgcttctgtctttcaacatcctttaactacattccatgcagactccagccagcctccatcatgatgattttaccatagtggtcaaaacagttgctaacgggtgggaggcagccagtgtgttgcaacatgacatgttgattgggaaggagcaacaggaggacctgctgaattacacattgccctcactgggcagctaagcctcaggggttttgttctttt

SEQ ID NO: 258155 - DNA, 401 bp, Homo sapiens
ttttttctgtaagaactactaaaggaaactgttgtaaataacaggatatatttttgaggctgtggatcatataagaactttgaatctcaccccagggctatttatagctcaaaaatttgttctttttttctatttcaagtgatttttgagaactgactgatatgtcttcctctggtgtttctgtatatgcctgaggtgtgatgtattactggaaagcagaaaggaacactctaagaaagcactttttctaagatgctaagagtcaagggaaaatgaacatacatgttgcaagctgatgcaggaattaaatattccactgtctgtcattcctttttatgagaaccctataccacctgtggtgcctctaacattgggtaacaacctgtgctacgaaagggcag

SEQ ID NO: 258156 - DNA, 301 bp, Homo sapiens
agtagagatggggtttcaccatgttggccaggctggtctcgaactcctgacctcaggtgatctgcccgccttcgcctcccaaaatgctgggattacaggcatgagctaccgcgcccagccgaacaaatgattcttatatgtagattctttagggagcagctaagccagcccccattgactgggggagatgatggtagctttgagacactcctagcagctgcagttttgttatcctgcaccctgttcactttccagggccatgcacctccacggaaataccttatctataagccttgtgtct

SEQ ID NO: 258157 - DNA, 235 bp, Homo sapiens
agatatgtagattgttgttagcgcttcctaccttgcacagcctcttgtcccgtcactggccccatgcatcttcctctgctgccttcaagaagctccagatcctgccacagacgtgctccactcagaggactggagtccaatcccctgacagtgcttttctctttgggaagcaccccctcccccactgccattaaacctctggaattctatggaataaagtaaacattaacttata

SEQ ID NO: 258158 - DNA, 499 bp, Homo sapiens
gctagtagcgaacgcataagaagggcttcctgtatgcctgcgtatcttgtttaagcctaaagatatgtactctctttatcctctttttttgagacgaggaagtagacccagcatgcccgagatcacacattttacaaggaagaagtaggatccagacccagggagtttaacttcaaaacttgaacgtttaacaatcaggtcttgctgccctactcataaagagacccaaataaaaacaacatgacgccatttttttccatgtgtttagactggcaaacttgtgaagtcgcttaataccaaatgtgtaccaagatgtaaggaaatgatgtgagaatgtcattagtataaccttttaggaggagtaatttgacaatatgagaggcttgagcggattgattcagcaatttcaccactaagaaagtatgcaacaattatttttgcaccaatatccaaagatttactacaaagatttctggcagcaatttttgtgtgtgtgtgg

SEQ ID NO: 258159 - DNA, 420 bp, Homo sapiens
gtgccctaaggctctgtttcttctctcccctgtagataggtaagcagcagaaaactgctttatgagccctaattattacctttccccctctttatggaataatcaggtcttatagatccaattattactatatttatacacatcttgcagtctgaaagatcctgtgtggacctcaaaataccagtatttcccctctgaagtattactgtttcttacttcagaaaatgctagaaattcacagtatccctatgctcagaatctatgataaacagcaagatgatctgagattcttttgatttgaaaatagctcagtctcctttgaatgaaacctataccaaatctcactctctagtaatttgtgctgtggaaagtataaaattgagcctaattccatgaaataaaccatgcttgcaaagtact

SEQ ID NO: 258160 - DNA, 356 bp, Homo sapiens
actaaattttagagcatggttttgtttttggaaaactgtgttgtaagtgccaatcaaccaacttttgaaaaaatcaagatacctaaactatatataaatggggagtattctgtacatatagacttatatataaagacatctgtgttcacggatgaccctcaaaatagttaatgccccaccagcatagaccatctgaatatcagccctgtctacacctatcaatgtattacaaaatcagtatagctctacaaaagagatcatgcttatttccccagatgtatttgattttgtatcatataattgtccatgttataatttttgaaaatgtttattaaaatagccatcttttttgatat

SEQ ID NO: 258161 - DNA, 485 bp, Homo sapiens
ttcactccctgtgcaggcctgtgggtgcttctgtcacccctgggagtctttttcctcccagccactccctaacgggtgtagagcaagattggaagataccctggaggaaggcggccagagcctcagggctgactcatgggtagcagaggcctgctccccaccacagcacactgcagggcacaggggacgctgggaaacctttgggctgagtcagacttttagatggggagctccctgtgtggccttgcacaatttacagcctcagtttctcctttcttgagactttctcccagcctcctatagatggaaggcatgaaaggcgtaaaaggaacgcaggtttggatagggtaagatttgaaacctgctgtctccacttgaacttatccatcaattttacttgtcctacacactttctgggtaaatttgtaagttgtagattggtaaaataaagtgactgtttatagagtgattgtggaaagcaggat

SEQ ID NO: 258162 - DNA, 693 bp, Homo sapiens
acaggggccgtaactggggggagctcctgactccaacaccccacccaactccctcctagggagagagagctgtcaacctccaaaaccaacccagggaaggagtgaggtcgaggccaaaacttggacaatctctgcacatcttgcaattcaatctggagcccctttgctgtctttccttttcctgaatctactctcaatgttgacagcactgtgcgatttctgtatttgccaggggcttctcgtgggaggtcggctccagccctctcgagaaccctccggagaccgtggggatgaggcagcgctcagccagagaagccctggagcccaggaccagcgcttcaagtgcaccgggcgggaggcaggggcgcagggagggaggctctggaccggccgcccctgctgactatggccccggtgcaggtcaaggcttgggcccggggatttcctttcaaaggtgacttagagccgcttcattagggtagcgccctcccaggcgggccctaatggcgtgtttggcagagtcagcgaaaagcagcgccctgcggctccagcggcgggggagcgccctcttccgcgccctcgccctctcccgtgtggggcagctgcgcgcacggggccatttgcagcgcaagcagcctagcgtgcggccgcggcgcccaggtcggaaaggaggcggcatcatggagctgaaga

SEQ ID NO: 258163 - DNA, 350 bp, Homo sapiens
acaggggccgtaactggggggagctcctgactccaacaccccacccaactccctcctagggagagagagctgtcaacctccaaaaccaacccagggaaggagtgaggccttgcacaatttacagcctcagtttctcctttcttgagactttctcccagcctcctatagatggaaggcatgaaaggcgtaaaaggaacgcaggtttggatagggtaagatttgaaacctgctgtctccacttgaacttatccatcaattttacttgtcctacacactttctgggtaaatttgtaagttgtagattggtaaaataaagtgactgtttatagagtgattgtggaaagcaggat

SEQ ID NO: 258164 - DNA, 440 bp, Homo sapiens
ctgtgtgcagtgactcaaacctgtaatcctagcatttgggaggccaaggcaggaggattgcttgagcccaggtgtttgagaccagcactggcaacatggcaagaccctgtctgtacaaaaaattttaaaattagctgggcatggtgttgcgtgcctgtagtctaaggtgagaaaatcacttgagccttgaaagtcagggctgcagtgagccgtgttcacacattctgtgaaaattcaatcaggcagaaaagtgacaacgttttctctttgacattgttatgaattgtatctaaatttgcagctctagattttttttcaattttgagggttttgagagcaaactgcctttttttttttttcttttctctttttttcttttgcccctgccagacatggtttttctctgtcgcctaggctggagtgcagtgacaacgatcaca

SEQ ID NO: 258165 - DNA, 329 bp, Homo sapiens
ttgtgtgatgagtgttctgaggaggggaacagagatgcggggagctggcttaggagtgtggcgctcctcagtgcgcagtgggagccacaccactcctgccttctgcctggcctcgcaagttcagagctgctgccttgtcaagaaaaatccactgtgccaggccccattttttgttttttggttaactccctgttcattaaaaaaaaaaaatctatatctatagatagatagatatagatataatctttgttatcaatttgtataagctctttggaaattagtccttcgattgtcatttgtattgcaaacacattctccctccccctgca

SEQ ID NO: 258166 - DNA, 640 bp, Homo sapiens
caaaaatatatgtatatgttccaaaaggaagatcagtgaaggtgttccgatgcttacatgactaaggtaattaaacatctacatatgtgaaggatttttgaggaggggatgtaaatacaatggatattataaggacagcagtcctagtatgttcctggtctgtggacctccttccttatccctgcacctttcctcctctatgcttgtgtatgttcacatgcatgagtgttcatgtgtacatgtgtgcacgtgtgcatgaccatgcacatgcactgaaagatggggatgtggggaggataagagcagcttaccctatttctcatttgtggaaaaaacttttactccattggatttggtaatcaaaaagctactgggggccaggtacagtggttcacgcctgtaatctcagcaccttgggatgctgaggtgagagggtggcttgagcccaggaatttgagaccagcctgggcaacacagaaagactctgtctccacaaaaactaaaaaaaaaaaaaaaaaaatcagtcaggcctggtggtgtgtgcctatactcccagctacttgggaagctgaggtgggagaatccttgagccagggagattcaggctgcagtgagccgtgatcgtgccactgcactccag

SEQ ID NO: 258167 - DNA, 427 bp, Homo sapiens
gcattcagctggccccaggatactgatcacagataaaactaccagagcacagttatataatatatgttacatatcttgtaacggaaagacaacaatcctttatttgtaacatcagtaatctgagcaagatagctttgggagcattctataaccagtttggcaacagcaagctgtagagcgggccaatgataaatcacattgaatcatcatttgtgtggccaatgcaaggagtctgcagtatgagcagcatgcagctgccaatttgtgatgaacgaggaaaggtaaaggttaaaagaacacattcgcacacaaaaccttgtgttttacaggcaacttcaaaataaattaggaagatgggctgctaatgggcaatatgactctaacctgagacctctatcaaaaaaaccccaaaaaacaaaaacctgca

SEQ ID NO: 258168 - DNA, 457 bp, Homo sapiens
tcaattcatatatttatcattaagaaaaaggtttaaagtgaccccaacacaggagaataccactttaaaaaaaacactaatacctcagatttgtggagaaattagctaaatcatttgaaaggtcttatagtttaccaatttggatcagttcactgcagtagttcatcaaaagtttttctctgttgtattcaaaagcttgccatattaccccaaatatcctgtcttcaaagagtttaacagttagtcattgtgaccaccatctatttatgattaaagcaaggttatttaaatttaatggctaaaagcgattttaagccataatacttttcaacctaataatctacagtgtgaaaaatggcactctcaaactggtagtagattttaaacctgcagtacttaaattatgcaagatccatacacaagtcaattcttgtcatgtctccaattaaaagaaaaa

SEQ ID NO: 258169 - DNA, 689 bp, Homo sapiens
gaagggtggaatttcttcttcacaaaatgttatctcaatgctactacttcagctgtaccttttgtaggcaattccaaaagtgtatgagactaggtgcattagcatgatacagtatgtgacatagccagtggaacccatacccatggttatgggaccactgctgtgcctccttcacgtgaaaattcttcctggttactagccatgtcttgtcatatgggagtttataccaatgtatcaggtatagcgtaaacctccagataattggctagctgaggttgtttgggtagaaaatgtaagttcatatattaaatatgcctacagctatgagaatgaactgttggcctttctaagacagaaatgatgtgatgtaatctactttccaccaaaggcctggttggtctccttaaactataattcagtatcaggaattcagaattatgcagcattctcagtattatggagaactgcactacttgttcatgaagtttgcctgtcctctctggtccattcaagttcaatgcctctggtggtattatgaatggaattatgtaacccccaaaaatatatatatattggagtcagatcctcaatagctgggacaattaagctggacactgcatttttctccatacctattaataaagatcatcgaaagcagtttcatttctgttaaaaggactagcatttgg

SEQ ID NO: 258170 - DNA, 487 bp, Homo sapiens
gtgactccccacccccatttgtcctatattaaataacacgggttccaatcttctttaaattttcatgatctggcttcataataaagctttatagttggttcttaccagttgtatcaccctggggaaggagaaagaattggatgttcattttgcacattattttaacctcggctaatggaaactttctctaacttcctgtgtaggtcagcaatttaaagttggattatccatagaaatcatatttcattgtaggttcatcctagaggttctaaactaggaaaggaatggactgggggggtctcaggtgagggtgtgtgaggacccctgctgctgcttctctggaggttaaggggatttattacactcagtcctaaatgtttcaagtgcagaaagagctgtgtaagtcctaaatgttagcggtggaggacatcttaggcatgaaatactctttcttattgccaataaagaaattaaagcttttggttgt

SEQ ID NO: 258171 - DNA, 312 bp, Homo sapiens
tattcagtcataagagtaaaaagaaaaaataattaaaaagcttaaagaaaacctatgggaattgtgggccgccaacaagcacgccaacatacacatcactaagcctaaatttccccatctataaatgggcatagggtctttattacaggattggtaagaaaattgaatggaattgtgtttgtcttgttttagtaaataaatcttatgctttatcttttaaacaccttattgaggtataatcaatacactggccattatattttaaaataacctttctttctccttctctctgtcttttcctctgaaatatct

SEQ ID NO: 258172 - DNA, 707 bp, Homo sapiens
atagcatagtgtgctgacaacttcaacttgaaaagttattaagagagggaaaagccattaattcctgagtttagtttcaggtacatcagaatttcctcacttcagatgaaagctaaactctgcaaactttcatggtaatttccaaaaaatttcatttcaaaagtttaaagctggaaactacagtgcctaaatgatcttgctaccacttcccctgccaaacgcctctcttgccccatctcctaatactaactacctgactcctacccctcacaatcatggcaagccaacgccacttatccagtgaaccactatcacgaaaaaaactctacctctctatactaatctccctacaaatctccttaattataacattcacagccacagaactaatcatattttatatcttcttcgaaaccacacttatccccaccttggctatcatcacccgatgaggcaaccagccagaacgcctgaacgcaggcacatacttcctattctacaccctagtaggctcccttcccctactcatcgcactaatttacactcacaacaccctaggctcactaaacattctactactcaccctcactgcccaagaaactatcaaactcctgagccaacaacttaatatgactagcttacacaatagcttttatagtaaagatacctctttacgggactccacttatgactccctaaagcccatg

SEQ ID NO: 258173 - DNA, 399 bp, Homo sapiens
gagggccagttcttctgccacatctctctgatttcagctagagaaaatatcctgcttttcagggctcagattagatttagtgcacacagagaagccaggataatctctttattttaaagtttgtaattttaattacatctgcagaattccttttgacatgtaatgtagcatattcacaagttctagggattaggcacgagatgggcattctcctaccacagccgggaagagcagtttcagaggttgccttccctaggtgatgtgggtgttctcagttctcaaatttgtctgttttctctctagggttcactttctctctagggttcacgttgaaagtcgtgattcttggtgccttgatttattgtgctcatagggttaaaaaaagatttgcattagaat

SEQ ID NO: 258174 - DNA, 385 bp, Homo sapiens
aagatattaacaatcaacccaaagagttcacaggatatccttttcagtaagttgttcttatttatttttccataaaattatgacctgattcattatcttggcattgatctataactacagttctttggaaaatatataaggtctgaagtcaggaaaacatctcagaagcattcactctaccatgtaaccattaatttaccctgatttggaaaaatagcctgaaaactagtgaatgcttccatctcaggagaaacttcagtgtcactagatatggtaaactgtagtatgctattttaacaaaatccagagcaaaaaatggatgaatccaggggaactacctatagcaccatctgaggcttaggatgttaaaaaaaaaaaaaaaaaa

SEQ ID NO: 258175 - DNA, 717 bp, Homo sapiens
gaatcatcaatggatgctaaaattaataggtgaatgtataatgagaaacataaatttatatagtctcaaagcatttcttcataaaatgccttttaattattaaagggaaaatagtaacttaacagtggagaaacctggtggacaccatcttaaccacgtaattgaaggtaacaccaccagtaataagacatacaggcatgacattcctccacactgagaagggtacagcatcacttctgcggtatttctgccacatgcaaaaacatgagacacccaggaggaggaggtgggaggcagacaggaagagagggaagaaaaagggataggtattggtggaggtttgatactaccacctccattaagatgttgatagtgaagacaggaagatgtggaggcagtacgtagattacaagaaaaattgtgaatcaacagaatttgaggatcagtatcagatgagaaacaatggattctgaagagagtagaaggaggtttaaggaagatacccagatttgtgggctgatgtacaagtggttgatcttgccttgtattaacaacaggataaattggaggagacaaagttttagggataattatccactaatttaagattctcaattcatcagtactgcaatcccaagcatgtagcatatccttagtgaagtcttttattattttatttgtttattatttcttattatattattagggtcagataat

SEQ ID NO: 258176 - DNA, 414 bp, Homo sapiens
tgaccttgtgaaaaaataataatatttctacttaatagagttatgttgaaggtataatgagatagcatatacaaagagcttagcaaaatgccttccccacagtaagtgctctgttaatagtttgtgtgggccaggcgcgatggctcacgtctgtaatctcagcattttgggaggtcaaggcgggtggatcaactgaggtcaggagtttgagaccagcctgaccaatacgatgaaaccccgtctgtactaaaaatacgaaaattagccgggcgtggcatgtgccggtagttccagctactcaggaggctgaagcaggagaatcacttgaacctgggaggtggaggttgcagtgagccgagaacgcgccattgtactccagcttgggcaacaagagcgaaactgtgtcttaaaaaa

SEQ ID NO: 258177 - DNA, 114 bp, Homo sapiens
  misc_feature (44)..(44): n is a, c, g, or t
  misc_feature (49)..(49): n is a, c, g, or t
  misc_feature (52)..(52): n is a, c, g, or t
  misc_feature (56)..(56): n is a, c, g, or t
gccgggtcgacacggccgtgtattactgtgcgagaggggcccantaggntcngctngttactccttctgactactggggccagggaaccctggtcaccgtctcctcagggagtg

SEQ ID NO: 258178 - DNA, 126 bp, Homo sapiens
gccgggtcgacacggccgtgtattactgtgcgagagcgtctccgtattactatgatagtagtggttattaccgacgacttgactactggggccagggaaccctggtcaccgtctcctcagggagtg

SEQ ID NO: 258179 - DNA, 121 bp, Homo sapiens
gccgggtcgacacggccgtgtattactgtgcgagagttcagagggtcttcacgcggtgacttagagaatgcttgtgactactggggccagggaaccctggtcaccgtctcctcagggagtg

SEQ ID NO: 258180 - DNA, 100 bp, Homo sapiens
gccgggtcgacacggccgtgtattactgtgcgagagttccgaggctacactttctggaatccttcttcgctactactacatggacgtctggggcaaaggg

SEQ ID NO: 258181 - DNA, 399 bp, Homo sapiens
aaactttcccaaagaaaaaaaataatctctaggtaatgctcttaagaattcttagaaagaaatctttattctttgagcactcttctgggaaacctaacctgtgattactgttaggactcaaaatgtttcaccacctgcatctacgtagataggatgaggagtctggggaaataatggagccaataggcttttagcttgaggagcgtggattctaaagccagggacactcatgaaaacaaccacctggcggattacaccctaacgttgaaactgtggcaaagtaccttttaattgcaaaagggtttaggcagagatttatctttgagttccttggcaataaatgtttacccactttaccactgttactatagaatggggaaggtttaaggtagaaaattt

SEQ ID NO: 258182 - DNA, 615 bp, Homo sapiens
tctcaatgaatgatcgggctgcttgtttcttttaaaacatttaagaagacagctgcttttgtcaacctagcacgtgagggtcctggtcaaaatttggtttcaatagccagggcccatgggaagcccgcaagagctgaaggcaaaaacactggaaagaattagattaaacccaagaaaacaccaaaatatcaggataaactgccccaggtgagcaccaggcctcctggagcccccggccttgtcccacaggaggcccccaaacccagatgcctacgttgagtagtctgtctggtccatcaccacccctagggtgggggctaaagaggcaggtgggagacagtccggggcccctcactttgaactgataacagccacctcatcccacagattctcaggtgaaaaatactcattagccataataagcagcttgatcatccgacacagccttgtcccaaataaattaaattcctttaccttgagacagtcgccccgaaaccagactaaccacctttcccaacaggacgctgctttcaaaaactaaaccaccccccactaaaaaaataaaaacacacaccccagagccagacacacaaagatctttgcagagaacaaaaa

SEQ ID NO: 258183 - DNA, 683 bp, Homo sapiens
gaaagaaaagaaagaaagaaagaaagaaagaaagaaaagaaagaaagaaagaaagaaagaaagaaagaaatttgtaatttctgtctgacatttctcaaaaggtttctgtgcagtaccagttcttcttccaccatttgctttcgttttagtgtccatattatagaagagttcatgtcgtgaaagaagtcaaaagcaatcttgaataagcggaacccttctgccagatggtctaacgtcaatttgctttctggcactgcttcttctatgtcttcatcctcattgtctggcactggttcagaagcactcatctccatcaagtcatctcctattagttcctctagcgtggtgtctattaactcttgaatttttctaagatccatatcttgaaactcttctcccactacattttatgccatatccaaatctctttcatgatttccttgatttgctctgttgtgtatcttcggcattcacgcacacatctggacacagttttctccagcaggaatttattgtttcgggttgatggctttcccagctttttctatagcaatggtgatattttcagtcctgcaatccttctagactttcattgacaatcttttccatagggtgctgtgtgtaatgagtctgaggggtccttatgaactcctgatctagacgctgagttaaagatgctgtgc

SEQ ID NO: 258184 - DNA, 148 bp, Homo sapiens
gatcgcttgagtccagcagtttgagagcagtgtggacaacaaagtgggtccctgtctctacaaaaaaccgacctattaaacatgcattatctatttctgtgaataatcactttatttttttttttatttttgagacggtctctcactc

SEQ ID NO: 258185 - DNA, 788 bp, Homo sapiens
tacgaatttggggactaagtttccaacacatgaaatttggggaatacattcataccatagcaaatacaaattcctttctcatgaccttcataatgccttggtcaaaaataaaggtcactggggtaatgcatagggatgcggaagtttataattacagggggccaagtcacactgaccattcataagtgaggcaagcccttttacaatctccctgaaaatgatcaactaatttctccttaaatattttcagcaaactaacaccttaacaaggcagctcacaaattataaaatatcagagagaactgaaattcatctccccaaaatttgcaccaactttgtaactgccatcactcaccaggccctgattttcttcttaggctttagtaaaatcctttttcccagctcaccctgaatgtctatttttaaaacccagctcaaaccttcctgatatttaccatcaatagctgtgacttagacttatttgggcttcagaagattccaagctactttctccagattctatggatacttctatcgcagctggtgtgtctggcagctgagcagacctacaattttaggagaagcatctcacaaataacttagtgcatcaatgtatgtggttctaattatcagttgccccgaccctctcacccgctttacttaggaaccatatgaatgtgcaaaaggcagataacaagagacttgtagtattggtgctcatggtctatcaaatctctaacttttaaaaacatatagtggatcacgaggtcaggagatcgagaccatcc

SEQ ID NO: 258186 - DNA, 612 bp, Homo sapiens
gggggggggctggctgtcagggaggccgccccgtcctggggggcacctcagggcaggtactgacttccatagccaggacctaggccgggaatcgggaagggatggccccggaagtgataaggcaggatttccaggcaggggaagtggcatttaggagaactggctatttaagggggcggtcagtgctgacacagacaaagcattcactggctgggaatggccgccacccagtggctctgagaactagacttggaagtctggcactgggagctgtgccaacttggaccaaactttgggcgcaaagcacgacgtggcagacgaggaaccacactagaacgggccacgcctacccaagatttacgaggccgtcctttccctcatgcaatcgcaatgggaaaaggaggaaactaaggctcggtaagcaaaagcgttggtgtgtggatacctccagccccaaggccgggaaagcggccctggagaccgggggcgccacgtggccccgcccccgccgcgtgcgcatgcgccccgcgcgcaccctgcgccactccatccgggaactcggcgctcccgccatttcgctgggcacagcctcgagctcgcggccgccatttt

SEQ ID NO: 258187 - DNA, 642 bp, Homo sapiens
gggggggggctggctgtcagggaggccgccccgtcctggggggcacctcagggcaggtactgacttccatagccaggacctaggccgggaatcgggaagggatggccccggaagtgataaggcaggatttccaggcaggggaagtggcatttaggagaactggctatttaagggggcggtcagtgctgacacagacaaagcattcactggctgggaatggccgccacccagtggctctgagaactagacttggaagtctggcactgggagctgtgccaacttggaccaaactttgggcgcaaagcacgacgtggcagacgaggaaccacactagaacgggccacgcctacccaagatttacgaggccgtcctttccctcatgcaatcgcaatgggaaaaggaggaaactaaggctcggcctcccctactgagcctggttggcggaggggagtcttaaagccgccgccatctggagaaccagctttacaaggaccctcactcactactcttcggcggccccaaagcctctggggggccctctatggccaccacttgctcctcgcccaggagtcatctcatgccgccgcctcccccagccctggtggaagaagccagcgcggacccctgcctctctgccccaga

SEQ ID NO: 258188 - DNA, 368 bp, Homo sapiens
ggtttctctaattcgggcagtctgttctgctgatttagaaatgggaccccttccatgttcaatatcactctttatgtataaaccacaagactaggggaagtagagtgacactgatccttaaataaaatttctgccacaaaacactgtgaatgaatttgaaagtaaaaaaaaaaaagttagagaccagataaaatagagttgatatcctttttacaagagtattttcaacaaaaaccacaatttacaaacaagtgtgtgataaacattcagagtggactgaggataatataagcaaagcaaaataatatttaaaatataaagccatgatccaagaaaggctctttcaaaaacaattgccaattctcttc

SEQ ID NO: 258189 - DNA, 517 bp, Homo sapiens
tcacatttgtcatttcctgtcctatgatgctcttcctgcagatatctacagcagctccccgctgctccttttgcaggtttttgttcagatgtcatcttcctggtgagctcttccctgaacaactcctcaccccctccaccttgcccctgggactccctttgacctttctcggattgttttccctgtaactcttgccaccacctcatacagggcttctcaagcttggcatgattggcattttgggacagttctttgttgcgggctattatcctgtgccttgcaggatgtttagcagcatcaccaccctcgacccactcaatacctgcaactttcctccctaggttgtgacagccagaaatgtctccagacactgccaaatgtctcctgggggacaaaaccacccctggttgagaatctttgatataatgtaaatatgcattttacctatgtatttgtttattgttcctcccttccccaccaataaaatataatctccatgagaacaggaatttttgtg

SEQ ID NO: 258190 - DNA, 514 bp, Homo sapiens
atcaagagttcctttgtggcagggcaaatgttgtagcattactgccaacagcacacacatctgtaggtggggttgcatgttgtatgcaccccaaatattgcactgtgtctttaagatactgatgtatattgctctgctaaagactggtggttccagagaagaaggcatacaaaattgtcactgattcagcaaacagaaaagtcaagacacaaattgacatatacttatcgagtcaatggatgttgtgtgagtaatttgatttacacaattattatacctcaatacaatgtagtggcagtttaaaaatatattttaattgtccttgtacatgcctcaatttaagattatatattatataatttttcagagtatgcagccaaaaaatagaaaaaacagttgtatcaggaagttaattgtaaatacatatgcatttttctggattttatgaagtttattgtatttgccagcttttaaaacattttcaccttttgtggttaattttttccactccaaa

SEQ ID NO: 258191 - DNA, 376 bp, Homo sapiens
cagtatcagtgattggttatagttagcctgatttctatgttattgaatttattatgtcttttttgaaatagtattggggtaaaataaacaccacaagtcaataagcttatttagttggtgggaactcagctatctcatctggaaggttagatagcctaatacataagacagccaagccacagtactactttatacatagactctaagaatttagtgctaaaaaagatgtaggaataagctagtgatggcatagttttaagtagtaaaaatgtccaatttttaaaatttcagaaaatagcatattcaaaaatgatttgagttcaagtgaaacttaagtatggcttctaataagacccgagggtgaaacctttgtatg

SEQ ID NO: 258192 - DNA, 944 bp, Homo sapiens
ccctcctctcaaggtgactcctcccctcagtgtgacccagccctcctcagtgtgagggttccgccctccacgtaggaacacggtctgccccctaaggccggaggaggggctgcaactggcctctttaagtcggcgcggtgcctgggtgcgcacgcagtctcaggactccgtgcactcgccgtaccagacgcttccggttctgccgctggttcctcctccggcctcggcgaaatagccaatcatcgctagggttgggtggtgacacgcgatcccggcggtccactccggggcaaacggtttaaaagggcgtcgttgagccgcctgccacctagcggcggaacggtgggcggagggagagaaagctgccgtctcgagtgcggaggcaggctgagagctcctcgaggaagcgaggctgagtcctgcaggaattctcaagtactgtattgatatttctgtagtaagcttaaaagagaattaatacaagcacagtccgtatcgcgtggggttaccgtcttccaatggagtctggttacacgtttatgagacttggagccaagaaatactactcgcttgtcgagggctactgagaaaagaataaagacggtcataaatgatacatgatgccttagagtcaagagaaggccagatgctgtcttggtgcgctgtacaagggaaggtattgcacaagtttggagcgagaggaatgggagacattcgcaatccttccacagccggtggaggcaggccaacctcacagaattgcacggggcacgtgcatcctgttcttttttctggaggcgtttggtcttcagcacacgctcattcatcacattaatgttaacatctacaactaatttgtgaatttgctttttattgtatgacatctgtaaacactaggaatttatgcctcattttgtttaatatcatagatcttttaaccgaca

SEQ ID NO: 258193 - DNA, 436 bp, Homo sapiens
tcctgttgtagcagttgtaccttcgagagggtgttctctgcacacacttactttcaactcttcctaaaggtataaacatgtggcatctatttttaaatggccattaattaaaaaaaaagctggcactcttctagaagtgaaaaattctagtaatatgatacctactagccagaaaataaaagttttaaaggacaaattatgttctccagtggtatttgggaacttgcaggaaacacaaggatttaaaaagagctgatcaatagaaagttctaaaatcatatcagtgttccatatctgctctatccaatagctgcttgaaatgtggctcacctgatagaggaactgaattttaaagtttaaattttatataaatttaataaatgtgaattgaaatgtaaatagccatatttggctaccataccgggcagatcaggtt

SEQ ID NO: 258194 - DNA, 407 bp, Homo sapiens
ataaaaactgctacacaggtttgtaaccaatagcctaaggtaaaacctggtattaataaacatatggcaatgaatcaagccacaactatctttattcacatagggatctatggactgtaaaaccaccaccgggcgcagtgcctcacacctgtaatcccagcactttaggagactgaggtgggcagatcacgaggtcaggagttccagactagcctgaccaacatgatgaaaccccatctctactaaaaatacaaaaattagccaggtgtggtggtacacgcctgtaatcccagctactcaggaggctgagacaaaagaattgcttgaacctgggaggcagaggttgcagtgagccgagatcaggccactgcactccagcctgggtgacagaatgagactccatctca

SEQ ID NO: 258195 - DNA, 228 bp, Homo sapiens
tctgaggctgcaggtaccaaagctgtccctgctcaatcctccctctcggagtgggctttggtttttgtgggcgactccattgttaaaagccagccctacaatgggacgaggacagttgacaggtttctgtgcaagcgcgtttccgatcgcgcaaggtaacagcttcattactcagtgatgagtgacccatatttcctaacatgatttccctgctgtaactcaaaaaaa

SEQ ID NO: 258196 - DNA, 684 bp, Homo sapiens
tgtatcacaaatactgcatcagatatacttgtactgaaaaaaatcaaaacaaaaacaagaactacagcaacaaaagcaacaattgttatttaactaaaattcaaattctgccgggtgtcttatatatatatatttttctaaatctgaccaagggaaaacagaaaggggtggttgaagcatgaaagggaatggaaaagagacaaacacggctgtaatttcaggagaagctccaggttcagcctgattgtgaaggaagctttcagtgtgccagacacctcagttagtcctgcgtcaagcaaaaggagctgggcgtctgggcttccacattagttatatgagttggttattaagaattaacagtaggctctgtgtatgattggggtagggtagggatataggtaaaactctcaactcacagaccttgggatcttcctaccagctgatatgcggctccagtgtccaagatacctttttgaatatgtcaggtctaatcagtatcacttcatgcagaagcagagggatgaacgtacagatctggtaaaagggacaggaagggaaatagctatggcaataacagtgtccacaacattatcttaagcgtgatggacatttgttaaaatgcttttggaaactcatagtgtggactgaaaactggaggccccagcaaattgccaacaggggacg

SEQ ID NO: 258197 - DNA, 410 bp, Homo sapiens
caggcatgagccactgcacctggcttagactggataatttttaaagaatagaggtttatttagctcacagttctggaggctgggaagttcaagagcatagcaccagcatctggtaagggccttcctgctacatcatgacatggttggggatgagagtgggcatgtccactcaggtctttcttccttttataaagccatcagtcccatcatggggccctgccctgattaccttatatgatcctaattacttcccaaaggcctcacctctaaatactataccatcgacatatgaatttggggattaagtttccatcatgagatttgggagatgcattcaaaccatagtagtgattttcatcctcttctctaaacatagtgaaatttcagaacaggctgggtgcagtctcaga

SEQ ID NO: 258198 - DNA, 886 bp, Homo sapiens
cctgtgagtgtccaggatgcatgagagaggttgttgtgagacctgccttaaagggtggcggtggcacgtgtggaccttgctttctgagtttcactctctgagtcccagaggtataagcttgtgaagagaagcgtgtatgtatgatcacactaagcagatacttgctcctgcactgttggaggaggaagaggagttaatttcatcaattaactcttccaacactccttccatttagtaatagcatcacttgttcctgtcttttgttccatggccaagctccacaaggtgaaattgaaaatcgagtgcaagacactggctgtgctggagttgaggaaagttttgctggagacctgcttgcaccatatgtctggtcactgatagatgaggactggccaggtcaggacagctgacacttggagaaggggctgcccaggagggcatgacagactctggaaaaggagggtcggagtattaaactggctgggaatgagaggcctccaatcttttcgcaggaaaaaaaaaaaggcttaatgctcgtgctgtggaagtcagaatggagcaaagtgggttctgtctgtcttgctgctgtgagtgtgtgatggaacaacagtgtcatttgctttttctcagaaatatttaatgcatgtttgtgacataatttttcaaagtaattttaagtaaatattttaaagtaaaaagttctaagatttgtgtctcaaggtaaagtctcaaacgttctttggtcactatttaatatgagattttgtcctcattttaaatggattcatgtaagcgtcctgtggaagaagagttaatagttatccttggaaaataagaactttttatgcctcagttaggtcatatggtttaggatctgattttgtag

SEQ ID NO: 258199 - DNA, 689 bp, Homo sapiens
tcttgaccatgtgaggcctcagaaattctgctataaaaaacattcttattaaaactactcttggaagaagtattcaaataagaaaggaagcaaatccaggaaaatactgaagtaatataggagttaacaaatatattggcttaacaatatataacaatatataaggcttaacaaacatattgataatattcagttatctgaacagccaaataaataaaaacctgcctctgccctaaaaatctagatataaagaaaaggaaagcaagtattattagttgtctttattatatattagaatcaagggcatattgtttagctatgtcaataaaaacaagtagcagtaggcttttataggctgatctttaaaataattttcttcagcaaatacattctgtcaaagaatttatgatttaaatttaaaaataaaatttatttgtaacggggttaaaactttatttaaaaatttaatgtaaggcaataatcgcaaaacatgagaaatgtgttctttaatttcagtggctgatatgcaagttaatgaatcatttatttgtttcttacaaggcaaagctaaacatgtaagaataaaggttttcagaaagtagacttgaaaacaattcatgcattcttgagaaaattttaatctgtttttaatttgtaaccttgtgatgattaaatacagtcaatccata

SEQ ID NO: 258200 - DNA, 420 bp, Homo sapiens
ctttaactcaagacaggatggtgatatgcaacagttataggcaaaaaatatttacatttaagaaaaaaagtatcatttaatcccattaggcagaagtggagtcaaaagcaaaaatatggctggttatggatgtatgtttcccttcctgttcatatgttgaaacctaattcccaatgtgatgggttttggagatggggtctttgggaggtaataggtcatgagagtggaaccctcgtggatgggattagtgccatataagaagagtccatagagctagctcactccctttctgccatgtgaggatacaagaagtcggcctggaaaagagccctcaccagaaccctacaatggcactctgatcttggacattcggcctccggagctgtgagaaataaattgtctttaagctatccagtttat

SEQ ID NO: 258201 - DNA, 2364 bp, Homo sapiens
  misc_feature (37)..(40): n is a, c, g, or t
  misc_feature (42)..(42): n is a, c, g, or t
  misc_feature (235)..(235): n is a, c, g, or t
  misc_feature (657)..(657): n is a, c, g, or t
  misc_feature (789)..(789): n is a, c, g, or t
  misc_feature (1009)..(1009): n is a, c, g, or t
  misc_feature (1120)..(1120): n is a, c, g, or t
  misc_feature (1618)..(1618): n is a, c, g, or t
  misc_feature (1677)..(1677): n is a, c, g, or t
  misc_feature (1858)..(1858): n is a, c, g, or t
  misc_feature (1877)..(1877): n is a, c, g, or t
  misc_feature (1913)..(1913): n is a, c, g, or t
  misc_feature (1999)..(1999): n is a, c, g, or t
  misc_feature (2249)..(2249): n is a, c, g, or t
  misc_feature (2266)..(2266): n is a, c, g, or t
  misc_feature (2279)..(2279): n is a, c, g, or t
  misc_feature (2283)..(2283): n is a, c, g, or t
  misc_feature (2324)..(2324): n is a, c, g, or t
  misc_feature (2344)..(2344): n is a, c, g, or t
  misc_feature (2364)..(2364): n is a, c, g, or t
gatgatcccaatagcagtgatgaatctaatggcaatnnnnangctaattcagaaagtgacaataacagcagtagccgaggagatgcttcttataactctgatgaatcaaaagataatggcaatggcagtgactcaaaaggagcagaagatgatgacagtgatagcacatcagacactaataatagtgacagtaatggcaatggtaacaatgggaatgatgacaatgacaaatcanacagtggcaaaggtaaatcagatagcagtgacagtgatagtagtgatagcagcaatagcagtgatagtagtgacagcagtgacagtgacagcagtgatagcaacagtagcagtgatagtgacagcagtgacagtgacagcagtgatagcagtgacagtgatagtagtgatagcagcaatagcagtgacagtagtgacagcagtgatagcagtgacagtagtgatagtagtgacagcagtgacagcaagtcagacagcagcaaatcagagagcgacagcagtgatagtgacagtaagtcagacagcagtgacagcaacagcagtgacagtagtgacaacagtgatagcagcgacagcagcaatagcagtaacagcagtgatagtagtgacagcagtgatagcagtgacagcagcagtagcagngacagcagcaacagcagtgatagtagtgacagtagtgacagcagcaatagcagtgagagcagtgatagtagtgacagcagtgatagtgacagcagtgatagtagtgacagcagtaatagtaacagcagcganagtgacagcagcaacagcagcgatagcagtgacagcagcaacagcagtgacagcagtgatagcagtgacagcagcaacagcagtgacagtagcgatagcagtgacagcagcaacagcagtgacagcagtgatagcagtgacagcagtgatagtagtgacagcagcaacagcagtgatagcaacgacagcagcaatagcagtgacagcagtgatagcagcnacagcagtgatagcagcaacagcagtgatagcagtgatagcagtgacagcagtgatagcgacagcagcaatagcagtgacagcagtaatagtagtgacagcagcgatagcngcaacagcagtgatagcagcgacagcagcgatagcagtgacggcagtgatagcgacagcagcaatagaagtgacagtagtaatagtagtgacagcagcgatagcagtgacagcagcaacagcagtgacagcagtgatagcagtgacagcaacgaaagcagcaatagcagtgacagcagtgatagcagcaacagcagtgacagtgacagcagtgatagcagcaacagcagtgacagcagtgatagcagcaacagcagtgatagcagtgaaagcagtaatagtagtgacaacagcaatagcagtgacagcagcaacagcagtgacagcagtgatagcagtgacagcagtaatagtagtgacagcagcaatagcagtgacagcagcaacagcagtgacagcagtgatagcaatagcagcgacagcagtgacagcagcaacagcagcgatagcagtgacagcagtgatagcagtgacagcagtgacagcagtgatagcagcnacagcagtgatagcagtgacagcagtgacagcagtgatagcagtaatagtatgacagcngcaacagcagtgacagcagcgatagcagtgacagcagcgatagcagtgacagcagcgatagcagtgacagcagtgacagcagcaatagcagtgacagcagtgacagcagcgacagcagtgatagcagtgacagcagtgacagcagcgacagcagtgatagcagtgaaagcagtgatagcangatagcagtgacagcagcnacagcagtgacagcagtgacagcagtgaaagcagcnacagcagtgacagcagcgacagcagtgacagcagcgatagcagcgacagcagcgacagcagcgatagcagtgacagcagcaatagnagtgatagcagcgacagcagtgatagcagtgacagcagcgacagcagcgatagcagcgacagcagcgatagtagtgatagcagtgacagcagtgacagcagcgacagcagtgacagcagcgacagcagtgacagcagcgacagcagtgacagcaatgaaagcagcgacagcagtgacagcagcgatagcagtgacagcagcaacagcagtgacagcagcgacagcagtgatagcagtgacagcacatctnacagcaatgatgagagngacagccagagcnagtntggtaacggtaacaacaatggaagtgacagtgacagtgacngtgaagcagtgacagtaacnactcaaccagtgatgattan

SEQ ID NO: 258202 - DNA, 563 bp, Homo sapiens
gcccctggtgtgctccaagcactgtgcttggtacctaagttgcaggggcaggtaaaatactcaccataaaactgtaaagcaagcaggaggcttgtatactgagacccactttcacgttattgtcagaatgtgtcatttttgcctgcgatcctgatctggaggcagaattgtcaggtgtggaaggcagaataacacaacccaaagagctctacatcctaatcccttggatctgggaatatggtatgttacatggcaagggagaattaaggttgcaaatgcaattaaggttgttgatcacctgcccccttgagaaggggaggttatcttggagtatctcggcgaacccagtggaatcaccagtgtccttaaaagtagaagaaggctgctaaagagagagagcctgagagatagcatcacgagaaggacttggctcaatgttgctgactttggaaatggaataccctgatttgattttcacacaagatacgcatgtgtcaaaaaatcatactgtaccatatatatatatatatatacacatacagttattatgtgtcaattaaaaa

SEQ ID NO: 258203 - DNA, 601 bp, Homo sapiens
gcccctggtgtgctccaagcactgtgcttggtacctaagttgcaggggcaggtaaaatactcaccataaaactgtaaagcaagcaggaggcttgtatactgagacccactttcacgttattgtcagaatgtgtcatttttgcctgcgatcctgatctggaggcagaattgtcaggtgtggaaggcagaataacacaacccaaagagctctacatcctaatcccttggatctgggaatatggtatgttacatggcaagggagaattaaggttgcaaatgcaattaaggttgttgatcacctgcccccttgagaaggggaggttatcttggagtatctcggcgaacccagtggaatcaccagtgtccttaaaagtagaagaaggctgctaaagagagagagcctgagagatagcatcacgagaaggacttggctcaatgttgctgactttggaaatggaataccctgatttgattttcacacaagatacgcatgtgtcaaaaaatcatactgtaccatatatatatatatatatatatatatatatatatatatatatatatatatatacacacacatacagttattatgtgtcaattaaaaa

SEQ ID NO: 258204 - DNA, 327 bp, Homo sapiens
aaattatttttttaatttgtggcttgcctaatcattttctgtatggtgtcgtctgattagcagaagttttcaattttgaggagatacaattctcttgttactactttctgtgacccaagaaacctgtgcctacccaacatcatgaagatattttcagtgtttttcaccaaatgctttatggtattagctcttataattaaagatccatctcagtgtttatggtgtgtggcagtggtcaggtttctgatacttcttctatatgggcattgcagcaccatttgttaaaaagactttcccttccctttgttgaaaaggtggtcattatag

SEQ ID NO: 258205 - DNA, 479 bp, Homo sapiens
taccctcttcccttttggaattcaggaaaagcccgaccagcattgaccaacacagatcttaagtctgatcagaaacatttacaatctactctctcagaagcccgctacctggatgcttcaagtgcaggataaaaccttggtttacacaacccctcactgtaacccagacattcctttctactgatagtaacactttcaacctgatgccaatcagataatggtttcttttttctttttttgaagcagagtttcactcttactgcactccagcctgggtgacagagtgagactccatctcaagaaaaaaaaaataactaaaacaaattagccgcgcatggtggtgtacacctttggtcccagctactagggtggctgaggtgggagagtcccttgagctcagaagtttgatgctgcagtgagctatgatttctccactgcactctggcttggggaacaacagagtaagacctgccatctcc

SEQ ID NO: 258206 - DNA, 1248 bp, Homo sapiens
  misc_feature (20)..(20): n is a, c, g, or t
  misc_feature (29)..(29): n is a, c, g, or t
  misc_feature (36)..(36): n is a, c, g, or t
  misc_feature (39)..(39): n is a, c, g, or t
  misc_feature (57)..(57): n is a, c, g, or t
aattcgcggccgcgtcgacntcgacgcgngaagatntcngcggccgtgcatagcggnctgccagaagacgacagaagggcaaatgggaaaaaaaaaaagggaagtagcaggtggagataatttaaatagcacagggacccctgcttaccaatccctccacagagttttgccctggagtaagcatgacatcagggtgcttgctgcttcctccagtggcccgagctctgtgtgcctttgttgaacaaggttttcgtggagctgaggtgactctcatgaacagagaatacctgtccttcatacagagaagcacccaaatgcaaacatctactttttctggtgttcaaccaggtaaacctctgtttagcaagaaacatcatccccagagtggggactgtcttgtcctttcagaagctagtaccctaagcaagactcataaggaaggtcgggcctccataggtctctgtttcttctgaacagtgatgagctaggtgcagagagagttaaaggtcctatgcagcttgacaagtgtgacccagttcccagtaaattccacttggctggggtttcagaggtgagcaagcaggctttttactcattacacaagaatctagacatccctttaattgggtggcattctgggtgctaaaaggaaggggctttgagaggcaaagatgatgggatatcataaatttttttgttccttttaatgtagcgcagctcctatacttcagatttaactttgaaatgtagcatagctaagatctggtccaaaaagatttctgatatctccatgaatcctagttagggattgataggaaaaaaaaatcttgtgccacagcttcatgctatttttaggaacctttctgaaaccagtggcagcccaagttagagcccagcattaagtccgcctctgcacatctacagttgccagcttatggtaaaagctttctgcaaagcttttctgctcctgggttaaggccttccagcatcagtcacatgtaattaacagctacattgtgtgcttactttttgctagatgtttcataaacattatctcatataaacctcacaataactaggtattattatcccgtatccctgttttacagctgtggaaagtgaagtgaaggatttttgtcatacagccagtaagtgccagaactgacttgaacctagctctctgtcttgattcaggaactactgctctttccattggtggctcctggctaatcaatgtgatagtctttg

SEQ ID NO: 258207 - DNA, 432 bp, Homo sapiens
tccacattctgagccagtaactgccacccaggtccagccagagtctgccttctctggaccccccaactcctgctagtcactgagcatgctcactgcaggtcaagaaagtgattctttaaatagcccctaattaatagagatcaaaaaatttaatgtatgcatttcctttcatccaacaattctagaaatttatactaaggaaataatcagaagtacacataatgatttggctgcaaacatatctattgaggcatccccttagattgcaaaaaaaaaaaaaaaaatttcagggacattctgaatgcaaaacaataagggaatatttaaataaattgccacatagccacatattggaatgttatgcaaacatttaaaaagttgtacaggcattttaatggcatgcagaaatatttgaaatagattttaataagt

SEQ ID NO: 258208 - DNA, 699 bp, Homo sapiens
ctcactgaaaacttaaatcatatgacttgtctaaagtcactcagctaagaagaaggatcacaatgaaaacctaggtctgttcaagtccagtgtctctgctccctgctctctaattctggagcttattctggctttgaagatgctgtatcccactccacctctccctcctcttgtacgaggaaggcaaccaggataactgagtcagttaatccatcaatttcagctacaagaaaaaagccatcatcttgagtgaacctgaccacaaaggaagaggagaaagttaatgacagtgtcaaggaacagctgagggacccagaccatggacacaagattgaccacccaaactccctcagagcattagggacttacaaaattccttaaatagacaaattttggggatctacttcataacagccatcttgtaaacaccagtaattcagagaggaaaaatgtaaaggctttggaagaccagggctctagtcatgaccaggccacttactagacatgggatgctccccacagggctgtggaaaggagtaaatgaagtaactgcagggaaagtgtataacatggtatctgtcaaacagaaggcaccaaataggtatttgttttccttctcctttctctagcctccctcctggagctcccaatctgataggtgacataagacttatacacaaataatcataacacaacaaa

SEQ ID NO: 258209 - DNA, 367 bp, Homo sapiens
tgctgtcctcttgttttgtcaaccattctattccagggtttctcaacctcggcactgttggcatttggggctggataattctttgttgttgggaatatgctgtgcattataacatggttagtgccattgttggcctctgtccactagatgcacctcttcccacttgtgacaatcaaaaatgtctttcagacacggccagatttccccaggggtcaaaatcacccctcactctccagttgagaaccactgctatattttaatttttatgtataatatatataaattacaatataaatattgtaattaaaggaaaaaacacttataagtattaaaggaattacatattataaatattgtaattaaagga

SEQ ID NO: 258210 - DNA, 965 bp, Homo sapiens
gtagaaacatcttgtactttgtttaacttgtatacttttgcactaaataagccaagatatactgaaaacagttgggttgaacggcacctatctcctgtgacctgaactctatcaaagctggcatacagtgcccagataaaaaaggaagctgaagtcttgactccatgttcaaattcattttggctcagctctcagcaaattccagggctctcacaacctgtttgtggaccacttgaactttatttatgtaaaaaatcttcagataatgcaaactgccgtaccttttccaagtagaattgaattacttgagatttaaagttaatgtaatggtaatgaagtatttttataaatatattttcaaaattttagctagattgacaatccaagattggtttccctccattaaaagggtgaagaggcatgatagcacctcacacttacaatgaacagttggaaataaaatttacagtttggctatatcccaactagatagagtttttacttattttttgcttttaagctgtggctgggatggtgagagtgcgagtagaggcaaatttctatattcaggaaatttcttgtccttcccactactattaaaatcttgtatcgcttttattgcttcaggatagagcatatgataaaacagacaagcatatcagacaaaaacacagatttttgggcattagaaataacttagtattcctggttttgacttgttttctaggtaaaacaggtcttttgtgatcctttgattaaaaacaggaataagaacctgtaatgaaattatagtatataatatacaaacgcatttgtccatgtgtgtaatagaaatttgagtgctaaccactatttttccgctttttttgtcctttttctctcttgagacccagtctcacacggttgccaagattgctccattgcactccatccttggcaacgagtgaaactccaactcaaaaaaa

SEQ ID NO: 258211 - DNA, 107 bp, Homo sapiens
tgagctgggggctctgatcctagcttccttgctagctcaccgcatatccttgagaagagcccctctgctcctttgttttacctatctgtaaaatgaaggttctgtac

SEQ ID NO: 258212 - DNA, 423 bp, Homo sapiens
tggggcttagcagcctaagccgtgggtctgaaggctcagacaggttcagggcccagaggagctgactcaggcctgactcccccgggaatcagggaaaggccaccagctaagaccgccaggggtcagagtcaggatgaattgctcgatgtccccaggggcactgccaaagccactgtcattcccactattcttcctggggtctaggagcaagctccagtgccctagcctggcatgcaaagccgggcaaagccccatggctcatctgggagctcaccctgcatgctctctctgggacatttcctcttttcctgtggtgttggataccatctgtacaccagcagtccccaaacttcctccagaccgccctcctgagtccacctgacagtttacctgatgtctccactgggatgacccataatcttc

SEQ ID NO: 258213 - DNA, 457 bp, Homo sapiens
gtgaatgtctgggtgtgaataccagagatatttctagataaacataatcagaattttgcttagaaaagtgtttccctaaggaccctttcttgagacacagcttcttgaaaaaaaagataaatatctagttaaactcatttatcatcacaagttattatgaaatggcagcccactggtgaccttacagactcactgccttaagtcccagccaagggatcaacacaattgatgatttaataattaactattctttggttacaaatatctttgcaattaattttccagagtaggctgctctacaggtgattgctttcaaatccattaaatgggccaggcgcagtggctcatgcctgtaatcccagcactttgggaggccgaggcaggcagatcacctgaggtcaggagtttgagaccggcctggctaacatagtgaaaccccatctctacaaaaatacca

SEQ ID NO: 258214 - DNA, 259 bp, Homo sapiens
gtgagacatgtgagttctaaacatcaggctcatgaatttggactaaatttttgttatggaaacatggaaatcctaaattaattgatgccagaatataaattggttaagaacatcaagaaatcataacaactgagttattttgaagttggtgtaatgtggtcaatggaacgctggtgaatgatccttgaaacctggattgtattttagcactaagacagtatgcgtgtaatcacttgcaataaattcatttttttaggct

SEQ ID NO: 258215 - DNA, 311 bp, Homo sapiens
tattaaaaactgacatggttggctgggtgcaatggctcacacctggaattctggcactctgggaagctatggtgggaggattgcttgaggccaggagtcagagaccagctggggtaacatggtgagacctggtctctacaaaaataaatttttaaaaattagccaggcatggtggcacatgcttgtagtcctaagtacctgggaggttgaggtgggaggatcgctttagcccggaaggttgaggctgcagtgagctatgatcgcaccactgccctccaacctggctgacagagtgagactctgtcgcttaa

SEQ ID NO: 258216 - DNA, 691 bp, Homo sapiens
gaagaagctctgatgaagcaatgttggggcactcatggttaaattgaacctttcccctggttaagtggagtgtgtgtgtgtgttgttctttttttccagcaccatatttggccctataattaatatgcaagttcaaatacctcttgcatggagcaagaagctgaaacatgcgcatttgtaatagactcagcatctgaattgaatgggcagctttggctggagtagtactgcagcttctcgaatgcctattgtcaaaatatatactagttaggagacacattctgctacgagggatgccctcccaaattaaagacactgttcagtttacgcttaacatttatggctatcaaactactagtccacaaccaatcatcatggtttcgttaacacagtcaaaatttaccactgggctattattaaaacttaatataattaatgtaaaaacacatacttcttttcaacaaaaactggctctctttgtagtctcttttttaatttggtgcaatcacttaaaaagtttagcacatttaaaattttacatcattttaaaattgtttctcttttataagaaggatgctatttactattaatgtagaagtacaaaggaaacggttactttggatttattcttttggaaaattagaatgtgggctacatgcttttcagaagttgatgaccaagagaagaaaga

SEQ ID NO: 258217 - DNA, 447 bp, Homo sapiens
cttttcttctgtcctgtgaaaacatccctgtgatttgaaaatgttctgataaacttgagtcagaaaaatcaacaggtagaatgtaaacttaacgatcttcatttgtaaacttaatgatctttgcagaaatctttgttttgttaattgaagtatccatgctctaggaacagtgtcaggcataacagcagtgctcaaaatatttgtcagatgaataaataaaggagtaagtgtgttgatcattaattaagtaggtccagagagtacaaggagctactggaaaagtagacttttccactgttttttcctcatgggctgaagatgtttgaagcatggagtgggggtagaagaatgggtttgggaaaaagtttgagaaaaagtgtaacttttagagaataatgtcaaaggagaacaagaggcttaaaaataaatactatagaattgaaagca

SEQ ID NO: 258218 - DNA, 329 bp, Homo sapiens
cagagatcagggacttccaggtgcctggcttgaactcatacccaccacatttctccctctggcaatggctgggcaatgtcagtgatcagaatatagaaggtggtcagtagctctcctccctgccaccccatcttccttccctcccagcctcctttccactctctgattccaagaacactggagctattgattggttaccctcttatttttctgagctgagaatggatttattactgcaataataatgatcatcatcatcctgggcatttgtgttaaatataccttccaaagcactgccacatttatttatttttttgagacagagtttc

SEQ ID NO: 258219 - DNA, 506 bp, Homo sapiens
tattttatgcaaaattgtcactatacccacttttacctctttatgctttttctctagttctgtgaacacacttatgatggctattttgaagtcttttctgttaaatctgacatgtggtctctctcacacaggcagtttataaggtctgctttttttctggtgcatgagtcataatttcttttttctctgcatgcctcataattttttgctagacactgacatttttgataatatagtatagcaaatccagttactgttcctttcttctacctccctctttcttggtgcttcttactgtttcttgcttattttttagtgactagccgaattattttagcaaagtctatttccccacttccccaacctccacaatgctaagccttggatgttgatccacagagaggtacatttttgggtacgcccacagtcaccctggacttacagtgatattctagctcttatcacaccaaggtgttaaactccactaactgttctactgttattta

SEQ ID NO: 258220 - DNA, 498 bp, Homo sapiens
ccttctgttccaggctgtgctaagtgcttttatgggctccaggtctggttgctcttctctagaccccggtcctcttctgcctgtcactcttctatggcactgagacatctttgtcttattttaggattgtttgtggatatgtgcgagcttatccagggccagagactgccctgttcgtttttgtgtcctccagggtcagggagagggttgaacctccataattgtttggcgaatggtcctgaagggacagaggtctgtttgcttgtacctttgtgtagtttataaatggaagattcagaaaagggcataagagttggtacatactgccacccaggccttcctcatttggcttggggtggctcacacagagttcacacaggcttccccacaggcaagctgtccttgaccactcctggctgcagaggaagaggcagatgtggaggccacaagccttctacacctccagccccagcctgttctgaaaagttggcggccgtg

SEQ ID NO: 258221 - DNA, 697 bp, Homo sapiens
ggagggagtgttgcattgaagcatgacagagctcctacagggaacctcaacaggtggaagaggaatggtgggcctaggtcaagtggagtggcaccgagtgagcagcttcttgtgtgtatacctggtttatgcttcaggagtgaaaaaagttcaccacccaatactgaggtttgagttctttaactaaactccaaagacaacaggtgttttatacatggattcccctgccccatttatgggtggggagagggcaaatggaacgttaggttaactagtttaaagagtcaaggcaatcccacctggatcccttcttaaaaaggaagcctgtgtccaagagtcccttctgctgagttaacaagaccccttcaacccgttctcatctttgggattgaggcgcctgcagaattacaagagaggatttgtcctcctcttctccagagagctaccttgattttccccacccctgccaagatagacattcatgaatgcagtcatccacacctccacaagtgcacacacaccagccatcctattttaaaacagacaaaagcaaaaccaacccaggatgtctctggacaccataaaccaaaatagtcgctggaaaaaacagtgatggtaggttccagatttaagattcataaaatggtaacatttccaaaaatatctctgatgaagacagtcatatgttagtacgttt

SEQ ID NO: 258222 - DNA, 541 bp, Homo sapiens
cagcttaaaaattagccagtatatactgaacatccactgtataaaaagcacattatggggtgctccagtaggtacagcagtgatcgagacagaatcatagccttcagggaagaggtatatgcaatgttctctccttccaaagattacctagatagagaactgttcataagaaatatcttggtactgtctacattactcttgagatataaaatatatattatttcttacgtctgaaatgagtcagttgtttctaaaacaatttgtattaaagtattcacattaaaaatttgtaaaatacagaaaagtagagagaaaaaatcatgaatttttaacatggtaatgattatatcagtttcgttcttggcgtttctttaacttgatgggatagctaatgttttttgtcattgcatagctttgtaaacttgtcctaaggattatataatttcagcatgagttagtttctaagtatgtcagaaatctagcttttttgtggtaattgttgttttacacaaaatgattaataaaagactctaaactaaac

SEQ ID NO: 258223 - DNA, 177 bp, Homo sapiens
tgtaggagacacattcccaggttttagggaagaaagtgtgatgagttgagatggatgcattgaccatctgtgatgcactcagcactgtaacatggtgtgtaagaccacagactgtgccatcggatggacctggattccaattccagctccactacagctctcactagtgcaaagtgc

SEQ ID NO: 258224 - DNA, 665 bp, Homo sapiens
gcaggctgtgtccttggtgggcagctttatttatttatttaatgtatttatttttgagacagaatctcgctcttgcccaggctgtgcagtggcatgatctcggctcgctgcaacctccgcctcacgggttcaagcggttctgctgcctctgcctcctgagtggctgggactacaggagtgcgccaccacgcctggttaattttcgtatttttggtggagaggggatttcaccatgttggccgggctggtcttgaactcgtggcctcgggtgatccgtccacctcggcctcccaaaagtgctgggattacaggtgtgagccacctcgcccagctacggcagctttaaatagcacatttgttatgatttcggaagggtaaactttacaatgacctgaggcgtggaaaaataacacgctctccctgccttcctatcaaaaaaggactttaaagctgtttggagcgagaaggggcagaggaaggctggctcagctgttgcctgaggaaggcagcgtcatgccagggaggagacagcaagcatcgctccctggctaccctgctgctgtcccttcctccccaccaagaggggccttcagccaggaaagatgaggatggaagacagctctccagctttggtgagtagagctgagcagcatatgtggggaggt

SEQ ID NO: 258225 - DNA, 342 bp, Homo sapiens
gcaaaattaagacaattttaccatcaggctgggtaataacaaatatgcagttatagatttgctttgttctgcccattatgctacagaaagtagttctgtgtttattatgtacctacttgaaagtatcttccttaaatgcttgtagaaggtggcttcatttaagtactacagaaataattatatatttaagtactacagaaaataattgtatgcaggccaggtgtggtggctcatgcctgtaattccagcactgtggttggctgcgtgggaagattacttgagcccaggagtttgagacccgcctgggcaacatggcgagactccatctttatttaaaataaa

SEQ ID NO: 258226 - DNA, 417 bp, Homo sapiens
gatatggtttcaaactgtacattgttactctcctttaggaaactatcatttattaagtttttggcataaagtcaaacatgaattttcgtaattacctaaaaaggctactaaaataactcttctttttcaatgactgtatctgtgtatgaaaagctggattttctttgtgtactttaacaaaaagcaacatacttacagggtttgttacagtgccttttcacaaactttgttttctcttcagcggtgaaagtcaaattttgtcaaaggctttttcaggatcttggagataatcatataatttttttctctagatttattaataggatatattatgccagtggatttcctactaatcctgcattcctggaattaatccctttttcatggagtatttatgtagtgttggcctttgtttgc

SEQ ID NO: 258227 - DNA, 457 bp, Homo sapiens
agaaggtcttaaaatcctcatcatcatcatagctatacttgcatatagtgcaagcacttttcacacatttaattcttaaagggcctcttgagaaaagctttataaactaaggcacagagataagtaatttgccccaaatcacacagcaaataagtggcagagtcagatctccaaacatgcagtctggctccaaattttatacccctaaacactatactatcctgactcctataaagcttctagagaaggaaggataggaagagggagaatctaaaagtcatcaggtttccaacagcaacactaaaagttataatgtaatggactaatcctttcaaaattataaaaagacattcctcttggcaataattttgtggatatgacatggaaagcacagacaacaaaagcaaaaatgaacaagtgggactacagcaaactaaaaagtttctgcacagcaaaa

SEQ ID NO: 258228 - DNA, 375 bp, Homo sapiens
cggccgcccccgcatccagcgcccgggccgccgcgctcaccagggcaccaccaacacttaagcctccatcttcaggcaagaaagtctgtgatatgaatgaagggatcataaaaggcacatggaatcaaagcttttggtcaactgccaacaaggtacagaggcccaacagcaatcatcgaatgaacttggaagtggatcctctcaccccagttgagccttctgatgactgcagccctggctgatgcttgactacaacttcatcagaaatcctcatgaagatccagcaccttccagttagcccatctgtgggttcttgaccctcagaaattctatgagataataaatatttgttgttttaagttgctaaactttggg

SEQ ID NO: 258229 - DNA, 485 bp, Homo sapiens
gaacactttagtatgtattttttaaaagataagggtttattttatttattaattaaaaaaatttacttagttaattcttttatagagatgcagtttttctctgttgcccaggctggtctcaaactcttggccccaagcagtcctctcacctcatcttcccaaagtgacgggggccactgtgcctggcccaaagattggggtttaaaaaaattctaatcattatcacacctaaaaagtaataataattccttagttacatcagatatccaaatgtcctcatttcttggttttcagagtgttttgagtcttcagacaaaactgtgaatatttactagtttcacctttcagcggaatgcctgttatttttaaatactctagtagtataaattataaatgtcagattttattcaaagtattattttatcctttggatttaaattaccttgagacccaaaaggatcatatttggatttattgctttctgt

SEQ ID NO: 258230 - DNA, 432 bp, Homo sapiens
catagatgcaccatagattcaaacttaatatatcaagaccagagctcatcctcatattaccttaaccagacgcccctcctgggttccctataccagtatctgataccatcacatccaccccagcatccaaatcagaaatctgagatttgtccctctccccaacaccccatatcaaatcactccccagatacctgatggcttgtgttcctgcccaagctattcttcacttctggaactttcctcctgttgtctcctctgctgggatgtccatcctcttacttctcatctgcttcaatatgtttgatcctggaagggtcagcatgggagggggagtgggcaggtcttccaggaagcctttctgagtcctggccactccgtgcctccatgagtggcttctggaccactcatcggtagttccatgatgcccctata

SEQ ID NO: 258231 - DNA, 337 bp, Homo sapiens
ctgggctggctctgtggctctctcctggggcaaagtgcaagagccttggccagccttggcctctccctgcctagttagaggtctttagctcagactgacgatctcgtattggtaattacgaccattcacagcagggagacgcagccagcgaagggcaagggcggtttagaggggagagactgcgatctgtagcagaagcgtgggataatagccttcctctcccctcctgaaccatttcacagagccccaactcactgccaggccggggcagagttcatggctgcagcgattgcaccactgctttccagcctgggtgacagagtgagactcagtcttg

SEQ ID NO: 258232 - DNA, 482 bp, Homo sapiens
ggaggggctgtcgatattattgttactgattaagtagattttgatccccagtgctggcagtgtttaaaaattacctgagagctttttcaaaaaaaagagatttccagctaccctcagacctgtcaatttagtttttttttaagagatgagccccacaaattcatttttaattgttttgtcagtgaaaaagcagaggtatctgagaaactacaaattgaaaagatgaaaaaaaaggataacatgtaaagttctactgattagctatgtgaactgctcatcacttatgcctaattataatgtgtcataaaagctatacatgaagatgatcaaaatgcatactttgaaaaaatttgatttcatctgtaaagacgtgtaagtcagatgacgtttaaggtgttataactggttccacagatgagtctattgctttatatttatactttctatgtgtagtctgcatggctgttcagttgttttgtttt

SEQ ID NO: 258233 - DNA, 2322 bp, Homo sapiens
cacctgcctttcaaaactggcccacctcctgctgcccaataacctgatgttgtcactctcatatttaaaacccataagtgctgccgggagcggtggctcacgcctgtaatcccagcactttgggaggccgaggcgggcggatcacaaggtcaagagatcgagaccatcctggccaacgtggtgaagcccagcctctactaaaaatacaaaaattagctgggcggggtggcacacacctgtagtcccagctacttggcaggctgaggcaggagaattgcttgaacccggaggcagaggttgcagtgagccgagattgcactactgcactccagactggtgacggagcgagacgctgtcaaaaaaacaaaacaaaacaaaaaacatatcaatgctgatgaaccaagtgcaaagccctgagcttggccaggcaacatagcctggaaacctgacttttaatccttactttgctctattcccccaacatacacacacttcatacaccacacctaaaagagacttcccacagttttccaaaaatgactcacatttatatttcctgtttttccctttgcccaccctgccctctctccctctgccttcatttttttaattaacctctggaactcaggtgctcctgctccaaggtttaggtcaaaagttacctcctccatgaagctttctctcattctcccacaatgtgtgaaagccccattctcagatttgcttagttgtgcatttgtatattctaccttgcactacagtcatttgtatatttatcttatggtttctgtgccttaggaaaggtacactgtcttaatcatctttgttcaatacagtgcctagcagagtgcctcaagtataatatgtgctcaataaataatagatgcatttttccatgcatattttctactatatcgaagtggaaaatatatccatgtgatatagtggaaaatatctcatgaagagagatacagtgaggaaaatatctcatgaagaccaaaaagcagaaatccaagttttttcttttcattactatcatcagtgattattaattttatgtgtcaacttggttgggcttagggatgctcagatagctggtaaaatattatttctggatgtgtctctcagggtgtttctgggggaaattagcatttgaatcagtagactaaataaagaaaatctgccctcacaaatgtgagccagcatcatccaatttattgacagtttagatacaacaataaggcagaagaaggtgaactctctttccttgagctgggacatccatcttctcctgctctgacattggagttcctagttcttgggacttcagattctcccctgaagtttctcaggccttttggcatcagactggaagttatgccattggctcccctggttctcagacctttggactcagactgaattataccactggctttcctggttctccagcttcaagatgacatattgtgagacttttcaacctccataattgcatgagccaatttccacaatatatctcctcttatgtatctatatatttcctattggttttgtttctctacagaatcctaatagatcatctaattgtttatctaacaagtattttcctccctagacgatatgttgggcactagggacacaaaaataaaaacacagacatctgcactcaataaacttacattcaatatcagagagattggcacagaatacaaataaaatgagatacatgcaaaataatatgaattgcaaaattacggcaattcaccaccaactaggtgtgtgaccgtgggaaaatcacactgtgagctaaatattagcaagtttaaaatgcaaaatcagaggcagtctatgaattggactttgctaatggcctcctttgctgatggatggcacattggtgttagaaagtgcttatttttgcaaaggtccattattgatgctttaattctaaggaaattatgtaggcagaaactaaagaaaggttaaaaaaacagcagctaaaattgatacttagacaataaaaaactaattataagtgatttatcagcaccactagataactacattggtgaaatttaaggccatgaaatgcaggacaagcctcgtaggaagcaaggtcccagtggatgagatgctgtcctctgggctcctaaccttccaccactagtattcaccatatctgattggaaatgtgtgcatgtgagtcggcctcccctctatgatgtgagtagggacctatttttgctcatctctgtatcctctacacacgatgcttggcacacagcaagtattcaataaatgtttatgaatgaagcaatc

SEQ ID NO: 258234 - DNA, 1166 bp, Homo sapiens
agctgtgggtcatgctgtaatcctaacagtttgggaggccaaggtgggtgcatcacctgaggtcaggagttcaagaccagcctggccaacatggtgaaaccctgtctctactaaaaatacaaaaattagctgggcttggtggcgggtgcctgtaatcccagctactcaggaggctgaggcaggagaattgctcgaacccgggaggtgaaggctacagtgagctgaggccgtgccactgtgctccagcctgggcaacagagcaagactccacttcaaaaaaaaggagaggagaggagaggagaggaaaggaaagaaagaaaagaaaaagaaacagggaagcttttagagtggaggaattaatctatattgtgatagacattacacaggtaaacatttgtcaaaactcatcaaactgtacacttaaatgggtgcattttatcataagtaaattatgcgcatgtaaagttgatttaaaacacacagtgtgtgtgtgtacttactagtctggtacattatgtttctacttctgtctgtttttttgtttttgttttttgagacagtctcgctctatcgcccaggctagagtgcagtggtgcaatcatagttcactgtaaccttgaactcctggctcatgatcctcctacttaagcctcccaagttgctgggactacaggtgtgtacaatcgcactgggctaattaaaaaaaaaactcaagcaatcctcccgcctcagcctcccaaagtgctgggattataggcatgagccacacctggcctctctgtattttctagtagcttgcgaataattgtttgttacccgctctcttttttccctttatcccctgcgccaaagtgaattaagcctgtcacctggaatttctaactattaaggccaactccatcatctcaacccttgccacagagttgtttgtttgtttccattttacaggggaatcttagagaaggcttttgcagaatgggaggtgtcaggagaaagccccagaagggggtaaggagggtaaggggtggtaggtatcttccagggagatatgcctggaagttcaaagagaagcattgagacccttatggtttgctaaggaagagctagttgggcctggcactaggaaagggcccaggctttgttttgtaagccagttctctcactac

SEQ ID NO: 258235 - DNA, 955 bp, Homo sapiens
acgctcacctcgcaatcaaagtgctaggattacaggcatagccaccacgccagctgatattaatatgaaggaatgctgtcttgtgtttgggtgcttttaaaggaatttctttcctttcccttggctggctgggtccagccatctccggccagcaaccctgtcagtgttccaccctgtcccaggccctgtgatatttattgtggctaaaggcaatgagattgggtggaagagaagggtctgggccagggactggagaggtgggggtggagtgggcaagggcacaccctgtggcagggggtcctataattttgtgtaaatatctgtacagcgcgctgctctcggcgttctctgtccactgggtgtgcattgatttaaacttctccactgtggggaagctctgtgaaatcgtctgatggtctgtgtggaagaaaagaaaaatctgtctgccgcctatttcccattggtgtcaattgaataaatgtatgtgaacttcagcagtcaccagctctgtctgcttgcctgcactcccttgcccctgatggggctctcccagaagagcttagctccccaacagagggggagtgaggaaaggcccctgggcagcccaagcaggcagagaggggtttgagcttagaggatgcaaggggcactttggtcttggccttcagctgttaatgaggccgaatctctgggaagcctgtggcctctccagcactttcattttcgttctagtcctaagaaggttgttgcctggagttttgcctggggttgtgtttccactgcacctgaggattctcatgtccttctagtttggatgttggcatggcctgggcagatctgggtgctaagggttcatgaacactctacccactaagtacaatttaaggtgaatatatctggtgatgtgtactctgtatgcctctgtttctgagtgaagggcttttatggaacttat

SEQ ID NO: 258236 - DNA, 5145 bp, Homo sapiens
gaattccggcccttggtcagaggtcccagagggggcccaggcgacttcctctcaaaggacatgagtagtcagacctgccttccatttttttctgcccttaccttggggggatgaagaactctattttgaggattctgtgaaaagggttgcaacccaactctgttctatttctttgcaggagcctgggtgagttctttctccctatcctgggcctctgtagctccatctgtggaatgggagagttggattaacaccaggctatcccgtagattggaggctgctgttagatgaaactgcaaagtgttctcagtaccctttcctaaatggcctagaatatggctacacttatacatcagttctgaggtaggtgttactagcctcatttttacaaaggcagaaacaaagcgcaaagaaccttgcccaaggtgacagatagggtaagtagtgaaggcaggattggaaccccaggagcctgacttaaggtcgctgctcttaactactatgcagaccaggaaactgaggctccgaagcggggaagtcacctaatgagggtcacacagccttgctacagcggaggcagctgggattccggcctcgcacgcccgagctttagccactgtgcggcgctgtcggggcagcagcccaggcatccgctcagttcctgctcacgtccagcgcccatctccccttccgtgccccagaggctgaaatgggcccaatctgtgttgaagctgcttgtttctgggtcctggagggaggccgggggagaaagaggtctaataggatgggcaggaacccggctagcgagaaacaaggcacagggccaaccttagttgcacaagacttttgagagatgaaggcaacacttggtggaggtcagggttcactgagggggtgtcgggcagggggcggaggaggtcctgccgcctgtcggtggggcccagaaccctgggagccaggaaggtggggggtgtccagtcctcagggcaactggggccagggagaggggagggagaaattaagcggattcccagacccatgaacagacatccagacaaatgccgtttccacagagactcacggagagtgagatagtcacagagactgagacaaacggatgccgagatccagagggtcggagaacaggcaaactcggagcagtagaccggcccgcgccccgggaacgcggccacagcggccggcgctttgcccggcctctccgcgcggagaggggtggcgggcccgacagcggagggaggagagggcgccgccgcaatctcacctctcccaggcccaaggctgcgggcgccaagttcgctcctggtgatcactcgaatgcgtctcccctcgggctggaagccgtgcgggctcgggtgggcgccggcgggccgcgctggggcggcgtgggtcccggcgtctcagcctcgcgctcccactgcgcttcggcccggtggcccgggcgccgccttggggagaggacgggtggggaccgccgccacttccctggctgcggctggcgcccgagtgagccttaacatccaggggctgagcgttctgaaggcggcggcttcagggagcacagggtgcaggagcggcggcgaagacaagggcccgcctccggccactcgagcccagctcccgccgcggcggcggtttgttcccgccgggtccctcagcggaggcgctacgcccgcccctgtcgcctcgccccaccccgcccagggagctccgccctagcccgcagctcttccgccttaggcagccgctaggcgggagggacaatcccccaccaccaaccactgccaccccgaggggactaggggctgaggcccgcccaggtaagggaaagcctcagctccttccgttgcgccccagcggcgggtcccagctcggattcccggggtagtggcgggggccgccggcgggtcgtgccctggaaggtgagcgcggccgagctgggccgccagggggcgctgcggagccgggggacacccctccctgcctgcctcagtcccccgccccctccccgcccgcgcgcaaaacgcactcgccccagaggcagcgcggccgagcccgagccgctgccggagcggagccggagagtggcggcggcggcggcagcggcaccatgaccctgggcagctgctgctgcgagatcatgtcctccgagagctccccggccgcgctgtccgaggccgacgcagacatagacgtggtgggcggcggcagcggcgggggggagctcccagctcgctccgggccccgcgccccccgggacgtgctcccccacggccacgagcctcccgcggaggaagccgaggcagacttagccgaggacgaggaggagtctggtggctgctcggacggcgagccccgcgctctggcgtcccggggggcggcggccgcagcggggagcccggggccaggcgccgcggcggcccgcggcgcagcggggcccgggccgggaccgccgtcggggggcgcggcgacgcggagcccgctggtgaagccgccctactcgtacatcgcgctcatcaccatggccatcctgcagagccccaagaagcggctgacgttgagcgagatctgcgagttcatcagcggccgcttcccctactaccgggagaagttccccgcctggcagaacagcatccgccacaacctctctctcaacgactgcttcgtcaagatcccccgcgagccgggcaacccgggcaagggcaactactggacgctggacccggagtcggccgacatgttcgacaacggcagcttcctgcggcgtcgcaagcgcttcaagcggcagcccctgccgccgccgcacccacacccgcaccctcacccggagctgctgctgcgtggcggggccgcggcggcgggggatcccggcgctttcctgcccggcttcgctgcctacggcgcctacggctacggctacgggctggctctcccggcctacggcgcacccccgccggggccggccccgcatccgcacccgcacccgcacccgcacgccttcgctttcgccgcggcagccgccgccgctccttgccagctgtcggtacccccaggccgcgccgccgcgcctccacccggacctccgacggcctcggtgttcgcaggcgcgggatcggccccagctcctgcgcctgcctcaggctcgggcccgggcccgggccccgcaggcctgcccgccttcctgggcgcggagctgggctgcgccaaagccttctacccggcgtccctgagtcctcccgcagccggcaccgcggcgggtctgcccaccgcacttctgcgccagggcctcaagacggacgcgggcggtggtgcaggcggcgggggcgccggggcagggcagaggccttccttctctatagaccacatcatgggccacggtggcggcggggcagcacccccgggcgccggcgagggctctccgggaccgccattcgcggcagccgcgggtcctgggggccaagcccaggtcttggccatgctgactgctccggccctggctcccgttgctggccacattcgcctctcgcatcccggggacgcgctgctgtcctcagggtcccggtttgccagcaaagtcgccggccttagtggctgccacttctgaccgcagcaggcccagggccggttaggtccgcactcctcagcctctcccgggagttcctgcggtcccagcggaactcagggagtctatttatgaagtctccagaccttgggccggcacgcgtgacacggcacttcaggctccacgcacagaatctcgcagatagttgggactaagcgggctctatcgctcagggcgacaggcccggggctacgcgaagaagtcgcaggccaagattctttacagtttgagaaataaaagcaggggggtgggggcttcgtttttttccctgcctctgcgcctctcggggaacacattccgggagagatgcctggccaggctccacggatcccgccagaaacaccaacagagggtctccctttctgcctttcccctctcacttcttccccaacgttgagaccctgcttgtccaatattataatttaaagacatctattatctgctttgtgcttaaaagaaaaattcaaccttttttttttttttttttttgctgttctccaaggaagttcgtttcctctgaagcctaaaccagtgtctacgcaggcggagctgaacggagaggtgaagcagggggtctttatattccctgcagaaaccctggatcccactccaccggaattcctttctcttttgtgtttgggtgcttttaaaggaatttctttcctttcccttggctggctgggtccagccatctccggccagcaaccctgtcagtgttccaccctgtcccaggccctgtgatatttattgtggctaaaggcaatgagattgggtggaagagaagggtctgggccagggactggagaggtgggggtggagtgggcaagggcacaccctgtggcagggggtcctataattttgtgtaaatatctgtacagcgcgctgctctcggcgttctctgtccactgggtgtgcattgatttaaacttctccactgtggggaagctctgtgaaatcgtctgatggtctgtgtggaagaaaagaaaaatctgtctgccgcctatttcccattggtgtcaattgaataaatgtatgtgaacttcagcagtcaccagctctgtctgcttgcctgcactcccttgcccctgatggggctctcccagaagagcttagctccccaacagagggggagtgaggaaaggcccctgggcagcccaagcaggcagagaggggtttgagcttagaggatgcaaggggcactttggtcttggccttcagctgttaatgaggccgaatctctgggaagcctgtggcctctccagcactttcattttcgttctagtcctaagaaggttgttgcctggagttttgcctggggttgtgtttccactgcacctgaggattctcatgtccttctagtttggatgttggcatggcctgggcagatctgggtgctaagggttcatgaacactctacccactaagtacaatttaaggtgaatatatctggtgatgtgtactctgtatgcctctgtttctgagtgaagggcttttatggaacttat

SEQ ID NO: 258237 - DNA, 1543 bp, Homo sapiens
ccagctgatgctgatggtgatctagagatccccggcgtcacagcttctccggccgcacagcctctcccgggagttcctgcggtcccagcggaactcagggagtctatttatgaagtctccagaccttgggccggcacgcgtgacacggcacttcaggctccacgcacagaatctcgcagatagttgggactaagcgggctctatcgctcagggcgacaggcccggggctacgcgaagaagtcgcaggccaagattctttacagtttgagaaataaaagcaggggggtgggggcttcgtttttttccctgcctctgcgcctctcggggaacacattccgggagagatgcctggccaggctccacggatcccgccagaaacaccaacagagggtctccctttctgcctttcccctctcacttcttccccaacgttgagaccctgcttgtccaatattataatttaaagacatctattatctgctttgtgcttaaaagaaaaattcaaccttttttttttttttttttttgctgttctccaaggaagttcgtttcctctgaagcctaaaccagtgtctacgcaggcggagctgaacggagaggtgaagcagggggtctttatattccctgcagaaaccctggatcccactccaccggaattcctttctcttttgtgtttgggtgcttttaaaggaatttctttcctttcccttggctggctgggtccagccatctccggccagcaaccctgtcagtgttccaccctgtcccaggccctgtgatatttattgtggctaaaggcaatgagattgggtggaagagaagggtctgggccagggactggagaggtgggggtggagtgggcaagggcacaccctgtggcagggggtcctataattttgtgtaaatatctgtacagcgcgctgctctcggcgttctctgtccactgggtgtgcattgatttaaacttctccactgtggggaagctctgtgaaatcgtctgatggtctgtgtggaagaaaagaaaaatctgtctgccgcctatttcccattggtgtcaattgaataaatgtatgtgaacttcagcagtcaccagctctgtctgcttgcctgcactcccttgcccctgatggggctctcccagaagagcttagctccccaacagagggggagtgaggaaaggcccctgggcagcccaagcaggcagagaggggtttgagcttagaggatgcaaggggcactttggtcttggccttcagctgttaatgaggccgaatctctgggaagcctgtggcctctccagcactttcattttcgttctagtcctaagaaggttgttgcctggagttttgcctggggttgtgtttccactgcacctgaggattctcatgtccttctagtttggatgttggcatggcctgggcagatctgggtgctaagggttcatgaacactctacccactaagtacaatttaaggtgaatatatctggtgatgtgtactctgtatgcctctgtttctgagtgaagggcttttatggaacttat

SEQ ID NO: 258238 - DNA, 714 bp, Homo sapiens
cttgggaagtccacaatgtcaattaccctctagtggtattgactcaagtcttttgtcaataaatctttaccaataaatgtgagtctcactagctggtcagggctgagtcgcaactgtttacaggactctgctggagtctgtaagcggctcggagacactcagctggactggcaaagcagaatatctgagtgtcagtgtacttcattcatctgtcactgggtcagaggtctgcaaaggacagaccccctgcagctggtgtccccgtgtgaggagtgctaccacaccccgactcattccttacatgtagactattttctttactggttcagcaaaagccaggaaaaacaactctgtagcaagcagaatgttattcgactatatattgtttaatttattgtaaatactggtgaacagtggtcaataaatagttttatattccttcaaaaagaaagaaagagcttgcagggtgtgcataggttgtctgcaaacgctgtgccattctgtatcaggggcttgagcacctgtgatgttagtatcttcaagggagggtcctggagccagtcccccacgtatactgcggactgactgtatttggattttgacagaaggctgagaaacccagaatgtcagagacaacctcccagccgtagaaagccgagttaatatcaggagaagccagtggttaaattcacagtctttttacacacaagagca

SEQ ID NO: 258239 - DNA, 572 bp, Homo sapiens
aactttgtaaatcttgttctttccaccctactggcaaagacattgggtggtaaatttctgttctctcctagaacatcagtcataggccagtttgcctctgttgctactgctattcttttcaaaacaaggggaaatttctagaaagtgtaactactaagttataaatatgtatattttagatgaatttattcagtgttatacactcacacatgccattctgcagattattcattgattgtatgttaggaattagtgatacaatattgaaagagttatctaagacttaggagtatcaagaaaatttcagttaaatgtgggctgataacagcctcctaggatcactacgcttggttcgttcaggtattgaaagtaaaggtcatttctagggtactctttttagtctactaaaaatagaaaatttgtctgttttgagtttcaaaacataaagaaggcaaagaccagttcttaatttgcaaagttagtgtgtttttcctttaatacttcttttggcaaattcagctggttctaggaaatgcagaaggctggcaatggtaagatgataaaaaatcagg

SEQ ID NO: 258240 - DNA, 533 bp, Homo sapiens
ccacagcctctgagtagatcctgacccagcattccatggcagtatcctttggaaagaaactttcaccaaacctgatgggaacctctcctcaaggactgctaagtcaggaaatggggtatgcagggtctggaagttggaagctggccgcatcccccaaatgagcaggtccaagacacttattcatacatcaggaaaaccagggtccagagatggagagaaatccaaggcttggagccacttggatggtcacccagggccatcagcatctactagccaggaggaggctgggacattcgggaggcaatggagagaaggaaatagaaggaagagggctggggctcccagcagtctaattacagggtcccaaggcccagcagtctttcagggagaaaaatcggtcggacttggacaaatcagctgcacagtgttaaccttccagagactgaactctctccccatttccaggaatctaatctttgatgtatctttgaataactttaaaaaaaataaatcctgaataatcttaaaaaaat

SEQ ID NO: 258241 - DNA, 355 bp, Homo sapiens
atgagcatgatagaaaaaaattattctctatttcctaggagagaaatccaaggcttggagccacttggatggtcacccagggccatcagcatctactagccaggaggaggctgggacattcgggaggcaatggagagaaggaaatagaaggaagagggctggggctcccagcagtctaattacagggtcccaaggcccagcagtctttcagggagaaaaatcggtcggacttggacaaatcagctgcacagtgttaaccttccagagactgaactctctccccatttccaggaatctaatctttgatgtatctttgaataactttaaaaaaaataaatcctgaataatcttaaaa

SEQ ID NO: 258242 - DNA, 621 bp, Homo sapiens
aaagcccgtctgtactgaaaatacagaagtagcttggcatggtaatgcacacatgtagtcccagctacacggcaggctgaggtgggaggatcacttgaacccaggaggcagagattgtagtgacccaagatcgtgtcactggactccagccttggtgatagagaaaaactctgtctcaaaaaaaattaaaaattaaaaaaaaagaaaaaagaaaaggaaaaaattggggtataagtggacccatgcagtttaaccctgtgttgttcaagtgttagctgcaaagcaagcacctctgtagccaccatcaaaacatctatattataggaattacctataaaaagtaaataggaaattatacatgagagcgctttgtcataatcagttattcacagctaagacatttttcaaaacaactttcctcattttttattaatggataatactataaacattttgcatggctaaaatctatatgtaaagtacctaaaacaatagaagccatattggtaagcccttaataaatgtaatatattactatcatttaatacattaatggtattttgataacaattacacttttcaaagatatttaactctgattctatattctatgtaaaaaaa

SEQ ID NO: 258243 - DNA, 419 bp, Homo sapiens
gaggacaaagtcagcacagggccagagccagagcaaagctagaaactcctaacagactttattacaggaactttgttttactgcaaatcacaattgatcttaagggtcatagttttcatgcaacagaacatatagtgatgaccattgggatctttagaaaatcaacataatcttatgagaaattccaactacaaatgataaatgtagaaaatttaatcaatcatctacaccaagcggagctagtatatactggggagtatataatttaattccttccgtttcttccacaaattaatgctttgtaattaaatgaacctcagaatgtttatacacagaaccagaagtcattcatttaagggcagtactattgtcaacattttcttctaatttctactgcggcctttcttattttttatttt

SEQ ID NO: 258244 - DNA, 1159 bp, Homo sapiens
tgtataaaagtttctatttcggcatactttacttttacttaactaaaatttcaaataaaatgtatccacttttatgatctcaacaagatcggtcattcctatagcggagttgaaaactttcaacttattcacaattatcaaaagaatggagcagcccccacagagacttccagcaatgagttgtaaaatgcagtctgcattaagtagcttccttacaatcatcccgatggtaaaagtgtcaaatttcgcaaacgcctggacaaggaagtgaaatgatcatctaataacgcagttgactcatctgtcaaataagcgagtgggccagggtccctgagctcactaccctcagattctaactccagcttcacatcattaggcgtaagcagccaattgggccgtctgggagccgtgcatcctgggagttatagtttccggctccctccttcagattacaagctccacagagccgcgggaggacggttgcctggtattattagcaagcagcaaatatggcggtggcgcgcgtggacgcggctttgcctcccggagaaggatcagtggtcaattggtcaggacagggactacagaaattaggtccaaatttaccctgtgaagctgatattcacactttgattctggataaaaatcagattattaaattggaaaatctggagaaatgcaaacgattaatacagttatcagtagctaataatcggctggttcggatgatgggtgtggccaagctgacgttgcttcgtgtattaaatttgcctcataatagcattggctgtgtggaagggctaaaggaactagtacatctggaatggctgaatttggcaggaaataatcttaaggccatggaacagatcaatagctgcacagctctacagcatctcgatttatcagacaataatatatcccagataggtgatctatctaaattggtatccctgaaaaccctgcttttacatggaaacatcatcacctctcttagaatggcacctgcttacctacccagaagtcttgctatactttctttggcagaaaatgaaatccgagacttaaatgagatctcttttttggcatccttaactgaattggaacagttgtcgattatgaacaatccttgtgtgatggcaacaccatccatcccaggatt

SEQ ID NO: 258245 - DNA, 410 bp, Homo sapiens
gttttttttcacaaattaaagaactgaagcccctctacacaattattaattttagaaatgcacccatgtccacattatacacaatagagagtgaagaaggaatagaagtcatagaaatctcatgtttaaaatatggtagtactaacgggaaagtggatcccactccctcttgcttcattcaaaaaagcagtgttaaaaagtttgatttataagttttatcatatgaagaaaacagtattacggatagccacatgcaagagaataaagttggaccccctcctttacaccatacacattaactcataatggatcaaagacttaaatgtaagcccatttttttaaatcccaactcttagaagaatacataggagtttttcatgaccttaagttaagcaccctttttagatacc

SEQ ID NO: 258246 - DNA, 486 bp, Homo sapiens
tgcatatagctagccaggtatcccagcatcatttactgaatggggagttctttcctcatcgcttacttttgccaactttgtcaaagaccagttgcctgtaggcgtgtggctttatttctgggttctctattcggttccattggtctatgtatctgtttttgcactagaatcatgctgttttggttactgtagcctcatattgtagaaaacgaaatactgcatgtttgctgtcacttataagtgtatattcatggagatacagttggcaataatagacaatggggactcctaaaaagggggcaagggttgtaaaactaactattaggtagcttgctcagtaaccagctgatgtgatcaatcataccccaaaccttggcattgcccatattcttatataacaaaactgtacatataccctatgaatctaaaataaaagttgaaattatttttaaaaagtaataaaggttctagctctgtagcaaatag

SEQ ID NO: 258247 - DNA, 706 bp, Homo sapiens
gtcatttccttaacttgttttaatgaaacttcttattttgagataactgtagattcacatccaagtgtaagaaagagatcccatggacactttacttagttttgccaaatgttaacttccttcaaatctatagtacaatatcgcaaccagcatactgacactgaggcaactcaccaatcttacccaggtttcccagttttcagtttagttttgaatacgccagatttaaaatgctggagatattcatgggaaaatatgttaaggagcaggtggatatgcaagtctgatactcagaagggtcaggggaaagatgcaaatgtagcgaacattaccatatgtgggatgcaatgccttaaagaatgtgttcatgactacagaagtacctagcagacacaatcctggggacagaccagtttatcatgcagagtaacaatattggtagtgcactcgctgtgcactggccctcttctaagcccctgacatgcattaactagcttaagagtggtgaagggcacaggttctagagttagctggcctggttcctgccctggctccaatcacttaccagctttgggagttttagagcaagtcagcccctgggtgcttcagttacttgcctgtaaaacagggctagtaagtgttcttagcctatacagaattattttgaagattaaatgagatgccacatgctaaaacaatgactggc

SEQ ID NO: 258248 - DNA, 433 bp, Homo sapiens
gctgatcacaaggtattagttatgaaacaacctgttggcactcttctgtctccattattacccaactttttaatgctataagtccaattttgtggatcaactacagcctaccaagacaaaagttgtttggagagagagcaaaggaaaaactgagcaggaaataagtaagccaacagtcatcacctaatgcaactgcacagaaaggctgaaaaatattttaagtcatttcaaaatgtttgtagatatcaaagagacaaaccatctgggtgaaatattccattactcttctttcttttgtaggggcattaatattgaactggaaaaatctcacccctgccgaagttaacatactttgtacttaacacctcattcaaaactctcaagcaagttaagttctaattagtaataaaacttacaagtgcatagccattaa

SEQ ID NO: 258249 - DNA, 293 bp, Homo sapiens
cagagtctctgctgggcaacaggattccagaagtagatttaggaacccaactatttattgatgggattcccactgtaggttaccctagaggggttcttaattgtttaaaagtaaatgacaattcttaaattccatgtcactaattttatcatttattacattctttaaagagtgagggaaggggcccaggcacagtggctcatgcctgtgtggcagagtgggtttctcctgttcacaagttcccacgggaaaggccaatctgcctggccccatgtatccattaaacaaactaa

SEQ ID NO: 258250 - DNA, 366 bp, Homo sapiens
aaaaaacaatcatctgaatagatacagaaaaagcatttgacaaaatccaacatctgttcctgataaaaactcccagcatgaggaaaagaagggaacttccttaagattttgaagagcatttaccaaaaaacctataattaacatgatgatggtgggaaactgaatgacttccccctaagatcagggaaaatgcaagaatgtctgctttattgcttctagccaacattgtatgggagagtctagccagattggaaaagaagaaataaaattatctatgtaatttttaaaatcctatttgatttagcaaggttgtaggttataaaatgtaaaagaaaaaataaattgtaactctccagataagcaatt

SEQ ID NO: 258251 - DNA, 461 bp, Homo sapiens
tttatgttgaggaacttccactgaaatgcttgtatccttggatgcctcccttagctctcctgctgtaagcttttcctttcagaacagacaaatagccttgtctctattgtcaaaaagtaggctcttttattgttgtcatacttttcttggtttgagaatactggggctgggcaagatggctcaatgcctataatcgcagcactttgggaggccgcagtgggcagatcacctcagatcaggagttcaggaccagcctgaccaaaatggtgaaaccccgcctctactaaaaatacaaaaattagccaggcatggtgccgggtgcctgtagtcccagctactcagaaggctgaggcaggagaatcgcttgaacccgggaggcgcaggttgcagtgaaccaagactgcgccactgcactccagcctgggcgacaagagtggaactccatctcaaaaataaaaata

SEQ ID NO: 258252 - DNA, 393 bp, Homo sapiens
  misc_feature (346)..(346): n is a, c, g, or t
  misc_feature (350)..(350): n is a, c, g, or t
gttttggccccagtcctgagggttgtgtgtgttaggggacccacctcacgttcgccgaggagttcctgcatattcttgcaccatcccgggtgctgttgctggggctctctttatttgcacgcgcgcttctagcttttttcctgacattttccactccacgctcgttctttctcccttgcattttgttgcttgcctgagactctttgctctcgcccttgcccaggctggggtaattctgtgtgcgcgcgtgtctcccccgcaccaaccttttttgcacactcgaagctgaatattttcttttttagagaatttacccgcacctcctgcggggttcctaagcactctntctnctccctccccccaatataaaaatatagacttttaaaaaaaaaa

SEQ ID NO: 258253 - DNA, 677 bp, Homo sapiens
tagagaagtggaaagaaccctgggcctgcaacccagcagttgtacaccgtggtttcctagaggaactcatgcacatgtgtcctggagacctgcaagaggacagcaccatggagatgaccagcaactaataccacccaaaggtccaccaacaggagaatggataccccagcaggggtgcatgcatgcaacggaacacaccacgtactggtgagagtgaatcaatgtcggtcacacgcatcaacgccgatgaggctgagactcgtaatatcaaatttagaattgcaagtagcagaaggatcaaagttatatttgtaataaagcttaaacacaagcaaatcgagcactgtattgtttaggcacacattcacatttggtaaagacataaagcaaagcaagggaacgagacaaaaatgaaatcccagagtaatcaggtggtcaggtcttggggggtggcgtggagttggggaagggcatcagagtggatctcacctcagctccgactgctttgggaagttctagttctgacatggagtggtgggttcacagctgtttgattgcttgttatgctttataacaatataaactgcatatgttcagttgaaatatttcataataaaggttttttaaaaaagaacattgggctcatctttcccatcagatacaggcatttttgtttt

SEQ ID NO: 258254 - DNA, 402 bp, Homo sapiens
ctgtcctttcccctttactgtctgacaagctactactcaacctttagatcatagctcaagcatcaccacctctatcatttcttcctttctccaggctcatttaggtgttttttcccgtttggtcccactgcatcttatgctatgcagatctccattatctttttttttttttttttggaaatgaagtttggtaccgtggtccaggcgggcctcaaattcttgagcctcagtttcctaagcgggggcttgtcccacagcacggggcttaaatggctgcaattaagtccatgaagtactcattgggaggctaaggtagtccctgggaaagttgggagagagcagggaccttatcttaccattggatttaatatatcccatggcaaaggacccacggggtggcac

SEQ ID NO: 258255 - DNA, 480 bp, Homo sapiens
ctgtcctttcccctttactgtctgacaagctactactcaacctttagatcatagctcaagcatcaccacctctatcatttcttcctttctccaggctcatttaggtgttttttcccgtttggtcccactgcatcttatgctatgcagatctccattatctttttttttttttttttttgcatgtctgtctcatactgtactctgggtaccagaatgataacttttaattgtttacagtgtctggcacatagggatgctaataaatggtgaatatcagtattatcatttttagttcaacaaatagttattgagtacttgctccatacagggactttatatgcattacttttcactctcacaacaagtttgcaaagtagatattctctttattttatagatgaggaaactggagtttaaagagattaaaagacttacctaagctaaacaactaatatgtacagtactatacttatattggca

SEQ ID NO: 258256 - DNA, 359 bp, Homo sapiens
tttaaacatccatcagtgcccatgaaaaaaatttttaaaaataatctgaatctcacttgtttattgcctacaatatcaatcaatggcttaggtatctctccgtgttctattacttctcaccgctcttaattcatgaggtcaaacagaatcttaaaacatcattaaaaaatttcctccctttccatgtctcaaggtatctgtaaatggacaatttgggtgtgctgaaatcaaatgactgaccaaggcccataactgtgatcacaggtaaaatgtttttctgctttgccaaaaatccgagtttcctttgctctctctgtcaagctgaaagagccctcccagacccaggggccaggtggaga

SEQ ID NO: 258257 - DNA, 376 bp, Homo sapiens
gtgttcaagtttcatgtggcaaatgaggaaaatagcctttgactttggataaaaaccaaactaatgttttcttaatgttgaaagtcaatacatttgagcatttgacactccatagattctgatttggaatgttttttatctgtgacaccaaaactacaatgcttcctttactttctacataaataagagcaggagaaatcctactgcattattaatctgaaagcacaaggacagctagtcagaaaattctaaactgaagagagtttaaaaaaaacattgtattttactatttttttttactaatgattgagtgaaatagttcattagggagataggcaatatttaaataaagaatggagtttgtcgttgattttcg

SEQ ID NO: 258258 - DNA, 572 bp, Homo sapiens
aggagggggaggaggaggaagaagaaggaggaggaggaggagaaaaaagtgggaagatcaactgtacctgattttaagacttactgtcatcgctgtattagtcaagacaatgtggtatttgcagaggatagagaaatacatcaatggaacagaattaagaacccaggaatacacccacacaagtatagccaactgatttttaaacattcaatgaaggatattcttttcaacaaatgaaccccacaacttacacaaaaattaacttaaaatgggtcatagatgtaaaggcaaaacataaagctagaagacttccagaagaaaacaggtgaaatctaggactaggtgaaaaggtcttagacatgacaccaaaaacaatccatcaaggaaaaatctacaactggactttatcaagattaaaacttttaatttgcaagccacatatctgacaaataactcacatctcagatatgtaaaaaactctcaatttcaacctgagaaagctgaaaaaagaaactctcaaaaacccaaaagatcaacatacattttactaaagagatatttcatgtactcgc

SEQ ID NO: 258259 - DNA, 406 bp, Homo sapiens
caggcagttagggacacagcagtgaactaaataggcaacaatccttgcctttgtggcactgacattgcagagggggcaggcagacaatgaatgagcagacaggtaatagcagtggtatattagatggtggtatgtgatggagaaaaacgtagcaagaaaggggctgagggagtacaggatggctgtcagagaaggcccgtggagaagatgacatttaaagcatatgatagagccagaactgcatcgatctggggcaggagcatttcgtgcccagggtacagaaggcacacaggccctgtggggaagctgtcaggtgtattctaggagcttcagggaggctgctggtgtggctggagcccggtgaaatgggcagagtgtgctgaggatgaggtcagagaggagcaaa

SEQ ID NO: 258260 - DNA, 495 bp, Homo sapiens
ttacttttcagagtgtttaagtgcttgtttttgtttgtttgtttgtttgttttttgtagtttgttcagttttagtggtgaacagtgcattagatagattctagttggcttatttcatcttagcaatcatcgaaaacttagatattttatctttaaaattacaaaccaatatggactactacaaacatctattagagcgtcgctacctttaaatatgattccctagattgggtgtgatacttctgtattttagaaagttcccctgccccaataaatctaaaatgtaaggttaaaaaccctcatttcttctttatttgcctagttcagccaatttgactctcagttggattttgagaatctcagtgatgtttcagtttggaggtcagttcagaatagctttttattctaattttaatacctctattatcctgataaaagtgttgttgatgaaataattttgaatatctcaataaaaatctcaagtgcctaccaaata

SEQ ID NO: 258261 - DNA, 541 bp, Homo sapiens
agaaaccgcctcaggcctcagagggaggcatcctggagcccaccttgccggggaagcttgagcaattcgctcacaactgcccatttttgcccatttttgcccattttaaaggtggggaaaccgaggtctggaaccccacagggagagagttgctcaggcctctctgagagccccatgttttctgattctccagtttaacacagggcagcctagaagaagggaaggcagtaaataagaaaaggcagaaacggtcattaaaatgttaatttgtgtttttctctcccccttttcccctcttccctaccttccctccagggtcaaaaagagctaagggatttttttaaggacagaaaatggaagacagccttcagcaggatgaaaaggactatggagtcaggccgcctaggtaggaatcctggctcaaccaactggctctgagacactgggcaagtggttttaaactccctctgcctcagtttcctcatttgtaacatgggggtgataataatacctccttcgtagggatcttggtggggggtgt

SEQ ID NO: 258262 - DNA, 311 bp, Homo sapiens
tgatccaactgctgaaacaaagccaaattgctgccgaggcccagcaggcagaggctggaagctttctgagacgtttcaggcgctgccaccttccgggaagaaagagaagcattgtgttcaatggggaaaagatcctgaaattatgtaagggaacaccaaataggacccagcaagtaaaaaagtgaaggaaactacttccaatatggcaaagttgatcctcaaattcagaactattctttcccagccctgcagacaagttcaacatcttaagcatgggaaaacaaaccagataaacaaaaccacaaaacatc

SEQ ID NO: 258263 - DNA, 1358 bp, Homo sapiens
gtctgagtggggtgaacatggcagtcccagtaggaacagcttgggttggtcatggctgttaatttttttctctatttctgaaccctacaacccacagatatgtgttcatcgcattatttcctttctgggtggcaggaatcaatataaagctgctgtggtgattttaccatcctcccttttattattacttttgtacctttttatgccttgctatgttatcaacccttttactgctctgagttaaagacagcacataaatagttatgcaaataaaatgaaagcgtatattgtttaatttacctttagttatttcagagagaaaaaaaatacatgtaacctaaatgttccaacgtatttcttaacagttgtatctgctttgggaaaagaatctctgtaaattttcttttaaaatttttatttccttaactttgtgtgggtacatagtaggtagtaggtgtacatatttatgggatacatgagatgttctgatacaggcatgcaatatgaaataaacacatcatgaagaaggggttatccatcccttgagcatttatctttcaaatctcagtaaattgtaaagcatttctgttcagtaggtagacatcagccacatttgctattttaagtttacatttacctaaattgaatacaatgaaaattcttcgtctctgtagcctagtggttttcgaccagaggtgattttgtccccaaggggatatctggcagtgtctggagacatatttagttgtcattaccagggaagatgtgccactagtatctagtggggggctcagggatgcagctcaacatgctgcatggtagtgttaccatgcacagaacagccaccatcgcaaggaaccattggcccaatatgtcaacagtggcgagagtgagaaactgcactagccacatttcacgtgctaagtgtcctatgtagctagaagctgtgatattgaacagcaccaacttagagcattctccactgtcagtgctgacatttggttctgtcaggcagtgtggtctcaggtgagagggaaaagataagaaggactggaagcagggaagtgatattctcatgaaaatacatttctttgaatgagaccacagattctagatttctttgccatagacggttccatcttaagtttctgaggttatgattgtcactgaagtcatactattagtaacagtactcagctgtttgtggagtactccctgatcgacaaatggtttgtcatgaattgtctcatttaatttttgtaaaactgtaaaacaaagaagctctctatattccaggtgagaaaagtggggtgatttatttttctgttataacaatgtgtagcatgaacccttgcaat

SEQ ID NO: 258264 - DNA, 509 bp, Homo sapiens
tggacataattgcttaggttagcacttgaacactttgttttaaattttttttattgctgccaaatagtcatttaataaatacccaattgtttatgtaaagagttttagaggagctataagtggtatccatgggtgaaagaatgaatccatttatttgaaatgtatagggtaattaatggctccagttttgaaatagatatattacctggtgttgattgtttttttaactttgaatagatgtcagattgtatgataacacattcccagtctgattatgttgaagctaagagtatcagaacatattgtaacatagtctatttattgattcaccggcctcggcctcccaaagtgctaggattacaggcatgaaccaccgcgcctggccacggtgctaagaatttagtagtgaataattcagtggcaaatcctcgggagtgttttgcaaataagagtgacactttttgtccttcacttctaggaaacgtggtgactatgttgagaaaaggggg

SEQ ID NO: 258265 - DNA, 877 bp, Homo sapiens
ctgcaggctgctggcttctgcggctgcggggtcggggtcgcggccagggccaagccgcagcgagttcacaggcggaacccctgcaggcggcgccccctacgcgaggtcacccctgggaaggagcgcagcccacccggcccctccgcatccgagcaggacgcccgtctcctctccctgaggatttcaggtctccctgtcccaggaggcttgtgccaagatggcatcagctggagacacccaggcaggcccacgggatgcagcagatcagaacttcgactatatgttcaaactgctactgataggcaacagcagtgtgggcaagacttccttcctgttccgatacgcggacgactccttcactcccgccttcgtcagtactgtgggcatcgatttcaaggtcaagaccgtctaccgccatgacaagaggatcaagctgcagatctgggacacagcgggccaggagcgctaccgcaccatcaccacggcctactaccggggagccatgggcttcctgctcatgtatgacatcgccaatcaggaatcctttgccgctgtgcaggactgggccacgcaaatcaagacctactcctgggacaacgcccaggtcatcctggtggggaacaagtgtgacctggaggacgaacgtgttgtgcctgctgaggatggccggaggctcgccgacgaccttggtttcgagttctttgaagccagtgccaaggagaacatcaatgtgaagcaggtcttcgagcgcctggtggatgtcatctgcgagaagatgaacgagtccctggaacccagctccagctcaggcagcaacgggaaaggcccggccgtgggggatgctccagccccccagcccagcagctgcagctgctag

SEQ ID NO: 258266 - DNA, 450 bp, Homo sapiens
gatggccggaggctcgccgacgaccttggttagtgcccagcctgggccacaggccctggtctcccagaaccaaaccctcatccccatcctctgattcagggtccaacccagtcactgatcctttgaggatctgcccaggaagatacccatgtgtatgccacatgtcccgtctaattgcaggggatccacgcgcaggaactcccactgccccactgcctatcccctgggaacccagcaaaaccatttctggaaattgatcctagagatatcctcacccatgtgggatatggtgtgtggagtgtagtagtagtattagtaggagtgaaacctacagatcccccccaggtgtctcacagttggagaaccaagtggacataaagtatattcacatggtggaatactatgcagccatggaaaaggatggggatgttctttatttttttatttttt

SEQ ID NO: 258267 - DNA, 262 bp, Homo sapiens
actctggaaaatattaatatgtttcaaatttctatacatgtataatagtgattgttttagacccaatgaactttaattgttgggtattcttgggtaacaatatttttagaactttgatacattttggtaaccatttgtaagatagttttattttatttacattcttatgagaactaattgaaatgagactggtgatacaagtcaactattgcgtcagagctaaccaatttgaagataaagaattgaggtggggttgaagtgg

SEQ ID NO: 258268 - DNA, 212 bp, Homo sapiens
tgttttctttatctttctgtttttccactaaaagctccgtttttccatcttcccattactctccctttcctgtgtacactcctgaagacaggcatcctcataaggtgttctgaattaactttagggtgttctccaggtactttgcatctttttatatttcttgtaaattgttaatttctaagctccatgattaaagagaattcaccactctc

SEQ ID NO: 258269 - DNA, 219 bp, Homo sapiens
agccatcccttccttgcccctcccttctcctttgcatcactccagcccacttgccatgcttcttccctcctcgtccttctgctggagttggccttgggcttcaaagcctcccaaacttctctacttagctaatttttattcatccttcacatgtcaactcaaacttcatttcctttgagcagtcttcccctccgttccacattagttccggtcttctac

SEQ ID NO: 258270 - DNA, 440 bp, Homo sapiens
tcgtctcaaaaaaaaaagtgtcagacttttagttatcaccacttacccctctttttctcttccttggtgtccatccctcctgtagcattggcgtggttcactcccagctggacacccaccttggaccaaggtccctcaacgttgtctcgtgggctcagcttagtgcttgctgcatagcaggactcagaatatccaaacacgtttcatgtggggtgactctggcagatctgaaatgacagacggccccttggcggggcagccgcaagtcccagtaatgccagcactagctccgagagggaaaattcattcctcaaccgcttcctggagacccttctcctatgaacagagagttgtgactgcctgcagctgattaggcccttttgatcctaaatagcagggattagcactcatggtccttcatggttaaagaggtcacagct

SEQ ID NO: 258271 - DNA, 722 bp, Homo sapiens
gacagagggagaagtgtgtgcatcttctgggagaggaggagcggagcctggcggggaaagctgtttgtggactcccctcctaacccacctccccctcctttcctctttctcaggacgtgcagcccctcatccactaactcactcatcatttagcttttactatgtcctcttccccttctaggaccaggtcaaggaaatatgtaattatcctctaaaaggcactcattcattcgttcaacctaggatgcacgtaacactggccaccagggcccgtgctacatgatggacacacagaacggagaaagacagatcctattcccccagagctcaatctagtcacagaggttaaagctaccattagttactttttggcagcaaagtgcctggagcctaggagatactcaactttcagaagctgtgtgaaattgtttttgaaaataggcaggattcaaaccatgaataaatgaatgaatgaatattgtcagctgggctgactccattctgtttcagggcccctgcccctcagggactattaagccacagttttagtaggcgcctagccctggtgatttacactgcatgagaaactgtagatttggggagaagttgccagttgcttttaacagagaaagctgataaaaggtgctcctggaaacagtggaaggtcaggtgagatcaagctcaatttgggctacagggaacatttagaaggttataaaaag

SEQ ID NO: 258272 - DNA, 463 bp, Homo sapiens
cagaggcctgaaggtccctgctatgcagccgtggccacagctcacagcaccagtgctgtggagcatccacacctttgatggcaatgcagagtgatagcaggttccataggtgtgacaaaacagcattaaagctcagtattttgcatatttttagcatttaaaaatatttttgctttagtgtgaggaaagtaaggatgggcaaagaggcgatcaaaatagctattgctatgacattttagaaaacaaagttggggccgtatttctttaaaaagataagcctctaaaaatgcttggcaaaaaaactatagtgttaaaataggccagtgatattaatgagaaaatgaaagtatatatcaggaataaagtgatattgcataggagtattgtatttttatgaattttgtgccagttgtttacatgtactatatatgttaaataaaaaaatcatgaaaaatgagggaaa

SEQ ID NO: 258273 - DNA, 445 bp, Homo sapiens
ggaagggcccctccaggaatcctgagagaaaaatctctacccagcagcagatgtgggcttgtgacagctccattgttggtcgggtggaggggggttgcggaggagaggcccactctgtgtggccaggattcaggggccccgagagaggccactggctctcaccccaatcctctctgcctgttgaaatacaaatagcctgcacttgagtgctcacctgtgctactccattccacgccggacaattgcgagagggaggctccatgaggttcccattttatggatgaacaaatggaggctcagagaggtttagaaacatcccaagattggtaaagaggtgaatccagggctgaactcgttctgatgtgtttcacggctgatattttaacaatgaaaccttactgtcttcattacgataagtctaataaatggcatttgtctactcaca

SEQ ID NO: 258274 - DNA, 769 bp, Homo sapiens
  misc_feature (737)..(738): n is a, c, g, or t
atgggctctttccctaagcagcctgaggtgatctgtgaaaatggttcgctattcacttgacccggagaaccccacgaaatcatgcaaatcaagaggttccaatcttcgtgttcactttaagaacactcgtgaaactgctcaggccatcaagggtatgcatatacgaaaagccacgaagtatctgaaagatgtcactttacagaaacagtgtgtaccattccgacgttacaatggtggagttggcaggtgtgcgcaggccaagcaatggggctggacacaaggtcggtggcccaaaaagagtgctgaatttttgctgcacatgcttaaaaacgcagagagtaatgctgaacttaagggtttagatgtagattctctggtcattgagcatatccaagtgaacaaagcacctaagatgcgccgccggacctacagagctcatggtcggattaacccatacatgagctctccctgccacattgagatgatccttacggaaaaggaacagattgttcctaaaccagaagaggaggttgcccagaagaaaaagatatcccagaagaaactgaagaaacaaaaacttatggcacgggagtaaattcagcattaaaataaatgtaattacaaaggaacaaaaacaaaaaaaaaaaaaaaaacggggggttttattgggggggggaaaaagggttataaagggcgggtatttgttttggccttttttgaagggggaatggggccanngagggtatatgaagagtattggggaaaggaa

SEQ ID NO: 258275 - DNA, 797 bp, Homo sapiens
  misc_feature (765)..(766): n is a, c, g, or t
atgggctctttccctaagcagcctgaggtgatctgtgaaaatggttcgctattcacttgacccggagaaccccacgaaatcatgcaaatcaagaggttccaatcttcgtgttcactttaagaacactcgtgaaactgctcaggccatcaagggtatgcatatacgaaaagccacgaagtatctgaaagatgtcactttacagaaacagtgtgtaccattccgacgttacaatggtggagttggcaggtgtgcgcaggccaagcaatggggctggacacaaggtcggtggcccaaaaagagtgctgaatttttgctgcacatgcttaaaaacgcagagagtaatgctgaacttaagggtttagatgtagattctctggtcattgagcatatccaagtgaacaaagcacctaagatgcgccgccggacctacagagctcatggtcggattaacccatacatgagctctccctgccacattgagatgatccttacggaaaaggaacagattgttcctaaaccagaagaggaggttgcccagaagaaaaagatatcccagaagaaactgaagaaacaaaaacttatggcacgggagtaaattcagcattaaaataaatgtaattacaaaggaacaaaaacaaaaaaaaaaaaaaaaaaaaaagcaacaaaaaagaaaaaaaacctcggggggttttattgggggggggaaaaagggttataaagggcgggtatttgttttggccttttttgaagggggaatggggccanngagggtatatgaagagtattggggaaaggaa

SEQ ID NO: 258276 - DNA, 621 bp, Homo sapiens
atgggctctttccctaagcagcctgaggtgatctgtgaaaatggttcgctattcacttgacccggagaaccccacgaaatcatgcaaatcaagaggttccaatcttcgtgttcactttaagaacactcgtgaaactgctcaggccatcaagggtatgcatatacgaaaagccacgaagtatctgaaagatgtcactttacagaaacagtgtgtaccattccgacgttacaatggtggagttggcaggtgtgcgcaggccaagcaatggggctggacacaaggtcggtggcccaaaaagagtgctgaatttttgctgcacatgcttaaaaacgcagagagtaatgctgaacttaagggtttagatgtagattctctggtcattgagcatatccaagtgaacaaagcacctaagatgcgccgccggacctacagagctcatggtcggattaacccatacatgagctctccctgccacattgagatgatccttacggaaaaggaacagattgttcctaaaccagaagaggaggttgcccagaagaaaaagatatcccagaagaaactgaagaaacaaaaacttatggcacgggagtaaattcagcattaaaataaatgtaatta

SEQ ID NO: 258277 - DNA, 377 bp, Homo sapiens
tggaaagtgcagagaagtatacacaggaagaaaaattcccaacccccagaggcaaaccagctgaaaccacgcaaccccagtcaccccaatgcaccgcgaggctgctgcctcctgtcagggtcagatgagcctcgaggctcaggaaagtcagaggatgccatctgcatggtggtaaattacagaggtgatgaggcaaggtgggtgtggggctgttcttaaaacggggcagcaggaaggccccaaggagatggatttgggctgggacgggaagagagagctggccatgctggggtgggtgggtgttcaaatggtggaaacagcagacgcaaaggccctgccgttggaaccagcttgtggaataaactttcagaaacaga

SEQ ID NO: 258278 - DNA, 462 bp, Homo sapiens
ggggcctgtgctggtcacgtaggaggggaagctggagccaggcgtgcagaggcgtgtctaggataccagggcaaggctggcccaaggacctggggcgggcaagatggtggagatgtggttttcaagaaggcagggaggctgcagatttgttaatgtctttctctttggtctaggagatatcgcactatgggaatgtggggaagggggttggtcggagcctggggctctgtctgtcattactctggcatttcaactcctcattcatggcctaattccccctccctgggagtaggggcaccaataatactgtggcctggcctgtgtccccttttctcctccttcctccctctgctctctagacttagggcctctagccgcaagcacccctcagtactcctcactaccaccctcaccctaacatctctgccccagctttattcacccctactcattctccttggt

SEQ ID NO: 258279 - DNA, 425 bp, Homo sapiens
agagagagggtgggagaggaatttttgtcgttaccttttccgccctgcatggaagagcagaactccaacaagagtccagcccactctcaagcctcaattctagagtttctgactctatgtgccaagaagacctgatcatcagtactagaaaatataaatagtaaatatacagtcatgtcaattatctaaagaatatatgtagagtatgagaactgaaaagctcatgacaaatgttttgtcatagatgatttctgccgtgtgatcaaattcattcatccactcatccgttcatcgttacttaacaaacattgaatgagtgaccactgtgtgccaatcactgtactaggcattataaatgttgtagaatattctgaaacaaataaacagttaaagctcaatgtacatttgtaatttaataaagtaga

SEQ ID NO: 258280 - DNA, 679 bp, Homo sapiens
ctggatcttgtgaggactactttgccactctttggaaatgcctagttgatccttggtttagacataaccttggttaaggtgtattggtttggtaagtcattgaaaaagaacctttgttttaaaagaaagaatttgaacaaaatatttataaaagataggccctcaggtaaaataggctttcttctttcccagagctgtccatgccgagtccaggcatagagaaggctttctttgccctgttcattaaagagcttcacaatgatgtcagtcatctcaccaagaaacaaactaagttgaaaagcccacctatttaactaagttggtctgttacagtaggcaggcagacatgggcaaggcaggagatcacccccaacctccaccaaggaatgtcagacaaccattaggtgatggtcaggtggttgttaaactgtctctctcaaataatatttggttgcagccggcgccaggaaaaggcaatctcccagtagatagaaaaaccctgaaactgatgatcagtaggttcctgataagatctcaggaggtgggcgagtaggctcaagcatgcacactaagaggcaaaaatggtagagtttaactggtatatgaccttcctctaggaacagtcaactggtaaggaaaaaaagatgcctcaagtaagcatgcacataacttcagtaaa

SEQ ID NO: 258281 - DNA, 429 bp, Homo sapiens
tccctcctatctcctacccctgtaaggaagttggtccctgttctgaggtctagtggtactagaagctggctctcacttcccttcttaaatctccaaagagctcaagaggctgaaagagggaaaagacaaaatgccctctagaaaaggaaagccttacttcaccccttgagtgtcctccaagtatagtggaaaataggaaaaatgaatctctggtatgggaagtctctagacttgaatctccttttaaaataagtacagcccctcagagtcatagcaggaaggcccctcagctctgcccccaaagaaaaataatggtaaagggagtggaagtgaaggtgggggcggggcagctgctctcataagagccctttgtggtggctgcctctgaaaggaggttttgctagacaaggtggaacttctcaaggtgac

SEQ ID NO: 258282 - DNA, 206 bp, Homo sapiens
tcctcttgttatttgagaaaataaaatatttgaatatgctttttacatacagttaaggtaccaatgagaaatcattcttattcatcaaagttcatttgtttcactaggcaacaattagcaatcctattttgtaacgacatctacttgaaagtaaaaatacaaactgcattcattaaaaaaaataacaaacatgcaacttacacttt

SEQ ID NO: 258283 - DNA, 510 bp, Homo sapiens
ttttttgagtttggcgaggacagacagcgaccgattgtttttatttccataatttttaagataccttaactggactctgtaggcaaagggagtaggtagtcaaaaacattttttaacaagcttaaatatctatcatgactcatagaagaatttccttatttcttcaccatctctacctgccttccaaaatgctgactcactgtcagctactttgacttaaatttccttagtgaaggctgatgaacccttgaatgggagacctatgtactttcttccacccagttcattcgtagcactttgttaatagaaccctcgaaaccttctgcctgatgtaacaatatgtgtatggttctatctagtgattaataaagaacagtgtagtaaaagtgtagagactttggaaccagacagatcttcatcggaatcccggttctgtctctacacttgctctgtgctgtggttaagttgtttcacatctctaaaatgggaataaaatgggaataaaaatat

SEQ ID NO: 258284 - DNA, 562 bp, Homo sapiens
cttctcagtttctaatctagcattgtccgatagaaatatattgagagccacaaatgcctgctacatatgtaattttaaaacttttcttgtggccactaaatgtggccactaaaaagttttttacagtgtgaaattaatatcaataacatattttatttaacccaatgaggtaggcaaaataatgaaagatgtccaagatccctgaaatgtgaatatattccttacatggcaaagggactttgcagatgtgattaaggctaaggggcttgagaagaatagagtgtcaagaatcatacaggtgggtccaatctatggtcagggagatgcgaggatggagaagggcgagagaagagatactgttggctttgaagatggagcaaggagccactagccaaggagtgtgggaaacctctagaagctgaaaaaggcaagggaacgaattctcacctaaggcctccaaaaggaatgcaaccctcccaaaaccttgattttgcccaatgagacctgagtcagacttttgaactacagaaatgtaagataataaatgtgttgttttaagcca

SEQ ID NO: 258285 - DNA, 1080 bp, Homo sapiens
cggtgcccagctcagtattggcaactaggagagtagtgagattgaacttggccttgaggaacagctgcctctagagttggatcagacaagggtgctgagagccgggactcacaaccaaaggagaaatgagcaatccgcggtctttggaagaggagaaatatgatatgtcaggtgcccgcctggccctaatactgtgtgtcaccaaagcccgggaaggttccgaagaagacctggatgctctggaacacatgtttcggcagctgagattcgaaagcaccatgaaaagagaccccactgccgagcaattccaggaagagctggaaaaattccagcaggccatcgattcccgggaagatcccgtcagttgtgccttcgtggtactcatggctcacgggagggaaggcttcctcaagggagaagatggggagatggtcaagctggagaatctcttcgaggccctgaacaacaagaactgccaggccctgcgagctaagcccaaggtgtacatcatacaggcctgtcgaggagaacaaagggaccccggtgaaacagtaggtggagatgagattgtgatggtcatcaaagacagcccacaaaccatcccaacatacacagatgccttgcacgtttattccacggtagagggatacatcgcctaccgacatgatcagaaaggctcatgctttatccagaccctggtggatgtgttcacgaagaggaaaggacatatcttggaacttctgacagaggtgacccggcggatggcagaagcagagctggttcaagaaggaaaagcaaggaaaacgaaccctgaaatccaaagcaccctccggaaacggctgtatctgcagtagaagtagaaagaccaggaggagctttccttccagcattctttctgtctcacagaaatttagaggcagctcttacctctccccaagatcttctgttcccaaggccaaatggcacccagtttcttttccatcacacccttcatgcaggtcctcctgtccttattagagcaagccagccaaaacttagcacaaggcatggtggcaacattaacatcacctccctcaggct

SEQ ID NO: 258286 - DNA, 400 bp, Homo sapiens
gagattcgaaagcaccatgaaaagagaccccactgccgaggtattggggtgcctactccaggcctgtttgggggaaaggtactaggttggaagtgtaggctatggggacccagctgagtctggttcttcctctcactccagcaattccaggaagagctggaaaaattccagcaggccatcgattcccgggaagatcccgtcagttgtgccttcgtggtactcatggctcacgggagggaaggcttcctcaagggagaagatggggagatggtcaagctggagaatctcttcgaggccctgaacaacaagaactgccaggccctgcgagctaagcccaaggtgtacatcatacaggcctgtcgaggaggtggggacagatccaagagcacagagtctgtgg

SEQ ID NO: 258287 - DNA, 389 bp, Homo sapiens
tcttcattcttaatagccccagtgtagaaacaatccaaatgtccattaacagtggaaaggatgaattaataatggtacatccttctaatataataacaggtcgggcaaggtggcttgcgtctgtaatcccaacactttggaaggttgaggcaggcagatcacctgaggtcaggagtttgagaccagcttggacaacatggtgaaaccccatctctactcaaaatacaaaaattagccaagtgcggtggtgggctcctgtaatcccagctacttaactacttgggaggctgaggcaggagaatcgcttgaaccccagaagcggaggttgcagtgagctgaaatggtgccactgcactccagcctgggcgacagagcaagatcccatctca

SEQ ID NO: 258288 - DNA, 494 bp, Homo sapiens
catttgagataattagtgttactatccctattttgcagattcggaaactgaggcacagagaaattaagtaatttgagattgcctatggaggagacaacgagtgtttgccaccattcagttctgtatatcttatgccgcctagcacagttcttgcccatagtaggtacccagtaacccagagaattttgaatggaatcagaacgtagactagcatgaagctacattaccgtggatggtggctcttgggaggagaggcccgtatggagtcactgcaaaccccaacaggattcccgaagccactgggttcataaagatgtcctttctgcttctgacttagagcagtcatccaatttaaggaaatgtggaaaaagaagtagaaaaatctttaaaggttttatttcacaacactgctgtattaagttgagggataaaaattggattactagttatttttggttatttagtatcattattaaaatggtgttatttatcta

SEQ ID NO: 258289 - DNA, 650 bp, Homo sapiens
ccaggaagggtgtccagtgttgtggggcagagttacaagacgagccctgtggctttgggtgacagatgggtattctgagcagggcacagcatgctgggtgcagagtttgttcgatgtggggctgtatgttttctacagcatgtgttttctcgcatgtgtgtcttgtgctgcacctatgacctgtttatgaactgttttctgcagagctggcatgctgtatgtgttgcggagggtgccaggatgcagtgtatgtgcccttttggagggggcggttgtgggcctttgagtcagaaggcgtcacgtctgggtcccatttctgtggccctgctgaggtgtggtccagtggtgaagagggcgatggatgggtttgcgtgtctgtgatgagcgcgttgcatggggctgcgcgtctagaactcagatcccaaagatcatgagaggagcgaggaaccccggggtatgtctcaggggcctgtgggtcagttggcactggtgtgaggggctcgaggtggaatgcgccagttgtgtttatgggatcatgggcagccaagcgaggggaaggttgtgtgtttgcaacattctccacaggattcttttgtgacgttgtttgtaggagcctgtctgggctgctgagctgggaggcaaactggtca

SEQ ID NO: 258290 - DNA, 316 bp, Homo sapiens
agccatgggttggccttaggtttcctgtttctagaccctattcttctgcctcaagtttggttccttgattgtaacacctgccataccaatgatatcctgaggtacaggctactatacagcaatgaagtaactgcattccttcaaagccttttcgaagagaacaggcttctaagcccatgtagacattgtcaactcagagtatgtgatacaaaggagggaaaagctgctgaaggctggaccatcatcaatattccaagtataaccttatgtccatctgtgaagtctaataatgaaataaagtgtatctatattgttt

SEQ ID NO: 258291 - DNA, 817 bp, Homo sapiens
tgaacatcagactccaagttcttcagcttttggactgtttgacttacaccagtgatttgccaggggtcttgggccttcagccacagactgaaggctgtactgtcagcttccctacttttgagattttgggacacgtactggcttcctggctcctcagcttgcagacggcctatcatggtacttcaccttgtgatcatgaccactggtatagcttgcctggtggtggacttggaggataccattgcatcagggcatttctccacatgatagctcctgcctgctggacaggtcctctcttgactatgtgtattctccagagaagcagataatggctcttgtaggaatgaggcttttaggcacttggctgatgtggatctcatctccttgcacctgggctgtgctgcacagaattcccacaaagactttcacagaaaagaaatacctcaggttgtactgctggcatatttggtttcccatcaaggtccttaacatttataaaattggattaaaataaactaacgaattaaatatgaatatgaaaataaacagctgttttcatggaaattgcattgatgtggattcttctgaaggcatgtccctaaagaacctgccaacaaattctgtaaaggcagaatgaacattctggaaaatttatgtccttgtgtagaaggctagaaaaaaaaaagaagaaaaaagaaactctcagcctgaaggcctacgtaaaacacaaagcacttctgaaatctttttggggggccaaaatcacaccaagcaatgcctgtggaagtgaatgtaatcaagtattgccctaccatct

SEQ ID NO: 258292 - DNA, 514 bp, Homo sapiens
tgaacatcagactccaagttcttcagcttttggactgtttgacttacaccagtgatttgccaggggtcttgggccttcagccacagactgaaggctgtactgtcagcttccctacttttgagattttgggacacgtactggcttcctggctcctcagcttgcagacggcctatcatggtacttcaccttgtgatcatgaccactggtatagcttgcctggtggtggacttggaggataccattgcatcagggcatttctccacatgatagctcctgcctgctggacaggtcctctcttgactatgtgtattctccagagaagcaggcagaatgaacattctggaaaatttatgtccttgtgtagaaggctagaaaaaaaaaagaagaaaaaagaaactctcagcctgaaggcctacgtaaaacacaaagcacttctgaaatctttttggggggccaaaatcacaccaagcaatgcctgtggaagtgaatgtaatcaagtattgccctaccatct

SEQ ID NO: 258293 - DNA, 481 bp, Homo sapiens
tcagcatttggtctttgtcttccaggaccactggtatagcttgcctggtggtggacttggaggataccattgcatcagggcatttctccacatgatagctcctgcctgctggacaggtcctctcttgactatgtgtattctccagagaagcagcatttataaaattggattaaaataaactaacgaattaaatatgaatatgaaaataaacagctgttttcatggaaattgcattgatgtggattcttctgaaggcatgtccctaaagaacctgccaacaaattctgtaaaggcagaatgaacattctggaaaatttatgtccttgtgtagaaggctagaaaaaaaaaagaagaaaaaagaaactctcagcctgaaggcctacgtaaaacacaaagcacttctgaaatctttttggggggccaaaatcacaccaagcaatgcctgtggaagtgaatgtaatcaagtattgccctaccatct

SEQ ID NO: 258294 - DNA, 742 bp, Homo sapiens
cttctgcatgagaatttgaccttcatttaaatttcacgctgggtttccctgttaaggttggctatgctgctaaccagtgttgtttatggtaacacaaatcccatgattaacactggaaggcctatacataagctgtatatatttgataggaagtcacacttggggtcttcctgagtgtggtgaatttgtaactgccatggcctttgtgaagaccctggaaattatgcctacgttgctgtcaccccaacagataatggctcttgtaggaatgaggcttttaggcacttggctgatgtggatctcatctccttgcacctgggctgtgctgcacagaattcccacaaagactttcacagaaaagaaatacctcaggttgtactgctggcatatttggtttcccatcaaggtccttaacatttataaaattggattaaaataaactaacgaattaaatatgaatatgaaaataaacagctgttttcatggaaattgcattgatgtggattcttctgaaggcatgtccctaaagaacctgccaacaaattctgtaaaggcagaatgaacattctggaaaatttatgtccttgtgtagaaggctagaaaaaaaaaagaagaaaaaagaaactctcagcctgaaggcctacgtaaaacacaaagcacttctgaaatctttttggggggccaaaatcacaccaagcaatgcctgtggaagtgaatgtaatcaagtattgccctaccatct

SEQ ID NO: 258295 - DNA, 879 bp, Homo sapiens
taggtttaggaaatttataaatgttcccattcaccttcagactaagttgttaaacctaattggggatcacaagtctacatggttcaatcgaagagctctccagtttgctgaatgttttggaggatgaataccattaagaaaataaagaaagatgccacaaaacgtgtgagaatttcagcacttaaaaataaataaccctacagaagaagctgattatactcttagtcctccctcttgctcttcacatgagatttggttcttctttttagcagttcaatgtattgacagaagtaaaaaagtcaaccaagtcctgttagtcttattcctaagtgtcccctacatttgtttatttccaagattacagccactgccatatttcagattatcactacttattgcctgagatgccatcttcgtcttacctcaccttcctcaaattcattggtgtatctgcctgcagagtcatttttctaaaatttagttatgtcactctcttgcttaaaacctttcaatttctctctattgccaataggataaagtctaaattcattagcattttataatctggcctgatcatctttccagcttcatcagctgcccatttccctacacattacaatgtctacttgggtcatcttagaaagtgggttatccttttcatgctgttatacatgggatactgctatggtttggatatttgattcctccaaacctcatgttgacatttggtccctaatgttggaggtggggcctaatgggagatgtttgggtcatggggttgtctccctcatgaatggcttgctactgtcctcttggtaatgagtgagttaccactctcacagtttcctagagcctggcatctcatttgttaaaatgagc

SEQ ID NO: 258296 - DNA, 932 bp, Homo sapiens
taggtttaggaaatttataaatgttcccattcaccttcagactatttaatggaaaccagtaagaataagtaagcagcttactttgtgtggttttctaagttgttaaacctaattggggatcacaagtctacatggttcaatcgaagagctctccagtttgctgaatgttttggaggatgaataccattaagaaaataaagaaagatgccacaaaacgtgtgagaatttcagcacttaaaaataaataaccctacagaagaagctgattatactcttagtcctccctcttgctcttcacatgagatttggttcttctttttagcagttcaatgtattgacagaagtaaaaaagtcaaccaagtcctgttagtcttattcctaagtgtcccctacatttgtttatttccaagattacagccactgccatatttcagattatcactacttattgcctgagatgccatcttcgtcttacctcaccttcctcaaattcattggtgtatctgcctgcagagtcatttttctaaaatttagttatgtcactctcttgcttaaaacctttcaatttctctctattgccaataggataaagtctaaattcattagcattttataatctggcctgatcatctttccagcttcatcagctgcccatttccctacacattacaatgtctacttgggtcatcttagaaagtgggttatccttttcatgctgttatacatgggatactgctatggtttggatatttgattcctccaaacctcatgttgacatttggtccctaatgttggaggtggggcctaatgggagatgtttgggtcatggggttgtctccctcatgaatggcttgctactgtcctcttggtaatgagtgagttaccactctcacagtttcctagagcctggcatctcatttgttaaaatgagc

SEQ ID NO: 258297 - DNA, 543 bp, Homo sapiens
agtgtggcatatttttcaattcaaagatttaagtattttaaattgttacataattattcatatatttcaatatgataattttgctgcataatgtgaaattttaaactatggctacatttcagctcctgatatcctataggtgaatttaaatctcattaaactaaataatagtcattcaaaaatatttttgaaatttttaattttaaccgattttaagcaaagtaggaatctttttcaagaaatgcaagttaattaaagagaagttgttgaactcattcttcatctctactgtaaagatgagaataagcagacttaatggacaacatgaagaatttgtgttaactgtgaaagaataatagctgaattgatctttacatattgaaaaagctgattctctaaatatcttaaaaagattaaattgtctatttggagttgttgggtgtttttcctttaaatcagggaaatggtccagatgatttataaattctttccctgcttcttcttcatatgtctttgataaataaacactgtcaagttatctgg

SEQ ID NO: 258298 - DNA, 481 bp, Homo sapiens
ccacttcctctctcaccatgggatctctgcataggccagctccccttttcttcccaccgtgaatagaagcagcctgagaccctcaccaggtgcagatgcccaatcgttaactttccagccatctgaattgtaagccaaataaatcgctttaaaaaaaatgatttcaatagtttttggggaacaggtggtttttggttccatagataagttctttagcggtgatttctgagattttggtgcacgtgtcacccaaacagtatacactgtatgcaatgtgtagtcttttattcttcacctccttcccacccttcctcccgagtccccaaagtccattattatcattcttatgcatttgcatcctcagagcttagcacccactcataagtgagaacatatgatatttggttttccattcctgagttacttcacttagaataattaaacttctttttctttataaattacccagccctgagtatat

SEQ ID NO: 258299 - DNA, 251 bp, Homo sapiens
ctttatagcagccaatggccagctctcctgcctttaatgtactgtggatattaagaaaaagcatgattttctccatgccttaaaagacctcagtctattagaagaggcagaagtggaaacagataagttacacagatcagtaagtaaacaatcagaacatgtcactatgcttaaattatatttttatagccatacctgttctataaatcagaagttagcaaactacagccttgcaggccaaacccactctt

SEQ ID NO: 258300 - DNA, 685 bp, Homo sapiens
ggaaggaaggaaggaaggaaggaaggaagaaagaaagcaggatgtacagcagggtagctgtagttaataatatgtatttcactaatgcatagagctcccctgcccccacattagcaggtaaagctgaaaaaggtagataaaagcataagtgacctcagaagactgaaattgcatctgaagtctatctccctatgatcctcagcagcacaggtatttttttttctacacctgattcttgggaaaatgatggaataaaaagagtctttttccatctccctagctctgcttttatactcttctgccccctcccatgtcaacaccccataaagatctctgacaaagtttcgctttctgttctacaatccacccctacctccaataaacacacctgttaagggtcccatcacatcagtgcctgtggggatgggcaaatggattctaatgtatatggtattcaaggaggaggtggctggctcattcaaatcaaggtgtcttcccactgtaaatagtccttcaaaatggatctcatggggaaacttcatactggaggatatcccaaacatgcaatgttcaacatatgtatggagtgcttatgtgccaggtgctatggccaagtgccaggtggaagggtgaatgggacacagatcccacactcgcagacctcacagcctcatgcggagagtta

SEQ ID NO: 258301 - DNA, 703 bp, Homo sapiens
gctggccttctctctcactaccatcagtgccttagattcaggaagacctggaaccaaattcccactccaccgttacctacagtgggcctttgggcaaatcagtgaaccttcctgatttagtatcctcagaagttcaaagtgagacaatgtaaaaatgtccatggggtagagctgctgggatgacaaaagggaaaaaaatacataaagcttctgacatgcagtaagcattccatgtgtattgattcctggacaatgcacactgttatttatttatttatttatttttacctgagaattggattagattagtgctggagttctcagtgggcaggaaagagaaggagatggtatcctcttaaagaaaacctcaaatttctctctctacctcactccatccccgccttggcctggatctcctccttttttctgtcccttcttcctacttgcctttttgcctcttgagattccagttgctgttcctttctctgctttcccatctccatttggtcttcagtctttgaggtctgggttctaccctgaccactccactacaactgctctgccaagatccgcaaggatgtcatgcttacaaaagccaagtcctttcttcatattgatctcattacttttctatggtagatcactctatttctaaagcacatttctcgccttggcttttacatagctttcatggtttatttct

SEQ ID NO: 258302 - DNA, 460 bp, Homo sapiens
ataaaaacagtcaacacttgccccaccctactcccagcatatgcacacacacacgtgcacacacaatactcacttaacaaacatttaatttattgaacatttattatatgccaaagctggtataagacaccaaaagagtaagacagaaagtattcttccctggagctttgtctgactttccaagctttattaggcatcaaacaaaactgaagtgctttttaagattcaagtctcctacgtcgtctaaggcagagtaagtagccttcagtactatattttactctaatttttttttaacacaatggcagtactataagtatgaaactttggtataaatgtcagattctagattgtgctcctgctttctgcacactctaatatttttaaacatctcgaaaatacagagtggcagcaaaattacctgtaaaaacatactagctcaagagtttgacaggctcaa

SEQ ID NO: 258303 - DNA, 201 bp, Homo sapiens
aacctttccatgactgccaccctcacattcaagactgaactggtcagagaaatagacgagacacctcacgggaagccctatgtagttagtattccacttatatcttttttctcttcttctgtagtgatggaaattttagcagggcacacagccactcagctaaacactacactgcctcaccctcctagcagctaggagtgg

SEQ ID NO: 258304 - DNA, 124 bp, Homo sapiens
atataaacatatatataaaatatgtttttatatatgtttatacatatttatatattgtgtatgcttatatgtgtaatatatatgttttttctatatattttttttttgagacagagcctcgcat

SEQ ID NO: 258305 - DNA, 868 bp, Homo sapiens
tttatttccaaatgattgtcatatgctaagtcaagataaacctaaaaatgaaaggagctatttccatcataagaaattaactgactaaattacacataaatatgcaatgaatctggtgcttgatatcatacgcaaagagaagccgtgatgtgtcatgtctgcgtaatggaattcaaaattattcatacaattataggtttcaaagtggcatgaactcatcctattctaattacatctacaaaactttaaacatagttctgaaaggtataagataacccagccctgccacacacacacatcccgccccccaggaaccccggtttcactgggccgccagtgtaactcactcctggcacttcctcctccccaggctcccctctcaagtcctactggttgcccctaatttcctagacctctaatgccagggtccagagctcatgccttcaacagctcatcctcgtgctccccatggagtctcagctactcccaggctccatctgtgcggatgcccaacaaacctacatctccagcccaccctctggcccgaaccccagactccttctcacccaccactgccagcctgatgtcatgtacacccaaacttcacatgcccatgctgactttcccagccagctccgcctgcaccttccccagcatagttcaaagcaactccaagcgtgtggcaggatggcccggtggtctaaggtgctagacacaagcttccacttcccaaggcaactccaaacttccagtaacttgggccaacaccctggggctgcctgtgaccccacctttgtctctctccccaacgttagatctgccagctagtcctgtggattttatcttcacaatgcacacagaatttgat

SEQ ID NO: 258306 - DNA, 222 bp, Homo sapiens
acagatgaggaaatgccaagaaagctggtcaaggtgacacaaagggccggctgcacatctgtctcattccaaaagtcatgctgctaatgacctggagctccaaaatccaatccctcaaagaccctcaaggcccttgcggcctggcctccctaccccgcctgcatcccagcacaggcctgggcctgacacttcccactgcttcctccacctgaaacgctgcac

SEQ ID NO: 258307 - DNA, 678 bp, Homo sapiens
gcaaacagtaaatcatgattatttacatttgtatatactgtacaaacagtttctcaaaaataaagtacgcctgtcactttagggtaaacaactgacagtgtttgttgccaataataaaatttgagctttcaaacaaaaatcagaatttaaaaaaacttgtatctaccctataacctaagactcttctgatatatggtggtgatattaacaaatgtaatatttgcaggaagtgataacatttggaatatctacacaactaaaatacatgatgttacaaaatcatgcatgactaaaagatccatttgaaatgtaagaccaatgaaatgaattttactgtaacacagtataaaaacgtttcagatcctagacctgtaagaaagtgtcggcagggtgtggtggctcacgcagtaattccaacactttgggaggcagaggcgggcagatcacgaggtcaggagatcgagaccatcctggctaacggggtgaaaccccgtctctactgaaaatacaaaaaattagccgggcgtggtggcaggcgccagtagtcccagctactcaagaggctgaggcaggagaatggcatgaatccaggaggcggagtttacagtgagcccggactactccccgcgaacttcatctcgcgtgcccaataccagaactcctcttaagaagacccct

SEQ ID NO: 258308 - DNA, 3973 bp, Homo sapiens
  misc_feature (3170)..(3170): n is a, c, g, or t
ggctatggaggcggcggcggttgatggttgaccgttggctccggggtgggggtcgccgttcgagtgatctgctcagacccgaccagagggcgcgggctgctgatgcttggcttggagcccgtgggggagacctagttcggctccgccatgccggccgccgggagtaacgagccggacggcgtcctcagctatcagagaccagatgaagaagctgtggtggatcagggtgggaccagtacaattctcaacattcactatgaaaaagaagagctggaaggtcacagaactctgtatgtgggagttcggatgccgcttggccggcagagccatcggcatcaccgcactcatggccagaagcaccggagacgagggcggggcaaaggagccagccagggggaggaaggcctggaagccctggcccacgacacaccatctcagcgtgttcagttcattcttggcaccgaggaagatgaagagcatgtgcctcatgagctgtttacagagctggatgagatctgtatgaaagagggagaagatgctgagtggaaggaaacagccaggtggctgaagtttgaagaagatgttgaagatgggggagaacgctggagcaagccttatgtggcaaccctttcattgcacagcctgtttgagctaaggagctgccttattaatggaacagtcctcctggatatgcatgcaaatagcatagaagaaatttcagacctgatcctggatcagcaagaactgtccagtgacctgaatgacagcatgagggttaaagtgcgggaagcccttctcaaaaagcatcatcatcagaatgaaaagaagagaaacaacctcattcccattgttcgctcctttgctgaggttggcaagaagcagtctgatcctcatttgatggataaacatggtcaaaccgtgtctcctcagtctgttccaactacaaatcttgaagtaaaaaatggagtgaattgtgaacatagtcctgtggatttaagcaaggtagaccttcatttcatgaaaaaaattcctactggggccgaggcctccaatgtcctggttggagaggtggatattttggaccgtcccattgttgcctttgtgaggctgtctccagctgttcttctctcaggcctaacagaagtgccaatcccaacaagatttttgtttatcttattgggtccagtagggaaaggtcagcagtaccatgagattggcagatccatggccaccatcatgacagatgagatttttcatgacgtagcatataaggcaaaagagcgagatgatctcctggcggggattgatgagttcctagaccaggtgacggtgctccctccaggagagtgggatccctccattagaattgagccacccaaaaatgtcccttcccaggagaaaaggaaaatgcctggagttccaaatggaaatgtttgccacatagaacaggaaccacatgggggtcacagtgggccagaacttcagcgcactgggcggctatttgggggcttggtgctggacatcaagcggaaggccccctggtactggagcgactaccgagatgcactcagcttacagtgtttggcttcctttctgttcctgtactgtgcctgcatgtcacctgtcatcacctttgggggactgcttggagaagccactgagggacgcataagtgcaattgaatccttgtttggagcttccatgactgggattgcttattccttgtttgcgggacaggctctcaccatcctgggaagtactggaccagtgcttgtgtttgaaaagattttgttcaaattctgcaaagactatgctctttcatacctctccctgcgagcttgtattggactgtggaccgctttcctgtgtattgtccttgtggcaactgatgccagttcccttgtctgctacattacccgtttcactgaagaagcatttgcctccctaatttgcattattttcatctatgaagcaatagaaaaactgattcacctggcagagacctaccccatccacatgcacagccagctggaccaccttagcctctattactgcaggtgtactctgccagagaatccaaacaatcacaccctccagtactggaaggaccacaacatcgtgacagcagaagtccactgggctaacctgactgtcagtgaatgccaggagatgcatggagagttcatgggatctgcgtgcggccatcatggaccctacactcctgatgtcctcttttggtcctgtattctctttttcaccaccttcatcctctcaagcaccttaaagacgtttaagacgagccgttatttcccaaccagagtacgctccatggtgagtgactttgctgttttcctcactatcttcacaatggtgattattgattttttgattggagtcccatcaccaaagcttcaagttcccagtgtgttcaagccaacaagggatgatcgcggatggattattaatcccattggccccaatccctggtggactgtgatagctgcaattatcccagctcttctctgtactatcttgatattcatggatcagcagatcacagccgtcattattaacaggaaggaacataagctcaagaaaggctgtggctaccacctggacctactgatggtggccatcatgctgggtgtctgctccatcatgggcctgccctggtttgtagctgcaactgtcttgtccatcacacatgtgaacagcctcaagctagaatctgaatgctctgctcctggagaacagcccaagttcctgggcatccgagaacagagagtgacaggccttatgatctttgtgctgatgggctgctcagtcttcatgacggctatcttaaagtttattccaatgccagtactctacggagttttcctttacatgggagtttcttcactacagggaattcagttctttgatcgtctaaagctctttgggatgcccgcaaagcaccagccagatttcatctacctgcggcatgtgccgctgcgcaaagtgcacctcttcaccctcatccagttgacctgtctcgtcctgctctgggtcatcaaggcatctccagctgccattgttttcccaatgatggttttggccttggtctttgtcaggaaagtcatggatctctgtttctctaagcgagagctgagctggctagatgatctcangcctgaaagcaaaaagaagaagttggatgatgccaaaaagaaggccaaggaggaagaggtcatagtccttgcaccaactgtatacctgggggcctcaaattacagaacataggaagggtcatgtgaaaagtcagcatgtctggaatcccgagggttatatttaggagctgggaagattacccccaaagatgttctcagctaagaatggattagggattcttgcttctgtctgttcttaatttttgggtttgacaaccacttattttttcctttgtttacaatctactcaccaggctcatacctacaatgtgaacatacagtatgcccttattagcagattcaatggctcacattctttcaaaaggtctaatttgacaaatacataagacccattatttcctagaatgtttgtaatatatctaattgcaaatggtgctgtggttggcaccatgcaaagataacttgcataggactttctgtcttttttcatttccctcagcacttggcatcttgtcatctacacaatggaccctcaataaatggcctatatgtgcaaagaaagaatgtgtagcaaatgaaaataccagaccaagaaatgagtgagctgggaagtgtttccaaatacagttagtgcctaaaatagtgtcctttgaaaaaacttttaaaagacttttttttaggccaggcataatgggttatccctgtaattccagggcttttgggagttgaagctggaggattacttgaggccagaagtttgagactagcctaggcaatataatgagaccctgtctctacaaaaa

SEQ ID NO: 258309 - DNA, 4084 bp, Homo sapiens
  misc_feature (3281)..(3281): n is a, c, g, or t
gtcctaccgagggaggagctacaggccaccgcgaccagcagagagcgaaggcaggagggaccagcctggcccagccccttcattttactgtcgggggtagtgaggaggaagaggaagaggcgaaggctggcggaggaggaggacaattatatagagtctgttgtgaaatttagatctatgttcaacaagaacaacagcaacaaactcagaagcactcctcgctaccgccggggagacccaggatacctaaactttactgagttggggccactcaagcctgaacagaaggatcagtggagccaacatagaccagatgaagaagctgtggtggatcagggtgggaccagtacaattctcaacattcactatgaaaaagaagagctggaaggtcacagaactctgtatgtgggagttcggatgccgcttggccggcagagccatcggcatcaccgcactcatggccagaagcaccggagacgagggcggggcaaaggagccagccagggggaggaaggcctggaagccctggcccacgacacaccatctcagcgtgttcagttcattcttggcaccgaggaagatgaagagcatgtgcctcatgagctgtttacagagctggatgagatctgtatgaaagagggagaagatgctgagtggaaggaaacagccaggtggctgaagtttgaagaagatgttgaagatgggggagaacgctggagcaagccttatgtggcaaccctttcattgcacagcctgtttgagctaaggagctgccttattaatggaacagtcctcctggatatgcatgcaaatagcatagaagaaatttcagacctgatcctggatcagcaagaactgtccagtgacctgaatgacagcatgagggttaaagtgcgggaagcccttctcaaaaagcatcatcatcagaatgaaaagaagagaaacaacctcattcccattgttcgctcctttgctgaggttggcaagaagcagtctgatcctcatttgatggataaacatggtcaaaccgtgtctcctcagtctgttccaactacaaatcttgaagtaaaaaatggagtgaattgtgaacatagtcctgtggatttaagcaaggtagaccttcatttcatgaaaaaaattcctactggggccgaggcctccaatgtcctggttggagaggtggatattttggaccgtcccattgttgcctttgtgaggctgtctccagctgttcttctctcaggcctaacagaagtgccaatcccaacaagatttttgtttatcttattgggtccagtagggaaaggtcagcagtaccatgagattggcagatccatggccaccatcatgacagatgagatttttcatgacgtagcatataaggcaaaagagcgagatgatctcctggcggggattgatgagttcctagaccaggtgacggtgctccctccaggagagtgggatccctccattagaattgagccacccaaaaatgtcccttcccaggagaaaaggaaaatgcctggagttccaaatggaaatgtttgccacatagaacaggaaccacatgggggtcacagtgggccagaacttcagcgcactgggcggctatttgggggcttggtgctggacatcaagcggaaggccccctggtactggagcgactaccgagatgcactcagcttacagtgtttggcttcctttctgttcctgtactgtgcctgcatgtcacctgtcatcacctttgggggactgcttggagaagccactgagggacgcataagtgcaattgaatccttgtttggagcttccatgactgggattgcttattccttgtttgcgggacaggctctcaccatcctgggaagtactggaccagtgcttgtgtttgaaaagattttgttcaaattctgcaaagactatgctctttcatacctctccctgcgagcttgtattggactgtggaccgctttcctgtgtattgtccttgtggcaactgatgccagttcccttgtctgctacattacccgtttcactgaagaagcatttgcctccctaatttgcattattttcatctatgaagcaatagaaaaactgattcacctggcagagacctaccccatccacatgcacagccagctggaccaccttagcctctattactgcaggtgtactctgccagagaatccaaacaatcacaccctccagtactggaaggaccacaacatcgtgacagcagaagtccactgggctaacctgactgtcagtgaatgccaggagatgcatggagagttcatgggatctgcgtgcggccatcatggaccctacactcctgatgtcctcttttggtcctgtattctctttttcaccaccttcatcctctcaagcaccttaaagacgtttaagacgagccgttatttcccaaccagagtacgctccatggtgagtgactttgctgttttcctcactatcttcacaatggtgattattgattttttgattggagtcccatcaccaaagcttcaagttcccagtgtgttcaagccaacaagggatgatcgcggatggattattaatcccattggccccaatccctggtggactgtgatagctgcaattatcccagctcttctctgtactatcttgatattcatggatcagcagatcacagccgtcattattaacaggaaggaacataagctcaagaaaggctgtggctaccacctggacctactgatggtggccatcatgctgggtgtctgctccatcatgggcctgccctggtttgtagctgcaactgtcttgtccatcacacatgtgaacagcctcaagctagaatctgaatgctctgctcctggagaacagcccaagttcctgggcatccgagaacagagagtgacaggccttatgatctttgtgctgatgggctgctcagtcttcatgacggctatcttaaagtttattccaatgccagtactctacggagttttcctttacatgggagtttcttcactacagggaattcagttctttgatcgtctaaagctctttgggatgcccgcaaagcaccagccagatttcatctacctgcggcatgtgccgctgcgcaaagtgcacctcttcaccctcatccagttgacctgtctcgtcctgctctgggtcatcaaggcatctccagctgccattgttttcccaatgatggttttggccttggtctttgtcaggaaagtcatggatctctgtttctctaagcgagagctgagctggctagatgatctcangcctgaaagcaaaaagaagaagttggatgatgccaaaaagaaggccaaggaggaagaggtcatagtccttgcaccaactgtatacctgggggcctcaaattacagaacataggaagggtcatgtgaaaagtcagcatgtctggaatcccgagggttatatttaggagctgggaagattacccccaaagatgttctcagctaagaatggattagggattcttgcttctgtctgttcttaatttttgggtttgacaaccacttattttttcctttgtttacaatctactcaccaggctcatacctacaatgtgaacatacagtatgcccttattagcagattcaatggctcacattctttcaaaaggtctaatttgacaaatacataagacccattatttcctagaatgtttgtaatatatctaattgcaaatggtgctgtggttggcaccatgcaaagataacttgcataggactttctgtcttttttcatttccctcagcacttggcatcttgtcatctacacaatggaccctcaataaatggcctatatgtgcaaagaaagaatgtgtagcaaatgaaaataccagaccaagaaatgagtgagctgggaagtgtttccaaatacagttagtgcctaaaatagtgtcctttgaaaaaacttttaaaagacttttttttaggccaggcataatgggttatccctgtaattccagggcttttgggagttgaagctggaggattacttgaggccagaagtttgagactagcctaggcaatataatgagaccctgtctctacaaaaa

SEQ ID NO: 258310 - DNA, 489 bp, Homo sapiens
ggctatggaggcggcggcggttgatggttgaccgttggctccggggtgggggtcgccgttcgagtgatctgctcagacccgaccagagggcgcgggctgctgatgcttggcttggagcccgtgggggagacctagttcggctccgccatgccggccgccgggagtaacgagccggacggcgtcctcagctatcagagaccagatgaagaagctgtggtggatcagggtgggaccagtacaattctcaacattcactatgaaaaagaagagctggaagggatatcattaggatctaattgcctacatgggagatagtgctttgaacacggtgaagtccaatataaatattaacaagtaacctgttctttgagaatgtgatgtactcagttcagtgcgttaattcttgacaactgcctggaaatacaaataaatacaaaacttaaagagaaaataaaatacaaatagttttaaaaactcaaagctacaaaa

SEQ ID NO: 258311 - DNA, 421 bp, Homo sapiens
aatactataataggtaaaaccccttgctagagaattagccaatctttttgatcaaattcatcagttttccagtttcttgtgggttttcttcaagtggtcttcattcataaatttttcctcccatgaaactacttctacagagtagctttttctctgagaataaagaaatctttttcttctgcattcgtggttgtctatatatatttctaaagttgttaggtaaggaagaatgttatttctgttctaagtgtgaggctagagcagacctttctctttggttgatttcctagacacaccatctcagcgtgttcagttcattcttggcaccgaggaagatgaagagcatgtgcctcatgagctgtttacagagctggatgagatctgtatgaaagagggatttttagggggaaacgggtccagt

SEQ ID NO: 258312 - DNA, 3839 bp, Homo sapiens
  misc_feature (3036)..(3036): n is a, c, g, or t
aatactataataggtaaaaccccttgctagagaattagccaatctttttgatcaaattcatcagttttccagtttcttgtgggttttcttcaagtggtcttcattcataaatttttcctcccatgaaactacttctacagagtagctttttctctgagaataaagaaatctttttcttctgcattcgtggttgtctatatatatttctaaagttgttaggtaaggaagaatgttatttctgttctaagtgtgaggctagagcagacctttctctttggttgatttcctagacacaccatctcagcgtgttcagttcattcttggcaccgaggaagatgaagagcatgtgcctcatgagctgtttacagagctggatgagatctgtatgaaagagggagaagatgctgagtggaaggaaacagccaggtggctgaagtttgaagaagatgttgaagatgggggagaacgctggagcaagccttatgtggcaaccctttcattgcacagcctgtttgagctaaggagctgccttattaatggaacagtcctcctggatatgcatgcaaatagcatagaagaaatttcagacctgatcctggatcagcaagaactgtccagtgacctgaatgacagcatgagggttaaagtgcgggaagcccttctcaaaaagcatcatcatcagaatgaaaagaagagaaacaacctcattcccattgttcgctcctttgctgaggttggcaagaagcagtctgatcctcatttgatggataaacatggtcaaaccgtgtctcctcagtctgttccaactacaaatcttgaagtaaaaaatggagtgaattgtgaacatagtcctgtggatttaagcaaggtagaccttcatttcatgaaaaaaattcctactggggccgaggcctccaatgtcctggttggagaggtggatattttggaccgtcccattgttgcctttgtgaggctgtctccagctgttcttctctcaggcctaacagaagtgccaatcccaacaagatttttgtttatcttattgggtccagtagggaaaggtcagcagtaccatgagattggcagatccatggccaccatcatgacagatgagatttttcatgacgtagcatataaggcaaaagagcgagatgatctcctggcggggattgatgagttcctagaccaggtgacggtgctccctccaggagagtgggatccctccattagaattgagccacccaaaaatgtcccttcccaggagaaaaggaaaatgcctggagttccaaatggaaatgtttgccacatagaacaggaaccacatgggggtcacagtgggccagaacttcagcgcactgggcggctatttgggggcttggtgctggacatcaagcggaaggccccctggtactggagcgactaccgagatgcactcagcttacagtgtttggcttcctttctgttcctgtactgtgcctgcatgtcacctgtcatcacctttgggggactgcttggagaagccactgagggacgcataagtgcaattgaatccttgtttggagcttccatgactgggattgcttattccttgtttgcgggacaggctctcaccatcctgggaagtactggaccagtgcttgtgtttgaaaagattttgttcaaattctgcaaagactatgctctttcatacctctccctgcgagcttgtattggactgtggaccgctttcctgtgtattgtccttgtggcaactgatgccagttcccttgtctgctacattacccgtttcactgaagaagcatttgcctccctaatttgcattattttcatctatgaagcaatagaaaaactgattcacctggcagagacctaccccatccacatgcacagccagctggaccaccttagcctctattactgcaggtgtactctgccagagaatccaaacaatcacaccctccagtactggaaggaccacaacatcgtgacagcagaagtccactgggctaacctgactgtcagtgaatgccaggagatgcatggagagttcatgggatctgcgtgcggccatcatggaccctacactcctgatgtcctcttttggtcctgtattctctttttcaccaccttcatcctctcaagcaccttaaagacgtttaagacgagccgttatttcccaaccagagtacgctccatggtgagtgactttgctgttttcctcactatcttcacaatggtgattattgattttttgattggagtcccatcaccaaagcttcaagttcccagtgtgttcaagccaacaagggatgatcgcggatggattattaatcccattggccccaatccctggtggactgtgatagctgcaattatcccagctcttctctgtactatcttgatattcatggatcagcagatcacagccgtcattattaacaggaaggaacataagctcaagaaaggctgtggctaccacctggacctactgatggtggccatcatgctgggtgtctgctccatcatgggcctgccctggtttgtagctgcaactgtcttgtccatcacacatgtgaacagcctcaagctagaatctgaatgctctgctcctggagaacagcccaagttcctgggcatccgagaacagagagtgacaggccttatgatctttgtgctgatgggctgctcagtcttcatgacggctatcttaaagtttattccaatgccagtactctacggagttttcctttacatgggagtttcttcactacagggaattcagttctttgatcgtctaaagctctttgggatgcccgcaaagcaccagccagatttcatctacctgcggcatgtgccgctgcgcaaagtgcacctcttcaccctcatccagttgacctgtctcgtcctgctctgggtcatcaaggcatctccagctgccattgttttcccaatgatggttttggccttggtctttgtcaggaaagtcatggatctctgtttctctaagcgagagctgagctggctagatgatctcangcctgaaagcaaaaagaagaagttggatgatgccaaaaagaaggccaaggaggaagaggtcatagtccttgcaccaactgtatacctgggggcctcaaattacagaacataggaagggtcatgtgaaaagtcagcatgtctggaatcccgagggttatatttaggagctgggaagattacccccaaagatgttctcagctaagaatggattagggattcttgcttctgtctgttcttaatttttgggtttgacaaccacttattttttcctttgtttacaatctactcaccaggctcatacctacaatgtgaacatacagtatgcccttattagcagattcaatggctcacattctttcaaaaggtctaatttgacaaatacataagacccattatttcctagaatgtttgtaatatatctaattgcaaatggtgctgtggttggcaccatgcaaagataacttgcataggactttctgtcttttttcatttccctcagcacttggcatcttgtcatctacacaatggaccctcaataaatggcctatatgtgcaaagaaagaatgtgtagcaaatgaaaataccagaccaagaaatgagtgagctgggaagtgtttccaaatacagttagtgcctaaaatagtgtcctttgaaaaaacttttaaaagacttttttttaggccaggcataatgggttatccctgtaattccagggcttttgggagttgaagctggaggattacttgaggccagaagtttgagactagcctaggcaatataatgagaccctgtctctacaaaaa

SEQ ID NO: 258313 - DNA, 2286 bp, Homo sapiens
ggctatggaggcggcggcggttgatggttgaccgttggctccggggtgggggtcgccgttcgagtgatctgctcagacccgaccagagggcgcgggctgctgatgcttggcttggagcccgtgggggagacctagttcggctccgccatgccggccgccgggagtaacgagccggacggcgtcctcagctatcagagaccagatgaagaagctgtggtggatcagggtgggaccagtacaattctcaacattcactatgaaaaagaagagctggaaggtcacagaactctgtatgtgggagttcggatgccgcttggccggcagagccatcggcatcaccgcactcatggccagaagcaccggagacgagggcggggcaaaggagccagccagggggaggaaggcctggaagccctggcccacgacacaccatctcagcgtgttcagttcattcttggcaccgaggaagatgaagagcatgtgcctcatgagctgtttacagagctggatgagatctgtatgaaagagggagaagatgctgagtggaaggaaacagccaggtggctgaagtttgaagaagatgttgaagatgggggagaacgctggagcaagccttatgtggcaaccctttcattgcacagcctgtttgagctaaggagctgccttattaatggaacagtcctcctggatatgcatgcaaatagcatagaagaaatttcagacctgatcctggatcagcaagaactgtccagtgacctgaatgacagcatgagggttaaagtgcgggaagcccttctcaaaaagcatcatcatcagaatgaaaagaagagaaacaacctcattcccattgttcgctcctttgctgaggttggcaagaagcagtctgatcctcatttgatggataaacatggtcaaaccgtgtctcctcagtctgttccaactacaaatcttgaagtaaaaaatggagtgaattgtgaacatagtcctgtggatttaagcaaggtagaccttcatttcatgaaaaaaattcctactggggccgaggcctccaatgtcctggttggagaggtggatattttggaccgtcccattgttgcctttgtgaggctgtctccagctgttcttctctcaggcctaacagaagtgccaatcccaacaagatttttgtttatcttattgggtccagtagggaaaggtcagcagtaccatgagattggcagatccatggccaccatcatgacagatgagatttttcatgacgtagcatataaggcaaaagagcgagatgatctcctggcggggattgatgagttcctagaccaggtgacggtgctccctccaggagagtgggatccctccattagaattgagccacccaaaaatgtcccttcccaggagaaaaggaaaatgcctggagttccaaatggaaatgtttgccacatagaacaggaaccacatgggggtcacagtgggccagaacttcagcgcactgggcggctatttgggggcttggtgctggacatcaagcggaaggccccctggtactggagcgactaccgagatgcactcagcttacagtgtttggcttcctttctgttcctgtactgtgcctgcatgtcacctgtcatcacctttgggggactgcttggagaagccactgagggacgcataagtgcaattgaatccttgtttggagcttccatgactgggattgcttattccttgtttgcgggacaggctctcaccatcctgggaagtactggaccagtgcttgtgtttgaaaagattttgttcaaattctgcaaagactatgctctttcatacctctccctgcgagcttgtattggactgtggaccgctttcctgtgtattgtccttgtggcaactgatgccagttcccttgtctgctacattacccgtttcactgaagaagcatttgcctccctaatttgcattattttcatctatgaagcaatagaaaaactgattcacctggcagagacctaccccatccacatgcacagccagctggaccaccttagcctctattactgcaggtgtactctgccagagaatccaaacaatcacaccctccagtactggaaggaccacaacatcgtgacagcagaagtccactgggctaacctgactgtcagtgtaagtctgggagctgccagatgtcctagcattgtgaccacaggtttaggagggacttctaagtgaaggggaggagtagccctttggccaaactctggcatttaccgaaataaagctttttaaaaacca

SEQ ID NO: 258314 - DNA, 433 bp, Homo sapiens
gagtcaaacttttgtaatgactgactgaaaaattagaatgtgatggggcctacagaggggcctcagctcctcaggtctgaagtatgcaaagaagcagcaaggcagctcctgacagcctttaaaccagttgttctaaaaacatttaactgagtatttggctgttttcctcaggaatctttttaatttttcccctcagctgcaggtgtactctgccagagaatccaaacaatcacaccctccagtactggaaggaccacaacatcgtgacagcagaagtccactgggctaacctgactgtcagtgtaagtctgggagctgccagatgtcctagcattgtgaccacaggtttaggagggacttctaagtgaaggggaggagtagccctttggccaaactctggcatttaccgaaataaagctttttaaaaaccaat

SEQ ID NO: 258315 - DNA, 439 bp, Homo sapiens
tctcatattttatctaacctcctaggtcaaagatagtgagacaaaaaggaattgctcaaatactgagatgcatgtcaactcttccaacaacctccagaatttactgagcctgtaacacagcttttgtaatccttttctgtgaaatccagtactgtgtcagcttcgttagggtctaaagtgtacctttcataaaggacctcaagatttattttcctgagctttaaatgagtgaaaatgtgttttgttgaaacttcccaagaagtaactgcattttctatggaatcttccattgtttatgggcctgatgaaagcatttggcacttaatgattcccagactatttcaactttataaaaaatcaagaaaaagaaaaaaaaggtgaaaagtaaatgttttgaatgctaacaataaaatatgtggatttttaaaccttacaaaaa

SEQ ID NO: 258316 - DNA, 445 bp, Homo sapiens
tgatccactcgctcctcagcttaaagacatggtcaaagatagtgagacaaaaaggaattgctcaaatactgagatgcatgtcaactcttccaacaacctccagaatttactgagcctgtaacacagcttttgtaatccttttctgtgaaatccagtactgtgtcagcttcgttagggtctaaagtgtacctttcataaaggacctcaagatttattttcctgagctttaaatgagtgaaaatgtgttttgttgaaacttcccaagaagtaactgcattttctatggaatcttccattgtttatgggcctgatgaaagcatttggcacttaatgattcccagactatttcaactttataaaaaatcaagaaaaagaaaaaaaaggtgaaaagtaaatgttttgaatgctaacaataaaatatgtggatttttaaaccttacaaaaa

SEQ ID NO: 258317 - DNA, 474 bp, Homo sapiens
tgaaaaagtgctgctttggaaatggagaaatattcaaaagtatggtgtgatgttttcaagtggattgtgattatagtctcaatttgttgatcttgacctctagtggacaggtgcaggcttactctttgttcagtcttagtaaatgaggctcaagggaaccctgtgttcacatctgaatggatgaaatgtaggtatgggtactgtgtcctctcttgcagtatgggcacaaaactgtctttaaaaaagagacaagtagataactaacatgtcgatcttcctgtgatgaatggagaagcctgtggataatacacagaacaaatgaacgctggaaaacactaaggctcatgtaattagagataaccgtatctgtgaaactaactacaggtcctaagttatatgatactgaaagtcgtttatttattttttaatgaaaaacaatacccttgaataaaccttggatgaagttttatgaga

SEQ ID NO: 258318 - DNA, 641 bp, Homo sapiens
gcaaaaatccaagtgagggtacatacagcatttcactgtgtttttagtgttgatcttgcaaagcgaatgcttttatcaccgagttagctgcccttgatataatagagatgatttgttttggaacatagcacaagtgttacaggtttcttgcatatatcaccaacaaattctacacagtaacttcttgacataattttaacattctcgaaaagcgtgctcttttgtttaactctctcaacaacactgacccaggcaggataagcgatcctgtagattatcaagagtaggtgatttatttcatcatggtcaaaacatatacaaaatctgccttcaaacccatctgttcctagaggtagagatagatacatatttatacaaaatagagatatgtatttatacaaaaatagaagggagccatgggattttgaggtatgctgtgaaattcctactatttatcttttgtgtttgactatccgtagggctgtaagcttactcagagctcacatagatgcgtccaggtactgtaagtcaacgactgtgcttggtctctgccctgttcttgttctgtgaagtgaagaaggcctcagatgcatttggtttggtgaggctagaagcacttgtatttgctacctctgtgttac

SEQ ID NO: 258319 - DNA, 217 bp, Homo sapiens
aactttgcagggatttcatcgctctggaatacgaatgtggcaaaaaatcccattgtgtctagtgggggcgaaagagaataacaggcaagcagcaaatgcttgtcagctttctcatagggtagctttccttttaacacgtgtttatccatgacagtttctgcttcatacttgaaggcattgttgaggaggagaggatcctgaagatggtgaatctact

SEQ ID NO: 258320 - DNA, 217 bp, Homo sapiens
gtataagcatccataatctttgttttttgagaacagttatataattacagaaaaatgtgaagatagtacagaaaattcctatatacgctgaacccaattacccctattattgacaacttacgttagtatggtacatttagttaatgaaccaatattaatgctttattattattattattattattattgtaaacttttttttaagttctggagtaca

SEQ ID NO: 258321 - DNA, 450 bp, Homo sapiens
tagaaatataccagtttctctcccaaagtggagagaaagggatgttatcagatgactttagctgaatggaaatatcccttttttcctatttaatttttctccaattttacagagcatttttttcatattttgttttacagtcactaaaaaatttggattatctgtagttccaacttctgaccaccaatcccactccaaaatcagggaggcagcaagggttatgagaagtacacagatctctcaaacaggccaatgtctaagaagagtatttcttaaaaatttttttcttttcttattacaattatgactacataagaagggtatttcttgaatggagatctgtgttctctcagactctagtctcagttgaactccagtctcagctctgacactaaatagtgttaaaaactcagggttccaatttcctcttctgcagaatcaaggtgtgcc

SEQ ID NO: 258322 - DNA, 509 bp, Homo sapiens
ctctgttacttgccttctctacaaaactgcttttctgactaataaaggcatggagtagtttttgtaggcaaggagaaacaattctgggaaaaagctttgtaaggagcaatattaatagacatctatgcccaaaatttgattcctgtggtattttccctacaaatttcttataggctagttcaaggagaaaagcatcataaagtttgaaagaccagctaaatcagtggaaattatactctcccctttcccattaagaactctattctcttactatgaaaacaccactgttctttcttatctcagagtgcagccttttctgtatactgatgccaaatgggtaacattttagtgagacatttgaagttgtgatatgcaactcggtgggggacaaacaaggtcatttaaaaggtctcttcattgagaacatcagagctttcaaaagaggcacacagcctttcccgcataattgggggtaaatgaagaaaaagcccataaagtacaaaaattaa

SEQ ID NO: 258323 - DNA, 688 bp, Homo sapiens
ctctatccaaagggaggtgaccttgtcctcagactggagtgaaacatgatacactaaatcttgttataacagattgacgcctaccctgggaggggaagtttttcttaatgaaggccattagctagtttgcatgattacatttatccatgctccttatctatctctccacacctgcccttctgaggcacacaaagacatcctccttgacacactcctcctacccaggtgttattgatgtgttgtagagggtaacctctgccctcaagaatgtgattcaacagtctgtgaatctgtggtttgcctgtcccacaggattattgtggggatgaacattaaaatgagatcatatacattaaatctaatgcattatgtaaatgtaaggtaatgttatgtttctaagcctctagacattttccatctttggaaaataatagaacaatgtcaccacaagacaaatgttcagctgttcacagaggaagttgaactctgaccccccttgagcgttccacacatttgttaacatccatttctcgatgatgtccatttatttaacacctctgatcaataacctcgtttctccccagtctctcttttactagcctcttcggtagatttaattaaagtaatgcactttatggggatatgaaaccaggcacttgattatgtcacttcctggtgcagttcctca

SEQ ID NO: 258324 - DNA, 650 bp, Homo sapiens
  misc_feature (93)..(93): n is a, c, g, or t
  misc_feature (140)..(140): n is a, c, g, or t
  misc_feature (172)..(172): n is a, c, g, or t
  misc_feature (243)..(243): n is a, c, g, or t
  misc_feature (251)..(251): n is a, c, g, or t
  misc_feature (298)..(298): n is a, c, g, or t
  misc_feature (386)..(386): n is a, c, g, or t
  misc_feature (467)..(468): n is a, c, g, or t
  misc_feature (608)..(608): n is a, c, g, or t
aatggattggaatggattgcaatggaatgaaatggaatggaatggaatggaatcaatcattccgagtggaatggaagggaatgtaatggagtngaaagaagggaatggaatcaacccgagtggaatgcaaggcaatggantggaatggaaaggaatggaatggaatcaactngattgcaatggaatggaatggaatggaatggaatggaattaatcggaatagaatggaatggaatggaatgnaatggaanggaatggaatcaacacgagtgcaggggaatggaatggaatggaatgnaatggaatggaataatccggaatggaatggaatggaatggaatcaactccattgcaatggaatggaatggaatggaatggaatagaanggaatggaattaacccgaatagaatggaatgcaatagaatggaatgcaacggaaccgaatggagtggaatggaatggaatnnaatcaacccgagtacaggggaatggaatggaatggaatgcaatggaatggagtcatccgtaatggaatggaaaggaatggaatggaatggaatggaatggaatggaatggaatcaactcgatggcaatcgaatggaatgnaatggaattaacccgaatagaatggaatggaatggaatggaa

SEQ ID NO: 258325 - DNA, 553 bp, Homo sapiens
aaagtggtgagtgcctctaagatcatacttggcacttgggcatgcacttttcaagaaatatagggagttgatgcccatggggccatgtaaaagtacaatgagaaggcagctgtctgcaacccaggaagagagccctcaccaggaaacaaatctgctggaatcttaatcttggactgtccagtctcctggaactgtgcgaaataaacgtctattgtttaagccatatttggtattttgttacggcaaccacagctaatataataaatagttccaataccataagaatctcttgcgttgctgttttataatcaccttccatttcaaattttgtcatttaaaaaatagtacataaatggaattttacagtatgtaactctttagcattggtttttccacccagcataattccctggagatccatccaagttggtacacatatcaataggttgttcttttttattgccaagtaatagtccacgatgtgtttgtaggacagtttgtttaaccactcaacaaactgaaagatatttgggatgattctagtgttggccat

SEQ ID NO: 258326 - DNA, 562 bp, Homo sapiens
gtcaaaagttatttagaaaagcatctgtgcgcccccgtttcaacactaggcagaggccccagtcctgccacccgcaggctggtacactggtggtcagagaaggttaagctccagagttccatggctcccaaccttcctagagccctccctcctgcctggtaacccaccattgcgctgcgtcttgcccaggtgtcctggtgggcaggggcaggagttaaaggtggtgccaggaacaagaggtccttcctatattcctttcaggggacgtggcttctagggagcctccgcagcccaaagagaatgctgaaatgcagagtgccagaaggaggcatttgaaggaggcgcggatgagtggaaccagtactatcacctgaattccatccccgtcttcatgtctgcagccccgcgagacacacctgatgtttcttcctttaggtccccagagctgcaaggctgtggtctggaacactcagaaacgggcactgttcatttctcccatctagcagaacttctcaacttggaagaacttgccaccacactttaataaagcagcttaccttta

SEQ ID NO: 258327 - DNA, 353 bp, Homo sapiens
caggagctcccaacccctttgcaggctggctggccagagagagaatttcggacaggatttaggcctggaatttccctccaaatgggcggtgtcgatcagggtaaaatgaatacgtggacatttactacggagacaaagttggaaagaacctgctaggcagagggaacagcacagagtttccaggagtactgcctaaggagaacatgcgcgagaaggaagcccacacagaggagagcagagaccaagccctgcagacattgtccgggctgtgccaaagacagactcacccctggactcttcagtgatataagccaataaattacttttttgttgttgtttttgtcttaagcaag

SEQ ID NO: 258328 - DNA, 369 bp, Homo sapiens
ctgtgaggtccagctccaaccaatggagataggacacagcagtaaggacccagtgcataggggataaatattcctgtctttctttgttcagtgtggtctcgtggcaagattgctgacaagcagcaccttttctgcagtaagtaaaattgccttgctgtgaaaactttttgtctgaatgctgatttctccttgcggcaccaaggaacaagcattttgtttctaacaatggataaatgttggagaagatggatatgctaattaccctgatctgatcactagaaattgtatatattgaaatatcactatgtaccccactgatatgtacaattatgtgtcatttaaaaaataaaataaatagctggaaacagt

SEQ ID NO: 258329 - DNA, 455 bp, Homo sapiens
aactttttcctgaaatgcagattagtttgaaatgaattttatttacgggttcatttttaatgtttgaacctgcttctaggtagggttaaagttgggtgacttgatgactcacgaaatacacaactatgaagtttggaaagtgtggtggtatgcacctgtagtcccacctgctctggaggctaaagtgagaggatcacttgagcctaggaggtaaaggctgcagtgagccatggctgtgcacttgcactccagtatggacagcagagcaagaccctgtatcaaaaaacaaataaaaacaataataattttttttaattaaaggagaaaagtttgggaagtttgacttacatatttgatcctcgaatagggagttattttggttttggcattagatagttttgtagcttggttcatggcacttgagcagcaaattcatggcccttacactgaatact

SEQ ID NO: 258330 - DNA, 605 bp, Homo sapiens
tgtgaggactgtggtggaggactccgcttcatcccaagacatacaggcctgatcaacaattccgtgatagtacttgactttgtgtctcacgtgaattacacctttgaaatagaagcaatgaatggagtttctgagttgagtttttctcccaagccattcacagctattacagtgaccacggatcaagatggtaagttccactgctgttctctcaaaacagacccataatttcttttgatgcataaatatccctcatgggcatgtatttattgcaggtgctatgcagtcatatacgttatacactgcagaggtaatgcactggttgttgttcttgttctttcctaaaactcagaaagatatttttatattacttctcagcagtatgaataataagatgaaatgcttccctccactgtttatgtactcatgtattttgtataatcatataacaatatatcttaatgagtaagtccatattacttaccaatagaagtcagaaatcaataaaatgttattaaatgaattgaatttcaattgccccacttatgctgccatcctttttgcatgtcaaataaagcaaatagtaagaatttttaaaactataa

SEQ ID NO: 258331 - DNA, 657 bp, Homo sapiens
ccttttgaaaggttttcaagattgctgtcatatggggaaaaacatgcaaacttcaagcttggttctccaggacaccctcttagaaatgactcacgcccttgtgcagagaggaccttatttctccagttcctcctggtctgacctcctcattctagtgagccactaacagcagggctcagtgcactctgtggccatgagaaacaggaaaacagaaataaatgggcttctcatttttgggtgaaaccctgggttcttgcagtttcccctgaaatagatccaggtcacatgctcagtgttgtcatgaaactgaaatcagaggtagggaaagtccagatgtttgttctccaccagagaaaaaaaagggcggttctctttacctcattttctaaataatcttcctaaaaacaacaaacaaaaaagtgacatttgatgggaaggcatgtcttataatgagcacaattctcctcactggtcttgaagcccaaggctataaacagagtcatggctagggagctacagaatattagctcatgtgggaaaaggaagggagctgttggctagaactttgcttcatgtggggaaagcataaaaatattgtgggcagacttcagctttgtgtcccctggtaagtttgactcattagaacaaaacaagaca

SEQ ID NO: 258332 - DNA, 343 bp, Homo sapiens
ggtgcccttctacaagggccaggacctcctccaggccacagcagtcacctggatgatgagggctccaggaggcaccctcaaccctggaattctctttttcaaataagagatccaggtgagaaccgtgaggatgggcacttggacaggaagaggttgctttgtcccgagcagcaacaacgttggtcactcaagccttcaccaggttctgctccacacagaaggaaggaaagcccatctcatcaggccttgggcaccaacaacacaaatagttccttgctagcaatacattttccgatatgtttttgcttcttcctctaacgtttaaccttgggtatatttcaaa

SEQ ID NO: 258333 - DNA, 987 bp, Homo sapiens
tgtactatcacttgagagagacaagagtctgctagaaggtagagaccttgtatgctgttccctgatgcatcctctggctagcagtgcctgacacacagtaggtgtgcagtaaaggtgtgtcggatgactgagtgatctccaccctcatggagctcgcagtctgtgtggacaagacacagggcaggagaacagtgtaagcacagcctgaagaaatgaggatccagcctctgctttcacacctgtgatgacgggggtctcaccacctcctcgacagcaatgaacatgaaaggccttcttggcagcgagctcttcatcctgttgctcctgaacccaggacttctaatagcgtgcccatgaaatttactgaattaggaagggagggaggaaatattcctgcctgaggtctctgttttctgggcccccacgggccccctctgccccctgccccaggtcaccttacaaacaaagaccccaactcagggtctcggctcttcaggcatccacccccaagtccccttttgggagcagtgtcttcagccacctccctggacgcccttcccctagtaggagcccacagggccagcaggagagtcaccatccttgcctctccatggccccaaaagaaagtctgatcccctcagcctatccctgaaggccaggccaggacccacgaactggcaccaccccagccctgctcagccaccacgtttcccaaatctaggtgcccagcctccaggcctttgccctggaacttccctcttcctggaaggccctctctccctgcccccatcctggcagatgaaatccctaaaagcccacggcaaatgccgcaccctccatgcagccctcgcccaccctcgcaggcacagtccctccacgctggtttcgtgtccacagaacctttccgtggccagaggacccgaaacccccacggccctgtgtttttgagcccctgtgggctctggcgcgtgtcggtgcccagcctct

SEQ ID NO: 258334 - DNA, 635 bp, Homo sapiens
  misc_feature (140)..(140): n is a, c, g, or t
catatctagaccttgaagttttgatatcaaatgatctggtgtaatagacgtggctaaacagtgtgggacagtcaggagttttttaggaacattggcttgggagttggacagagctgcattctaaccttggctgtgccaantactcgccaagtgatctacggaatatgctagggaacatctctaaaatggtttcttcattcctaaaatgtcgggggtgcctattattggtgatgttgagaagcacagtgtccagctattcgggaggctgaggcaggagaatggcgtgaacccgggaggcggagcttgcagtgagccgagattgcaccactgcgctccagcctgggtgacagagcgagactctatctcaaaaaaaaaaaaaatctgattctcatgtttgtttttaaataatagctgtatctgaacaaccaagtagaatatgtctttgctccatagcatcattgctttaaacattctaagataaaattttagcagaattggcaaaatgactaaagtctttattttagacatcattcgcattgggttaagaatgtaacatcagaatatgtacaaacttacaatttttattctatttttaggttaaagccaagtaactcgcttttccattttatctcttt

SEQ ID NO: 258335 - DNA, 696 bp, Homo sapiens
gaaatgcccttttccaaggtctacctatttgcaaattataatcctctgtgcctggtttttgaagagaataatttataaacattgcacaatcctgtgtcttacattgcagagctccagtgttgtaaggtttgatgaaattaagcatgtcttcctttttgaaagataccaattttaattattttttcattacaaaataaatcaaattcagaacacctgtaataaattacaaacatgactgaaatactttacagtatcttccatcaagaggtagaatctctattcctcaacggcttgaatctgggcttgtcttgtgacttggtttgagcaaggaatctgatagaagtaatgttttgaatgttctcagctttggattcaagccctcttgaagcttctgttcttgcaggtaaagaagcataagctagcttgttggataatgagaaacatgtagcccagttgcccctgtcagtccaatttacaacaagtcaacccctagaagcagagctaggtgacctgcaaacaagcagatatgtgagtgagtgagtgagtccagttgaaaccagcagagaaaccatatagctgaacgaagccatgtagcccaagcagtcatcccccagaacattgagctaaataaagggttgtgttttcagtcttttaagtttctgggtgattctattatacagcacaaaatactgatgc

SEQ ID NO: 258336 - DNA, 684 bp, Homo sapiens
aaagaaagaaagaaatatgagaagaggacaaagagacatacatatccttaagaagtccagagatgcacaagttgcgtagcaactgatacatgctgtcaggggttaagcaagacacagaaaaattgtaggtgataagtaatattttaagaacttgtgtttaaattatttaggtaagacattatgtgtggttaaatatcagaacttgtgaaaaacagttaacaaaaaaacttggtatccgaatctctcttttacaaggaagccaagaaatatatacaattgtatattaaaatcagtggcagcattctttttaccacttatcatctatccatttgtttaacaaatacttttttggtgtctctcatgtgccaggatgctagaaataaagaaatgaatgaaataaagtccttgcccccaaaagctcactataaagtggataaaacaaatatgcaaataaataattacactatagattgataatcatcattccagagacattaacaaatccataaaagtacgaagtgacaagctctgcccataaggaaccagagggagcttgacctgagcatttgagttaggtctcgaagggtgaataggaatgtgccatgcagagaaaggacagaactttccacagagaacaaagaggttggactctatcccattaatgcagagtatcccaactgctgt

SEQ ID NO: 258337 - DNA, 553 bp, Homo sapiens
cagccaacaagaactgccagatgtatgagtgaggcatctttgaatctttgaccttccagccatccagtcctccagtggaggcaaccacatgagtgagggaacgcaggagaaattagcaaaggtatggcacaggcaagctcattgtgattttgtgaaatcatgaagaatcatgagaaagaataaaccactagaattttaagctcttacgtttgggataatcgacacctaaagacaaatgggctgctgccacaagaaaaatttaaaatatgtcaggcgcggtgtctcatgcccataatcctagcactttgggaggccgaggccggtggattgcctgagctcaggagttcgagaccagcctgggcaacagtgtgaaaccccatctctgctaaaatacaaaagaaattagcagggtatggcagtgtgtgcctgtagtcccagctactctggaggctgaggcaggagaattgcttgaacctggaaggcggaggttgcagtgagccaagatcatgccactgcactccagcctgggcgacagagcaagactccatctctc

SEQ ID NO: 258338 - DNA, 199 bp, Homo sapiens
cggcacgaggcgaacaagctactcagcctagaagtgtcatgatttgttttacaaaacaaggatgataattatcatagcgcctaccacataggttttgagaatcaagtgagttagtacatagtgcttggaacagtgcctgatacacagtaaacttcataagccttttctttttgttattatttaatgtgctcacatcaaa

SEQ ID NO: 258339 - DNA, 452 bp, Homo sapiens
tcactgtgtgccgggccaccgttttcccttccagccaccggcaccactagcctttgatctttccaaggccagagggggcatgggagctgctgggctggggccgctgagcctcctggagtctgatgtggcttccatgagagtcaggccaggaccacaggtgcctcctgagtccgtgggtctgggcccaggccctggtgctctatgagtgacacttgggagttaccgtatgtgccaaggagcagtgagacacctgtggtaatggcgagtgacctgtcctatgggctgcacagctggaggatggtagaattttggagcaatagtgggcagtgtgttgttggggaagaacatgggcttctgaatcagaaaaatatgaattcaaaacctaccgctgtctcttgttagtcaggggaccttggccaagtctcaataaatgtttcttcatctggagatga

SEQ ID NO: 258340 - DNA, 430 bp, Homo sapiens
gcaagtcccatcttccgtgaatggtggcaggcaaaaagagagtttgtgcagggaaacccccatttttaaaaccatcagatctcttgagactcattcactatcaagagaacaacacaggaaagacgcacccccataattcaatcacctctcaccaggttcctcccacaaaacgtggaaattgtgtgagctacaattcaagatgagatttgggtggggacacagccaaaccatatcacaagatcactcagcaaataaaggatggagctggaattcaagcattcttcccctcatgaccctcccagtggctgagggatggcatcttgtggcagaacttggtgtccaccttgtcctagccaaggtcacgtggcagggagtgtcacacctggattcagcccagttgtgctggcctgcagagctctaccaccctaaa

SEQ ID NO: 258341 - DNA, 229 bp, Homo sapiens
gatcaggtttatgatttcaaatgatgcctctggctgtaggttcaagaatggatttcagtgagcaacgtggatgtggggagaacaactagagagtgttgtaacagtccacatacgagatgtccataacttggacatggcagtggggatggagagaagttagcagatacaagaaatgtttagtcgatgactgacagagaggttagagaatgggagaagtcaaggatgactc

SEQ ID NO: 258342 - DNA, 601 bp, Homo sapiens
tgtctctgaaaaaggactgctggttttccacaatctttgagaattgtggttggattgggaagtatattagttccttcttaagctgctatgaagaaatacccaagcctgggtcatttatatagaaaagaggtttaattgattcacagttctgcatggctggggaggcctcaggaaacttacaatcatggtggaaggggaagcaagcacatccttcttcacatgatggaaggaaggagaagtgctgagcaaaagggggaaaaccccttataaaaccatcagatctcatgagaactcactcactatcatgacaagagcagcatgtgggtaactgcccccaagactcaattacttctcactgagtcccttccacaacaggtagggattatggaaattataattccaggtgacatttgagtggtgacacagtcaaaccatatcagaaagtgttactaaaaagaactgaaatgtctggccaatattgtcactctttctttccatgatatttattctctgctgagttccctgcattttattccctaattctttcaccccatagcttcttggaaaatgcatcacaaggttccaagtatttagcaatttc

SEQ ID NO: 258343 - DNA, 137 bp, Homo sapiens
tttttttttttcaagtgaattaccttaccagagaagtgtcaatcaatttagcagcaaaataagccaacgtagccagagggagcagagggtctggaactgtggctcctgaacctgtctggtcattagaatcacctggg

SEQ ID NO: 258344 - DNA, 534 bp, Homo sapiens
ggagcaaagactatctctgggacctgaaaaccattctttgaaattctttccctggtgtgcctgagtctttcttaacttggtggttccatgttgaaggagttgttaaatgcagccccgggggcgggggatgggtggggtggtgggggaagttctgaactgtagtttaaaaagctttcacaaacattttggttactcagtttggatggtgttctttaagtgagttttattgactcgtggaatcattgatgacagattaataatttaaggttcaagtctggcattgctatagagaaatacctgagcatttggcaggccaaggtgggcagatcaggaggtgaggagatcaagaccatcttggccaacatggtgaaaccccatctctactaaaatacaaaaaattagccaggcgtggtggtgcgtgctacttgggaggctgaggcaggtgaattgcttgaacccgggaggcggagcttgcagtgagctgagattgcgccactgcactccaccctggtgacagagcaagagtctgtctca

SEQ ID NO: 258345 - DNA, 396 bp, Homo sapiens
ctctcctgcttctgttatatttatttttgttatgttgtttatccaaagggggcattgattataacagttagtaaaatactggtgtggctattcacctttgttagcttatatgtcttaagtggtacaaacaaagccaagtaagtgtctgatgtgagatccttaaaaccgggaggcctgggtgctccttcttcccctgactccagtattcctgccctggacagtgagcccacctgaagctctttcctgaggtcccacaaagaagggtctgatggttttatcaggaaaaaaataattaattttttaaaattttaaatggaaaaaattaaattagttaaaaattaaaaatggctcttttccttgtttctcttgttttttgatgaccaatacctaaaaaag

SEQ ID NO: 258346 - DNA, 746 bp, Homo sapiens
agacacatgcataaacatgtccttgaagttttggaaaaatgtagataaagagactaggatggtattagattctcattggcatccctcaggaaatggatttgaacttagatttctgtatcttgctaacctagtaattaggaatgaggttcacataaacctgattcctggacattcatggactgagaaagtttatctcctttataagttacctctttgcttcttaaatggttacttgcatatatactgcagcaaagtaagtaaaccaagaaagaggaatacatgagacctaagacacagtggattcaatccagagaagtaatgaagggcagcatcaggataactgaagagcagccagttcagaagagagaaggtggtaaaattcctccaagcaggtcttctccatgatgggggagagggaggcaaggagcaactccatgcaatacagttacatttgagaataagggggctgggcacagtggctcacgcctgtaatcctagcactttgggaggccaaggtgtgcagatcatgaggagatcgagaccatcctggctaacactgtgaaaccccgtctccactaaaaatacaaaaaattagccaggcgtggtggtgggcgcctatagtcccagctactcaggaggctagggcaggagaatggcgtgaacctgggaggcggagcttgcagtgagccaagatcatgccactgcactccagcctgggtgacagagtgagactccatctcaaaaaa

SEQ ID NO: 258347 - DNA, 2335 bp, Homo sapiens
agccatgcgtctctgagcgccccgagcgcgcccccgccccggaccgtgcccgggccccggcgcccccagcccggcgccgcccatggccgaggcccccccgcgccgcctcggcctgggtcccccgcccggggacgccccccgcgcggagctagtggcgctcacggccgtgcagagcgaacagggcgaggcgggcgggggcggctccccgcgccgcctcggcctcctgggcagccccctgccgccgggcgcgcccctccctgggccgggctccggctcgggctccgcctgcggccagcgctcctcggccgcgcacaagcgctaccgccgcctgcagaactgggtctacaacgtgctggagcggccccgcggctgggccttcgtctaccacgtcttcatatttttgctggtcttcagctgcctggtgctgtctgtgctgtccactatccaggagcaccaggaacttgccaacgagtgtctcctcatcttggaattcgtgatgatcgtggttttcggcttggagtacatcgtccgggtctggtccgccggatgctgctgccgctaccgaggatggcagggtcgcttccgctttgccagaaagcccttctgtgtcatcgacttcatcgtgttcgtggcctcggtggccgtcatcgccgcgggtacccagggcaacatcttcgccacgtccgcgctgcgcagcatgcgcttcctgcagatcctgcgcatggtgcgcatggaccgccgcggcggcacctggaagctgctgggctcagtggtctacgcgcatagcaaggagctgatcaccgcctggtacatcgggttcctggtgctcatcttcgcctccttcctggtctacctggccgagaaggacgccaactccgacttctcctcctacgccgactcgctctggtgggggacgattacattgacaaccatcggctatggtgacaagacaccgcacacatggctgggcagggtcctggctgctggcttcgccttactgggcatctctttctttgccctgcctgccggcatcctaggctccggctttgccctgaaggtccaggagcagcaccggcagaagcacttcgagaagcggaggatgccggcagccaacctcatccaggctgcctggcgcctgtactccaccgatatgagccgggcctacctgacagccacctggtactactatgacagtatcctcccatccttcagagagctggccctcttgtttgagcacgtgcaacgggcccgcaatgggggcctacggcccctggaggtgcggcgggcgccggtacccgacggagcaccctcccgttacccgcccgttgccacctgccaccggccgggcagcacctccttctgccctggggaaagcagccggatgggcatcaaagaccgcatccgcatgggcagctcccagcggcggacgggtccttccaagcagcagctggcacctccaacaatgcccacctccccaagcagcgagcaggtgggtgaggccaccagccccaccaaggtgcaaaagagctggagcttcaatgaccgcacccgcttccgggcatctctgagactcaaaccccgcacctctgctgaggatgccccctcagaggaagtagcagaggagaagagctaccagtgtgagctcacggtggacgacatcatgcctgctgtgaagacagtcatccgctccatcaggattctcaagttcctggtggccaaaaggaaattcaaggagacactgcgaccgtacgacgtgaaggacgtcattgagcagtactcagcaggccacctggacatgctgggccggatcaagagcctgcaaactcgggtggaccaaattgtgggtcgggggcccggggacaggaaggcccgggagaagggcgacaaggggccctccgacgcggaggtggtggatgaaatcagcatgatgggacgcgtggtcaaggtggagaagcaggtgcagtccatcgagcacaagctggacctgctgttgggcttctattcgcgctgcctgcgctctggcacctcggccagcctgggcgccgtgcaagtgccgctgttcgaccccgacatcacctccgactaccacagccctgtggaccacgaggacatctccgtctccgcacagacgctcagcatctcccgctcggtcagcaccaacatggactgagggacttctcagaggcagggcagcacacggccagccccgcggcctggcgctccgactgccctctgaggcctccggactcctctcgtacttgaactcactccctcacggggagagagaccacacgcagtattgagctgcctgagtgggcgtggtacctgctgtggg

SEQ ID NO: 258348 - DNA, 633 bp, Homo sapiens
caaggtcccacaagaagtgccaagactatggctgggcatggtggctcacacctgtaatcccagcaccttgagaggccagggtgggaggatcacctgaggtcagtagttcgagaccagcctgaccaacatggcgaaaccccgtctctactaaaactacaaaaattagctgggcgtgatggtgtgtgcttataatctcagctactcgggagcctgagtagtgtgtcagttcctccctgccagccagtctgcctgggcgtggtagtccttccagcccctgggcttgtgctaagtttctttctgtaattgctccatctggctggtctgagaagcaggttcaaatggcaggagaatcacttgaacccaggaggcggaggttgcagtcagcagagatcgcgccattgcactcaagcctgggcgacaaagcaagactccatctcaaaaaaaaaaaaaaagtgccgagatgaaggagggtcgagagatctggtcctggcagacaagtgggactttgcccattgagaggcaccgatgggtctttagtccaaggctggtgcatggaatgacatggaaggaccagggtgctgtgttgctggggagggggaccgctcatttaatatggctgcacgcaaggcctgg

SEQ ID NO: 258349 - DNA, 717 bp, Homo sapiens
  misc_feature (565)..(565): n is a, c, g, or t
gttaatagctagctgaattcacacttcagtattctcccaacaggaaactcctttggtgggtgggggagccaaaggcatctgtattttcaggaggccctgcttaagtttggataatgtttatttctgtagctgctggttgtacaggcattttcagtttaaaataattttcatatcacttttgtaggccattaatttcttcagtaatttctcagcaactcatagcaccccagtaagatcatggcaaagctcacacatcacccacctgtatgattgtagaggggccaagggaaagcgtccgtcatcctgttaagggtttgttgaaaattgttgatgaaaagagtgaaactttgtaaaatatttaagagatttattctgagccaaatagaagtgaccatagcccatgacacagccctcagaagaccctgagaacatgtgcccaaggtggtcggggtacagcctagttttatacattttagggagacatgagacatcaatcaaatacacgtaaggtatacattggttcagtccagaaaggtgggacaactccaagtgggcagagagggtnaggtaggtttccttggtctttggctccctctttcgcttcctcttctctcggccttctggctgcctgttctttcctttcttctgatcggctctttttgcgtctccctttccgcgttctttgtcatctccattttcttctctgctcctcggcct

SEQ ID NO: 258350 - DNA, 184 bp, Homo sapiens
tctgagggggtttcttgtcagctcagcaggtttttgggttgcaggtttccacgtctatcaaatggggactatcatgcctacttcagaagagcatctgtgcagattgagtgaccccccagcagtgtctgcatgtagtaggtgctcagccatgctccccaggccaggacacagcgctgcccactcc

SEQ ID NO: 258351 - DNA, 543 bp, Homo sapiens
gaatgggtagagctgagtgggaaggagaagccaagccccaacaaagctccatagtccaccattggtggctagctatgtgctgagacttgttatagcagtagaaatggaggcctgtgtgtatgcctggactccagtgaactggggagatagacgtggcttgtgtatggctggtgtcacctcagattttaccttttgagaccaaggtgcctggtttctgtccccagtagttttattgtcttggtctgtaccatccacgtccttcccatcccctctttttgtcctctctcctctcaccttaaaggtttttcattttcagtttattgatttagttctaccctgtggtgggattcataatgggaaaagggagtttgaagtagctacagcctaagggtgattggaaggagttggggtggacacctgagttccttcccttcattttagagagaaccgtagtccgcggaattcttgatggctggtgggctagatgtagggttgaagaggcagctcccagctccaggctggagaattattgcctagtccaag

SEQ ID NO: 258352 - DNA, 809 bp, Homo sapiens
  misc_feature (808)..(809): n is a, c, g, or t
gtgcaatggctagtactatgtgtcaacttgtctaggctatactgctcagctgtgtggtcaaacagtagtctagatgttgctgtgaaggtattttgtagatgtgatcaacatttacaatcagttgattttaagtaaagcagtttaacttccaatatgtggatgggcctcatccaattagttgaaggtgttaagagaaaagaccaaggtttcctggaaaaggaattctaccacaagactaacataaaaatgcactgtgagtttcatgcctgctggcctgccttcactgtcctgggggaggcttggagagaccaggtggactggagtagactgttgagagacgctggtctggtgaagatgtccaggaaaccacgagcctccagcccattgtccaacaaccacccaccaacaccaaaagggaggttcccaagacaacccggaagggaaaagggacccatcaaggaagttccaggaacaaaaggctctccctaaaagaccgccgcttcaaaaaaacctgaggaatggagtgggccaacactatccagccactctgaccagccgaacgaggaactcaatcaaaatgagccatagcgggaccacaagggcaaggagaccaccaccttctccagtctctcttcggacagccagtaattcccgggcaaggccagagacttcaagtctatctgaaaagtctccagaggtctaaccccagataaatagccaacagggtgtagagtacattttacaccccaaagagtgtgccccatggtgatgaaaataaaatgaacatgttgtaaaatgaaaaaaaaann

SEQ ID NO: 258353 - DNA, 786 bp, Homo sapiens
  misc_feature (785)..(786): n is a, c, g, or t
tccctgggttcacggcaagggtggaaccggattctgcccggatggggatctggatgggggggtggggggttgatttgggaagcagagcacagcagcccaaatttgcttgtaatgtcggcggctacagaggaaaggccaagaatggacagattaataaagggccatctacaagccacgaataaggccatcaccagaagccaaccccgccagtccttgatctaggacttccagacttcaaaactcctgctggcctgccttcactgtcctgggggaggcttggagagaccaggtggactggagtagactgttgagagacgctggtctggtgaagatgtccaggaaaccacgagcctccagcccattgtccaacaaccacccaccaacaccaaaagggaggttcccaagacaacccggaagggaaaagggacccatcaaggaagttccaggaacaaaaggctctccctaaaagaccgccgcttcaaaaaaacctgaggaatggagtgggccaacactatccagccactctgaccagccgaacgaggaactcaatcaaaatgagccatagcgggaccacaagggcaaggagaccaccaccttctccagtctctcttcggacagccagtaattcccgggcaaggccagagacttcaagtctatctgaaaagtctccagaggtctaaccccagataaatagccaacagggtgtagagtacattttacaccccaaagagtgtgccccatggtgatgaaaataaaatgaacatgttgtaaaatgaaaaaaaaann

SEQ ID NO: 258354 - DNA, 855 bp, Homo sapiens
  misc_feature (854)..(855): n is a, c, g, or t
gtgcaatggctagtactatgtgtcaacttgtctaggctatactgctcagctgtgtggtcaaacagtagtctagatgttgctgtgaaggtattttgtagatgtgatcaacatttacaatcagttgattttaagtaaagcagtttaacttccaatatgtggatgggcctcatccaattagttgaaggtgttaagagaaaagaccaaggtttcctggaaaaggaattctaccacaagactaacataaaaatgcactgtgagtttcatgcctgctggcctgccttcactgtcctgggggaggcttggagagaccaggtggactggagtagactgttgagagacgctggtctggtgaagatgtccaggaaaccacgagcctccagcccattgtccaacaaccacccaccaacaccaaaagggaggaagtggaaggcatcctctcaaccctggcccagaagccctatcaaagttcccaagacaacccggaagggaaaagggacccatcaaggaagttccaggaacaaaaggctctccctaaaagaccgccgcttcaaaaaaacctgaggaatggagtgggccaacactatccagccactctgaccagccgaacgaggaactcaatcaaaatgagccatagcgggaccacaagggcaaggagaccaccaccttctccagtctctcttcggacagccagtaattcccgggcaaggccagagacttcaagtctatctgaaaagtctccagaggtctaaccccagataaatagccaacagggtgtagagtacattttacaccccaaagagtgtgccccatggtgatgaaaataaaatgaacatgttgtaaaatgaaaaaaaaann

SEQ ID NO: 258355 - DNA, 832 bp, Homo sapiens
  misc_feature (831)..(832): n is a, c, g, or t
tccctgggttcacggcaagggtggaaccggattctgcccggatggggatctggatgggggggtggggggttgatttgggaagcagagcacagcagcccaaatttgcttgtaatgtcggcggctacagaggaaaggccaagaatggacagattaataaagggccatctacaagccacgaataaggccatcaccagaagccaaccccgccagtccttgatctaggacttccagacttcaaaactcctgctggcctgccttcactgtcctgggggaggcttggagagaccaggtggactggagtagactgttgagagacgctggtctggtgaagatgtccaggaaaccacgagcctccagcccattgtccaacaaccacccaccaacaccaaaagggaggaagtggaaggcatcctctcaaccctggcccagaagccctatcaaagttcccaagacaacccggaagggaaaagggacccatcaaggaagttccaggaacaaaaggctctccctaaaagaccgccgcttcaaaaaaacctgaggaatggagtgggccaacactatccagccactctgaccagccgaacgaggaactcaatcaaaatgagccatagcgggaccacaagggcaaggagaccaccaccttctccagtctctcttcggacagccagtaattcccgggcaaggccagagacttcaagtctatctgaaaagtctccagaggtctaaccccagataaatagccaacagggtgtagagtacattttacaccccaaagagtgtgccccatggtgatgaaaataaaatgaacatgttgtaaaatgaaaaaaaaann

SEQ ID NO: 258356 - DNA, 255 bp, Homo sapiens
tatctttggttatttagctgtaaatgttatatgtgtttatacaagagtagttcatggttctcaaaggatacataacctctctcgtcactttcctcctctgacccagcagtaccctaactttcaatctttaacatcttacaatctgaccatattgtcagactaatactgggctggttttatttaaggctaaataagagctaactagatgaactaagaaaaatatctactaaaatctgctatgagcatatgtattgc

SEQ ID NO: 258357 - DNA, 309 bp, Homo sapiens
ttcatttttgtatatggtatgagagaggggcccaacttcatctttcgcatttggagatccaattattttagcacattttgttgaaaaaaagaactattttatgatcattaagttattttagcagctttataaaaattaattaatcataaaggtaaggaatttatttctaggctttcaatgatatcctattgatctataagatcaacagatttgatatgtttgatgatattctgttgtgtttatctttaaaacaataccacccagtcttgattactttactttgtagtaacttttaaaactgggatatgt

SEQ ID NO: 258358 - DNA, 427 bp, Homo sapiens
gtataaaagacaatcaagttttttctggtttctagaagattgaaaggtctcaaactgttcgcacttcagttgatgtgggagatgagtgagggtcagtcaagtgtagaggagacaacatagctaaaagccgagacacgggcatagtgatttctgaaaagtacaagcactgtgttgtggctggagcttgggtgttgaagagatacaaccaaagggagagatgaggctgaaatggaaaggataagccaggggcttcaggctgttaaagatgttgaatgataggctgtacttaagctttgaacatcctgaagattgcagagaatgaagaatttcaagtaggatgacatcaagtttataacattcaatgtgaaataggatgaaatgtggctaatcttttttaagatttttatattttctcttcattgaaaat

SEQ ID NO: 258359 - DNA, 355 bp, Homo sapiens
gcggccgctactactactactaaattcgcggccgtgcgaccaacatagctaaaagccgagacacgggcatagtgatttctgaaaagtacaagcactgtgttgtggctggagcttgggtgttgaagagatacaaccaaagggagagatgaggctgaaatggaaaggataagccaggggcttcaggctgttaaagatgttgaatgataggctgtacttaagctttgaacatcctgaagattgcagagaatgaagaatttcaagtaggatgacatcaagtttataacattcaatgtgaaataggatgaaatgtggctaatcttttttaagatttttatattttctcttcattgaaaat

SEQ ID NO: 258360 - DNA, 261 bp, Homo sapiens
cttgaagttttaatgaggaataatagccacatttggcctttttctccatgtacaaagctttacatttgtttgctttctggaacaaaaacaaaagtgtgtcatgttgtcagtcttgggctggacatgaaataaaagagtcaaattgagatggaatgtcagcaagaaggtttagttttggctgtggggtttccaagcgtgagcttcctggcccctgtgacactggaaagagtggctcctcccagaaggagctaacagcacagg

SEQ ID NO: 258361 - DNA, 289 bp, Homo sapiens
gctatgattgcaccactacactccagcctgggagacatagcgagaccctgtctcttaaaaaaaacaaacagaaacagtgggtgggaaaatacacatttttaaatattgagtcttcctatccattactttgttttatctcttcaattaaataggttttctttaatgtcttacagagttttgtgaatgtgtccagaaaagtcatacaaatattagttttgttcctggatataattttttttttttttgtagatgtaagtggtatatatatatttttgagacagagtctcac

SEQ ID NO: 258362 - DNA, 410 bp, Homo sapiens
aaatgtgaccaaggatgtgatagatctccacaatgaaaacttcaagacactgataaaaaaaattgaagaccacacaaaataatggcaaggcattccatgcctatggattagaagaatgaaaattgcttaaatgaccatattacccaaaacaatctacagattcaatgcaatcccacccaaaataccaacgatattttttacggaaatagaaaaaaatatcctaaaattcatatgggaccccaagagacctcaaataaacgaagaaatcctgaggggttgggggaagcaaacaaacaaagctggaggcatcactctgcctgacttcaaaatatactataaggctatagtaaccaagacaccgtgatattgttatagaaacttaaaggcttaaatggaagacttgaaactat

SEQ ID NO: 258363 - DNA, 680 bp, Homo sapiens
gggaaactgcccccatgatcgaattacctccacctcatctctgccttgacacgtggggattataggcattaatttcaagatgagatttgggtggggaaacaaagcttaaccatatcattctgccccagcctctcccaaatctcatgtccctttcatatttcaaaaccaatcatgccttctcaacggtcccccaaagtattaattcattccagcattaactcaaaagtccaagtccaaagtctcatctgagacaagacaacccccctcctccgcctatgtgcctgtaaaatcaaaagcaagttagttacttcctagatacaatgagggtacaggcattgggtaaatatgccccttccaaatgggagaaattggccaaaatgaaggggctataggccccatgcaattctaaaatccagtggggccatcaaatcttgaaactccaaaatgatatcctttgactccatgtctcacattcaggtcacactgatacaagaggtgggctcccatggccttggtcagctccacctctgtggctttgcagggtacagcctccctcccgactgctttcacaggctgatgttgagtatctgtggcttttccaggggtgtggtgcaaacagtcagtggatctaccatttgggggtctgtaggactgtggccctcttctcatagctgcactag

SEQ ID NO: 258364 - DNA, 337 bp, Homo sapiens
ctatgtataggattcggtatgatctgcgatttcaggcatccactagggtcttgaaacgtaacccttggataagggggtactactgtacttcataagggcaagggtggttatgtattaatagaaatattcttactcaagtatatgtgaatacatttttgtaaatattcatcaatttggagtataaaagagaaaatactgaggcttcccttcagctctactttccagagttaacaccattaaaatgttaatacctgtttttataggccccttctccatgcatttatatatgtgtataaagtagtattataatgtgtatgctacttttcagcttgattta

SEQ ID NO: 258365 - DNA, 303 bp, Homo sapiens
actgtatacaagcaccaagaagaatgtgacacgaacgccagagtcctcagatgaatgccctggctgtaatgagcagtaggcactgtcacatggccacccatggagggcctgtggcctgacgggagcgggagggcagctcggcagcccgccttagcgtgggcactcacacggagctgccacttgtagtttctacgaagctctgggctctccgctctgttttaaaaagaaaagaaacattgcaatatcagtcacaatggtaacaagagaatttctaaagcatctgctcagtttctcgaaattaaa

SEQ ID NO: 258366 - DNA, 351 bp, Homo sapiens
aaaaatgattatgaaggttatattgagtcagtggaagaagaaccttcaacatcaggatgtggtaagagccttacccattttatctcagagggccttctgttgcctgggacagcaatgtgaccaaaatggcatttggagaaactatggaaatggtccagctaaagggctatctcttgttctttagtcggttggatgtagagataagcacatgtagatcctacctacgtgaaagatggggggtgggggtaatgcgtattttaattagccagatctagccactttatgatgcatgcatattttcttttctttctttctttctttctttcttttttttgagacagagtcttgctc

SEQ ID NO: 258367 - DNA, 695 bp, Homo sapiens
aggggaaggaaggaagacggttcagtttagcctcttgaaaaatggatacatttgcaagaaggaggaaaaaaccagaatttttgaaaggaatcaagaaaagagttcagaattgcacgggacatgatagcaggaggaaagggaagatgaggtcagtttgcagtgccgaatgttgtgagaggtcaggaaggagctggactgtgtggggacaagtgtgttcagagattgtgctgtctgtggtatctaggagaaggttataagcaggatgggaagtgaagaaaaacacatggcatggagttgagcagtgagaggaaaacctcagtagtgtgctgagaaaggtttaacagctggctctccatgtgggtgagtgggtggaaaccctgatgtgtaccatttgctggattccagtgtgtaaatatttctaccatggccaatttcaagctacccatggttaataactgcctcacaagttccagaaaaacttagccatcagttctcacaagccgttatgagctggctacagtacatcactggaagaattgaaagataaatgcatatgttcatcttctaagccttatattatatgtaaggcattcttttgaacttaaaacaaatatgggcctggtatagtggctcacgccagcaatcccagcactttgggaggccgaggcaggcagatcacctgaggtcaggagttt

SEQ ID NO: 258368 - DNA, 432 bp, Homo sapiens
attctaagtgaagtacctcaggaatggaaaaccaaacatcatatgttctcactcatatatgagagttaagctatgagggcgcaaaggcatgagaatgacgcattggacttttgggactcaggggaaagggtgcggggtggtgagggataaaagactacacattgggtaggtgtaggcgcttagatggtgggtgcgccaaaatctcagaaatcaccactaacaaacttattcacgtaaccaaacaccacctgttccccaaaaacttattgaaataaaaatattttttaaagaaatgaaaaccaatcatgtccaaatcttgtacactaaatgtaaaacttcttactcattattattgcagaatataggtgttccagctcttgggtagaaactataatcagaaattttctcgtttccaattcctatcaagatcct

SEQ ID NO: 258369 - DNA, 866 bp, Homo sapiens
tttcgccatgctggccaggctgatcttgaactcctggactcaagcaatcctcccgccttagcctgccaaagtgctgggtttacaggcatgagctaccatacccagcctagcttttttttttttttaatatgaaaaaaaaatgtttggagccttcccactaaggaacaataagattaagggatttaaaagaattgattagtgacatgcacattgctgccccaggagaaaattctgctattactcatgagaagagccagcatgaagagctctgtgaggtctgaggtcacccttgtaactgcgctcggggatgtcaaagtcagcattgacacaactgtgaccataactcacctgttccaggctctcctgtgtactgcacacccatcctccttctcagtgttcccagcagctgtaggagctaagaagagtgaaagtagctatgaaagacaccatctgtagtttgtttgttccacaaactccggcctctttcctcttgggcacacactaacctgcgtgtcccagcccctggcagttagtgtggctgtagcatgtgggtggaaatgattcaggtatggcccacaggaagccccctgtcattctccacgtctgcctcttccctcatctacagaggactcagggaggactcagccacctaagagagccagaagctggaagggagctggatccctgaatgactgtgtggagcagagtcccctccttaccacctgcctccattggattgtgacatgagagacaaagaatctttctgtgtgaaagccattgccattttagagttattgatcacagtaggcatctcactccatgaactaatgatcttagctacaatcaactgcactcttaccatgagc

SEQ ID NO: 258370 - DNA, 279 bp, Homo sapiens
tcctcccatttttaactctccagtttcgaacctttcttcttgtctccattagcactgccatgatgttttaggaaacatcctttttttttcctaatctctcagtcctcagttagcccttaatcctacccaagctgggccccaaaagaaaacctttcccctttcaccagaaatttcaactctttttcttccccttccttctgctgcacccaggacttcttactccaaatctcttctatggtgttttctctcctctctcagttaagcattgctagagaaaaa

SEQ ID NO: 258371 - DNA, 105 bp, Homo sapiens
taagggcccttaagatccccttttaccaacccctgggagaaggtgctttgcacatgaactccctttctccatttcttgatcaatgaataaagtttcttctccgct

SEQ ID NO: 258372 - DNA, 210 bp, Homo sapiens
gatctacagaaacctagaaatgttatagaaatacccagaataccacaatcagtgcaggtctgtgtttattgttgatgttttgaggactgggggttactgtgagaggttttgcattatgttttgtctaaaataaaagttccagccaggtgtggtggctcatgcctgtaatcccagcactttgggaggccaaggcgagtggatcacgagatc

SEQ ID NO: 258373 - DNA, 355 bp, Homo sapiens
gtcatttctttcatttgacttggatttttgtaacttggtctctccctattaagagtttaagtcagctgggcatggtggcttatgcctgtaatcctaacactttgggaggctgagggaggcggatcacctgaggtcaggagttcgagaccagcctggacaacatggtgaaaccccatctctactaaaaatacaaaaattagtcaggtgtggtggtaattacatgcctgtaatcccagctacttgggaggctgaggcaggagaatcacttgaacctgggaggcagaggttgtggtgagccaagattgcgccattgcactgcagcctgggcaacaagagtgaaactccgtctcagaga

SEQ ID NO: 258374 - DNA, 1212 bp, Homo sapiens
  misc_feature (294)..(294): n is a, c, g, or t
  misc_feature (508)..(508): n is a, c, g, or t
ggggagtctgaagatgtgactcaattcctgcaatctcataagaaaactttaactaatgagaagttgtttcttatggacgggaaaagaacgtggtttcttgagatggaatctactcctggtgaagatgctatgaacactgtcaaaatgacaacaaaggatttaaaatatgacagaagcttaattgataaagcagggtttgagaggactgactccaattttgaaagaagtcatactgtgggtaaaatgctatcaaatagcatcatgtgctatagagacatcttttatgaaaggganagtcaactaatgcagcaaacttcattattatcttatgaaattgcgatagccaccccaaccttcagtaactactaccctgattggtcagcacccatcaacattgtggcaagaccctctaccagcaaaaagattatgacttgctgaaagctgagatgatcgttagcattttttagcaataaatatttttaattaaggtatgtatgttttttagacnattctattacacattttatagactacagtatagtataaacacagcttttttttttttttttttaagaaatggggtctcatgctgtcatccaggctggagtgcggtggtgcaatcatgactcactgcagcctcaaactcctgagctcaagtgatccaagtagctgggactacaggcctgtcacatcacacccggccaaaacgcataacttttatatgcaatgggaaacaaaaaaatgtgtgtgactcactctattgtgatattcagtttactgcagtgatatggaactaagcccacaatatccctgcggtatggctgtacagtataagaatcacctgaagggcttattaaaaacagcttgcttgaccccctcccttagagattccgattcagtagatctgggttggtcaagaatttgcatttctaacaagctcccagctgaggctgaggctgccattcaacatactaccaagtagcactggcatagagagatccctggaataaaatttacctacttgtgtgtgtgtgtatgaatgtgtgtgtgtgtgtgtgcgtgtgcatgtgcgtgtgtgtgtatacagtcttgctctgttgcctgggctggagtgcagtggcgtgatctcggctcaccataacctccgcctcccagctttcaagcgattctcatgccttagcctcctgagtagctgggattatggggtgcgcc

SEQ ID NO: 258375 - DNA, 129 bp, Homo sapiens
gagacgttgtggtgagcaggctgtgagcacgggagcagaagtgggatcgtctcagcagtgctcgggtgtagccaggtgcaagagattattccaggagacagctatagtggggatggacagcgtgtgggg

SEQ ID NO: 258376 - DNA, 636 bp, Homo sapiens
ggtaaaaattgttaccatttagccatttaccattgcttgattctgactcatcaagctttccaatcaatgtgatttttaagtataagccttaactataagccttaatcttcaataattcaatgccattcacatattgttcaggcatttttcctatttatttaagaaatgaatcatctatagttccaatatgaaataaaaaaaactctacaataagccaaatctaaaataatacatgtctattatcactcataatccttgttaatgctttcacaccctaggactgaggttttccttctagtttttcttcccttcaattccttctgtccatttattcttaatttgagagattttatttgttgccttataaccttcttctttgcctttttcttctcttcctttttattctttaaacatacatcttttgtttttttcttttaatcttctgtcttaagcttagactttctcacctgacacccattttctcagcatatgttagtgaaacgggagagttccctgatccctcacaggacttatgacagaggtgtcgctcatgtgctcagccactacaggctcgaactcctttcgggagggcgagcacacggatgggcgggggcaagagctggggcggggcgagtg

SEQ ID NO: 258377 - DNA, 647 bp, Homo sapiens
ttctctgtcttctcttcttccatctctatgacttcagtcagcatcaaaacttaatccaaaaactcatttttgccttctagctacaacaacagtatctgaccacaggacattttcccttcccattgttcttgttcctagggtttttgttttgtttggttttgtttttttgagacaaggtctggctctatcgtgcagtggcacaatcctggctcactgcaacctccacctcctaggcccaagccttcctcccacctcagcccccagagccgctgggaccacaggtgtacaccaccatgcctggctcatttttgtattttttggtaaagatggagttgcccagcctggtctcaaactgagctcaagggatccgcccgcctcagcttcccaaagtgctggggttacaggcatgagccaccacacccagcctttttcttctactttcagattggatggtgtttcagaaaacaagcctctattcaaataatattttactataattcttgttaaaaatactgtatactaagctgggcacaagtggtcacgcttgtaattccagcactttgggagaccaaggcagcggatcacgaggtcaggagatcacgaccatcctggccaacatgttgaaaccccgtctctactaaaaatac

SEQ ID NO: 258378 - DNA, 343 bp, Homo sapiens
gtgagactcagggaagggagaggaattggctgaattaatttaaaagaaaatctggccgagcactgtggatcacacctgtaatcccagcactttgggaggctgaggcaggtggatcacgaggtcaggagtttgagaccatcctggacaacatggtgaaagcccatctctactaaaaatgcagaaattagctgggcatggtggcacatgcctgtaatcccagctactcaggaggctgaggcaggagaatcccttgacccagggagtaggaggttgcagtgagctgagatcgcgccacagcactctagcctggtgacagagagagactccgtctcaaaaaaaaaaa

SEQ ID NO: 258379 - DNA, 701 bp, Homo sapiens
tgatactctttttttttatttgagaaacttgcttagtagaaactgttgtgtatgctactgaatgacactaggtccaaagtggataaacatttccttatagggtaacttatagcaaaaacaacattttctccctgttatctcagatgctggtttcaacattcaggatggtctatatttacatttttagcacagaacagaatttgataaaaacaaacttcttttttatattctatttttattgagttagaattttcatacagtgaagtgcacagatcttaagtgtatgtacaatttaataagtttgataaatatatattcctgtgtaagtatcattacagtcaagataaagaacattttctcattcctacttctatcctccccatccgctataggcaaacattttttcgctttttctcagcataaattagtgttgtctgttctagggcttcctataaatacaaacgtatgcagtgttttatgtctaacttcttttgcccaacattatgctttccaggttcattcatatttttggatatatcagtagttttatgagtttgtgggatctgtaagttaattttttttcaccaaatgtggaaaatttttaaccattatttcaagtatttttttgttatccatttctccttcctatattttttgaaactccaattgcatatggtcagactatttgatattgtcactga

SEQ ID NO: 258380 - DNA, 672 bp, Homo sapiens
gtcagaagtagtgatggagtaaatcatataataaaatcttcaagaaatgaataaggctggtctggggattagttagatgactacaacaaactgggttagtgggtaatctgttgacataaacttcaaaagaaatcaggggcttggaaggaggaaggaagaagaaacaaaggtctgaaggtagcaagaagaatcaggaaagacaattatcctaactccagaccaagtagtaagagagacatgtgagagaaaaccaccactgtctgagaagactctaagtgtccttaatggagagccagattttgttagagaaacagtgaaggaaatcctctgaggagaggttgagtaaaaaggggatttttttttttaatgactgactgtgctccagagagtggagaagaatgaattgggagctgaggaggaatggtagatggaggctaattacaggatattccaagatgcttgagaatcaacatccacatgatgagatgacctgggtatcttgggtttcttgtgtgactggcagaaattcatatatagaatataagggggttaatattggcattctctagggtggtggaagtgtctgttgtatcgtgtggggaagaaatcaccttgacaggaaaacatggagctcaacacatcacttattcagtcacaaatgacattgaggtc

SEQ ID NO: 258381 - DNA, 501 bp, Homo sapiens
actgttggagtacagcaagtagagaatgatatggctagacatggtgccagattcttgattagattttagttctctagttgtatttgaattaaagtaggaaagctattattacgtggaagactttttacaatttacatattacagacagtggtagtaaaaaaaaaacgagattaatacatatttattagcaatatatattctactttcaagggaaaaattcacataatggaaaaatatgattgaaaccttgtgaaacaaatatgacaaatatataatactttctgttacatcttagcaagtggatgatgattgatgactatgaatgacaaggactatttatatttgaaacaaaaataggaatcttcttttttatctaagaaattgatggactactgtggagagctaaactaccattacaacaaaataagaagattttactaaaggaattgttgcataaggtcaagaaatttgaccttcgtattctaaatggtacatgcattg

SEQ ID NO: 258382 - DNA, 361 bp, Homo sapiens
acacttatcatattcagactgcaggtttcaaatgttgattctgccacttcacacttaccggctgtgtaaccttaggcaagttttatgtcccttttgtcctccagttttctcatctgtaaaatacaaatataacatatctcatagggttattctgaggttcaaatgagttcctgtgtgtgaagtgctttgaataatacctggcatacagtggtatatgagctaactctcactactgctaccatgctacatttcttgcagttttgttggagaaataaatatgatatatatatatatcaaaattctcagcatagcactggatgcatgactgtcatccaataaattgaaattattactgaagcaa

SEQ ID NO: 258383 - DNA, 728 bp, Homo sapiens
atgtgaaataataattaaggtagatagaatatttggatttccaataacacaagttcctaagtatacgtcagaaggtagcaagaccaagaacatatttttttagcaagagactaacaatttaatcccaggcacaaataacagtaaactgattgctagaagaagctatgatgtttagatataaacaaagtctaaaagataggaatagtcatatttactgttaccctaagaataggcctctcctaacagagaatgaacagaagccagtaagtttccccgtttctactaggacatatttcaagtttggtttattttgtataaagtaaaagaatgtgaaggagtctcaaacacaacataagaataaaactgtattacaaagccctaaatattcccttggattaattcactatattatatttattatgtatgccttatctacttccaaagaatattttttttctttttgtagcttaacggctaattttattttattatactttaagttctagggtacatgtgcacaatgtacaggtttcttacatatgtatacatgtgccatgttggtgtgctgcacccattaactcgtcatttacattaggtatatctcctaatgctttccctcccccctcccccgaccccacgacaggccctggtgtgtgatgttccccttcctgtgtccaagtgttctcactgttcaattcccacctatgagtgagaacatgcagtgtttg

SEQ ID NO: 258384 - DNA, 680 bp, Homo sapiens
gtgaatgtttctccctcattcctgaaacaacagatagagctgttgaagtttacaacgtcccccaaggcatttctgtgtttctgcctttaatctagggcccaagtgaccacccacaagaatgccccgaacactcactgcctcaggatgcgtcctgcaatttacattcccgtggtgcctctgccttcaccccacgctggtgcccccgcctccactccagccgtctctctggccacccctgccccctcgcttctctccatcatgccaaaaagtgccctcgtcctctgacggtggaagaggggattcagttaggagtcgggatggcctatgtgatttttgtacactattccagaataggtgtgtggttgctttaaaaatcaaaagaaatgtgtcttccaaatctttgaagccctttgatttcaggaagctgtggaccgtgtttagcctgtggctctgtgtgccccttggctgctgctgctgcttactcctgagggtgaagttgctaacataagaaacgagtaatttggatttgcgcttcttggtaaaaacccctttccattaacctgtaaaactctagagggcaggggatctctcacattgaatctggtggtcttgtgagaatgcctggaaaatagtaggcattctccaatgattgttgttggattagtgtcattgcttaaaga

SEQ ID NO: 258385 - DNA, 251 bp, Homo sapiens
cctcatatggtggagatacacacacacacacacacacacacacgagagagagagagcgagagcatgagctctctggtctcgtcttataaaggcactaattccatcatgaggacctcacccccatgccctcatctaaacccaatcacctcccaaaggccctatctctaatgccatcacattgagggttagggcttcaatatatgattttggggggacacaattcagtccacagcactccccaattatcaaca

SEQ ID NO: 258386 - DNA, 365 bp, Homo sapiens
atgttttttaaaaatagtaatttttaaagacaacagcaataaagaatgttaaatattgagaatttaatgtagcaaattagaagttcatctaaagaattaaaagacagtttgatggtggtggggcgtggtgcctcacacctgtgatcctggctctttgggaggctgaagcgggtggatcatttggggtcaggagttcaagaccaacctggccaacatgatgaaaccctgtgtctactaaaaatacaaaaattagccaggcatggtggaggacacctgtagtcccagctactcaggaggctgaggcaggagaatcgcttgaacctgggaggcagaggtttcagtgagctgagatcatgccactgcac

SEQ ID NO: 258387 - DNA, 437 bp, Homo sapiens
tcccccagctccttgcacttcctgggtgtagcgacgcccccgccaccccgcttctgcttgctctccatgggttgtacccactgcctaaccagtcccagtgagatgaactgggtacctcagttggaagtgcagaaatcacccaccttttgcgttggtctcactgggagctgcagactgaggctgtttctgttcagccatcttggcccctccttatgcctctagatatctacccaaatgagttgaaaacatgttcacacaaaaagctgcacttgaatgtttatagcagttttactcataattgcaaataattggaagcaaactagaggtctttttagagtttttctctgtattgacctttctctctatgccttctgatgtgcagctaaaactatataaaaatataataaaattaaaggacttaaaaggtaggaaccaaa

SEQ ID NO: 258388 - DNA, 405 bp, Homo sapiens
atagccttttctactcaccaaatccacccaactttttggaaaaaaaaaacttgcattttcaggttgactctcttgcaggaagggtcgggagcctatggtggcaggacagagagatgtgtgtctcagtgcactggattgaatagtggccccccaaaatgtttatccatgtaggatctcatgtgaccttatttggaaacagggtcattgcagatgtagttagtgaagatgaggtcatgctggagtaggtgggcccctaatccagtgactggggtccttatgagaaggccatgtgcagaccccaagagagacaggaggagaaggccacgcagtgaagaaaacagaggctggagtgacgcatccacaagcccacgggtgacaagcacagccggagccatccgaagccag

SEQ ID NO: 258389 - DNA, 1013 bp, Homo sapiens
acagcttgggtctctccaccctcaggacctagcacgagcgcagccacctcccagctggtcccaggctctgccctctatcttggcatccagatttggagagcagtgccagctcaaggcaaaggccactatctctcttcagagcccttgcaccctcttggagatggcttgagcgagtggctccatctgacctaaaggacgcactggtcctgcagccccatctgcccacagcctgcctcctgtgtggcctctgcagtgagctctgcgcagtgggctcttctccaggcacctggaggcccactccccggctgtcccggaatcctcttctctgacctcggccctccgattttccccagaacgccatccatgaggccctgcccaacgtccctgcggttctcctgcctctctggctcctggcctctcgccaggcactcctctgccttgccccagccgtccacttgctccctcacttgtgcctgcaggaggccggcacagagcagaggactgcatggagtccacccctggggctccacctcctgtcctgtcctggattcacacttctccttctcctgcctcctgctgctgggccacagcaacaacagcaaaagttagctagattccgagatgcagagttcaattctgtagtcgttgaactcaaaatgaattgaacccactcttggtgcaccagccaaggccagcagggaggcaggttttccaggcggctgcagggctgcgaatttttgcatgtgactagagagctgggaaggggcccacccaggagtgttggtgtgtaaggaagatgcaaggttggatttgtaatgacaactcggcctttcttcagacatggccaagcccatcagcatgggcatggccagcccctgagcgggggacagtcctcccgctcagggtctgggtggtatattaactgaaaggggtccacagcaggctcacattgtttccttgatgaaggacaggctgcatctaccgaaggccatcagcactatgtgcctgtcatt

SEQ ID NO: 258390 - DNA, 620 bp, Homo sapiens
gctgagggagaaggcgcggggccggggagtgtggttggcctattagaagtaaggattgatagggcctgggtggagatcagctgggagtgaaggggggacgggcttgggtttgaaggtgaaggtctctggagaactggggacacgtggatctggagtaagaggcacctactgaaaccggaaggtggctgagaaggttttatgtgaggtgtggacgggaggctattggactagaaggcattagttggtctgttaggacaaagtatacaagcagcaaacgcggtagatttatgtgtggtaggtgaaggctgtgaatcttttatgagtagttgagcaagaacagttgtctgattctgcggtgtcggagagtggagggtctcaggtagtgtcttggtcaggtttgaaggttaatttactgctagtggagggccaaatactcaaaagagtttttaattctcactactggggctgatcctcctcctacactccacccctcctgccatccctgtgacagttcatctcgttttgcctcagcagcacaagaactcactccctccgaagtaatggcatacatattgtttgcttttgactagatggcagtcaggaatcccttaattctttat

SEQ ID NO: 258391 - DNA, 437 bp, Homo sapiens
gctgagggagaaggcgcggggccggggagtgtggttggcctattagaagtaaggattgatagggcctgggtggagatcagctgggagtgaaggggggacgggcttgggtttgaaggtgaaggtctctggagaactggggacacgtggatctggagtaagaggcacctactgaaaccggaaggtggctgagaaggttttatgtgaggtgtggacgggaggctattggactagaaggcattagttggtctgttaggacaaagtatacaagcagcaaacgcggtagatttatgtgtggtaggtgaaggctgtgaatcttttatgagtagttgagcaagaacagttgtctgattctgcggtgtcggagagtggagggtctcaggtagtgtcttggtcaggctggagtgcagtggcgagatcatagctcgttccagcctcaa

SEQ ID NO: 258392 - DNA, 3625 bp, Homo sapiens
  misc_feature (2689)..(2689): n is a, c, g, or t
  misc_feature (2718)..(2718): n is a, c, g, or t
tcaaagacacaaataaatgaaaaaacattatatatgtactcatggactagaagatttaataactttaagatgttaggctgggcacagtggctcatgcctgtaatcccagcactttgggaggctgaggtgggtggatcacatgaggttgggagtccaagaccagcctgatcaacatggagaaaccctgtctctactaaaaatacaaaaattggccggacatggtagcacatgcctataatcccagctacttgggaggctgaggcaggagaattgcttgaacccgggaggtggaggttgcagtgagccaattttgtgccattgcactccagcctgggcaacaagagtgaaactccgtctcaaaaaaaaaagatgtcaaaactcttaaaaatgtcaacatcagtaaccagtagagaaatgcaagtcaaaaccacaattacgtattacctcacatccattaagatggctactaacggctgggtgcggtggctcatgcctgtaatcccagcactttgagaggctaaggtgggtggatcaagaggtcaagagatcaagaccatcctggccaacatggtgaaaccccatctctactaaaaatacaaaaattagctgggcatggtagcgtgtgcctgtagtcccagctactcgggaggctgaggcaggagaatcacttgaacctgggaggcggaggttgcagtgggccaagatcccgccactgcactccagcctggagacacagtgagactccgtctcaaaaaaaataaataaataaaaagatggctacttacaaaaaacctcaggaaataagtgttgatgagggtgtacagaaattgtaactcttgttaaaaatataattaccatatgacctggcaattatacttctgggtatataaccaaaagaaagggtcttgaagagctatttgtacacccatgttcatagcagtactattcactacagccaagaggtggaagcaacccaagtgtcccttgaccgatgaatggatgaacaaaatgtggtatatatccatacaatggaatattatttagccttaaaaaggaaagtagttctgatgcacactacaatgtggatgaacctcaaagacattatggtaagtgaaaaaagacaaatgtcataggattccacttatatgagctatctatgaatagtcaaattcatagaaacacaaagtagaatggtggttgcctacgtctgagttgaggggaaaatagggagttgttgcttaattggtataaaggtttgcaagatgaaaatgttccggagactggctgcacaataatgtgaattgtgacagtactgaattacatacttaaaaatgattaagatagtaaattttatattgtgaatatctgaccacaatttttaaaatgctaataaaaaccaaacaaaaccaaaaataaaaataaataaaatggaggagtgtaggagggaggtgggtgtaattataaaaattgttggcggggtgcggtggctcacacctgtaatcccaacactttgggaggctgaggcgggtggatcatgaggtcaggagattgagaccatcctgactaacacggtgaaaccccgtctctattaaaaatacaaaaaaaaaaaattgccaggcatggtggtggcaggcgcctgtagtcccagctacttgggaggctgaggcaggagaatggcatgaacctgggaggcggagcttgcagtgagccgagatcgcgcctgttccagcctgggcaacagagcgagactctgtctcaaaaaaataaaaataaaaaatatataaaaattgttggaactgttcagcatctcgactgcagtggtagatacatgaacctgcacaggtgacaaaattgtatagaactaaacatacacacgcacaaataagtacaaacaaaactggggaaataaattttaaaaaataggtagcatatgtcaatgtcaactatagttttgcaaaatgttaacattgggagaaactggactaagtccagaagtaccttctcagtatttcatacaattcggtgtgaatctataatcatctcgataagaaataaacacacacacacacacacacacacacaaggcctgtttttaaaaaacgatatatatgtgtgtgtactaatatataaggcagtagaggtaaatatccaaacaccagaggttaggtcataataaaaatgattcttttcatgtgcaggtgacaatatgcacactctataacaagcaatccctctggagaaactcatcagccaaacacactaatgtgacctatatgcaagtaactcctatggctgactgccttctagacacctcaccctgatcttctctataacggtctgatctttccaagaaacctgctctacccactgtctgccccaacacagttaaggccagaccttgagaggagaggccaacaatccttgcacaatggccaccccgcccccacgacttttctgacctcatctcctactaacccccaccatcgctggtcttcctcttttcttggactgtaccaggtgcgctcctatcttgggccttgtactgactcttccttgcctccttcaggtctttgctcaatgtcaccctcacattgaggcctactctaacaactttaatttaaaggattatttccccaatgtggcacaacaaatccccttagtcctgatctatttatttcctcgggaattncttacatattaatttcctttattgtatgnctgtctactctgcccactagaatgtaaactccagtaagtagatcagctcttttgtctgttttattcactaattcatcctcaggacccagagctgtggcttggcacataacaggcacaacaataaaaacttgttgctgttgaatggctggagaaagctcatgacagaagcactacattcaaacaccttcagtatcactggtgtaacaatctttggaaggcaggctcctgatctactgctgtggggactcagatttcgccaactgcctgcaggtgggaagcacacccttggctggttcacagccatctgctgctgttatctctaccactttcgaccacaaaaacttatccccatcttctttagtaagcatgacacaatgacatctcataggtgtcagatgcctaagagattgaaaacatagcacaggaaggaagctgttgcaccatacaaccattgtgtgtgtgtgtgtgtgtgtgtgtgtgtgcacgcgccacaaactaaagtggaaaagtgtcacaggtatatcatttaggagaccttaatcacttctcctgaagcatctgccaacatataatcaacaaagttttgagattgggcgcagtggctcactcctgtaatcccagcactttgggaggccaaggcaggcagatcacttgctctgaggaattcgagaccactttaggcaacatggtgaaccccatctctacaaattaaaacaaaaaacaaaattacccagtagtggtggtgcaagcctagatggagtcttgctctgtcacccaggctggaccgcagtgatgcgacctcagctcactgcaacctcccactctgggtttcaagcaattctcctgcctcagcctcccgagttgctgggactacaggtacatgccaccacacctggctaatttttgt

SEQ ID NO: 258393 - DNA, 493 bp, Homo sapiens
caatgcaaggtctgtaagggaggctacacaccaaagacattggatttgctatggtgactgatggggatttggttaaagtcttaaaaaaattcagacacttgtataatgtgcatacactaaatgcgtcttctaaaatcacaaaatcacccagttgtttttttccaaatggtttgaaagaccacattaaaagttttaacaatgtgttttcctttgtgcattttctaatttttcctaacttctttcacagtcttactgagctcagtagatagcaactctgcccttagactggaactcatccttctgttctctcttaactcttttgtgtgtgtgtgtgtatgagatggagtcttgctctgtcacccaggctggaccgcagtgatgcgacctcagctcactgcaacctcccactctgggtttcaagcaattctcctgcctcagcctcccgagttgctgggactacaggtacatgccaccacacctggctaatttttgt

SEQ ID NO: 258394 - DNA, 6483 bp, Homo sapiens
attgctaagccatccttcagacagagagggagcggctgcaagaggtaatgagagatggcaagaaagaagctgaaaaaatttactactttggagattgtgctcagtgttcttctgcttgtgttgtttatcatcagtattgttctaattgtgcttttagccaaagagtcactgaaatcaacagccccagatcctgggacaactggtaccccggatcctgggacaactggtaccccagatcctggaacaactggtaccacacatgctaggacaacgggtcccccagatcctggaacaactggtaccactcctgtttctgctgaatgtccagtggtaaatgaattggaacgaattaattgcatccctgaccagccgccaacaaaggccacatgtgaccaacgtggctgttgctggaatccccagggagctgtaagtgttccctggtgctactattccaagaatcatagctaccatgtagagggcaaccttgtcaacacaaatgcaggattcacagcccggttgaaaaatctgccttcctcaccagtgtttggaagcaatgttgacaatgttcttctcacagcagaatatcagacatctaatcgtttccactttaagttgactgaccaaaccaataacaggtttgaagtgccccacgaacacgtgcagtccttcagtggaaatgctgctgcttctttgacctaccaagttgaaatctccagacagccatttagcatcaaagtgaccagaagaagcaacaatcgtgttttgtttgactcgagcattgggcccctactgtttgctgaccagttcttgcagctctccactcgactgcctagcactaacgtgtatggcctgggagagcatgtgcaccagcagtatcggcatgatatgaattggaagacctggcccatatttaacagagacacaactcccaatggaaacggaactaatttgtatggtgcgcagacattcttcttgtgccttgaagatgctagtggattgtcctttggggtgtttctgatgaacagcaatgccatggaggttgtccttcagcctgcgccagccatcacttaccgcaccattgggggcattctcgacttctatgtgttcttgggaaacactccagagcaagttgttcaagaatatctagagctcattgggcggccagcccttccctcctactgggcgcttggatttcacctcagtcgttacgaatatggaaccttagacaacatgagggaagtcgtggagagaaatcgcgcagcacagctcccttatgatgttcagcatgctgatattgattatatggatgagagaagggacttcacttatgattcagtggattttaaaggcttccctgaatttgtcaacgagttacacaataatggacagaagcttgtcatcattgtggatccagccatctccaacaactcttcctcaagtaaaccctatggcccatatgacaggggttcggatatgaagatatgggtgaatagttcagatggagtgactccactcattggggaggtctggcctggacaaactgtgtttcctgattataccaatcccaactgtgctgtttggtggacaaaggaatttgagctttttcacaatcaagtagagtttgatggaatctggattgatatgaatgaagtctccaactttgttgatggttcggtctcaggatgttccacaaacaacctaaataatcccccattcactcccagaatcctggatgggtacctgttctgcaagactctctgtatggatgcagtgcagcactggggcaagcagtatgacattcacaatctgtatggctactccatggcggtcgccacagcagaagctgccaagactgtgttccctaataagagaagcttcattctgacccgttctacctttgcgggctctggcaagtttgcagcacattggttaggagacaacactgccacctgggatgacctgagatggtccatccctggcgtgcttgagttcaacctttttggcatcccaatggtgggtcctgacatatgtggctttgctttggacacccctgaggagctctgtaggcggtggatgcagttgggtgcattttatccgttttctagaaatcacaatggccaaggctacaaggaccaggatcctgcctcctttggagctgactccctgctgttgaattcctccaggcactaccttaacatccgctatactctattgccctacctatacacccttttcttccgtgctcacagccgaggggacacggtggccaggccccttttgcatgagttctacgaggacaacagcacttgggatgtgcaccaacagttcttatgggggcccggcctcctcatcactccagttctggatgaaggtgcagagaaagcgatggcatatgtgcctgatgctgtctggtatgactacgagactgggagccaagtgagatggaggaagcaaaaagtcgagatggaacttcctggagacaaaattggacttcaccttcgaggaggctacatcttccccacacagcagccaaatacaaccactctggccagtcgaaagaaccctcttggtcttatcattgccctagatgagaacaaagaagcaaaaggagaacttttctgggatgatggggaaacgaaggatactgtggccaataaagtgtatcttttatgtgagttttctgtcactcaaaaccgcttggaggtgaatatttcacaatcaacctacaaggaccccaataatttagcatttaatgagattaaaattcttgggacggaggaacctagcaatgttacagtgaaacacaatggtgtcccaagtcagacttctcctacagtcacttatgattctaacctgaaggttgccattatcacagatattgatcttctcctgggagaagcatacacagtggaatggagcataaagataagggatgaagaaaaaatagactgttaccctgatgagaatggtgcttctgccgaaaactgcactgcccgtggctgtatctgggaggcatccaattcttctggagtccctttttgctattttgtcaacgacctatactctgtcagtgatgttcagtataattcccatggggccacagctgacatctccttaaagtcttccgtttatgccaatgccttcccctccacacccgtgaacccccttcgcctggatgtcacttaccataagaatgaaatgccgcagttcaagatttatgatcccaacaagaatcggtatgaagttccagtccctctgaacatacccagcatgccatccagcacccctgagggtcaactctatgatgtgctcattaagaagaatccatttgggattgaaattcgccggaagagtataggcactataatttgggactctcagctccttggctttaccttcagtgacatgtttatccgcatctccacccgccttccctccaagtacctctatggcttcggggaaactgagcacaggtcctataggagagacttggagtggcacacttgggggatgttctcccgagaccagcccccagggtacaagaagaattcctatggtgtccacccctactacatggggctggaggaggacggcagtgcccatggagtgctcctgctgaacagcaatgccatggatgtgacgttccagcccctgcctgccttgacataccgcaccacagggggagttctggacttttatgtgttcttggggccgactccagagcttgtcacccagcagtacactgagttgattggccggcctgtgatggtaccttactggtctttggggttccagctgtgtcgctatggctaccagaatgactctgagatcgccagcttgtatgatgagatggtggctgcccagatcccttatgatgtgcagtactcagacatcgactacatggagcggcagctggacttcaccctcagccccaagtttgctgggtttccagctctgatcaatcgcatgaaggctgatgggatgcgggtcatcctcattctggatccagccatttctggcaatgagacacagccttatcctgccttcactcggggcgtggaggatgacgtcttcatcaaatacccaaatgatggagacattgtctggggaaaggtctggcctgattttcctgatgttgttgtgaatgggtctctagactgggacagccaagtggagctatatcgagcttatgtggccttcccagactttttccgtaattcaactgccaagtggtggaagagggaaatagaagaactatacaacaatccacagaatccagagaggagcttgaagtttgatggcatgtggattgatatgaatgaaccatcaagcttcgtgaatggggcagtttctccaggctgcagggacgcctctctgaaccaccctccctacatgccacatttggagtccagggacaggggcctgagcagcaagaccctttgtatggagagtcagcagatcctcccagacggctccctggtgcagcactacaacgtgcacaacctgtatgggtggtcccagaccagacccacatacgaagccgtgcaggaggtgacgggacagcgaggggtcgtcatcacccgctccacatttccctcttctggccgctgggcaggacattggctgggagacaacacggccgcatgggatcagctgaagaagtctatcattggcatgacggagttcagcctcttcggcatatcctatacgggagcagatatctgtgggttctttcaagatgctgaatatgagatgtgtgttcgctggatgcagctgggggccttttaccccttctcaagaaaccacaacaccattgggaccaggagacaagaccctgtgtcctgggatgttgcttttgtgaatatttccagaactgtcctgcagaccagatgcaccctgttgccatatctgtataccttgatgcataaggcccacacggagggcgtcactgttgtgcggcctctgctccatgaatttgtgtcagaccaggtgacatgggacatagacagtcagttcctgctgggcccagccttcctggtcagccctgtcctggagcgtaatgccagaaatgtcactgcatatttccctagagcccgctggtatgattactacacgggtgtggatattaatgcaagaggagagtggaagaccttgccagcccctcttgaccacattaatcttcatgtccgtgggggctacatcctgccctggcaagagcctgcactgaacacccacttaagccgccagaaattcatgggcttcaaaattgccttggatgatgaaggaactgctgggggctggctcttctgggatgatgggcaaagcattgatacctatgggaaaggactctattacttggccagcttttctgccagccagaatacgatgcaaagccatataattttcaacaattacatcactggtacaaatcctttgaaactgggctacattgaaatctggggagtgggcagtgtccccgttaccagtgccagcatctctgtgagtggcatggtcataacaccctccttcaacaatgaccccacgacacaggtattaagcatcgatgtgactgacagaaacatcagcctacataattttacttcattgacgtggataagcactctgtgaatttttacagcaagattctaactaactatgaatgactttgaaactacttatacttcatactcataaaaattattgtgtgttgctaatttgttcatacccactattggtgaaatatttctgttaattttgttatatgttttttgtgtgaaccctaaaggttaaaccttagccctgtgggataggcagttagggaggtgtggaaaatctatgcattaccttaatgtctctgtgtggttagtatggtagtgactgttcatcatatgacatttactgaagatgaactgggtccatgatgaagtgtgtgtatgtccacgtttgtaatcatagaatggaccccattcttttgttaaatacacaagagaaagctttctgtgacagttccaggtcttgaagctaatcagcatctcaagaaagtatccagaaagaacatctgctagttggttataggcggtgggaggaataatatacctaattggttataggtggggggagcatgataagcaaagaaaaggcaaacacaaggaaagatcagatgaaacagaagatgatagtaaaagtgatcctaagtaagaacataatgtaaaattgtcagcagcctcatggggaggaaaaaggaagagtcaactcacttgaagaagagggtcttgagaaatccttagcataaagggctactggtgagattgagatctgagcaggcaaagctcaaaagagagtttggaggttaaaaataatttatttttgcagtagtgtgctttgaaatgtgtaaatcttatttctaatgtatacaaccacatttcacataaaaatatgcaatttatatgccagataaaaataaaacaagtgaatttgcaagtg

SEQ ID NO: 258395 - DNA, 2905 bp, Homo sapiens
actgggttaacactgggaaataaaaacttcccacccacttcttgcaggaggctgtgtggttaaatcctgttacattatacttcagctcttaccatggccttgtcattgggttgaactggagctgtattttagattttgccaacaataacaagcgctgccaagtacttcagctgagatcacccaaataatactctactagcaaaagctttgcgtggcgttctaaccatcagaaactgagatggcaagaaagaagctgaaaaaatttactactttggagattgtgctcagtgttcttctgcttgtgttgtttatcatcagtattgttctaattgtgcttttagccaaagagtcactgaaatcaacagccccagatcctgggacaactggtaccccggatcctgggacaactggtaccccagatcctggaacaactggtaccacacatgctaggacaacgggtcccccagatcctggaacaactggtaccactcctgtttctgctgaatgtccagtggtaaatgaattggaacgaattaattgcatccctgaccagccgccaacaaaggccacatgtgaccaacgtggctgttgctggaatccccagggagctgtaagtgttccctggtgctactattccaagaatcatagctaccatgtagagggcaaccttgtcaacacaaatgcaggattcacagcccggttgaaaaatctgccttcctcaccagtgtttggaagcaatgttgacaatgttcttctcacagcagaatatcagacatctaatcgtttccactttaagttgactgaccaaaccaataacaggtttgaagtgccccacgaacacgtgcagtccttcagtggaaatgctgctgcttctttgacctaccaagttgaaatctccagacagccatttagcatcaaagtgaccagaagaagcaacaatcgtgttttgtttgactcgagcattgggcccctactgtttgctgaccagttcttgcagctctccactcgactgcctagcactaacgtgtatggcctgggagagcatgtgcaccagcagtatcggcatgatatgaattggaagacctggcccatatttaacagagacacaactcccaatggaaacggaactaatttgtatggtgcgcagacattcttcttgtgccttgaagatgctagtggattgtcctttggggtgtttctgatgaacagcaatgccatggaggttgtccttcagcctgcgccagccatcacttaccgcaccattgggggcattctcgacttctatgtgttcttgggaaacactccagagcaagttgttcaagaatatctagagctcattgggcggccagcccttccctcctactgggcgcttggatttcacctcagtcgttacgaatatggaaccttagacaacatgagggaagtcgtggagagaaatcgcgcagcacagctcccttatgatgttcagcatgctgatattgattatatggatgagagaagggacttcacttatgattcagtggattttaaaggcttccctgaatttgtcaacgagttacacaataatggacagaagcttgtcatcattgtggatccagccatctccaacaactcttcctcaagtaaaccctatggcccatatgacaggggttcggatatgaagatatgggtgaatagttcagatggagtgactccactcattggggaggtctggcctggacaaactgtgtttcctgattataccaatcccaactgtgctgtttggtggacaaaggaatttgagctttttcacaatcaagtagagtttgatggaatctggattgatatgaatgaagtctccaactttgttgatggttcggtctcaggatgttccacaaacaacctaaataatcccccattcactcccagaatcctggatgggtacctgttctgcaagactctctgtatggatgcagtgcagcactggggcaagcagtatgacattcacaatctgtatggctactccatggcggtcgccacagcagaagctgccaagactgtgttccctaataagagaagcttcattctgacccgttctacctttgcgggctctggcaagtttgcagcacattggttaggagacaacactgccacctgggatgacctgagatggtccatccctggcgtgcttgagttcaacctttttggcatcccaatggtgggtcctgacatatgtggctttgctttggacacccctgaggagctctgtaggcggtggatgcagttgggtgcattttatccgttttctagaaatcacaatggccaaggctacaaggaccaggatcctgcctcctttggagctgactccctgctgttgaattcctccaggcactaccttaacatccgctatactctattgccctacctatacacccttttcttccgtgctcacagccgaggggacacggtggccaggccccttttgcatgagttctacgaggacaacagcacttgggatgtgcaccaacagttcttatgggggcccggcctcctcatcactccagttctggatgaaggtgcagagaaagcgatggcatatgtgcctgatgctgtctggtatgactacgagactgtaagtagctttgacttttcttctactccttaagactgtagctgcagctgcatagacaagctacctttctggagagagaaacatccatctacatgctgaggagtagtttttagtgttttctgtaatttcatagcagaacctgggtaaagttaacctaaaccgttaacatcagtcatgatgaaatgtgaaaaaataccttcatatactttatttagcaataagataggctgacatagtatctcataaattaatattggaggaactgatggacaatgtgagcttggtcaggaatca

SEQ ID NO: 258396 - DNA, 5464 bp, Homo sapiens
actgggttaacactgggaaataaaaacttcccacccacttcttgcaggaggctgtgtggttaaatcctgttacattatacttcagctcttaccatggccttgtcattgggttgaactggagctgtattttagattttgccaacaataacaagcgctgccaagtacttcagctgagatcacccaaataatactctactagcaaaagctttgcgtggcgttctaaccatcagaaactgagatggcaagaaagaagctgaaaaaatttactactttggagattgtgctcagtgttcttctgcttgtgttgtttatcatcagtattgttctaattgtgcttttagccaaagagtcactgaaatcaacagccccagatcctgggacaactggtaccccggatcctgggacaactggtaccccagatcctggaacaactggtaccacacatgctaggacaacgggtcccccagatcctggaacaactggtaccactcctgtttctgctgaatgtccagtggtaaatgaattggaacgaattaattgcatccctgaccagccgccaacaaaggccacatgtgaccaacgtggctgttgctggaatccccagggagctgtaagtgttccctggtgctactattccaagaatcatagctaccatgtagagggcaaccttgtcaacacaaatgcaggattcacagcccggttgaaaaatctgccttcctcaccagtgtttggaagcaatgttgacaatgttcttctcacagcagaatatcagacatctaatcgtttccactttaagttgactgaccaaaccaataacaggtttgaagtgccccacgaacacgtgcagtccttcagtggaaatgctgctgcttctttgacctaccaagttgaaatctccagacagccatttagcatcaaagtgaccagaagaagcaacaatcgtgttttgtttgactcgagcattgggcccctactgtttgctgaccagttcttgcagctctccactcgactgcctagcactaacgtgtatggcctgggagagcatgtgcaccagcagtatcggcatgatatgaattggaagacctggcccatatttaacagagacacaactcccaatggaaacggaactaatttgtatggtgcgcagacattcttcttgtgccttgaagatgctagtggattgtcctttggggtgtttctgatgaacagcaatgccatggaggttgtccttcagcctgcgccagccatcacttaccgcaccattgggggcattctcgacttctatgtgttcttgggaaacactccagagcaagttgttcaagaatatctagagctcattgggcggccagcccttccctcctactgggcgcttggatttcacctcagtcgttacgaatatggaaccttagacaacatgagggaagtcgtggagagaaatcgcgcagcacagctcccttatgatgttcagcatgctgatattgattatatggatgagagaagggacttcacttatgattcagtggattttaaaggcttccctgaatttgtcaacgagttacacaataatggacagaagcttgtcatcattgtggatccagccatctccaacaactcttcctcaagtaaaccctatggcccatatgacaggggttcggatatgaagatatgggtgaatagttcagatggagtgactccactcattggggaggtctggcctggacaaactgtgtttcctgattataccaatcccaactgtgctgtttggtggacaaaggaatttgagctttttcacaatcaagtagagtttgatggaatctggattgatatgaatgaagtctccaactttgttgatggttcggtctcaggatgttccacaaacaacctaaataatcccccattcactcccagaatcctggatgggtacctgttctgcaagactctctgtatggatgcagtgcagcactggggcaagcagtatgacattcacaatctgtatggctactccatggcggtcgccacagcagaagctgccaagactgtgttccctaataagagaagcttcattctgacccgttctacctttgcgggctctggcaagtttgcagcacattggttaggagacaacactgccacctgggatgacctgagatggtccatccctggcgtgcttgagttcaacctttttggcatcccaatggtgggtcctgacatatgtggctttgctttggacacccctgaggagctctgtaggcggtggatgcagttgggtgcattttatccgttttctagaaatcacaatggccaaggctacaaggaccaggatcctgcctcctttggagctgactccctgctgttgaattcctccaggcactaccttaacatccgctatactctattgccctacctatacacccttttcttccgtgctcacagccgaggggacacggtggccaggccccttttgcatgagttctacgaggacaacagcacttgggatgtgcaccaacagttcttatgggggcccggcctcctcatcactccagttctggatgaaggtgcagagaaagcgatggcatatgtgcctgatgctgtctggtatgactacgagactgggagccaagtgagatggaggaagcaaaaagtcgagatggaacttcctggagacaaaattggacttcaccttcgaggaggctacatcttccccacacagcagccaaatacaaccactctggccagtcgaaagaaccctcttggtcttatcattgccctagatgagaacaaagaagcaaaaggagaacttttctgggatgatggggaaacgaaggatactgtggccaataaagtgtatcttttatgtgagttttctgtcactcaaaaccgcttggaggtgaatatttcacaatcaacctacaaggaccccaataatttagcatttaatgagattaaaattcttgggacggaggaacctagcaatgttacagtgaaacacaatggtgtcccaagtcagacttctcctacagtcacttatgattctaacctgaaggttgccattatcacagatattgatcttctcctgggagaagcatacacagtggaatggagcataaagataagggatgaagaaaaaatagactgttaccctgatgagaatggtgcttctgccgaaaactgcactgcccgtggctgtatctgggaggcatccaattcttctggagtccctttttgctattttgtcaacgacctatactctgtcagtgatgttcagtataattcccatggggccacagctgacatctccttaaagtcttccgtttatgccaatgccttcccctccacacccgtgaacccccttcgcctggatgtcacttaccataagaatgaaatgccgcagttcaagatttatgatcccaacaagaatcggtatgaagttccagtccctctgaacatacccagcatgccatccagcacccctgagggtcaactctatgatgtgctcattaagaagaatccatttgggattgaaattcgccggaagagtataggcactataatttgggactctcagctccttggctttaccttcagtgacatgtttatccgcatctccacccgccttccctccaagtacctctatggcttcggggaaactgagcacaggtcctataggagagacttggagtggcacacttgggggatgttctcccgagaccagcccccagggtacaagaagaattcctatggtgtccacccctactacatggggctggaggaggacggcagtgcccatggagtgctcctgctgaacagcaatgccatggatgtgacgttccagcccctgcctgccttgacataccgcaccacagggggagttctggacttttatgtgttcttggggccgactccagagcttgtcacccagcagtacactgagttgattggccggcctgtgatggtaccttactggtctttggggttccagctgtgtcgctatggctaccagaatgactctgagatcgccagcttgtatgatgagatggtggctgcccagatcccttatgatgtgcagtactcagacatcgactacatggagcggcagctggacttcaccctcagccccaagtttgctgggtttccagctctgatcaatcgcatgaaggctgatgggatgcgggtcatcctcattctggatccagccatttctggcaatgagacacagccttatcctgccttcactcggggcgtggaggatgacgtcttcatcaaatacccaaatgatggagacattgtctggggaaaggtctggcctgattttcctgatgttgttgtgaatgggtctctagactgggacagccaagtggagctatatcgagcttatgtggccttcccagactttttccgtaattcaactgccaagtggtggaagagggaaatagaagaactatacaacaatccacagaatccagagaggagcttgaagtttgatggcatgtggattgatatgaatgaaccatcaagcttcgtgaatggggcagtttctccaggctgcagggacgcctctctgaaccaccctccctacatgccacatttggagtccagggacaggggcctgagcagcaagaccctttgtatggagagtcagcagatcctcccagacggctccctggtgcagcactacaacgtgcacaacctgtatgggtggtcccagaccagacccacatacgaagccgtgcaggaggtgacgggacagcgaggggtcgtcatcacccgctccacatttccctcttctggccgctgggcaggacattggctgggagacaacacggccgcatgggatcagctgaagaagtctatcattggcatgacggagttcagcctcttcggcatatcctatacgggagcagatatctgtgggttctttcaagatgctgaatatgagatgtgtgttcgctggatgcagctgggggccttttaccccttctcaagaaaccacaacaccattgggaccaggagacaagaccctgtgtcctgggatgttgcttttgtgaatatttccagaactgtcctgcagaccagatgcaccctgttgccatatctgtataccttgatgcataaggcccacacggagggcgtcactgttgtgcggcctctgctccatgaatttgtgtcagaccaggtgacatgggacatagacagtcagttcctgctgggcccagccttcctggtcagccctgtcctggagcgtaatgccagaaatgtcactgcatatttccctagagcccgctggtatgattactacacgggtgtggatattaatgcaagaggagagtggaagaccttgccagcccctcttgaccacattaatcttcatgtccgtgggggctacatcctgccctggcaagagcctgcactgaacacccacttaagtcgaaagaaccctcttggtcttattattgccctagatgaa

SEQ ID NO: 258397 - DNA, 535 bp, Homo sapiens
cccaatagaagaaaaatgtgctctggcagcactgtcatgaaaaacaaagaaggcgactcctcctacacagcagagttgttcagaaagtaccacgctgcactggcaataatcaattttaatgattaaggctaatgtgttttgcataaaagacaagaataaattaaagcaaagcccacaaatgacagggtgacaaacactgtgtcttgaaaaagcaccaaacaatctattattgaacgtctaatttttccccacactgtttatctttctttatcaatgtttccagcaaggcactcacatttttatacctgtattttgtaaagtaaaattatccaaaaaattgtggcatttaggggagtcagagccaggttgtgggagtatggggaaaaaaagatagctggtctcacggcttcacatccactggctaaagcagtggttctcaataggagtgggttggattttgaccccagaagatatttggcaatgtctggagacatttttggttgttagaactggggggtccctattggcatctagt

SEQ ID NO: 258398 - DNA, 494 bp, Homo sapiens
cacaaattcagatgcatgtggatgggcccaaaatactttgtttacatgtactccaaatgtaactcctggggcacccttccttattttctctaccacaccaatgccttcatggtcttacatcttgtcctcttaaccctgacttctctagccctcatgaatgctttagtgtggcagatgttactgtacatgggccctcgtttattcagcaaatattcatggagcccttgtaccaagcacggtgctgagtgatgctgtgagggtgagcaaaagagaattgtcatctgttaaatcccagaggtccgtctgtgacaaaactttcaccattcttttgtaaaaattagaaaaatacaaaatagtgagtttttcatgagctacgttgtatcaattttaaagtatttcttttaggattctattatttaccctttttcttcaatgttaaataccatttcctttaataaagatttaaaaaagattccttccttccttcccccctc

SEQ ID NO: 258399 - DNA, 857 bp, Homo sapiens
ctccagagaatggatcccacaatttgtggccacgtctcactctgagctcagtgcctggacttggctgtggccaggaaatggacggaagatgtggggtgagctcatgtgacatgagctttaggaaaagggccagaaaaaagctttcaggaacagaagacaaccacagctgcgtagcaggtaacagccatctaaatggcgtttttgttttgtttgtggattgcttcattggttggttgtgctcctaactacatgctcttgttgagctaaagaaaaactggcccttccagaatggaacaggctgttttgcttctttgacaccatctatgtattaaacggagggaatgatctttaactgtttgctcatcccttcgcctcctgaatcatcttgctctcaaatttacttgtatttgtggttttacagtgtaaagcgtgctctattttggctacaagtactacattctataccatattggaaatgttcttgagcactatcatatacggggggattcgcagtcagggcaactcccaatgggagaaagaaagacacatcttttgcctgtcagtactaggagctagcatttcacagtgcttggaagttaaccaaactttgatctttttgtttgaagctcgtttagcctccacttcagtgcaatgaggtagttgctatccctattttatagatgtgaaaacagaggctcaatgaagacagataggctgctcagacataggctttggacttgagttctcaccacacgcccaggtaaagaagagcctcctgggtctgcccaatctgtggcatctgctgtcaggagaaaaacaaaactccattttggtctgcaaaaagaaaccagtgggaa

SEQ ID NO: 258400 - DNA, 1124 bp, Homo sapiens
gtggtcatggaatagagtaagccactgaagtcgatggcttgtcccagtcctcactatcagaactagtctaagaatttgaagtcaatgtgttatttttactctataaagtaaaagtagaaagtcagtttcagtacttaataaatatgattattctatgctgatagtaatcttgagaaactatagtttttatacttctattcccaaatgtaaaaactcacaatttttctgcatatgattttaatttggttcccttaagccaaaaaacatgacaacaattattgctactcacccccaagaagaaagtgtggaaaggtttgtgggaaattgtttaaaaaaaaaaaaaaaaagacgtttaggataaccaggtactttcaagttcctcattagtttgtgagaagtcctgatggttacatttcactgaaacttgaaaaattaagcagaatacaggagcaaatagcatgaggcgttctctttctggactgtttatctggaaaaactaaaaatgctagagaactcaaaataacaacttttaatgtctgagctgactagaatgtaatagaattttccagaagtcaaaaaggaagtaggagtagtaatctgggaaaataagtcagcactataggctagagttattctggaagaatctgtaattgtctctaacctagtgcttgagagccatatcctcatggaaagaattaactaggaaaagtcctttccacaaaagcagagggcaaggaaacttgcttgtctggctgtatggtaagggaacaagatttctgagaatttgtaatcataggcttctgatacaggtctttagcctaagttcatagaaccagtgtgccctgaaaaactccagaccaagaagaacttagttctttagtgtaaagtgctcatggcttggtagtatcccaaggaacctggaaaaaagggcttctccaaagatatcatcaacccaggcctcagatgccacacataaaagaatattaactcataataaaattaaatcagaaaaccatgagaaaaagcacaatgagcaaaaaggcaatagaaacaataggtagtcataccagcaaaggcttcagttattggaattatgagatgtagaatataaaatactatctttg

SEQ ID NO: 258401 - DNA, 1245 bp, Homo sapiens
gtggtcatggaatagagtaagccactgaagtcgatggcttgtcccagtcctcactatcagaactagtctaagaatttgaagtcaatgtgttatttttactctataaagtaaaagtagaaagtcagtttcagtacttaataaatatgattattctatgctgatagtaatcttgagaaactatagtttttatacttctattcccaaatgtaaaaactcacaatttttctgcatatgattttaatttggttcccttaagccaaaaaacatgacaacaattattgctactcacccccaagaagaaagtgtggaaaggtttgtgggaaattgtttaaaaaaaaaaaaaaaaagacgtttaggataaccaggtactttcaagttcctcattagtttgtgagaagtcctgatggttacatttcactgaaacttgaaaaattaagcagaatacaggagcaaatagcatgaggcgttctctttctggactgtttatctggaaaaactaaaaatgctagagaactcaaaataacaacttttaatgtctgagctgactagaatgtaatagaattttccagaagtcaaaaaggaagtaggagtagtaatctgggaaaataagtcagcactataggctagagttattctggaagaatctgtaattgtctctaacctagtgcttgagagccatatcctcatggaaagaattaactaggaaaagtcctttccacaaaagcagagggcaaggaaacttgcttgtctggctgtatggtaagggaacaagatttctgagaatttgtaatcataggcttctgatacaggtctttagcctaagttcatagaaccagtgtgccctgaaaaactccagaccaagaagaacttagttctttagtgtaaagtgctcatggcttggtagtatcccaaggaacctggaaaaaagggcttctccaaagatatcatcaacccaggcctcagatgccacacatggccaggtctggtggctcacgcctgtaatcccagcactttgggaagctgaggtgggcagatcacgaagtctggagttcgagaccagcctggccaatatggtgaccccgtttctactaaaaatacaaaaactagctgggaatggtggcgagtgcctataatcccagctactcaggaggatgaggcaggagaattgcttgaatcccagaggcgaagttgcagtgagctgagatcgtgccattacactccaacccaggcaacagagtgagacgc

SEQ ID NO: 258402 - DNA, 492 bp, Homo sapiens
agagatggaagttggaatggacaagcctgccctctcatcggctctccatggctctgtcctcaggctgtttctgcaatttgacatgaggcctggccccagggaaaccagtggggcctcatctcctccctgtgctgctctgagatggagtcttctcagggtcagtccagctctggagcccctctccagctcggtcaccaaagctgtctggtcccagggcggtgctgagtgacaggcacaccagccagtccaattggccatttcatacccaatgcatgtgactgataaagagataacaccctgtctccaagacacaggctttacataaacagctttaatgacctcttcacctagagacaagactccttagtggtggaacctcaggcatccgtgcaggatgtaagaaagctcccgtatatacatgaactgagaagtgtgtagaagaataaatactgtaataggtaataaaatgtatgtatttttatttatatgcta

SEQ ID NO: 258403 - DNA, 597 bp, Homo sapiens
gatgtagatggaaagaatggaggtttagtaactcaaatgcatggatcatgtagctggagatacacccaagcctcagaattagtaagaaaatattttgaaacagtctatttgaattcaagatttttgcagtaccagttttctgtcattgttatgcactaaattgtgtcaccacctcaaaccatatgttgaaaccctaacccccaatatgactgtatttggaggcaggactgttcaagaggtaattaaggttaaatgaggtcataaatgtagggccctaatccaatagtactggtgttcttgtatgaagaggaagagatgccagagctttctctacctttgtatgtgcacagtggaaaagccacttgagttcattgtgagaaggtgactgtatataagcctggagagacctcaccagaaaccaaccctactggcaccttgatcttggacttccagcctccataactggagaaatggatggcttaaactgtatttctgttgtggcttaaactacatttcagttgtttaagccacccagtctgtagtatttttatggtatttattatagtattaaagtattatgatattaaattattatgg

SEQ ID NO: 258404 - DNA, 1609 bp, Homo sapiens
ctgccctctggaccctgcggaccccagccgagccccttcctgagttccacaggcgcagcccccgggcggtcgggcggaggggtccccggggcggtgccagggcgcaatcctggagggcggccgggaggaggaggtgcgcgcggccatgcacaccgtggctacgtccggacccaacgcgtcctggggggcaccggccaacgcctccggctgcccgggctgtggcgccaacgcctcggacggcccagtcccttcgccgcgggccgtggacgcctggctcgtgccgctcttcttcgcggcgctgatgctgctgggcctggtggggaactcgctggtcatctacgtcatctgccgccacaagccgatgcggaccgtgaccaacttctacatcgccaacctggcggccacggacgtgaccttcctcctgtgctgcgtccccttcacggccctgctgtacccgctgcccggctgggtgctgggcgacttcatgtgcaagttcgtcaactacatccagcaggtctcggtgcaggccacgtgtgccactctgaccgccatgagtgtggaccgctggtacgtgacggtgttcccgttgcgcgccctgcaccgccgcacgccccgcctggcgctggctgtcagcctcagcatctgggtaggctctgcggcggtgtctgcgccggtgctcgccctgcaccgcctgtcacccgggccgcgcgcctactgcagtgaggccttccccagccgcgccctggagcgcgccttcgcactgtacaacctgctggcgctgtacctgctgccgctgctcgccacctgcgcctgctatgcggccatgctgcgccacctgggccgggtcgccgtgcgccccgcgcccgccgatagcgccctgcaggggcaggtgctggcagagcgcgcaggcgccgtgcgggccaaggtctcgcggctggtggcggccgtggtcctgctcttcgccgcctgctggggccccatccagctgttcctggtgctgcaggcgctgggccccgcgggctcctggcacccacgcagctacgccgcctacgcgcttaagacctgggctcactgcatgtcctacagcaactccgcgctgaacccgctgctctacgccttcctgggctcgcacttccgacaggccttccgccgcgtctgcccctgcgcgccgcgccgcccccgccgcccccgccggcccggaccctcggaccccgcagccccacacgcggagctgcaccgcctggggtcccacccggcccccgccagggcgcagaagccagggagcagtgggctggccgcgcgcgggctgtgcgtcctgggggaggacaacgcccctctctgagcggacccggtgggaatccgagcggctccctcgggagcggggactgctggaacagcggctattcttctgttattagtatttttcttactgtccaagatcaactgtggaaatattttggtctcttgtgacgttcggtgcagtttcgttgtgaagtttgctattgatattgaaattatgacttctgtgtttcctgaaattaaacatgtgtcaacacaggactttctggatcattccagaaagtgtcagacgttttctcattgaaaaata

SEQ ID NO: 258405 - DNA, 139 bp, Homo sapiens
gaggccaaccatccaagagtcccagtggatggtgcagaggagtgaagtgcagcgctcacacagcttgaggtgtgaatgctcaccctgttttgtgccctcagacaagctgcttcactgtctaaacattggtgtcctcttc

SEQ ID NO: 258406 - DNA, 321 bp, Homo sapiens
tgcagtttggttgactctgccactccaacctgctggctttggagaatacaggtgatccaggtgaggaaggatcccacccaatgcagcccacctgctctaccaaaaagcagccaggctgcttctttgagaaggtccctgatcccattcctcctgactgggcgagacctcccaatgagggtctccagccacctccaacagttgcatgtgggctggcaacaagttagtacccccacaggatggagtttctagaggaaggcacaggctgccatctttgctgtttcatggcctttgctggtgatacttccacgtacgggagaaacc

SEQ ID NO: 258407 - DNA, 709 bp, Homo sapiens
gaggaggtaaggttgctggggaggcaaaacagaacatgacgaagccacactcgggaataacattgaggagtgtctacatttgattgcctggagaaagaggaaaaaagaaggaaaactgggtgataatgttaccaaaatagcaggggtgtggtctaggtcctgctgcttgctgcacagaaagtcaatcactgagacaatgagtactgccagggaagaaggctttaattgggtgctgtagctgaggagatgagagatcacaatgaaatgattaaaaggataactaaaggaaatgtatagaagaatgaaaaggttgagtcaggggcacagcatagtaacatgtaggaagagaggatatagacattacattgcctggggacatctctttccctctctaggccactagcataggttcaaaacagagactaaattgcaatgcttatattctgtgtagactaaagactgaaaaagtaatggagctttactaaaagatgggtttcaaatgagagagtcagatgaaagtgcaagggatttccagcacctatgatggtaccatagttgtagatggcaggaaagcaaggagcagaagctttcaagtcgagtgcacagtcattttatgagaaggtgcaaggaaatgatgagggagtttacagaacccaactgtctcacaatttgcattgtatgggcgcccttatttagtttgtggagttct

SEQ ID NO: 258408 - DNA, 259 bp, Homo sapiens
tgaaaccttgtctctactaaaaaaaaaaaaaaaaaaaaaaagagttgagagagtggctgcccttggtgaaggggcagtgatttggagggggcttctggggacttctcgggggatggacaagttctatttcttgagcttgatgctggttatgtgggtggattgggtttgtaaaatttcatgaaactgcaggcatgtttatatgggtacttttcagtatttatgtggtacttcaataaaaagctgtgaggccaggtggtgg

SEQ ID NO: 258409 - DNA, 484 bp, Homo sapiens
agggaagcctattaaagactcagtacctagagtttttactggaggccagtcacttaggtaccctctgcctaggatatacaaacttccagatttccagaaggaaagtggatatgcagcataaaccacattatttgcacagacagtttaggcaaattgagccagtcttaccatttagagaatggtggatcactcctgaaagtcaggtctgctaaaggccaatgtttcaaacaggtcttcctatatttaattgacacagtcctgattaactgtttactacacaccaggttatcttagaatagttatcttactttcttcacacttgtggaagaagagattataattaaaattaaaatgcactaatttaaagccctgatatattcaattagctttggtatctcaaaaattttggttgctaaccatgatttctcattttgagttggtgttatatcatgtgcccttaaaataaaatgatgcaatataccta

SEQ ID NO: 258410 - DNA, 422 bp, Homo sapiens
atcagcttatcaatttctttttaaaacctaattttattgatagcgttcaatctttagaccaactagaagaaagctggtatctttataatagggagtctttcaacctaaaatatggtatgtccttccatttatttaagtcatctgtaacttccatcagcattttatagtttataatgtaaaagatcttgcacttcttctgctggatccattcctagatatatcacaacaaaaccaactccagtgaaaatattctctacatataagaaacaacttttcaaagccattctaagagatatatgctactttcatttttatgttatttggctaacactgcaaatctctcatgaagcacatctgcctgtattttaaaggctaccttttgatccttagggtaccttataagcatggtgggatggtgtaaa

SEQ ID NO: 258411 - DNA, 450 bp, Homo sapiens
cgcattatagaagtggtagagcaagcagagaaagagaaaggaggcagattgcttatttaaagaaataatagcagaaaactgcccaaatctggggaggaaaatgaacatccagatccacaattcccaaagaattccatgtaggttgaacataaagatgtcttcattgatctttttgtggttcataagcatgatgattgggttttcataccattgtgtaagatgtgcctttctcagaccttgccaaaacactggcacattacctgtctgatatgaaaattttttcactgagacacattgtgatcaaattttcaaaagttaatgacgaagaatttgaaagcagcagaggaaagcaacttgtcatgtacaagggagctcctataagactttcagcaggtttttcagcaaaccttgcaagccagaagagaatgggatgatatactcaaaatactg

SEQ ID NO: 258412 - DNA, 240 bp, Homo sapiens
cggcacgaggtgatgttgagcggcctatagtgacagtcacggagtggccagctttggtgtctgtgcttgttgcgtccttgcattaaattcggggtgcggtgggggaatgattgccaacattctggtaacgatgaaaagaaagcttcagcagttttcctgaaaacctgtaatgccattttccctgtaagaccaagagatggccttgtggtaccatgtgaaaaacaacgttcacgcttacta

SEQ ID NO: 258413 - DNA, 416 bp, Homo sapiens
gaggaggtagcacttgtttgagttaatgatttgcaccacatttttggggatggtgactttaatactttaattctgcaggagttcagatgtatagtggacagatctcatctctgtttgagacttagtcaaacgaaccaataaatatttattgagcatttactggtaccctgcattgtgctcaaaccccatgtcgatcatgagtaaagtataagtcatggcccggtatgtcagattgaacagtaagatggttagagggaacaatccacaaggtaatgtagaagtgtgagtaattcaggataaattgtttgggacagttactgagtgatactcactttagccattggagagatcaatttggtctagaagtctcaaaggcttcctggaggaggcgagaaagatgataaacaggaaaagcc

SEQ ID NO: 258414 - DNA, 1011 bp, Homo sapiens
acttaatataagtgtagtggcaatttccacagatgaaagaaaaccaagagaaagaatgatggagaagagatagtccaagaattttcaacttgaaaaaatgcacaagtgattcatgacactcagagaacagcaatcaagacaaataacaaaataaaacaataaaaacagaaatacttagacgtctaatattgcaacttctgaacacaaaaaaataaaaacacattgcttaaaagtagctagataaaaatggcacacctatacaaaggaaaagagaactacagcatatttctctacagaaaatatgcaatctgaaagaaaaatggaattaggttgttaaattctgaaacaaattgtcaacccggaattcaattccttaaaaagttatttttcagaagggaaggaaaattaagaaattttccgaaacacaaaatagagaatttcttgccagcagctccataaacaagaaatatttcaggataacttcaggcagaaaaaatatattaattataaaccaacttggatctaagtcaacaacaacagcaacaacaacaaaaacaaacaaacaaacaaacaaacagggtaatgaaacggcatatgaaagcaaatacaggaaggccatttttttttcttatttctaattactctgaaatacaactggctgcctaaagcaagagagtagtaaggtattgacttttagagcaaacataaaagtaacctgtatgacaacattaccaaaaaaataaataaataaaaggaatagattgaatatatgtatttgtaagatttttaactatacaaaaagtagtataatattctttaaaagcagacagattagttaaatgtgtattttaaatgtatattgtaaaccctacgagaattactaattttttaaaaagtaatataaataataaatcaatattatagataaaataaaataaaaatagtcaatttatataaaaaaagaaatataacagaaatgggaagaaaagaaatagtacatgaaaacaatag

SEQ ID NO: 258415 - DNA, 327 bp, Homo sapiens
ttgatgagatctgaagtgatgtaaataaataaggcttcctgatattgtataatgaaatgtatcaacatttgaaagacctgttatgaaatcatgcacaggcaaaggatccattcattcaaagtacaaaatacagtagtggatttttttttgtaggaaaatatacgtaacataaaatttaccattttaatgattttttttttttttttgagacagagtctcactctgtcaccaggctggagtgcagtggcatgaccttggctcactgcagcctccacctcctgggttcaagcaattctcctgcctcagcctcccaggtagctgggacta

SEQ ID NO: 258416 - DNA, 410 bp, Homo sapiens
gatcagattacatagtgatcaaaatctggtctgaactaacaatcagtctaccagagcctggggtaggtgctgagccccaggccccaccataccctgtaccctccattctctggttgcaatggcctgcttagccctctgtctctcctggactgagtgctctgggagtgagacagggatgaaaccctgtttgctgctgagcccaaaattagtgctgtgtttgagggaggcacatgtggtgtgcctagaggctgaatgagagggtctcttcaggacctccagacagtgagcccctaccgcagcaccatgcccagtccctatgggcacttggtaaatgggaatggaatggacacatgtgcccaggggtgactgttctaaggccgacggcagcgtctgtagggtccaccatctgc

SEQ ID NO: 258417 - DNA, 699 bp, Homo sapiens
gcctggtgcataacaccatgcacataactcaatactggacacacagtgacaggcacacaacactgggcgcacaaaggaagtatgcatgctaggcactcagcaggaacacaggacactagaaggcacacccagtcagcacatacagttggctttgagcaacgaagtgtgcgcagacgcagtgtcacccaccagcttagggctgaccgtggccagccgtgctccagatggcggccgccccgcggcgcagatcttggatgaaggcgacatggagcggggctgtcgccagccactggggctcagggggctcaggggcacttgcggcagccacacagcctgagcgctgctggctgtaactctgtgggatgcacgaggtttgcttccatcagtgccctctctgatgcacatgtgaatcgctctgagtctcttacgataacaaaaaattccgtagggtgtggcacgtgtaaacccgactcgtatttcttgctagagtatctttggcaaggtttcctgggttactgggtcagaagtcaaaggcaggtgactttgcaattgccaattatctccgcagggctacaccagagtgggtcaggggaagaatcagagatgggtcgtaggattgtatcgtcattaggtgcatgtgcccagaaagcaggaaacaaatctcccaaaaaagctctctcagcctgctcttcaaaaacc

SEQ ID NO: 258418 - DNA, 515 bp, Homo sapiens
gttgggcaaatactgaccgagctcctgctccatgctgggcactggggaccagagatgactccgacccaggccctggcctctaggagattgtcagtgaggtaggaggtagacacgtgcacagatgtcacagtgtcttccttgcccttttgtgcctggaccccagtttgtagccacctgtttctttgttcactgactgttctccccctttagattggaatctccatgaggcctgggcccatctgccctgttcgctggggtatccttagcccctcactcttgcttggcacgtagtgtatgttctgtattacagccttggaagggaaggaaggatggttgctgtttagtgatcactaagtgtggtccaggcactgttacaagctttctatgccctgcctccttggagccttacaaccctgtgcctcatgtatgtatcgtcacttgctgggggttgcaggagattgtttggcgatagaaacaagttgtagaactatataatgtgacctcattcctgttta

SEQ ID NO: 258419 - DNA, 1415 bp, Homo sapiens
tattgttttttataacaaagtggaagatttcaagaaaggacaactcactgtacacttgagaataatacctacagaggttcatactgaagagtagtctcaataatgtaaagaatttgacaagcatgatgctattgaaatagttctgtaaggaagtggtgttctttatacatcaattattacaaaaagcagtgaattgtaagtgtgaggtgtgtttacttagatgtgaagagttctccttactgctgtgatggaataacaagggtcagatttcctctcctgccttaaacaactggaagctatacaatacgtataataggtaatggtttttagacataggacaagcacaggtttgtgatcctcaggagactgcagacagagtgaggtgagcaccatggtttctcagcctgcccccgcacggcagttcctaggttgcagttcagggaagggaaacaataaatctcgctgaattgaagagacaggactggcagttggggaggccacagcagctagaatttccaggggaaagtactggagagatgggatccttctagatacagggctcaagaagtctgctgggagtcccctgagtcctttgacttagtactgacttgcactgaggccaggaaaagaagcactggaaagcagcaggctgaacaattcctggaactcatgcagggctgggaatagtttatgttctcagcagccagagtggaaacagagtggaaacacatggagcatcaggtagaattctcagaaaggttttgttttagtagtgcagctaattaactctagattaaaagctactctggacctacagtgtccggcatccaaaaaaactaatgtgttatgcaaagaagcaataaaatatgacttataaccaggagaaaaatcagtagaaacccagaaaagacagaggtgatggaattagtagacaaggatattaaaagagctattgtaaatataaagtagaggaaaacataagattgatgaaacctgaggtataagagatatttttactggccaaaatggaacttctagggatgaaatcaacttctgattttgttaaaatcccgagtggagagattagatacagaaaaagaagaaaaaatcaatgaacttgaagagtaagaataaaaactaccaaagtgatatacagagagaaaaaaagacttagagaagaggaagagaataggaaaaccattacagtagtgtaatatatgtttaactggagtcccagaaggagaggagaaaatgaagaggcatgaagaagtatttgaataaataatggctaaagattttccaaatctggtgaaaacaatacccccacatattcaagaagctcaaatgacctgaagtagaataaacataatttacatcacagcagtgcacctcagagtcacattcatgaaaagcac

SEQ ID NO: 258420 - DNA, 1245 bp, Homo sapiens
ctgcattctctctgactagaagcttctgttcctgacaccaaatgtgccaggttagcaaatgagcacaagatgtggccctgattctagttggtggggcaagggcctggttctcctgggctgagtgggggagtgtcctggcagcagcgagtgacctgggcagtggccaggtgggtgcgatgactctgatgcctcactcagtctctgggcaatcatcatctttgcctctagccaccgtagataaggtgtgaagggactgctgtttgcaatgggcttaccatccaaatatcccaaaggctttgaccagcaaccaagtaaaatcagtaattgaggagagcagggcacaaaggggctgcagtttgggagctcctgaagaaatggctcagatattgagtcagagaaataaaaagtaggatcagttagcaattctaactgcccttccttctgacccctcataagaggagtgtggtgagggaggggactgggtaggggtcatcccaggaggaggggtttacattggaaccagttcaggttcggtgcatctttcctcttcggttttacagtggcttccgtgggatcgtcaatttcttgttcttagagtttcgggtgtttttctccagtcttgttactgtagactgtagaaagcacgggccccaggctctgagcttagtaataacctggctggtagattcctcatgcccctaattgtcccacttaggcctgaatgtcttgcatggagagaaatctcctgtcagtgtggtccagcagcagggaggagttctgcccaaattccgatatcaccccttcccccatccaagcatccttcgattagggaagtggagagcacatccctgtaaggcccataagagaaagaggagtttgttacatttaatcaacactgtgaagtctgttctacagcaattcagccattacacagtatatgactgaaactcatttaactgggttaatttcatttcttagactgaatatattattgttaagatacgtgtgcgtgttaggtaattctcagcatctcctccaagtaggccgaccttctcggaaaattcaccctaaaagtctcacaaaagaatgagttcatggggagattctgtaaagtgatgaactgagatgaaagcagccaacagcccaggagcttttcagaatagcgtctgcagcagaaccagtttccattcagagcgcgtccttggtggaaatgcttttttgtgtgtctccacgcgctgatggtgg

SEQ ID NO: 258421 - DNA, 1855 bp, Homo sapiens
  misc_feature (2)..(4): n is a, c, g, or t
gnnnggaaatgccctggagtgtgtgtcacctgtccaggacgacttgttgattcccaggagggccgcctttccggtctgggtccccgagaggactgccttgctcacctgtcccctcggcgcggccccggggagctcccgagaggcccccgggatcgctggccctccgaactccacagcaatgagcaagttgggcaagttctttaaagggggcggctcttctaagagccgagccgctcccagtccccaggaggccctggtccgacttcgggagactgaggagatgctgggcaagaaacaagagtacctggaaaatcgaatccagagagaaatcgccctggccaagaagcacggcacgcagaataagcgagctgcattacaggcactaaagagaaagaagaggttcgagaaacagctcactcagattgatggcacactttctaccattgagttccagagagaagccctggagaactcacacaccaacactgaggtgttgaggaacatgggctttgcagcaaaagcgatgaaatctgttcatgaaaacatggatctgaacaaaatagatgatttgatgcaagagatcacagagcaacaggatatcgcccaagaaatctcagaagcattttctcaacgggttggctttggtgatgactttgatgaggatgagttgatggcagaacttgaagaattggaacaggaggaattaaataagaagatgacaaatatccgccttccaaatgtgccttcctcttctctcccagcacagccaaatagaaaaccaggcatgtcgtccactgcacgtcgatcccgagcagcatcttcccagagggcagaagaagaggatgatgatatcaaacaattggcagcttgggctacctaaactaaaacacatttttgatacctaaattaatgagctatagataaaatataaaaaatgtttttaccaagttcagaagttaacaaagactctgctttataattatattgaatgaataattgtgttttaagcctcctaagtaaaagtaaaaaaggagtcatgtgcatacatagaatcagtgatggaggccaggcacggtatctcatgcctataatcccagcactttgggaggctgaggcagttgagaccaggagttcgagtccagcctgaccaacatgaagaaaccctgtctgtactaaaaatacaaaaattagccggacatggtggcaggcacctgtaatcccagctacttgggaggctgagtcaggagaatcgcttgagcccaggagatggaggttgcagtgagccaagatcatgccactgcactccagactgggcaacagagggagactccgtctcaaaaactaaaaaaaaaaaatacatttagtatagcggggggtgggggggagaaataatgttatttcctatgcgaatgacgtgtatccctgtacccatggtaaatgtaaatatactgtgtctcttttgggagagccttttagtagaggagtcttatatgagtctctacataagtagtttcacttgagttttgcagtttgaaatcttaaaggagctttaattgacatttattataccaattaagcttggaatggggcaatggatgcatttcccaaaacgtgtgaaagcactaacagcttatattgctgaatgagaatctcctgggtgtaatttagccacttagggaactgcgtgaacactcccaggccattatgatgctgttacagcttcagtgtataaatgcatgagtattctttctgttctgttttgtgctctcttgtacatttatttaccctttacagaatatttcttgtaaatacataaaaatattggcaattaaaagtacatcttgaataaaaaaat

SEQ ID NO: 258422 - DNA, 379 bp, Homo sapiens
aaaaaaaaaaaattggcggccctcttgccgaattcggcacgagggttttgcagtttgaaatcttaaaggagctttaattgacatttattataccaattaagcttggaatggggcaatggatgcatttcccaaaacgtgtgaaagcactaacagcttatattgctgaatgagaatctcctgggtgtaatttagccacttagggaactgcgtgaacactcccaggccattatgatgctgttacagcttcagtgtataaatgcatgagtattctttctgttctgttttgtgctctcttgtacatttatttaccctttacagaatatttcttgtaaatacataaaaatattggcaattaaaagtacatcttgaataaaaaaat

SEQ ID NO: 258423 - DNA, 397 bp, Homo sapiens
cttaacacacagaggtttgcttcatgcaaccaggtgaggaacatctctaaaacattttacagtcaagaaaattcagtgttcaggaggttgaatgcgttatccaagatcacacatatgtcctgacagatttggggttcaatgaagaattatgtattttaattaagaattatgtattttaattaataattatatattttaatttcacattttaaatttctgcagtttccttccatcacttttcaccatgctttctacacttggaattactttttttggcttcttgatcttctttacttgtatgttattgattttctacaagttttaacatatatgattaaagaatatttcttaatgttttaataattatcctagaataaaatatatttactaaaaaaaa

SEQ ID NO: 258424 - DNA, 393 bp, Homo sapiens
gcctagagtctcatgtactagggaggctgaggtgggaggatcgtttgagctgggaggtcaaggctgcagtgagctgtgatcatgccactgcactccagcctggggaaatattttttcagcaccttttatgtaccaggcactgttctaggtgataggaatagcatagtgtaggagacaggagccctttcatggagtttgtattttagacaagagatagttaataagaaagcaaatttctggtaatgacatgaattataaacaggcaaatgtgatggaggctgatgggggttggagtgggagctaccgaaaaagaagtcgtctcaggatggcaaaatggcgttagttacatagaatcaaaggacagtttctccagcataatcagcaacatgtgca

SEQ ID NO: 258425 - DNA, 456 bp, Homo sapiens
agctacctacctgcaacaaaatcagatcgggggtgccatgagtaatgtttgagtgaaggttgacataagggagaattagggaatattctacggagataaaatggtctctatcctaattaagttggtgggtacatggccatatgtatttctcaaaaatcatcaacctctttccttataaataattgaattgtatgtaattattcctgaataaagttgatttttaaaaagaatgaagtagctcaagctagcggaatatcaaggcagggcagcaagcttgtgttaatgtcaaacatatctaaaatcataataccttgagacaaaggttgggagaggaaaggacaaaagtaataaaaggcatggtttcactcacagtggctggaggtagagaaatttggggttgatatttttagatcagaatgtgagatttcatagcaacctcaaagacaagaagtagtc

SEQ ID NO: 258426 - DNA, 153 bp, Homo sapiens
gtgtgtgtgtatgtagtgggaaaaaaatatatgtcataacattaaccattctaactactttccctttttaagggcacaaaacagtggcattaattacattcacattgttctacaaccatcagcacggttcccaaaccatttgtatcatcccaa

SEQ ID NO: 258427 - DNA, 726 bp, Homo sapiens
cggacgcgtgggttaccatatcagattcacattcagtcctcagcaaaatgaagggctccattttcactctgtttttattctctgtcctatttgccatctcagaagtgcggagcaaggagtctgtgagactctgtgggctagaatacatacggacagtcatctatatctgtgctagctccaggtggagaaggcatctggaggggatccctcaagctcagcaagctgagacaggaaactccttccagctcccacataaacgtgagttttctgaggaaaatccagcgcaaaaccttccgaaggtggatgcctcaggggaagaccgtctttggggtggacagatgcccactgaagagctttggaagtcaaagaagcattcagtgatgtcaagacaagatttacaaactttgtgttgcactgatggctgttccatgactgatttgagtgctctttgctaagacaagagcaaatacccaatgggtggcagagctttatcacatgtttaattacagtgttttactgcctggtagaacactaatattgtgttattaaaatgatggcttttgggtaggcaaaacttcttttctaaaggtatagctgagcggttgaaaccacagtgatctctattttctccctttgccaaggttaatgaactgttcttttcaaattctactaatgctttgaaatttcaaatgctgcgcaaaattgcaataaaaatgctataaacca

SEQ ID NO: 258428 - DNA, 635 bp, Homo sapiens
acactcaatctcctccttcctcccattatgccctaacccttggcaactcatactctgttctctatttctgaaattttaacttttcaaagtgttacatgaatggaatgaataaattacgcaatcttttgtaatcgccttttttactcagcataaatttccaaaattcatccatattgttgtagttcattcccttttatctgagtagtattccatggtagatatgtacctcagtctgtttaactattcactctttgaaagaaatatgggttgttttcagtttggggcttacatgaataagactgctaagaacattcatatacaagtgcttgtataaacataggtttttatttttccaagaaaaacaccaagacagcatttttcagttcagtaattgtatgtttaaagaaattgcccaggagaatggcatgaaccccagaggcggagcttgcagtgagcctagatcgcgccactgcattccagcctgggtgggcgacagagcgagactccgtctgaaaattgccaaactgttatccaaaatgctttgtgaatattttcttccagtctgcagttgtcttctaaacctaacggaatctttcagaaagcaagcttttaatttttatgaaatccaactcatc

SEQ ID NO: 258429 - DNA, 1237 bp, Homo sapiens
ctccggaccttaggtgatgtgcccacttcggcctctcaaagtgctagggattacaggcgtgtgccactgtgcccggccagaagagaaactcaaaaagacaggaacatttccttgaactgatagagcaggagccttcagtttgcaaaggtacaccattgagagagactagcttaaaaaatgtaaaaattgccacactgactgaaattttagaacttctgcgataaagtaaaactcccagaaagttcctgtctgggatagggggcaataggagggaaggcaggtagcatactacctttaaaatttaggaatcagaatagtcctagacttaccattaggaacagtggaaacttagactctaatgaagctgttcattcaaaatacaaagtgaatctgattttcaacctaagattgcatgcttagcccaactttgaatttcggagtaaaaatattttcagatttgcaaggtcatagaaaatttgattctttgtaaaagatattggagtgggggatggattagctaaagcatgactttctacagtgaagagaaaatgtctaaagttgaaaaatgaagaaataggccgtggtcgtggctcatgcctgtgatcccaacactttgggaggctgaggtgggaggattgcttgcccaggaattgaaggctgcagtgagccgtgattgtaccactgccctcgagcctgggcgacagagcaagactgtctcaaagaaaggaaaagaaaaaatagctgtgtaagcaagacatttagaagtcacagagtttgaaattgattgcttctaggggcagggtgtggggagtagggcctagtgttgagcagggcctggagcttacgtattttaaactgtgaactattactttgatagaaatttaaaaaattttagagttttaaatctatatcattacagactatatatattctgtgtttacactgtgaaaaaattagaagtcaatagaaaaagagaaatgaaaaaaatccctttttatatatttgaaaaaattatacctctgaataattgagtcaaagaagacttgttatggaaattagaaaatatttagaactgaataatgaaattaccacatatgaaacattagggataaacatgtttcatatgcagataaaatattagaatatttagttaagaagaaagactgaaaattaattagctaagcattaaactcataaaaacaaaaggtaacttggagaaagtagaagaaagttttaa

SEQ ID NO: 258430 - DNA, 575 bp, Homo sapiens
tgagtgtctgaagttcatcatgccacatttcccagtgtaaagaagttcagaactaaatggaatgatttaaattcttgacttaaggagaccagcagctttgataatgctgccaaattatcctcacagtatcagaaagaaaaaattgacctaaagacttgcgctgtaagaattaaaacagcagaagcagaagctaccctcacctccccatcacttgtctgccctgaagcaggacataagaccctcatttgagaggtgcccttccttatctctgaagacaaaggaacattcttatctctgaagacataggaacatcgagaagaatggagtatgcttatctatgaagacatgagaacacagagaagaatctgaacaaacggggcttgctaagttccctgcagtttatcggcattagattatacaattttgtcctccctttgtatttctctatgactgtccatgattcatcaaacctaaacataataatatacaagtctacttgtttctttgggtcttcatttccaaagcctcccatgttcataaatatattaaataaatgtatatgcttttctcttgta

SEQ ID NO: 258431 - DNA, 329 bp, Homo sapiens
atttccaaaaagaaaattcatcctcaaaagatatacacaatttatcaccacagatgtttgctagaatgttttgtggccacccaacaacatcagttcaagaagttgttgagcaacagtagagtcattcaagtgttgcacctgcccctggtgctaccttgatggaaattcatttacagatacacattctgttatctttgtttaaaaattactttcactacttatgtcatgccctgaatatgattgctctgaatgagagaaaaagagttttatgtagtcgttttgtttaatctatactttgaattttctacattgtgtgcagagaaattggt

SEQ ID NO: 258432 - DNA, 291 bp, Homo sapiens
gttgcacgctcatggtcccagctgcttgggagagtgaggctgtagtcagctgtgattgctccgctacctgccagcctgggtgactgagcgagaccctgtccctttaaaaaaaaagtggggggaaagaaaacagggtggaaggaaaacccagatctgcccactctctggagctcacactccatggggtgaggcaagaggtcaaaggaaggaggagagttggggtgctggggtgcaagggtgctgggcgggggtgcagggtaccagggcaccgggcgcattgtcagtggggtg

SEQ ID NO: 258433 - DNA, 431 bp, Homo sapiens
gaattctaattacatagcatcccaatataaaggatgattaggaaaaactgctttctaaaagataataaatagtgtaacctgcattagattctctagcagagctcataacagttgggctttggtatatcagtttgtgtaaggataaaagtctggatattccagaggtgtcatttaccaactttgtgggcttaaatagatgtttgaaaataataaaaccatttgtgttattagccacgtaaagattaaacatatgttggagtcagattgtccagtcatttaataaaataaatcatttagattatcatgtaatttatttatttatctgtaaaaatggatagaactcttcttattccttttagaatgagaatatcctaggtttctctttaactcatatgtttttgttgttgttgttgtttttgtgaaatggagtc

SEQ ID NO: 258434 - DNA, 493 bp, Homo sapiens
ggactgggaaggagagggcagccaggtgaggaagagaaagctgttctgggtttgggagttgacccaggtggcactttctccttggactgattctgcaggtgcagtgggactacatgtcttctgagactgtaagatgttcttttggggactgggattgctgcctgccttccccgagacgtgtgtgtgtgtgtgtgtgtgtgtgtgtgtgtgtgtgtgtccagcatgtgtgcagctggggccttaacccccttctttcccatcctactgttctcccactgaaagaggcagctaggttctaaagtgatccatcccctgtcggataccgtgtccccatcccctctccgtctccagaggtcggctcccatagctgctgtcctgtgcttgcttcttatttattgagacagggtctcactctgtggcccaggctggaatgcagtggctccatcttggctcacggcaacctggaccctctgggctcaagcgatcctcccac

SEQ ID NO: 258435 - DNA, 870 bp, Homo sapiens
tccgtttcctaaaatgggctgagtgttcttcctcagctctgctgtgcctggaatggcttcccttgtccacacatcccacccgctggaccctgtcctttcttgtaaggggatccaggaggacatgaggaggcagatttactcatctggcagcctctgctgcaacttgtcccatccagtggaaggaaggaagggaggaagggaggaagggagggagggaaggagggagggagcgagcgagcccctcccctgagagaggagtgcagcctggccaggtatccctggtggtggagggaggaagcgaacggtctggggaaatctcagctgctctgtatttttctctgagtcttctaccccagcgggccttccctatcgcccttgaatctctgtttgtggcttcctggcttgcccagcacagagctgagagttcagctgtcaaagccatgtggaagatttccatattttgccagagcccctgtcccacccctgcggccgcccactaggtctttgtgactgaacacctcggtggcagccccagcacctcatggcaaccgaagcccatcattcctactcctcctccaacccgggtcatcttgttcttgcacctgctttgaaagcaagcccacagttctccaaattggccaggctttagaagccaggaaatttttttctgtgcccatcaatgacatccttaagtcttgcctgttttttcactggtaagggaacaactttccttctcctctccaatacatgccccagtgtagacatttgccaccctggactcagcatcctctgtgtgcccattgtcaccagagcagctccttgccaccctgcctagttccatgttcctggccatccccgtttgtcctatat

SEQ ID NO: 258436 - DNA, 409 bp, Homo sapiens
cagagtaagaccctgtctcgaaagcaaaaacaaaacaaaagagtctgcaccgaaggtgctgaaaccacagagtattgggtcatttgttgggcatgttgtacgtgtgagatacctacggttctagctcaagttttatttctgaatccctacatttagtcaattatccccatagctctccagcccaactctctgtttttcctttcagaggaacaaccttgttgtggaagaaaaacaaaacaaaggcaactgagttcagtttttatagaaacttcccagggtcagaacatgttcaatctgaccatatccaaatctgcaatcaggatcaaacagaagtgatgatcaaaaaccacatcctactatattatccagcatgaaacagactagacgtgcataaatatacctactgaag

SEQ ID NO: 258437 - DNA, 702 bp, Homo sapiens
caggcatcttgcctctcaccctgtgctgggccccgtgctccagaacagctcatcggcgctttgcccacatcttctgctggcagagtctccccgattccatcttccacagccctctcaaacatgtgctttcttctccaaccccagatcagtcatcaccctctctctgtcccagatcaaaaacagcctcttaacttgttccctcttgccagccttgcctgtcctgcttatgctccacactgcacccaaaattaccttttcctctgatcatgtcactcccctgcttgccagccttcaacatcacccattgccctccagattcattatcagagcccaatcatcaagtttctcttcaatctctctctctttttttttcttttttttctttttgagacagagtttcgctcctgtcacccaggctggagtgcaatggtgtgatctcagctcactgcaacctccacctcctgggctcaagtgattctcctgcctcagcctcctgaataactgagattacaggagtccgccaccatgcccagctaatttttgtatttttagtagagatggggtttcaccatgttggccaggctggttcgaactcctgacctcaggtgatccacctgcctaagcctcccaagtgctggaatacaggcatgagccattgcacctgggcctttcaatatctttactctgggtttcccttctccc

SEQ ID NO: 258438 - DNA, 485 bp, Homo sapiens
agaatcagcagttctgatatacaaggtcaggagaaaatgatgtcccagctcaagaatggagaatttgcccattctctgccttttcattctgtcagggccctcaacagatgggatgatgacagctcacattgatgagggtggaattcctttactcagttgactgattcaaatgctaatgtctacccttacaaccatacccagaaataatgtattaccagctatctgggcattccttaacccagtcaatttgacacctagaattaaccatcacagagtagatcttaaatgttctcaccatgcatgcacacatgcaagcacgcacacacacacgcccactcacatatcaaagcctcacactgtataccttaaataatacctagtatcatatcggataaggaacccctagtctccctataaataaggagctacagtttctcagcttttctcaaaattatctggaaattctagtcaatgcaggaaaggaa

SEQ ID NO: 258439 - DNA, 262 bp, Homo sapiens
atttttctttttccttttcagcattttttccaatgaaaatgtaatagtgtagtaaaaagaaacaatggaagttaatttaatagcaaaagataatggccagaatattatgttacaagaaaaaaaataaaacaggattttaaacagctatacatagaaaaaagcctggtaggaaacagaccaagatgtcaaaagtgattatttcttttacaatattgtgtcttccaacttttccataaacagcatgtattacttttataatcag

SEQ ID NO: 258440 - DNA, 693 bp, Homo sapiens
gtaatttaagttttgccattactttcttccttttctttttaatttgatgatttttagtaaatttaccaatctgtgtggttatcaacacaatccagttttagaacatttccatcactctggcaagatgctgtatgccaatttacagttaatccttgttcctgttctctgtctcagaaaatcgctattctctgttgtctttagaagtttgcattttctgaacattttaaaaatggaatcatgcaatatgtaggtttttgtgtgtgccttctttagttcagcacaatgttttttttttattattatactttaagttctagggtacatgtgcacaatgggcaggtttggtacataggtatacttgtgcaatgttggtgtgctgcaaccattaactcatcatttacattaggtatttgtcctaatgctatccttccctcagccccctacctcaacacaggctccagtgtgtgatgatccccaccctgcgtccaggtgttttctctgttcaattcccacctgtgagtgagaacatgcagtgtttggttttctgtccaaacactttgtttggacagaaaaaaacactttgttttttgtgatagtttgttcagaatgatggtttccatctgcatccatgtccctgcaaagaacatgaacttatctttttgatggctgcatactattccatggtgtatatgc

SEQ ID NO: 258441 - DNA, 360 bp, Homo sapiens
gtgtcccagaattctgagccacacttgagaattaggttgggcttgcttgagggctacagttacaggaacagagcaggtcaaaaaagcaatatttgagcaagaaactaaaataagaccttagtttttaatcttaaggaccagagaacacatacagcatccaaatcaaattcgggtattcaggtgagaacaagaggctgaacgtgggatacaggagagtgagtctagaagaattttccaagttgaagaatgcagcttcttttaatggtgcacacttagtgttcagtcttaaagagaatgccctgttaagaatgctaactggggctccagtgctgatagattttcaatgaatggaacttagac

SEQ ID NO: 258442 - DNA, 411 bp, Homo sapiens
taagtcagcagactagaaattcaggtaagagttaataatgcagttttgagtccaaattccacaagaaagagcaagcctgctggaaatgcagtccttaggcaaaattacttcttcagagacctgtctttgctctaaaggctttcagctgattggatgatgcccatccacatcttggaagatattattattattattattatttgagatggagtctcactctgtcacccaggctggagtgcagtggtgcagtcttggctcactgcaatccccacctcctaggttcaagtgattctcctgcctcagcctcccaagtagctgggactacaggcacgcaccaccacacccagctaatttttgtatttttagtagagacagggtttcaccatgttggacaatctcttgacctcttga

SEQ ID NO: 258443 - DNA, 553 bp, Homo sapiens
tcccattctaccacccacctccttcactgccttctatacctcaagtctgcccccagctccagcaccagactgcacctaaatcacaccaggtcacaactattctgtaagacacaagaggatttgcgtaacctgtgttgagccaagtgtcacccattcttccataatatttatggaatatttacttccttttttacctttcctaacgcttaatactttgcaaactattggttttgttctgaagcttacttttaagatattcttattttacatacgaaagtgcttccttatgtttgcctggttccaaattagagggtaccagagcccgatctcctctaagcaggaggcttcccataggaaaggaatgttcctttgtgctcatccttcgtataaatcaccagggagcttttaaatgaacaaagacctggctgacccagagggtagaacttataaatagtactccagcctggacaacagattgggactccgtctcaaaaataaaataaagtaaaataaaaattaaaaaataaaatacactgacgatagctgatgaact

SEQ ID NO: 258444 - DNA, 698 bp, Homo sapiens
gtgaacagccagatgaagaagtacatagggcaaagtctgaaagggtcttgagtacaggagcttctgtccctgtgggactggggtgtgctacccactggtatgtggatgtgttcactaacccagaaactctctgaactccatcttttagggattttttttatggaggtttcatcacataggcatggtcaatttttaattcaatctctagcccctctttctccctggaagatctgggaatggggcaatggggctgaaagttccaagcttcgaatcatggctttctggtgaccagtccccatcctcaagccgtttagggactcaccaagagttgcctcattaaaacaaaagatgcttccatcacccaggacattctaaggaattttggagctctgtgctatgatctgggagtggagatcaaatacatatttcttgttatgtcacaatatgcataggtatcttacacaattatactatataaattctactttatatttactttttccctttaacattaaattatatgcatttttccattttgctgcaattgttgtaatgttcactttagtagatgcataatatgcataatttacagtgttaactgtgtcaggtgtttacaataccttatttgatttaattctcacaaaaacctataggacaagtattgttttatttatttcacaaaagtaaaaactgaggct

SEQ ID NO: 258445 - DNA, 763 bp, Homo sapiens
ggaacagggagtgtactgatacaaagttgtttgtcaggaattgtccttgatttacagaaacaacattggttcgtgattggctatccattgttgagctatgcattattaggttaatttgcagctgcttgtggcaatagcaatcagtttcaacagttgaagacatagctcaaaagggagggggagtagaaagtgattgctgtatcgttttaatgtctctctgggcctgataataaagacttgcatccctcagataaaagttattttctcagtaacttagcataaagtattaagttaacatgagttttgtcgtacaatgtgtattatgtttgaatgagtaatatatttgttttgtcaatttaactttgaatcttggccctgaaggaagaggccacagttgtcccattctgccccaccaccttttgggctgatttgtcattggtcaaaggaatgctagtggaaataatgtgtgagccctagcaactctccttttcctcctcccagttcttgagactcttagtagagcttttggagactgaatgagagttgttgagttattggttaactcattgtgcttgacggaaagtaaaaagcaaacaaagaccacacttcttcagttgctcctaacgttttaagagtttcgagttgcctctttgcagttgcagcttccaagggaaattgtttctcaggaaaatatgtgggaggttaaaaaaaaatgcttgaggaaatgtaatttcaaattattagtaaacataacattgaactt

SEQ ID NO: 258446 - DNA, 421 bp, Homo sapiens
tttttttttagttatgtgaagaatggtggtggtattttgatgggaattgcattgaatttgtagattgcttttggcagtatggtcattttcacaatattgatttcactatttcacttatccatgagcatgggatgtgtttccatttgtttgtgttgtctataatttctttcagcagtgttttgtagtttttcttgtagaggtctttcacttccttggttagatatcttgctaagtattttattttatttttttgcagctattgtaaaaggggctgcgttattgatttcattctcagtttggttgctgttagtgtatagcagagctactgatttgtgtacagtaattttgtatccagaaacattgtttcatttaccagttctaggagctttttgtatgactctttagggctttctagatatac

SEQ ID NO: 258447 - DNA, 411 bp, Homo sapiens
ttgcttcctgttctgtttaacgacaccctaacgattacttttcatttcagcagttatagtttgtttcagtagcaacagttatttccagttttagttttgacagcattcctagaactagctccttagggttttttaaagacaccaacgccaaccagcaagcgccccctactgagcggtctaggtcccagctctgagaagccactcaagtttctaagtttatggaacatctaaagaacaaattcatctggctctcatacagtttttaggatactactttgattgacatttcagtttcttttagatctatatcttctatttttcttgaggctattttgataattatttcttaagatattatcaattttcatctagataataaaatatatcattttatgtatttttaaattcatc

SEQ ID NO: 258448 - DNA, 282 bp, Homo sapiens
ctaaacagaaagttctgaaggtcgacagttgcatccttgtctcctgacaagagtgtcctccgcttcacaaatccctaataaacatttggttgagtttctcatatgtattacctgttcttccctgcctttactcgcatgaagtttgctgtcatgaatgtggaatttcactgttttttagaaaaacaatatgagttttgttcctatttactaagtctctgaaatttttaaagtagttttttctcactttttctaatacctaccagtataatttgtaaaaaaaaa

SEQ ID NO: 258449 - DNA, 470 bp, Homo sapiens
tccgatgacaagaacctgagagaacaattggatattcacccattgcctgcagcatcagtgaggaagaatcacttttcatagccaaccaggttacagagtagaagaaatgatgcaagaattagcagacacagaagataatgactgaaactctgccctagcaccatggcagtctgaaaggatctccacactttctcaggaatagtcagccctcggatctagcatgacggttacaaatagagcaacagctcaatgaccgaattaaactaactactggaagaaatatagacccccattcaggcttattccagtgtcagtgtggcaaatggccttgatgagctaggatctgaaaaggaaccaaaagaaggaagaaaaaaaccccacagacaaaataaaagcatattaccttcttaccccctgtttttattgaagttcaaagcaaacaggaaaagacttttaaaaagaagcacaaa

SEQ ID NO: 258450 - DNA, 840 bp, Homo sapiens
tgattacattttcctggtgtctcaattatcttttttaaattttgcattcatactccctgagcttgctcaattttatcttgccattaattcttcatcttctgaggtttggctccataccttctcaggaaaacaccttccaggctctgttaacttgaccataactttatttgtgacatgtttggtattctaacgtgcaaaaaaatattgacatacgggataatataagaaaagcagtttggtttgtttcatagcattagttccattttcagttgttaaacagtttgtaagtgtaacagttaataagtagaggagataattcactactcagtgaccagctatcattacacctttgatactgtaatggtagcaatgagtctatcctaagaaaaatattttcagacaatttcagtagattcaggaacctcctgaaatccatgcaaggctccagtgttaaaacagccttcccaatgtatcccacccacacccgagaattttgagtctccttaagtacatccatctacttgcaggggattgataattatttcagtatctactattgtgtttgtttgtttttttaaatattttttattgtgtttgttttttactttgagtataatttaacagcttggtcattttgacctggaacagttcttaacagcatctcctttagacagctgtttagttgtatgtagttattagacctaattatttgatgttattaaaaagatgattgatcagtagcaattgatagttgagcaattctagtctgaatttgaagtcatttttttgttccttttgatatatatatatatctttcagttgattataattacatatgta

SEQ ID NO: 258451 - DNA, 474 bp, Homo sapiens
cagacggagtttcgctcttgtcacccaggctggatggagtgcaatggcatcatctcggctcactgcatcctccgcctcctggcttcaagtgattctcctgcctcagcctctcaagtagctgggattacaggtgcctgccatcacacccacctaatttttgtatttttagtagagacggggtttcaccatgttggccaggctggtctcgcccagctcatgagttagttggaggctggaggtggggcccagcggcccacggcacagcaagcccgcctacaacactgatgccccgtacatgagactgatgtggctgtcaggctcgccttggccccatgaccaccaccaccgctcttcagaggcactgtctctgcccacatccattcctgactgaggacagtagtgttaggcttctgcagttacccattcaactctggtttctctgctgggaaactaagctttccacagccatggacg

SEQ ID NO: 258452 - DNA, 540 bp, Homo sapiens
cagagtctaggggtttggataggtcagaggaagatcactgaattcaggtttactccacccgagaggagcaggggtcagggtggaaattcagaagtgctcaaatataccatttttatcacaagcaggctgaccactaggaagggagaagatagaaggtgaagatttgttagggaattgcagagagctgaagactcatatgctggagatggctcatacctgctctctagagccgatggatacatttccaaagtttgcaaatcaattgttaaacacagccattattaaaaattacattacaaacttacaataaattacttgagaaacaaaggcaataagtactacaactcatcacaccttaataacgatacattattattatctatgctcttgaggttattcccatcgattgtatctgtctggtgaaaatatgatctgaaagtgaactactgtgcatctctttccaaccctgtatttggtaatatatcacattggtagcttgaaaacagccatggcgggagtatttatatcatgaaaatctgc

SEQ ID NO: 258453 - DNA, 372 bp, Homo sapiens
gcagaccaattcagagcccatttcagtggtgcaggtgagaggtgttagagacctggacaaggtggtggcagatgaagatggagagaagagagataggatctcgctatgttgcccaggctgacctcctgcctcatgcatccctcaccaagcttaacagtttttcaccttctcctctttttcctgcctggaacatgaatgtgatgactggaggtgaggcatctattttgtgaccatgaaacaagaaagcacaaaaggaatagctgagcctaaaaaatagaaggaatctggatctttgacttcaatgagccattgttgagctctgggctcttcattttttgttaagtgagaaaaataaagccttatttatttgca

SEQ ID NO: 258454 - DNA, 261 bp, Homo sapiens
gacgtcccactgacagatctgcccactataaaaataccacaccagcttctcccaaacagtttcacctttcctttctcccttaccttacttataactgatcttacaaggtctccaactccaggatcttgtgcaaagatcttaggagcaaatttgtgtggaaggggctgcaccacttcctttagcactcagatggttattaagctgcccacaaaggtaatgaaccacttatgctcagagaatccagatgccacctgacacaca

SEQ ID NO: 258455 - DNA, 448 bp, Homo sapiens
cctcagcagattagtccttcttcctctgcttccagccatagcaaagggaatctcttctccctcggtttcataccccacttttccatcaaatgtctcctgtctctatttcctccatcagctttgtcttgaatgaggactgtgtggtatctctgggaaggtagagggtagaaaattcctgccttaagttgaagggaaggtgcagaggtaggggatcaaattcagccccaaggaagaacttcacaaacctctggtcaggataggtggctggagggagggaagcagggaggcagagtggtggtagtggaagggcatggggaattttgggagacttgagttcgagttcacattctgccctaacaattacaacggtgtaatctttaagtcacatagtctctctgagtctcagttcttcatttaatatcatcatgtaaaagtaactttgaaatga

SEQ ID NO: 258456 - DNA, 445 bp, Homo sapiens
accagattatctgggtttgaatcccagtgctgccacttactagctgtgtgaccttgaagttacttaaactctgtgtgcctcagtttcctcatatgtaaggtaaagatcataatatcttataggttgctgtggagattaaattagtcaaatacatgtaatgtacttaggtactaggcacatagtaagtgttcaataaatgtgaccgtagttggggtggaattacaggtgggcacttggaaaatatgcataatgcaagtcagttttatctgttgcagtgtgaaatctgggcacctttttgagagtataggatgcatgtaaacattgctgcccagtcacggtgggaatggcagctgggatgggaggaagttgagaacattgttacacaacatgtactgttatttaaacaaataacaatcttagaaaaataaagaagatacggggaaga

SEQ ID NO: 258457 - DNA, 670 bp, Homo sapiens
agaggcaaatttggtgtatgctactatggatgtgatctaaacaacattaaaaaacagcatatttgtcaataatatttttgaatgtagtaattgatcatttaaatgaaaataatatattatggtctcatctttcaataattttgagagatttttctagaaactatacatttaaccaaaatcagtatttttatcatcaaaataatgtttccaagattttagtttgcaaaagttatagtatatgtgaaaagtctcttattttttaattctaaaaactgatcctaaaattttgtatagaaagtaagtattttcactctattaaaaaaatctaactcataaaattatgtatactttaaaaaaacaagttaagtatactgggttatcttgtaattgtttgtcttcttatttatttattcatttatgtatttatagtttgcagtcagctttccagagccagtagatatagtggcttgtatctgtgttgtcacatgtgggagtagtcaaaattgattttgcaatttctgttgatattgattaggaaagaaaccttataaatttctctaaagtcttttaatctacctaattattcatgaaatagtagtgacccttggtattttcaaatatacttaactctctaatcttaggcttttaatttatgtagatggctatacct

SEQ ID NO: 258458 - DNA, 294 bp, Homo sapiens
gagatacctgaggagcagagcatttcgaggggtagaggagagcaagtgaaaggccttggttctgcatccatgatgaaggtacacctaagagggtttgctgatggacgagatgtgggatgtgcgaggaggagccatcatagcgtggggttgcccttgactgacatggggaaggtcatggcaagggtaatggtggtgagaattcagggttgtgttgtttggctttagacatgttataagtttgagatgccagtcagatatctccttgtctagtagcttggtagcattagagttctg

SEQ ID NO: 258459 - DNA, 568 bp, Homo sapiens
tagtatctctctctctctcattctttctctctttcctttctctcaataaagtgacataatggctttcatttgtgcctccactcagaaaatgtgtccctattgcttgtgcaggccagttagttggattacctcatagatgacaaataggaggtgagataggattggggtcagtattcattctcttcattttgtcatggtcctttatgctttggcatttcaaattgatcaccaaaagtagcgaaaggcagctgctgtttgattctttgcttggtgagagtagtaatacccttgtttactctactggtagaattgccttgataagtataacttggatgtacaaagtctagtatttatacagaaattgatcaactgaaaattcaatttctctcttggagaactcactctttaaagatactgcagaggctgggtacagtggctcacacctgtaatcttgatactttggaagaccaaggtgggaggatcacttgaggccaggagttcaaggctgcagtgagctgtgattgtgccactgcattccaggctgagccatagagcgacacttgactca

SEQ ID NO: 258460 - DNA, 259 bp, Homo sapiens
cggcacgagggaaatagagacgagatctcgctatatcacctgggctagtttcgaaccctggcctcaagcaatgctccagcctcagcctcccaaagccctaggattatagatgtgagccactatgaaggggctcaattctgacttacatttctaacagatttggagtggcaagggagcttggatcaaatagtcaaatattcttccatggaggaaaggcaaagaaaggagaaggtgaccccttaggaaatattttagtcta

SEQ ID NO: 258461 - DNA, 668 bp, Homo sapiens
tcaaaataagtgacacttgtttaattctacttaatgaatgtgaatttccaagagagtcagatgcctttcagttagagcttcacctggagccaagttttccttcaatgaaaaacattatttaaacaagaaaaactatatacagacacacatatttttctagttgagtcaaacaactatattcttctcctggaagaaaatctggcactgttagtgccacaataccctgaccaatggcaagttgctattactttccagagtagctttttttccaaataagaggagttcaatttcattctctgtaaaacaatattcaaatgtcgaccacctttgacgtctttcttggataaccatgatgtgccctaatcattattattttttaagaataaacaagaaatgtggagtctcacattttaaacaaaaattcagaattaattctcctaaggaaatttttgtgtcattgacttaaaagggttgagacagaaagctggagaaaaagatttaccccaaagagacataatcaatgatagttttaatcttcctttctcagctaagattcaatgaagatacattggctgtattgcctttacacaaaacctagaccctcgcttaaaatggagcaagctagggagtcccataagaggtcctctttaagacatgacaatttcagt

SEQ ID NO: 258462 - DNA, 612 bp, Homo sapiens
ggaaatacagacacttcagagatactgtgtgttctgttccagactgctgctataaagcaaatatcacaataaggcaagtcacatgaatttgtttctcaatgcatataaaagctacatctatacctcactatagtctattaaatatgcaatagcattatgtctacaaaatcaatgtacatatcttaattgaaaatactttcttgctaaggtcttgcttcaatgttggtgactgctgactgatgagggtggtggtggggtaaggttttggtggctgtggcaatttcttatgacaagaaaacattgaagtttgccaccttgataagctattctcttctctgcagtgctatcaaatgtgatgctattttatagcattgcccacagtggaacttctctcaaatttggagtcaatcatctcaaatttgccaccgctttacaaactaagtttctgtaatatttcaagtcatttgttgtcatttcaacagtattcacagcatctgcatcaggagtagtctccatctcagaaaaccactttctttgctcatccataagaagcagctcctcatccgttcaagttatatcatgagattgcaacaatatagtcacactttaggc

SEQ ID NO: 258463 - DNA, 376 bp, Homo sapiens
cctctactaaaaatataaaaaattagccaggcatagtggtgcacatctgttgtcccagctgcttgggaggctaaggcaggagaattgcttgaaccagggaggcagaggttgcagtgagccaggatcgcgccactgccctccagcctgggggacagagtgagactgtcccaaaaaaaaaaaagcccccacgcagactattggtgtgccctggaactgagcattagctgttccctctccgagttctctcccctacttccccagccttccaggctgggctgtgggtcactgcctccgaggagccctcctggattctgctgaagatggtcaggcccctccatccccccattttctcttatgtacctgacagccctgcctt

SEQ ID NO: 258464 - DNA, 679 bp, Homo sapiens
ccccagtgataacatgtatgaaaatgtacagaaatgcaactattgtgaaaatcaaagacagatattacttccatttatttggagctttgtgaagtgttgtcaccatttgagtaaatcattcactactggtgttatttgagctgttcagaaaagatacccttatcagtcttcacttgcagctgtcactagcccagtacagctgacctctcattgttccttctggggtaaatataaatgagcactgatgtgttgaaataatttaatatgtaatcactttatcttttaaaatagtttacttttattttgcctttatttatacatatatttttaaattttgtatgaattttttctttaattgacacatgatagttgtatatgtttatggggtacaatttaatgtttcaatacatatgtgtgttgtataactatccaatcaagcttgttattgtatcaatcacacatgtgtttgttgtttctttgtggtgaaaacatttaaaagtttatcttctaactatttggtaatatacaatattttatcattaaccatattcaccccctctgtgccatagaattccagaatttattccttccatttaattgtagctttgtacccagtgaaaaatgtatccccatcctctgctttcttctcccctccccagtctctaataacaacggtttt

SEQ ID NO: 258465 - DNA, 1241 bp, Homo sapiens
agtggcttttaatatatttgtaaggttatgcaaccatcaccacttggcagatgctttttagaatattctcagttttaagctggaacatctcagaagtgacctcttcagggccaccagagtagagaggattccaaatcaaagtaatggttgtttaatccagaaaggcccttacactttattaatatgttaaattctatctgttgaggtagataataggtaagattctgtatttgagaatgtgtttttgagactgaagtgcctgcaagaacagtgctcatataaaggtgtttttaggcttcagtgggacagcagatggggtagaggagaggccccacagtatccctggagtatcacagtagtaaacactgcctttcgttacttctcctgccatggctgacctttttgtctcttgtttcatggttttacacgtatgaatggcttgagactgaggatttagggaagaagcgaaggcatcatctagggctgtgctgtgccaagttgagcagttgtttaaactgttagaatttttgactggtgtaaaaaccctctttggagcaggtattacgtagtgctgtcagtacatatcttattgcattcttctgttctttattttttaccttttctgaagttgcacagcgtgaaaagacagcaatttcagtttgaacaagttaaggaagtaatgtagacgacaaagtttaagccttgatttgcttgctttggtttgctggggaagaaatgtctgaaagtgttcagatagtattttctttctggttgaagagaaaggaatgaaaaagagatttgataaccttctgggttgagttagcagtattggaatggaatttttttccagaaatgcgaatttctggttttgctcagatatatgtactagcgactcattaacaaacatttaccagtccactgaatgaaagatgctatgctaggcacttgaaataacaccaagatgaataaattgtggtcctgaaggaatctagaaagggatcagatgcccagtgtactctagtggaagtcacagtgtggtaagtgagccctgcagagagtgtagagaaggctttcaaagccgagaacagcaatcccttacgtaaaacctctcagtcttgtcactctcataaaactaaagatttatctattatctgctcactgttctttgcgaatgccttgtgtgtatttttttttctggcctcctgggccagagtgcaccagtacgatcatcaccaaggttg

SEQ ID NO: 258466 - DNA, 898 bp, Homo sapiens
cggacgtatatgccatagctgattctagatgtaacactggtcatctctgctacacctttttgtctcttgtttcatggttttacacgtatgaatggcttgagactgaggatttagggaagaagcgaaggcatcatctagggctgtgctgtgccaagttgagcagttgtttaaactgttagaatttttgactggtgtaaaaaccctctttggagcaggtattacgtagtgctgtcagtacatatcttattgcattcttctgttctttattttttaccttttctgaagttgcacagcgtgaaaagacagcaatttcagtttgaacaagttaaggaagtaatgtagacgacaaagtttaagccttgatttgcttgctttggtttgctggggaagaaatgtctgaaagtgttcagatagtattttctttctggttgaagagaaaggaatgaaaaagagatttgataaccttctgggttgagttagcagtattggaatggaatttttttccagaaatgcgaatttctggttttgctcagatatatgtactagcgactcattaacaaacatttaccagtccactgaatgaaagatgctatgctaggcacttgaaataacaccaagatgaataaattgtggtcctgaaggaatctagaaagggatcagatgcccagtgtactctagtggaagtcacagtgtggtaagtgagccctgcagagagtgtagagaaggctttcaaagccgagaacagcaatcccttacgtaaaacctctcagtcttgtcactctcataaaactaaagatttatctattatctgctcactgttctttgcgaatgccttgtgtgtatttttttttctggcctcctgggccagagtgcaccagtacgatcatcaccaaggttg

SEQ ID NO: 258467 - DNA, 676 bp, Homo sapiens
ataaattatatagtatatataatataaaatgtatagtatatataatataaaatatatattatatattatatataatataaaattatatattataaaatatatattatatataatataaaatatatattatatatattataaaatatatattatatataatataaaatatatattataaaatatatattatatatattatataatatataatatatatttgggggtggggagttccacaaaattccaaaaagcaaaacttgaatttgctgttcacctagtactacattgaatctatgtgaaagaagtgatgtgtaggcattgtattaggtattataagtaatctagagatgatttaaagcatacaggaaaatgtgcataggttacatgcaaatactacatatgccattttatataagggacttgagcaactgcagattttgttatctgtgggggtgtcctggaaccaataccccactaacaactgtactaaagatggaaggtattattttaagttctacccacctcccaaaaaaaaggatctttgaaactgaaagtgccatgcaattgtacaaaaaaacaattgctgtgagtttaggaaatgttacaaatctaaatctcgttctaaggaaaattttaacttccaatccctaaatattcccttcttaacagtcaaagg

SEQ ID NO: 258468 - DNA, 725 bp, Homo sapiens
cccagctgagctgttgatgctccaaggtcctgtcagaggcagctgtttgagcattggtccctggagttgccagaggtgcatgaggagggctgggcccggaggtgaaggttgacaactacagccctccgcttctcctgcagagatagaaacaccggaaacacgtggagaggtgtgcacttacggcaggcccgctgccttcttctcctccagcatcctgtgtcctgctgggctggccgtggtgcctggccacactccgaatcaagcctttagttggtgatgtccaaaggcccctcctccagcactctgcacccctggttcagcccgatgtccctagacggtgtcaggggatcctgtacctgaagacatgggagacaaaccattcccaaacaccagggaaagggtgtcccaaaatatcactgtctctctagagaaaggaacccctgcacacaccccacctgagccaccgtgctcacttctcatcgctgtcagagccgtgcacttgggctgccaagacctgtgaggaccagcgggtttctagtggccgcagccgcccgtttccctttccagagctcctctctcccagaggacggcgtccaaccggaaaggtcctttgtgtttggaaagggcccttttctggcacaggctacagcataaagatgaagaagtgagaccacttctaccatactccagaacccaccagccccactttggggggccctgaggcc

SEQ ID NO: 258469 - DNA, 479 bp, Homo sapiens
gaggctcggggacttcccacatcccgggatgggaacttccccagttctccccctcggcgactgaatagtccaggggaactggcttttgtgaaaattgggaatctaagttagtgcattttgaactgttggctgtgtgtgaggtgctgcaggaaattctagtttgataaggggatgccgagggaatttcctggcatggatgctgcttgcttactgcttataagttaatgtgtcaagatagggaccggttgctacaaaagaaatgtaagctggaaaaggaaaatgctaatttgacttccagactggccctggcccaatgccaggcctatgtcttgactgatcaagctcaaagctagtaatgcttcctccatagtctggtgggtgtaaatatatatagacatagctcttcttctccctttcccactgcgatttgcttattatgtctgtattgccatatacttggaataaaggtgtttaccctt

SEQ ID NO: 258470 - DNA, 659 bp, Homo sapiens
  misc_feature (437)..(437): n is a, c, g, or t
  misc_feature (457)..(457): n is a, c, g, or t
  misc_feature (475)..(476): n is a, c, g, or t
  misc_feature (542)..(542): n is a, c, g, or t
  misc_feature (552)..(552): n is a, c, g, or t
  misc_feature (555)..(555): n is a, c, g, or t
  misc_feature (569)..(569): n is a, c, g, or t
  misc_feature (659)..(659): n is a, c, g, or t
ggggtaggaactggggaaaaaccttgtgcacaagacctatggcctaaagtccccctgcctcttttggggtcccacctggagctggagattctccattgtgaactttcctggcacaggaaagttcttgagggaaaattgagggaaatgctgagtgagttctcctctttgctgagcacagaattctcaccctctgttgtacgtggtgttttccctgcccggttgagtcaccgctcctggtcccctccctgctactccccaggttttgcttctttgctcatatgcttatccttttctagatttctcttcatggagcccccattgtagccttgagtgacaacatcaccctagttcacaacaccttagcatgcctgaggactccttttgtaccactgtgaacacacacacacacacacacgcacaccagttccccacatccnctttcaatttcatacagganaactcatgactgtgttgnngaaatcatttgcatggccataggagacacaatgaggcatcatctgtctctgagaatacaggatctncatgtccaangangtgagagactgcangtgcacagaagcccaaggtttcaggatcttggagaggaatcacaggagaccaagtacagcaggacttgccaagaggaccgctctgtggtn

SEQ ID NO: 258471 - DNA, 479 bp, Homo sapiens
ttacaggcatgagccactgcacctgggtcccttaatttcttaatataactattattcatttggagggaagttgttcacaatgctctgagaactattttaattgaaatataatgctaatcatgaaatttctactttacctggccagaaaaagtcctcaggggacaaaggaagtgagggaggtttggcttccacccaagtcacccagtgatatccagggttggttatgttttgtctggttttgcctctcaccattctgtatatgctcttttaagattgggactctattacaaagtccggtctttcagttaaggccatataactgatgggatccccctacttgaagtctttcagatgctgtgagttgagtctcataattgcggcccattcaatactcaggcaatggggatttggcaatagaaaaaacaccgtgcaaactctgaaggtgtctttaaattatcctatgttacagttggattgag

SEQ ID NO: 258472 - DNA, 644 bp, Homo sapiens
tgaaaatatattttcagggaatatttgctaactccttattatgctaggagtttaagatactgactcaaagactttgaagtgattagagcttcctctagagtactgtggcctatgtgtactaaaacatctgattgtccgtccaacttgataatatactgctatcttttgggcctctggtgtattgtgtatttccattatcttcttgctatgaatccttgatgtcaaatgtcagatatggacacagtaatgatgacagttacaatgaaccagtgctgatccatgaagggaatatggaggaaagagtaggagcggtggtaccagactcaatgtgataaagaagtgagtttgctatttgctgctgggtatttttgattctgtgatagttagtgaagttaattgctcctattttttctttttaaccagttgatgttttctttacttacagttcagctatcttgataataatcatgctcatattgggagaatagtcttaagtgcaataagataaaactgggaagagagttcagagatcttcattgtccaaaaaatgcctttctccctcctttgccactgtcatttttggtcacggtaagattaacaatggccccctaaagatatccagcccctaatcctctaaacctgtg

SEQ ID NO: 258473 - DNA, 598 bp, Homo sapiens
ttttgagacggagtctcgctctgtcacccaggctggagtgcagtggcactatctcggctcactgcaagctccgcctcccgggttcacaccattctcctgcctcagccttccgagtagttgggactacaggcacccaccaccacgcccggctaattttttgtatttttagtagagacagggtttcaccgtgttagccaggatggtctcgatctcctgacctcgtgatccactcgcctcagcctctcaaagtgctgggattacaggcgtgagcaccgtgcctggctctgatatatattataatatgggtgaaccttgaaaacaatacacagatgacccctgacttactatttttaaactttacaatgtttcaactttacaatgatgtgaaagcaataaacctttagaaaccatacattagagtacccatacaaccattctgtttttcactgtcagtactgtactcaataaattacataagatattcaacactttattacaaaataggctttgtgttagatgattctgtctaactgtagactaatttaagtgttccgaccatgtttaaggtaggttaggctaagctacgatgttcagtatg

SEQ ID NO: 258474 - DNA, 413 bp, Homo sapiens
tagaagaaacaccaaatacacagcttaaagaatttcattaatacacctttgaaaaacagctctaagaagacaggctattggtatttttaacatgtttactctcaaatgatttatacacttgatcctttcaaaggagtagaaacagcttagaaagaaggcaaaggaaaaagatattgaaattaaaggtagagctccctctaaaaacggaaaatcaaaggaagtggaagccagttacataatactcaaatatatgtataataaggaactgcatgctttgttaacagaaagctgaatatttgggttggacacagtggctcacatgtgtaatcccagaactttgagaggtcagggcagggtggatcacttgaagccaggagtttgagaccagcctggccagcgtgctgaaaccctgt

SEQ ID NO: 258475 - DNA, 622 bp, Homo sapiens
caacttaaactagttgctccctaagcctgtgcttagttttgttatgtcaagattatcctttgccactcccttgtattggatgtcctgtttgctgaaccatgaattattcctcatttcttggcttactcatcattttgatgaattgtgtcctctactagcttcctgagaaggtgtgcatcttttttcagtttttgcatatctaaaaatatatttatgcgaatgatagtttggctgaagtacataaaaataattcccatgcagtttttaaaatgttgtttttactatcttcttatatccagtatttgtattaagtctgatgcatgtcttgctccagtttcttggtatttaggttactttttttctttttggaaactttagtgattatctctgtcactggtgttttgaaatcgcatgatatgttcacccatccttttttcattcattgtattaggcatctgacaaacctttggagtttggagatttctgtttgggagaagttttcttgtttcatttctgtggtaaatgctcacttttattttctgtgttctcctttttttaagaaactcctattgttctgacattgttctgacactgagctcctgcatcaactcctttttttttt

SEQ ID NO: 258476 - DNA, 463 bp, Homo sapiens
ggaaaacaatgagatagaggtagaagaccagttaggaagttacttcagtcatacagatcagttgagagattacggtggcctagatgatggtagtagctctggaagtagaattaaaggatttgaacagtagtgtaaataatgattctaaaattatatgaagatgttttcccacccatagtctgatgtattatagtttatgatacttgaacaatgttctaagatctgcatgagataagaatactgtagaataacataagaatttaaggcagtggctttgagacttctaaatatttttcactctcaatatataccattataggcaggtttaagaaaaagtcataagcattaaaatcagattaactctgaaatgatgagagaatagaggaatattctagaccagcatcattccaagagatctaacataagccacatatgtaattttaattttttagtagctactttt

SEQ ID NO: 258477 - DNA, 1199 bp, Homo sapiens
aacacactaggcaagctcccatcaacaggtctctgcatctgctgttccctctgcctggaagtctctcctcccagctgtctgcgtggttcaccttccttcaattctttcttcaaatgccaccttctcagtgaggccttccctggccattctagataagaccccctactacacctccgaacactccctctctccacattgtgctttttctccacagcatttatcaccaactaatgcactatatactttgcttctttatcattatttttagtctgtctccccccactagaattaaaactccatgaaggcttgcatttttgtcttttttgcttactattttacctgtcaagacaaggatggtgctcagcatattgtaggcgcccaacagatgtttgctgaataaatgaacttctccgaaatgtaataatacctgataatatgtttagcctgatcaatattaattaagtacaacagacagaagtcccagaattgtcatcaaattagtagaacactttgggagggataacaaattgctcattcattcattattccagtcactggaaaaacagaaatgaacaagtacatatgatacctgtcctcatggagcttgcagtcaaagtgaaggtgtccactcccctgccccataaccagaaccaaacagtgcctgtgggtaaggccaaggtcacctggcccccagttctccaagctaacaacatgtgaattatcctcaattctttcttctccctcaccttccaaaacaattacccaatttgtcatcaagacctcttgagtctacctgaggaacgttccaaatgcagtccaactctccaactccactatcattcaattcctcatcctacatcatctgccacttgagaactgcagcattctccaaactaggatctcaccacaggctctcctactccaatctgtcttacaaccttagctggagttacctgccccaaaacaaacactgttccttttcttaaacattttttggccaggcacggtagctcccacctttaatcccagcacttcggaaggccgaggcgggcagatcacaaggtcaagagatcaagaccatcgtggccaacatggtgaaactctgtctttactaaaaatacaaaaattagccaggcatggtggtgcgcccctgtagtcccagctactcgggagactggggcaggagaatccgctgaacc

SEQ ID NO: 258478 - DNA, 251 bp, Homo sapiens
cactcattcattaaatgttccccaaggcttagtctcaggttcgctttttttctgtcagcctaaataacagagagagtctctgtaaaagaaaaagatatgtggtaaattatgtgcatatccagggaggtttaaaaaaagataaaggtatttaaaggaaaaatgagaaggataattgttttgagataattatccttggctacaaagatcaataaaaaaagtgatgccagtccagagtcatacaggcagttgct

SEQ ID NO: 258479 - DNA, 673 bp, Homo sapiens
ccactgtattgtattcccttctattctgctgctgccacctctgattgtaatgactttttcactgggctggatagcagctaaggcatcaaaagcatggtttcctttttccaaaatctctggtctgtctgccccgcccgcaccgcccccccccccccacccccggcctaagataatctttgtgtggcatcttttatttatctaaataagatttttggtcattgtgcttttacttttagacccatgactttggtaattcatttatcacactaaagatcatttcagagccttcttatggctcaatgagtaaaatcctaagaatgtttcttttccaaatagcaaattgctggaagtgagaagcattattttgtccatgagagcaacctaagagagagcagttggagtttatgttaaagacagcaaatggtttattgacttcaaaaagtttagcccctgctgaaacagtctgaaggaaccagcagcactgggcccattaaattcaagaaacaataaatttccgttattggcacaaacattaagtctcttgaaatgtagagccacagtgataatattgctaagtttgggtttgtcatgacaagatattgagaaatctatgaaatttatgacatgttagggaaatgtgatatgccatttaattgatgaacaatccatcctc

SEQ ID NO: 258480 - DNA, 139 bp, Homo sapiens
ggactgttcctcagtctgtctttgttttccacggtgctgacatttttgaagggtacaaatcaaatcttttgcagaaatgtcctttcatttgggcttgtctgatatttcttcataattagatgcaggtcacacatttccg

SEQ ID NO: 258481 - DNA, 248 bp, Homo sapiens
taggattatgggtttgaggagcgcagacaaggttatgggcaaccccagaatcagtaagtttcatttacagagagatcaggattgcaatctatgtggatccagggacttacgtgacatatcaggggcaagggcttccaaaccaagacagactcaaggctgaatcctggccaggccaatgaccgactacatatcattgggttggaaacctccctaagctttgctttcttcgtctctataatggacacagt

SEQ ID NO: 258482 - DNA, 457 bp, Homo sapiens
cgccatgaggtccagggagacagaatccaaggagagagcccagggtcccgggatgctgctcaagagggagcccggggaggggccgggggaggggaccacggaggattccagaagcaacgtccccattgataaagtgccctggtatattttaatgtattgagataatgtatttctggaggagattttagggatgaatcagtgatgagtgatgatagaggaaactaaaatgtgaaaaaatgagacagaacttcaggtagaatagaaaaatgtctgagaaggaaactgtaatatagaacaccacattgctcagctgtgagtgaagtcacggaattgtaacagagtaaacactgaatgttattagtctaaccacaagttatgaaaacaatatgctaaatctcgatcttctgcagtaagaagagatatccagaactgaaaattaacaaaacagcagcgtaga

SEQ ID NO: 258483 - DNA, 404 bp, Homo sapiens
cttttttcatgcccaatgtatttttcatgtccttcctttcttccttcttctctccctccctttcttttttaaaataaatttttataatttttttaaagaaatagagacaggttctcactagagccccccaaagtgctgggattacaggcatgatccagggtgcctggccctccctccctttcttctttccttttgttgattagaattgcaagagggttatccttgaaatctgtgttttcaaagaatcagctcttgaagtttataaggagttctactctattctttgattaagtcatctaatttgctttttagtagtttcttcttccagtttgtttcactgttttgttgagaagctcttttttaagctttttgaatcaagtgcttagtgtttacttcaatacatt

SEQ ID NO: 258484 - DNA, 196 bp, Homo sapiens
taacacatacattgtgtcataaatgttatattaatatacaaaataaatatatatatttatgatatgtgtgcatatgccacgtttgcttaaaaatctatttactcctctttccctttaggtttcggtttcctatttaacattttattgtatcgttaaaatactaaaaactgacctcagtgacagagaaaatgtatac

SEQ ID NO: 258485 - DNA, 326 bp, Homo sapiens
gcatgatcgtagtgtactacaacctcaatttcctgggctcaagtgatccaaccacctttcccctctcaatgggattacagttgagagcaatatttccatataccttgattacaaccctagaaaaatcacaccaggtaacctcagttgagccctgctgagcaggagaaagggagaatccactcaccgaactctgtgctgaaaatgcctccatctacaagaagagatgcgtttttctaattcatgtaaaaattaataaactagctgtatggaatggtgttactctcccacaaacatataaaaaataaagatgcaatcttaaatttata

SEQ ID NO: 258486 - DNA, 371 bp, Homo sapiens
ccttccctacataatttaaaggaaatggaaatcttattcaaccccaatctcaaaaaaacatgtaaattgcaactgatgatattgtcattgaatgatttttactttatctttccattgcattatagttgagagcaatatttccatataccttgattacaaccctagaaaaatcacaccaggtaacctcagttgagccctgctgagcaggagaaagggagaatccactcaccgaactctgtgctgaaaatgcctccatctacaagaagagatgcgtttttctaattcatgtaaaaattaataaactagctgtatggaatggtgttactctcccacaaacatataaaaaataaagatgcaatcttaaatttata

SEQ ID NO: 258487 - DNA, 186 bp, Homo sapiens
agcaatatattgtccctattcagatttcctcatttgcctcaaaaatgtattcaaagttgtttcctccacccctgtccaagatccagtcagggtttacacatttaatttgatggctatgtcccagtggaatttgctttagataagtttatagtgctgttatttatagggctgtagtgatgttgaaga

SEQ ID NO: 258488 - DNA, 376 bp, Homo sapiens
ctatgtaagaaggttgaaagatcatagtctttttggaagactgagtaataataaaactccagtctcgtgttaaaaaaaaaaaaaaagaaagaaagatcatagtctctcttgataagatatggagatcaaagatggataaagcatggtttgttgcctttaaataacttttcagtgtaatgggccataaatttaggctcaattatgtgggtatactatccaaaccttctataggacatttgcagtgctaagtttcagcttgtccacactgattgagaatcactgctgatatctaagaggactgggtggggtagggctggatttttaaactcacgaggtagctgtcactgtcaataaaatgccaatagcaaccacagtg

SEQ ID NO: 258489 - DNA, 431 bp, Homo sapiens
aagattatttgaacacagcactgctataccatgagagtggctctggcagctcatatggttactaagtgaccaacagatgggtagcatatacaatgtggatacttgggacaaagggttgattcctgtcctgggtggaatggactgcgatggtacaacatttcatcatactactcagaaaggcacatgatttaaagtttatgtgtgatttatttctgaaatattccatttaatactttgagaccatggttgacagtgggtaactgaaaccactgagggcaaaaccttgaataaggggagtgggaatgctactgtaaaatgtttcaaggagacaattaaaattagctgatttgcatgcatttcaaaaggccactctcgtggtggtatggagaatagaggaggcaaattaaagtatatcaatccagatgtgttgc

SEQ ID NO: 258490 - DNA, 394 bp, Homo sapiens
tacactggccttcaatctctcctcattgccaggcttctctgattctgggcctcttcacaatgctggttcctccccaaaactctggcatcttttccatagctcttcccacaggaagagcttatttcttcaaggaggccccctgggcagtcctggccaggtgaaattcttgttccttttaaaaaaattttaatagcattcatctcaatgtgcagttacatatgtatttgtgtggctaatttgatgaatatctgtccccttcactagagagtgagtaccatgagagtgggcatcaaggtatgtgctcatggctgtattctctatgcctgcatgtcctaggcactccaaaatattgattcaataaatgaagtaatgatggtttggaaagcatttcaag

SEQ ID NO: 258491 - DNA, 646 bp, Homo sapiens
tctactcgcctgcagttggccattgaggcatcggccgagtccctggcctccctacagcgacagatcacttcggtagcacaggtcgcagcacagaacaggcgggccttagacttgcttacagcagaaaaaggagggacatgtttattcttacaggaagaatgctgctattatctcaacgtgtcaggggtagttgagaccaatttacaaactttaaaaaaaaaagatccaagaggagttaaaacattcctaggaccctctccaccctggtccttcttggtggttttcacctgtggttcaacagatgctccctttccttatcccaattataattctctgtataataatgtgttttgccccaatcctagtacagtttctccgccagcggatacaagaaatcaccagggtcactttcaaccagatgttacttcacccctacgtccaactgccaacctctgatttaggccctctccccagtgacaccccttaacagcaggaagtagccagatgatttcgtcgccccttttctataaccaaaaataggctggactgattggactccagtgaagactccaagatggcgatcaccacctcagataccccgactcagcatttccgggttcacctttcctgttcccgtcaccccgac

SEQ ID NO: 258492 - DNA, 822 bp, Homo sapiens
tatacttaaattgcctaaccagagtccagtgcaaatgtgacctgtttccattatgagtgaatatgagtgatgtgtacgttgttgagattaagggattcccctttgccctactgcaaatatgtaaattatgtatttacatcacatgctttaaaaaaatactagtttatttgatgcctgtttccacaaaggatttaaggtagagaaatattctgtaagttacatcctaaagactttaaactaagcttttattttttgtgtgtgtgaaagtgtttactatcatatttactgtctttactatttgtttgacattagcaccatttaaacttatattggtcaggattgtgaagtttcaaacccagaacttaacaatctataagtttggagggaaacataaaattaatttccatcaatatattacagattattatttgtctataaactagtttttctttctgtatgtactaggtataatacataatagtgttatgtcatacataaatataattataatgattcccctactttctcagggatgtttctctttttattcctttatattctacccaactgagacaacgagttggacagctgagtttaattaccaaaatggcctttggtagatatacatgtccaaagctttaagtgtacttttacgacttttggtaggggactgtactttgaatatactgttatccccaaagttcaaatgaactatgtcatataaaattttgtaaaatatctttctttatatctactcaatgcattattaaaagatacagaattctatcaaatctcatctaagaatactatttttattttaat

SEQ ID NO: 258493 - DNA, 572 bp, Homo sapiens
ttttatttatatttttaatttttccgcctttttcctcccaccgtgtttgggaggatcttttgagcattgtggcttcttttattgtttttgcttttctggaagaagcaaggcgcatcttacatggcagcaggagagaaaagagggaggagggacctaccaaacacttttctcttgttctggaagaacacttcttgtttgttttcacttgttttggaagaagacggctgccatgtcatgaggacactcaagaaaccctgtgaagaggtttctgtgttgagaaactgaggcctccaaccagcagccatgtgagcaagccatcttttaatccaatcctctagcccaaattaagttcccagatgggtgcagtcatagccaacagcttgaatccaacaccaggagagaaacaaagcaatctgaaaggtcatttaaaggtgatacggcatcaagaactgcatctctgagtcaccacttagaggaaacacaccctgcaatgtcacccaagcatctgccttcccagtaatatctgcactggattaatctgtgggcaagaagggaacttttattctgtaaag

SEQ ID NO: 258494 - DNA, 431 bp, Homo sapiens
tcaataaatcaacacttccagcatcaaaaacaaatgcaaagacacataactggtttatatagtataattatataatctattttaaaatataaattctgcgtgcatgccaggccctgaggcctgatggcaagttttaaagttcatttaaggaaatcgacttttatctgttctgtcaagctgtccctgtgaatgttcattaagcaccatttgggaaaaaggctacatttgaggccttttgtgactagaaggcctgagccagatcctcccatgccccagaccctggggctgatcctccctccaacactttgactggagctctgtctctctacctccccaagacacacacacacacacatacacacacacacgcacacacaaacacgatccatctgtgggattacggttttacccggctccattcctgtcttaga

SEQ ID NO: 258495 - DNA, 559 bp, Homo sapiens
ccagcagcctgcacgttgcttcatgttatgtctgtgggggaatgaacatgggagaccaatggccatgggaagcaagggaactaatgccccaagataatttcacactaaccgcctcttccctcgaacctgcaccatcaagtcagagcatctggttcttaaaaacctccattattggaaaattctgtattgctcgctggggaaaggcctttacagacccagtaggagagttaacttgcctaggacaacaatattacaacgagacactaggaaagactttatggaggggcaaaagcaataattctgaatcaccacgccgagccctatgcacaaaaacaaggtattgtctatgcttaaggaaccacctctgcatgaaaaatgtgaggatgggaaaaccgagaccacttttgaaatgtccatgcataacacaatgaagtctaagtctcctcttcccttaactttacaacatttagtggctttttgggaagacatctctttggctactatcaaagctgcttcccagaatatgatttttccaagtcctggttcctgtgcagttctt

SEQ ID NO: 258496 - DNA, 534 bp, Homo sapiens
gagcagcagcgacatgagggtggacttcattttcaggtatggagttttcactgagtctgattcaacacagtactggcagaaaccaaccagaagcatcatcaaacaaaagcttcctggaagttctccattgaaagaatggctgtgtccatttgacgtggaacctgcaatgctgcccatctcactcacagtgaaaagcagaggcctcacaacatcctgtgccacctggccctcctttattcctctagcctcatagctcacactttcctctttgcccactgtcctctttgctgttaaatatgtcacacacgctcccacctcagggcctttgcaattgctgttctcccatcagaaaatgctctttctcatctccttcaggtccttgttcaaatatcagcttatcagtgaggttttccctcggcatctaggtaaaaatgcaacactttcctttccctggccctccaccctcaatcttttttgtccttattacctgttttaattttctccatagcccttataatcttaaggcagtctgta

SEQ ID NO: 258497 - DNA, 439 bp, Homo sapiens
ccctccccagtttactgacactaggagtctcagccatgaacctaatggtgggcttgaaaagtggagtacggcttctgcatttctatacaacattaagtttcaaaggacagatgaaagcagaagagccatagaagaaggctctaggtgctcagttactgctacatctttaccatcctgcacgcctcttttacttatggctagattcccgctaacaaatgttggataagaaacactgtctgaatcacaagaacagagaggttaggagaaatagttttgctcactccttccatgtggtgaaacatctactaatgcaatactccagtcctctctctatccttactcacatgaaaatgcaatggttcgatttgtaaaggtaaataaacagatgtgttattttgcatgtatctacattatacttgatatttgaaatctgccgtca

SEQ ID NO: 258498 - DNA, 468 bp, Homo sapiens
gataaatcactgcaaagaatgaaattggcttattcacatcaaaactagataagatgctaaaaaaaaagatatgaaatagaactaacctatagtttcctgaaatcagtacagtttaatttataagaagctagaaagtaatgcaccttgattgttttaggaatgatttatgtgttgcaattttaatttatttaaagcatgtctactgtgtttgtcctaagagaaatatttcaacaaaacgtgctctgtgtttaagatatgtttaggcagtagttagcaactctgaaagtagaaactggaaatgtttattgtgaggcttgttgcagaatttccattttgtgagttactacttagtttcatgtcagcctaaaattgtaaattccctgtagatcttcaccccattgtggtgtcatcaatgaatccaaagcaggtgccattatttttttaaataaacacttgatgttagctttg

SEQ ID NO: 258499 - DNA, 611 bp, Homo sapiens
  misc_feature (363)..(363): n is a, c, g, or t
  misc_feature (365)..(365): n is a, c, g, or t
  misc_feature (376)..(376): n is a, c, g, or t
  misc_feature (383)..(383): n is a, c, g, or t
  misc_feature (427)..(427): n is a, c, g, or t
  misc_feature (448)..(448): n is a, c, g, or t
  misc_feature (488)..(488): n is a, c, g, or t
  misc_feature (509)..(509): n is a, c, g, or t
  misc_feature (524)..(524): n is a, c, g, or t
  misc_feature (586)..(586): n is a, c, g, or t
  misc_feature (594)..(594): n is a, c, g, or t
  misc_feature (596)..(596): n is a, c, g, or t
  misc_feature (608)..(610): n is a, c, g, or t
gatttcacagtcttctaagcttggaacgcttggaaaggctggcttggcagtaggtagtgtggccggcttgccctattccttttctcttgtgttgtgactgtggcgtaacttagctgccatgggtttaaatgggtttccaagatggcgtttaacttcctgcctggtgggagagaaggtggcttgatctcagtaacatcaacccacttgctctaagatttagtagaattcatggtcccaagtatatttatgccaaggctgctgattctcagctcctcggcatatggggacaatggggaaggaagatcttggcccattgccatctcctgacagttcttttggctgttgttttatcgctgctttcananagtgacttttnctgtctngttacagtgattttctcctccctgcagtgtgcagggttatagcnttgctggtttgaaaagagacnactgattatttgaaggcttaggtggaaggatgttaggaanattcagatctgttctcactanatgccagtaggaaanaaggcatcatcttttgtgttcaccgcattgactctcattctctcatgttcatttctcatgantgttgganantctggtgtttgnnnc

SEQ ID NO: 258500 - DNA, 369 bp, Homo sapiens
aaaaaagttcataaagactgtagtcttgtagggaaatgctcttgatagacaattaaattgcattcagacttcagcaagggttattgattgcctaccgtggagaaatatactggttaagtggtgactgtagagtcagacccagattcagagctctcatagctttcccatcattcacatatcatctgcttccatgagtgtgcgtgtctgttaccacctaagactggcttaatcaataagaaaacactcagacatacttggaagcctagaggaaggctgctttaagactggttgattcagtgactcgatgatgtaattaaagaccagggttcctggactccagcctgggcgacagagcgagacaccgtctca

SEQ ID NO: 258501 - DNA, 2075 bp, Homo sapiens
tcactagaggtggtcaggcaatgaagagtgaacagggagttgtagtcccttggatattgatgtttccaggactaaatcacattggagaacaatcaattcacaagctgtaaagccccagctttaatcactttctctctcagaaagatggtgcctgctctccatgtaacttccatctcctcagtgccagagacagggaccacactagaaggcagtgattgtccactgagattttgtcccctttaaattaacctagacatttgtcatcacagacaggagcccccagagtaagcttacagcaagtgaagtgggaatccttgagggcaatgtcagcctgccctacaacgttaaccctttcaccaccgcatactatgcacttatttaacaccctactctgcctggtcttcagcttcacaagccatattgacagaaaccagggatttacattcttacttgaaagctgtttttttccaggtttggagcttagagatgaagatgggagttccaggaggactgaggcccatcttggagatgaaatacttcctggcgaaggcaagcatagcctttattttgcacacttcaagtcagaagcctcaaatcaccttctgcccttgaccctccaagcccactttcacactccctccccgcttcgctccccgaccccaccccatcaccactctgctactcgcaacgctgcctggtcgcacccaggaaccatctttgtgggtggggttcctcgtctccgcggacaggctgctagtgagccgcagctcctccatccggaagccagggatcttcatcttgccgcggagttccatgctgccgtcgcccccagtcttcagggactttgcgctcccgcaggctcctgctcacctctcccatcgttgggcgctggtggcaccccaggaggagagaggagcagcaggagcccggtctcgcagtgccggcacggacagtactctgggggtctgggccgcgtgccacgaggagcagaggagccaccggagccgcttccgcagacgccctgacacggaggacccagagcgccgcgccgcgccgccgaggaacgcgctcaccggcgccaaattttcccatcccgggagcgagggcggcggcgaagggtccgggacccgaggtggcggcgcggggctctgcgcgggcggctgtgggtgctggagctcaggaccctaactttagcgaagtcgggccgcggcggggcgggtggaggcggcgtgggcaggggctgccgcaggtgcggagtgaggcgccgccacacgggcgggggcaggagtctcaggaactcggcagccgccagcagagcccggtgcgggaccgggagctgccggggcctcagtccgctctccccacagctctccgtggctgcaggttgaggtcgaactgcaagcgccacggaccctgcctgctgtttactgcgttttcactggagactccagcaaatgtcctggagaggagagggattcctgctctgtccatttagtctctacattggcaccttggtgtaaacccacagcagaggctgcgtgtcctggctgagaaacacagaagggcagcggggacggaggtggggccgtgtgcagatgaagtatgtttatgaagtacatgattgtgagcgtcagcgtatgtgtgtttagggtttttcccatcagtctccagctttgctcccttttcttgaccttctgtagcactcactctgcccaaagccagtcttgcgtaatcccatttgaaagagcactttgttactagccatattctaaatgttttgtgagcctacactatggctttagaaaaaaaaaccacacacaccacactaggggaaaagaaaggaactcaaaactgtggcttgggaacattttcatttggagcacaccaattagtcccagggtttagctctaaacccaagattccgtaggaaatcggacatctattggagacttatctactacgtttgttatatgactgttaaaccaattcattgacctgtatcacattccccacctcaacccttgaagcagctggcatgccgtctgaaatcttggaataaactttgcatatggtta

SEQ ID NO: 258502 - DNA, 509 bp, Homo sapiens
gcataatgtaaaaacattagcatatatatccttcaaagcattctgactttacttttcagttctcagtagcttctctcatgctttaaaaacggagcggaaaccagccttttcctggtgcgcattttgtgggcttcagtcagctgcaggtccagcggcttctgcgctgtcgggggcctgcaccgcctccctgctcttgtttagtctcctttttcatttgcagggcagcgattcccaactgcgggaaggagcttagatgtttttggcagttcccgtggagaaaccctgtataagttatcgccaggagctgaagggattgagttatttcccagcggcctcgtgactggcggtggggtcaaaagaggagtgtggtggagagtggagactggcacccagcgctccagccccagggagggcagtggattcccagggaccccgggactcagtgggggatcttactttacttctggggtatgaaggttggcatcttgttcagatggactcacagatta

SEQ ID NO: 258503 - DNA, 460 bp, Homo sapiens
cccaggctggagtgcagtggcgtgatctcggctcaccgcaacctctgcctcccaggttccagcgattctcctgcctcagcctcccaaagttctgggattacaggcgtgagccaccgcgcccagtcaatgcctgcatttttaaggtgaaatattatacagttaagtgttaaacaagtgaagaatctcaacaaaatacatattacctttaaggctctaaatgaccagagagaaagaactgtgaccattaccattaaaacgttcacgtcctggcctatacatttcttttaccgttgccttcaatttccatatattttggttcttcaagttagctggacgttctatgaggtcagggagcaagtgtatatccctaaactgctgagcctcaacactcacaggatgcctaccaacagcatccaactcttttaagagacttaaacacccaggttactgtccaaatgag

SEQ ID NO: 258504 - DNA, 559 bp, Homo sapiens
ggaatggaatggtgaggtcatttgacctgttccaggtgagtggaggccaaagaacattctttctgcctccccttggatgggaaaattgagaaattaaaaagttgcctttccgaggaaacaaaagttattttctctatttaaaataaatgtccaaaggcacccctctaaacaccaaaacttttagctcctggcaaacttacctagctagaagttggagaagagtgcggtttcaaaccatgcttcctttctgcccttgccaatacgttctcactgactgtgattctgctgtgaacacacacacacacacacaaacacacacacaagccccttctgtgtatgatcaggacaagtagttcaacagttaataaaaaagttaaattattggatgagaaagatatatttaacctaaatcataaatatgtatatccatttaataaacactaaaattgagaaaaattagtttggggatgagggccttcattcataatagccataatgcattatctatgatgtgagcttgattgagcttctttaaaatgcataaagaatttgaacaaca

SEQ ID NO: 258505 - DNA, 432 bp, Homo sapiens
ggtttatattcaaatttggtcatctgtattgttgaagtttttcattatgagaatatttttataatgtcattttatctccttgagaatgttttttgaggccaggttctgaatatggttggaagtaagttgggataaaaatagaacagagttaatttttagctttaatttagtggtgaccttggaagtcagctttattaaggtactgttagatttcttctgagaatttttggtgaacaaaatctactctgctcactagtaaccccaagaagatccataaaagatcagtggtttgttttacaggagctgcctcataaatataggagaataccaactgatagtgtctcttcccctcagctaataagggtagacacttaataggtataacctagacttatttttttttagccaaatgaacttaaatagaaaaatgta

SEQ ID NO: 258506 - DNA, 765 bp, Homo sapiens
tgtggggagagtgcaggctgaagagttacctaaggtcaaaatcctgacctatgagccaagccatcgatttgggatttctactgaggacactggaagtcactaagagcatctgaatgaaagaaaataaaagagactgagaaaccacagaaataaagaagcgctgatgacaatgcctgcttgctgatggttacgatgatcatagcagtgtgcattttgtatgcatgaagcctgcgactaaataaacgtgtggggaaatatttgtaaggaaataagctattaataaaataagctaaaatcacaaaaaaaaaaaaaaaaaaaaaaaaaaaaaaaaaaaaaaaaaaaaaaaaaaaaaaaaaaaaaaaaaaaaaaaataaaaaaaaaaaaaaaaaaacaaaaaaaaaaaaaaaaaaaaaaaaaaaaaaaaaaaaaaaaaaaccccggggtttttttttttttttttccatactgggggttttttttttaaaaaaaaaacacagttccccttttttaaaaaatttggggaaaaaacaattttttgggaaacccgggggggaattaaaaaattttttccctttgggattttttccccggggaaaaatttttatttttaaaagggccccaattttttatttatccccaacttttttttcccccctttttaaagccctcaaatttttttggggtttaaaaaatatcccaaattttgtcgccttaaaatttaaaatttaaaaagggtggttcttcccctttgattctttttctggg

SEQ ID NO: 258507 - DNA, 277 bp, Homo sapiens
aaagaaatgcaagtgagaatagtggttttctctgagtagtgattaagtgtggaatgaggatggcactcgaatggttgataatgttctattattgttctgttgttgtgcttgcatggtgttcattttctgaaaaatcactgagcagtacattttaaaatatttcttatctatatttgttgtatttcacaatttaaaaaagatttttaaaacaaagttagtggttcttattgaacaaatacaagtggttttccaaagtaaatacttctctaaacttaaa

SEQ ID NO: 258508 - DNA, 384 bp, Homo sapiens
gtctcgctctcttgcccaggctgcagtgcagtggcacgatcttggctcactgcaacctctgcctcctgggtccaagtgagcacctggctaatttttgtatttttagcagagacagggtttcaccatgttagccaggcaggtctcgaactcctgacttaaagtgatctgcccgcctcagcctcccaaagtgctgggattgtaagcgtgaggcaccacgcccggccttatctatcttttggcacaaataatttacattgcaggtgggatgccatggttcacacctgtaatccctgcactttgggaggctgaggcaggcaggggaatcacttgaggctaggagttccagaccaagctgggcaagcatagtgagaccccatcactacc

SEQ ID NO: 258509 - DNA, 507 bp, Homo sapiens
ctgagagtcatttgaccaaagtttggctttattttgcatacaggaaaaattagcccctagccttttctcaagaagtgatgctgtttctaaagaagaatagatggggagatctgagacatccagagagaggacaatgtgtccaaaaccagctgaaggcagagagtccatgcctcattcattttaggagtccctcatgtctaacaccatcttctgtgtcctaaagccagtatatatataatatttttaaaactctgcaaagattggaacaagaagtggtgggatacattttttggcataaactgggctatgtgtgcccggtattttttctttcccccctatttctttggagggttttgttcagaaacaatgtgctatagccagagagagtcgatcttacaaagtccctgcatttactttcacagcaagaactgctaccttgattagacaggaaggagaacaactactacaacaaagagaataaaatacattcagtttggtaaataacca

SEQ ID NO: 258510 - DNA, 438 bp, Homo sapiens
aaattattctctacttcttaaaggcacttttttttggttgctatttctgggtaaggtttactttgataagtatcttagaatcagtctagtgttgagagttgatggtggaattgctgttcatcaaaaatgagcttgagttagatctcttagactagcagtcttggatccttttaactgtggaagaatgtctgcaatggtgatggtaccattagccatttggttaaaggggttgatactgattataaaaaatgtgagatattaattggggtttttacaagtggatttttgatggttgattttagaattgttgagtttatcaaagagtttcaaaatgtccatgggtatgggtagagacgaatttttttccttcagattcagtaatctctttactcttgaattaattgtctctgacagatgcatggctgatttggactggat

SEQ ID NO: 258511 - DNA, 309 bp, Homo sapiens
ccctctccatttcttctatttaggcctcatcatttctgatctcatcgctcaccataaaaacctgctaagaatccaaccttcgcattagcacccaagtgattattgtgaaatttaaatgtaatcaaatcagctctaaaacaagggttactgtgaggataacaatatggcaacgtttgtagagtgtttagcgcagtgcctggcaggtcctcacaaaagaaagaacagatgaggaaagagaaaagaaacaaaaagtcagctgtcacaggttatatcaccccatccctaaaatcctccagtgtctctcaagag

SEQ ID NO: 258512 - DNA, 423 bp, Homo sapiens
tgtatctcttggagtaacatcaaattaaactctgtcttccctagtaccattaaacagttcctagccactagactgagagtaacgtgttattgggcaaatggatttgagattattattgagaatccttttggttgtaagtggttaaagttgcagattagttgctggctcatgactgtaatctgagcactttggaaggctgagacaggtaggcttgcttgagctcaggagttcagcctggccaacacagcaagatcttgtctctaccaaaataaaaataaaaaaatcagccaggcatggtagtacacatctgtagttataatatttgggaggctgaggtggtagcatcacttgagtgcaggagatagaagcttcagtgagccatgattgtgccactgcactctagcctgggcgacagcctgtttc

SEQ ID NO: 258513 - DNA, 620 bp, Homo sapiens
ctcagcctcttataatgctcccatttctctctctggtctggccaacccagctcagatctgaactgctttttctcacttatgaccagggcttatctcatcggccttggagaaaaactccacttggagttcccacttggagaaaaactcttgattctaatgccttatcctgtattggtggagagaatttaaatcaatgttcagagtcccagaatttccacattgaagtcttcctggccagcacagagtgataagtgactcacattctcaaaaatatctataccaaaactacaagatcatgcctcttactactcctactcctcaaggtgaggaaatcctagacaaactacagtgtaacaaagtccctgagaaaagtgtcactccctcttttcttcaccaatcaagggaagacaaaaacaagcagaattttaaggagttttctgaatactaattagtagtatgagcttggacaactcacaacttgttggtcttcaatttccccagctgtagaaataaaacgattatacagaatgatctcaaaggtctcattcaattctatgcagacatatatgttcccaggccttagtgggtttgcaatctggttgaagtagaagactagccat

SEQ ID NO: 258514 - DNA, 336 bp, Homo sapiens
ttctctttgatttctgctccaggaagatacttacctcggttctgagcctgactaatcttatggattttttcttttaatattttctcatgtgtttggagctatagggatgtgattaaagataaggttctggagccatatattgatgacagaatgttataagcaaaaatataaaaaatgatttcaaattcttcttgtatttatacctttaaggaatatcttcttttgattaaatatataagcattatatgtattggatgtatcagtagagatattgtttatagattttcatgtcatttttctataggtaatagtcataattgatgttatgagcttttt

SEQ ID NO: 258515 - DNA, 686 bp, Homo sapiens
cttcaaccttgatggcaacagccgatcgtggtggtgactgagggtgggcaatatcagtgggcctccagagatgtggaggtgcagggactgttgggctcccagtcaggatgcagcctggtgggggctgggttctcaggaaggcatcatgctatataattgcttacggctcagggggtgtgtgggacccaatgtgatcttgatccttgaagcaatgcctttgcccagtttccaggcagtttcctatgttattcttgggctcttgagggtttagggactttgctgtggctgggaggcaggagtctacagtaggaatgcagaccactggggtcactcacttatcctttcctacactcggaagcctctctagggtctccacaaattcttgccaaccaggctttctcactttcctgttctttccttgctttgggcattttctgtcacttttctgttgaatgaataataatagatttctttaaaacagaacaatttatctgagctttctaaactgatgagaggaccactaaatatgttatatggaggtgtataccctagatatactaggaaaattttctagtaattatatatatgatagaaatactgaaataaagaggtggtgaagagagaaattggcatgtatgtctattcatcctatatgagcagcaccggtattgaactatgattttctt

SEQ ID NO: 258516 - DNA, 665 bp, Homo sapiens
gtcaattattaatgatatgtagaaaattagagaattgtgcctgttgataagcatccaattctggttgaactcaatttttatctgtatcagagagagctgagctgatatagctaaaaattgagatatatgtgtgtgtgtgtgtgtgtgtgtgtgtatatataaatatatatatatcagctatatatatagttgttatagctaaaaatataattatttatactgtgaatttattatacttttctattttactggttatatatattatatatcgcctatgtatatatatcagctatgtgtatatatatatcagttatgtatatatatatcagctgtgtgtgtgtatatatatggtcagtttattctctttgaaggcagacacacttaacttcttgcatgaatatagctttaactattttatcactatttatcatgttagtatgctacaagtttctggtagaaaagctctatcaagctaagagagcattatatggaaagattattgaattttattaaatgacttttttcagcataaactaaaatgatgacgtttgtctttttaaattggttaatatttaaaaaattattttattattggcttagaataaacttacaatattttattttgaatttatgttatgtttataggtgagattggccttctttct

SEQ ID NO: 258517 - DNA, 345 bp, Homo sapiens
gacagcagcgggagaagaaaagggcctccctgggatgaccttccaggagacaactgctacaagaaagcctatgtacagttaaaagagcacaactgtccctgatcacatggaagccttctccaggtgctgccacaaacaatgggaaggggtcttggagcagaggttgggatctctgacaagtgcagtgacaagctaaatgagatcatgctgtctttctcaaaagtggaacagtggctaaaacaacatgtaaagcattgatcctagtgcctggtaagaggaagccttcctatactttacttccccagcctcttcagtggcagtagtaaaagatttcaaatccttcct

SEQ ID NO: 258518 - DNA, 641 bp, Homo sapiens
tgcctgttgactctggagccctttgaaccagtgtacagtcgtcagatagggaccggtgaacacctgattccaaacatgtaggatgggggtcttgtcctctttttatgtggtttaatagccaagtgtctaaatgcaatcagattgcatttagaccagcaactgaaatgaatgagataactcttcacctgtagttaccatgtcccattacaactcctgttttaatggaagtaagtgtgtaatggaagcctgttgatcagaaaaaaagagtctggaacttaattttcatttgcttcagagttgttcatttgcctagaaagcttttaggaaagagctttcttaatagttggaaaagaactgttcatttctgtgtaatggttatacttttaaatgtttataatgtgatttttattcataggtagtaacatctacaaaagttttaggcaatgagatttgatattatttcatgtcagcccactgtggacaaaatgttttcacagatactacttaagtgaacctagaaacagagatgtagatcttatactctgataagaatgctttaaaatactattaaatgtaagcatatttaatgttatatgtttatcaactcaagaaatgtttaaaaaataaaaattttaaatgta

SEQ ID NO: 258519 - DNA, 894 bp, Homo sapiens
tttatgtctcttgattttccacttacaaataacctttgctaatggctttggggagctgttcgtatgtacccgaaatgctgatgaatctatttcagtttgaagtgtggcagattaggaatttctgctctctggaaaggggatttatacctggaatatgcatcaaattcacaaacactttgcgatatacgtgcagacacatgagtgactggttttgacaggaatttaatccttcaattggatttccctttgttcttgtgagtaatcagtatctcataaaatatattcagttttggctaattgtacagctatgatacaactttaagtttctaagatgtaaattactatgtgatataaagataattcccctctagcatttttcttttgtaacagcctctttttactcctgaaaagctctttattttaaggttgatttcattctactaggagaactgttgtgttagataacaactaatgcccaataaatacactgaagggagattaggaactgttaaagaaagaacacaaagcaaatgccttaatttcgttctttcagaacgtatatatttcccaaagttgtcagttcctttatgtttctaaaaacttaccaggtaggcatattcttaatactttgataataaaattaaacactgaaatcaaagctgtagattgaacatgctcacattaagtgaaattaaggagagaggaatacatttcattattaatgtatcagtgaattctggagtttagccatgaatatcagctataatcaataacagtttgagtatttaggcagtttgtaattcatgaaatttaaatcagaagggtctttaaacatctttttgtctaatctcattttgcattcaatttaattctattttttctcagcctactata

SEQ ID NO: 258520 - DNA, 307 bp, Homo sapiens
ccaagcacacttgtgaccttgactcccaaagcttagctcatgctgtttctttcagcctgcagtattcctccttggtgggtcaccaataggcaccctgtgcagaaggctgaggcagaaggatggttgaaagcaaggccaagatttccatgtgcagaaagtcttgcaaatgggactgctccctcagtgccctctctctcccttaaatcatttgtaacattatgtatgcatgttggaaacaatggtatctccccagcttccccgttaagctctgagagttgtgaaagtgttctgttgaccagtgtcttga

SEQ ID NO: 258521 - DNA, 350 bp, Homo sapiens
gatggattggaggctctaaaacaagctgagataatgagctaaaaggttttacagctcctcctgccaatctctcttctcttcaagacccaggaattgggcctgcagtattcctccttggtgggtcaccaataggcaccctgtgcagaaggctgaggcagaaggatggttgaaagcaaggccaagatttccatgtgcagaaagtcttgcaaatgggactgctccctcagtgccctctctctcccttaaatcatttgtaacattatgtatgcatgttggaaacaatggtatctccccagcttccccgttaagctctgagagttgtgaaagtgttctgttgaccagtgtcttga

SEQ ID NO: 258522 - DNA, 408 bp, Homo sapiens
acacatcatgagacctcattcagcccttccaagaatcctctgaagggttctgattttacagacaaagcaactttggcatggataagtgattggctcaaggtgttgccgctagtcagtgccagagccaggactccacacaggccatccgactccccagcccacatctttcacttgtacagcagattgccaaactcatgttgatgtggccaggccttgtgggggctctggtgctctcaagtacagatgaaacactgcacccccgcccccatgtcactgggttgctgccaagtggccctgccatatcctcccatttttaaagaagtcaggaatcctaatttgtatgtgaaacccaacttttgaatgtcagtaactatctttaattaaataactactgatccaacaaaaaat

SEQ ID NO: 258523 - DNA, 772 bp, Homo sapiens
ctagatccaacagcagcttttttaaaaaagaaaaacatacctttctcattttatttaaactgactcgactgtgtcattttctgttttaatttcagagggtgttgctatgctttcctctgtacaagctggtggtgtatcaattcgttcttccttaactttgggactgtcacagggttcctgcaattcgtttttgacaatgttcaacataatattcaaggggttttcaactggtgtcttgctgggagatggtgtacaatcaaatgaagatgtctacaaaatgaaaggccctatgagtactgatgaaagttcaaaattctcacattaaataacatttagtcttgtaagacccttgtatgaacaagagaacacacatacaaccaaatgcaaatgaaacacctgcctcccaacaaaatgtgccataaagacaaccagaaataaaatatatattgcacgttcaatatgtactcagcagtgagttaagcagttaacagctaagttataggacattatacagccaaaaaaagttgattagacatgcttctacattttaatctctacatagatgttaaactcatacatatatcctgggacttgttactaccctaatttcaaatagtctgaggattttttaaatccccacaaaccatcaccctcaacactagtcttctgacaacctaaataaaccttccaaattgcctccaacccattatctctaaaaacctatttattccattacttgattttaaaaacagactacaaatatgaccatttg

SEQ ID NO: 258524 - DNA, 972 bp, Homo sapiens
tattccatggcttttcgtgtggacaaatcgggaggtggtgtaaactggtttttggtgaaattcggctcggcctcatgcgaacctatctaggtccgtctctggagtggcctgtcatcgatcgcgccctccatcgctgagcgacacaagtggaaccccccaggactgcattctgcgaaactaccctgcttttcccccagttttggtctgtgaacacatttgggaaattcttctgatcctaccgctactctcttgagatgaagaaacagctcagatttgaccaagatcacacaagtaggagttgaggaattggaacccactatgactgactccaaattaatatagtgtttatagccacttacataataatggtaaaggttttatttttttcactatacaatatgtagtagataaatttactgaggaaatgagacagcacgtgacaaatccttaaaggatacacacatgacaggaaggattagaagaggaaacagaaacaggtaacagagaagcagaaaaagtaaaatctcccaaaataaaaatagaaggaattaaaaataaaagcagactccgggtgcagtggctcatgcccagcactttgggaggccgaggcaggtgaatcacttgaggtcaggagtttgagaccagcctcgccaacatgatgaaaccctgtttctactagaaataaaaaaattagccaggtgtagtggcgtgcacctgtaattctggttacttgggaagctaaggcagaagaatcacttgaacccgagaggcagaggttgcagtgagccaagatcatgccattgcactccagcctgggtgacagagcaagattataaagtcttctcaataaaatcgtctcaaaaataataaaaataaaagcagaagttaatgaaatagcaaataaaattgatgatagtaattagctggtgtttgaaaagaacaataaatagaaactcaacaaatctgaggaag

SEQ ID NO: 258525 - DNA, 662 bp, Homo sapiens
  misc_feature (21)..(21): n is a, c, g, or t
tatcttttggtggagtgaaanaatttgagccagtgaagccaaatcgtaacttacagcaagcagcatgcagcatacctggctctttgctgattgcaaataggcatttaaaatgtgaatttggaatcagatgattgcatttggtaaggccaggcagcaggtaagttgtaaaaccagtaaaaaaacacaggtcattagtcaaaagagtgcttcaggtctcctgactccaaatccgagaatcctttcactgtagcatgtttactgctcaaatatttctacaaccctattgcttaacaacaggaatgaattatttcaccatttgttgcaaacgtatgggtcacgttttgtgccagcagcagaaaatacagaaattagtaagaattacctgccctccaggggcatcaccaacctggattcccctctcggcccagtttttccacccttattgccttctcccttcaggaataatgaactcgtcctggaagcttcattttcgtatattcccgctcttttctcttcatttccctgtcttctgcataatcatgccttcttgctaagtaattcaagcataagatcttggaataataaaatcactatcttaggagaaagaataaaattgttattttcccagtctcttgccgtgccatatgcagggatcctctaga

SEQ ID NO: 258526 - DNA, 3189 bp, Homo sapiens
tattccatggcttttcgtgtggacaaatcgggaggtggtgtaaactggtttttggtgaaattcggctcggcctcatgcgaacctatctaggtccgtctctggagtggcctgtcatcgatcgcgccctccatcgctgagcgacacaagtggaaccccccaggactgcattctgcgtaggtgacctgtgtggcgcgggccgggcggggcctttttgtccttgggcaaacgtggtatactttctcagtggtggttggaaggaaatttgttgccctgtcatttcgcaagtatggaaaaagacctaaaggagaatttagcagctgcagccgctgtttttattgcgtactttactagcgccaactctttaataatcgcttgttagttgttacccctgttttatgggtcaagagactcaatatatcagtactttggtaaggccaggcagcaggtaagttgtaaaaccagtaaaaaaacacaggtcattagtcaaaagagtgcttcaggtctcctgactccaaatccgagaatcctttcactgtagcatgtttactgctcaaatatttctacaaccctattgcttaacaacaggaatgaattatttcaccatttgttgcaaacgtatgggtcacgttttgtgccagcagcagaaaatacagaaattagtaagaattacctgccctccaggggcatcaccaacctggattcccctctcggcccagtttttccacccttattgccttctcccttcaggaataatgaactcgtcctggaagcgtaccttactttttaatatctctgccttgtcatgtgctgttcgtcttaccaggaaactaccctgcttttcccccagttttggtctgtgaacacatttgggaaattcttctgatcctaccgctactctcttgaggtacagtaaattgtctttgacttccatcaccttttgtaatattacaattgccatctactgagttcctatgatctgcctggcattgtactaagtgctttatattttcttgttcatttttttatgccaacataaatgagtttgactcaattcttattataacctgccaaaataagtattcctcttcctttttacagagagagaaacaagggaaaaaaaagttaattgcctgaggatatactgctagtgttgcgggacaaatagagacgggagaggccaaacagaattcaggacaaccctttattattaaggtgatcactggctcagtcggactggggtccagaaagtctgagcccggaacaaagggatcaatcaccttttaagcaatttgtggcgggagtttggtgctacaggaagcctacttgcagaagcaagaacaaaggcagttaattattcttttacatttgttacaccacatgtcttacatccttgggaatgcatgcttttgtagcaattgcttatcaaccttgtgactttacagcgcgctagggagggaagcaggaactcgtggtgcctcaaggaacgtgaaacggtggaacacagataagcctctccgtgcgtagaggagaaataagcggttaatattctctcttaacccaggcctccggagggtggggggctatatttcattctacctctaaggaaaagaataaacttcttgactaatatacttataaaattcattaattcccccttcactagtaaataataaatacctgacttaggattccaaaataggtcttgaatttttctgcaggagctcctcaaagtctctgaattcccacaaccttttattagatcacttatcccattgtattataattatctgtttaacaatttttcctcacccctaaaggaccctgagcttctggaaggtagggactgtatcttaaaatcttggcatttctgatgtctagaatatttcatttaagagaagggcttagtaactgttgtgtgggtgggttgatgagttaactgtcaggcaggtgaactaataggctgaagataaagtttttcactgttggaagtgaatttgggattagtcatcctaatcccctcacttttagagatggggcaactgagtcatgcgcggtggctcacgcctgtaattctagcactttgggaggccaaggtgagcggatcacctgaagtcagggatttgagaccagcctggccaacatggcgaaaccccatctctactaaaaatacaaaaattagccaggcatggtagcaggagcctgtaatcccagctgttcgggaggctgaggcaggagaatcacttgaacctgggaggcggaggttgcagtgagttgagatcgcgcaattgcgctccagcctgggcgacaagagcaaaactccacctcaaagaaaaaacaaaacaagacatggggcagctgaggccttttgtataccaggcatttatcgagttattcatgtgggccagtttctgtgataaatgatttgcaaataatacccaacttaatctgtattgttatttttatttttacagatgaagaaacagctcagatttgaccaagatcacacaagtaggagttgaggaattggaacccactatgactgactccaaattaatatagtgtttatagccacttacataataatggtaaaggttttatttttttcactatacaatatgtagtagataaatttactgaggaaatgagacagcacgtgacaaatccttaaaggatacacacatgacaggaaggattagaagaggaaacagaaacaggtaacagagaagcagaaaaagtaaaatctcccaaaataaaaatagaaggaattaaaaataaaagcagactccgggtgcagtggctcatgcccagcactttgggaggccgaggcaggtgaatcacttgaggtcaggagtttgagaccagcctcgccaacatgatgaaaccctgtttctactagaaataaaaaaattagccaggtgtagtggcgtgcacctgtaattctggttacttgggaagctaaggcagaagaatcacttgaacccgagaggcagaggttgcagtgagccaagatcatgccattgcactccagcctgggtgacagagcaagattataaagtcttctcaataaaatcgtctcaaaaataataaaaataaaagcagaagttaatgaaatagcaaataaaattgatgatagtaattagctggtgtttgaaaagaacaataaatagaaactcaacaaatctgaggaag

SEQ ID NO: 258527 - DNA, 3262 bp, Homo sapiens
tattccatggcttttcgtgtggacaaatcgggaggtggtgtaaactggtttttggtgaaattcggctcggcctcatgcgaacctatctaggtccgtctctggagtggcctgtcatcgatcgcgccctccatcgctgagcgacacaagtggaaccccccaggactgcattctgcgtaggtgacctgtgtggcgcgggccgggcggggcctttttgtccttgggcaaacgtggtatactttctcagtggtggttggaaggaaatttgttgccctgtcatttcgcaagtatggaaaaagacctaaaggagaatttagcagctgcagccgctgtttttattgcgtactttactagcgccaactctttaataatcgcttgttagttgttacccctgttttatgggtcaagagactcaatatatcagtactttggtaaggccaggcagcaggtaagttgtaaaaccagtaaaaaaacacaggtcattagtcaaaagagtgcttcaggtctcctgactccaaatccgagaatcctttcactgtagcatgtttactgctcaaatatttctacaaccctattgcttaacaacaggaatgaattatttcaccatttgttgcaaacgtatgggtcacgttttgtgccagcagcagaaaatacagaaattagtaagaattacctgccctccaggggcatcaccaacctggattcccctctcggcccagtttttccacccttattgccttctcccttcaggaataatgaactcgtcctggaagcgtaccttactttttaatatctctgccttgtcatgtgctgttcgtcttaccaggaaactaccctgcttttcccccagttttggtctgtgaacacatttgggaaattcttctgatcctaccgctactctcttgaggtacagtaaattgtctttgacttccatcaccttttgtaatattacaattgccatctactgagttcctatgatctgcctggcattgtactaagtgctttatattttcttgttcatttttttatgccaacataaatgagtttgactcaattcttattataacctgccaaaataagtattcctcttcctttttacagagagagaaacaagggaaaaaaaagttaattgcctgaggatatactgctagtgttgcgggacaaatagagacgggagaggccaaacagaattcaggacaaccctttattattaaggtgatcactggctcagtcggactggggtccagaaagtctgagcccggaacaaagggatcaatcaccttttaagcaatttgtggcgggagtttggtgctacaggaagcctacttgcagaagcaagaacaaaggcagttaattattcttttacatttgttacaccacatgtcttacatccttgggaatgcatgcttttgtagcaattgcttatcaaccttgtgactttacagcgcgctagggagggaagcaggaactcgtggtgcctcaaggaacgtgaaacggtggaacacagataagcctctccgtgcgtagaggagaaataagcggttaatattctctcttaacccaggcctccggagggtggggggctatatttcattctacctctaaggaaaagaataaacttcttgactaatatacttataaaattcattaattcccccttcactagtaaataataaatacctgacttaggattccaaaataggtcttgaatttttctgcaggagctcctcaaagtctctgaattcccacaaccttttattagatcacttatcccattgtattataattatctgtttaacaatttttcctcacccctaaaggaccctgagcttctggaaggtagggactgtatcttaaaatcttggcatttctgatgtctagaatatttcatttaagagaagggcttagtaactgttgtgtgggtgggttgatgagttaactgtcaggcaggtgaactaataggctgaagataaagtttttcactgttggaagtgaatttgggattagtcatcctaatcccctcacttttagagatggggcaactgagtcatgcgcggtggctcacgcctgtaattctagcactttgggaggccaaggtgagcggatcacctgaagtcagggatttgagaccagcctggccaacatggcgaaaccccatctctactaaaaatacaaaaattagccaggcatggtagcaggagcctgtaatcccagctgttcgggaggctgaggcaggagaatcacttgaacctgggaggcggaggttgcagtgagttgagatcgcgcaattgcgctccagcctgggcgacaagagcaaaactccacctcaaagaaaaaacaaaacaagacatggggcagctgaggccttttgtataccaggcatttatcgagttattcatgtgggccagtttctgtgataaatgatttgcaaataatacccaacttaatctgtattgttatttttatttttacagatgaagaaacagctcagatttgaccaagatcacacaagtaggagttgaggaattggaacccactatgactgactccaaattaatatagtgtttatagccacttacataataatgagggtgttgctatgctttcctctgtacaagctggtggtgtatcaattcgttcttccttaactttgggactgtcacagggttcctgcaattcgtttttgacaatgttcaacataatattcaaggggttttcaactggtgtcttgctgggagatggtgtacaatcaaatgaagatgtctacaaaatgaaaggccctatgagtactgatgaaagttcaaaattctcacattaaataacatttagtcttgtaagacccttgtatgaacaagagaacacacatacaaccaaatgcaaatgaaacacctgcctcccaacaaaatgtgccataaagacaaccagaaataaaatatatattgcacgttcaatatgtactcagcagtgagttaagcagttaacagctaagttataggacattatacagccaaaaaaagttgattagacatgcttctacattttaatctctacatagatgttaaactcatacatatatcctgggacttgttactaccctaatttcaaatagtctgaggattttttaaatccccacaaaccatcaccctcaacactagtcttctgacaacctaaataaaccttccaaattgcctccaacccattatctctaaaaacctatttattccattacttgattttaaaaacagactacaaatatgaccatttg

SEQ ID NO: 258528 - DNA, 1883 bp, Homo sapiens
tattccatggcttttcgtgtggacaaatcgggaggtggtgtaaactggtttttggtgaaattcggctcggcctcatgcgaacctatctaggtccgtctctggagtggcctgtcatcgatcgcgccctccatcgctgagcgacacaagtggaaccccccaggactgcattctgcgtaggtgacctgtgtggcgcgggccgggcggggcctttttgtccttgggcaaacgtggtatactttctcagtggtggttggaaggaaatttgttgccctgtcatttcgcaagtatggaaaaagacctaaaggagaatttagcagctgcagccgctgtttttattgcgtactttactagcgccaactctttaataatcgcttgttagttgttacccctgttttatgggtcaagagactcaatatatcagtactttggtaaggccaggcagcaggtaagttgtaaaaccagtaaaaaaacacaggtcattagtcaaaagagtgcttcaggtctcctgactccaaatccgagaatcctttcactgtagcatgtttactgctcaaatatttctacaaccctattgcttaacaacaggaatgaattatttcaccatttgttgcaaacgtatgggtcacgttttgtgccagcagcagaaaatacagaaattagtaagaattacctgccctccaggggcatcaccaacctggattcccctctcggcccagtttttccacccttattgccttctcccttcaggaataatgaactcgtcctggaagcgtaccttactttttaatatctctgccttgtcatgtgctgttcgtcttaccaggaaactaccctgcttttcccccagttttggtctgtgaacacatttgggaaattcttctgatcctaccgctactctcttgagagagagaaacaagggaaaaaaaagttaattgcctgaggatatactgctagtgttgcgggacaaatagagacgggagaggccaaacagaattcaggacaaccctttattattaagcgcgctagggagggaagcaggaactcgtggtgcctcaaggaacgtgaaacggtggaacacagataagcctctccatgaagaaacagctcagatttgaccaagatcacacaagtaggagttgaggaattggaacccactatgactgactccaaattaatatagtgtttatagccacttacataataatgagggtgttgctatgctttcctctgtacaagctggtggtgtatcaattcgttcttccttaactttgggactgtcacagggttcctgcaattcgtttttgacaatgttcaacataatattcaaggggttttcaactggtgtcttgctgggagatggtgtacaatcaaatgaagatgtctacaaaatgaaaggccctatgagtactgatgaaagttcaaaattctcacattaaataacatttagtcttgtaagacccttgtatgaacaagagaacacacatacaaccaaatgcaaatgaaacacctgcctcccaacaaaatgtgccataaagacaaccagaaataaaatatatattgcacgttcaatatgtactcagcagtgagttaagcagttaacagctaagttataggacattatacagccaaaaaaagttgattagacatgcttctacattttaatctctacatagatgttaaactcatacatatatcctgggacttgttactaccctaatttcaaatagtctgaggattttttaaatccccacaaaccatcaccctcaacactagtcttctgacaacctaaataaaccttccaaattgcctccaacccattatctctaaaaacctatttattccattacttgattttaaaaacagactacaaatatgaccatttg

SEQ ID NO: 258529 - DNA, 2539 bp, Homo sapiens
tattccatggcttttcgtgtggacaaatcgggaggtggtgtaaactggtttttggtgaaattcggctcggcctcatgcgaacctatctaggtccgtctctggagtggcctgtcatcgatcgcgccctccatcgctgagcgacacaagtggaaccccccaggactgcattctgcgaaactaccctgcttttcccccagttttggtctgtgaacacatttgggaaattcttctgatcctaccgctactctcttgaggtacagtaaattgtctttgacttccatcaccttttgtaatattacaattgccatctactgagttcctatgatctgcctggcattgtactaagtgctttatattttcttgttcatttttttatgccaacataaatgagtttgactcaattcttattataacctgccaaaataagtattcctcttcctttttacagagagagaaacaagggaaaaaaaagttaattgcctgaggatatactgctagtgttgcgggacaaatagagacgggagaggccaaacagaattcaggacaaccctttattattaaggtgatcactggctcagtcggactggggtccagaaagtctgagcccggaacaaagggatcaatcaccttttaagcaatttgtggcgggagtttggtgctacaggaagcctacttgcagaagcaagaacaaaggcagttaattattcttttacatttgttacaccacatgtcttacatccttgggaatgcatgcttttgtagcaattgcttatcaaccttgtgactttacagcgcgctagggagggaagcaggaactcgtggtgcctcaaggaacgtgaaacggtggaacacagataagcctctccgtgcgtagaggagaaataagcggttaatattctctcttaacccaggcctccggagggtggggggctatatttcattctacctctaaggaaaagaataaacttcttgactaatatacttataaaattcattaattcccccttcactagtaaataataaatacctgacttaggattccaaaataggtcttgaatttttctgcaggagctcctcaaagtctctgaattcccacaaccttttattagatcacttatcccattgtattataattatctgtttaacaatttttcctcacccctaaaggaccctgagcttctggaaggtagggactgtatcttaaaatcttggcatttctgatgtctagaatatttcatttaagagaagggcttagtaactgttgtgtgggtgggttgatgagttaactgtcaggcaggtgaactaataggctgaagataaagtttttcactgttggaagtgaatttgggattagtcatcctaatcccctcacttttagagatggggcaactgagtcatgcgcggtggctcacgcctgtaattctagcactttgggaggccaaggtgagcggatcacctgaagtcagggatttgagaccagcctggccaacatggcgaaaccccatctctactaaaaatacaaaaattagccaggcatggtagcaggagcctgtaatcccagctgttcgggaggctgaggcaggagaatcacttgaacctgggaggcggaggttgcagtgagttgagatcgcgcaattgcgctccagcctgggcgacaagagcaaaactccacctcaaagaaaaaacaaaacaagacatggggcagctgaggccttttgtataccaggcatttatcgagttattcatgtgggccagtttctgtgataaatgatttgcaaataatacccaacttaatctgtattgttatttttatttttacagatgaagaaacagctcagatttgaccaagatcacacaagtaggagttgaggaattggaacccactatgactgactccaaattaatatagtgtttatagccacttacataataatggtaaaggttttatttttttcactatacaatatgtagtagataaatttactgaggaaatgagacagcacgtgacaaatccttaaaggatacacacatgacaggaaggattagaagaggaaacagaaacaggtaacagagaagcagaaaaagtaaaatctcccaaaataaaaatagaaggaattaaaaataaaagcagactccgggtgcagtggctcatgcccagcactttgggaggccgaggcaggtgaatcacttgaggtcaggagtttgagaccagcctcgccaacatgatgaaaccctgtttctactagaaataaaaaaattagccaggtgtagtggcgtgcacctgtaattctggttacttgggaagctaaggcagaagaatcacttgaacccgagaggcagaggttgcagtgagccaagatcatgccattgcactccagcctgggtgacagagcaagattataaagtcttctcaataaaatcgtctcaaaaataataaaaataaaagcagaagttaatgaaatagcaaataaaattgatgatagtaattagctggtgtttgaaaagaacaataaatagaaactcaacaaatctgaggaag

SEQ ID NO: 258530 - DNA, 2091 bp, Homo sapiens
tattccatggcttttcgtgtggacaaatcgggaggtggtgtaaactggtttttggtgaaattcggctcggcctcatgcgaacctatctaggtccgtctctggagtggcctgtcatcgatcgcgccctccatcgctgagcgacacaagtggaaccccccaggactgcattctgcttttggtctgtgaacacatttgggaaattcttctgatcctaccgctactctcttgagagagagaaacaagggaaaaaaaagttaattgcctgaggatatactgctagtgttgcgggacaaatagagacgggagaggccaaacagaattcaggacaaccctttattattaagcgcgctagggagggaagcaggaactcgtggtgcctcaaggaacgtgaaacggtggaacacagataagcctctccgtgcgtagaggagaaataagcggttaatattctctcttaacccaggcctccggagggtggggggctatatttcattctacctctaaggaaaagaataaacttcttgactaatatacttataaaattcattaattcccccttcactagtaaataataaatacctgacttaggattccaaaataggtcttgaatttttctgcaggagctcctcaaagtctctgaattcccacaaccttttattagatcacttatcccattgtattataattatctgtttaacaatttttcctcacccctaaaggaccctgagcttctggaaggtagggactgtatcttaaaatcttggcatttctgatgtctagaatatttcatttaagagaagggcttagtaactgttgtgtgggtgggttgatgagttaactgtcaggcaggtgaactaataggctgaagataaagtttttcactgttggaagtgaatttgggattagtcatcctaatcccctcacttttagagatggggcaactgagtcatgcgcggtggctcacgcctgtaattctagcactttgggaggccaaggtgagcggatcacctgaagtcagggatttgagaccagcctggccaacatggcgaaaccccatctctactaaaaatacaaaaattagccaggcatggtagcaggagcctgtaatcccagctgttcgggaggctgaggcaggagaatcacttgaacctgggaggcggaggttgcagtgagttgagatcgcgcaattgcgctccagcctgggcgacaagagcaaaactccacctcaaagaaaaaacaaaacaagacatggggcagctgaggccttttgtataccaggcatttatcgagttattcatgtgggccagtttctgtgataaatgatttgcaaataatacccaacttaatctgtattgttatttttatttttacagatgaagaaacagctcagatttgaccaagatcacacaagtaggagttgaggaattggaacccactatgactgactccaaattaatatagtgtttatagccacttacataataatggtaaaggttttatttttttcactatacaatatgtagtagataaatttactgaggaaatgagacagcacgtgacaaatccttaaaggatacacacatgacaggaaggattagaagaggaaacagaaacaggtaacagagaagcagaaaaagtaaaatctcccaaaataaaaatagaaggaattaaaaataaaagcagactccgggtgcagtggctcatgcccagcactttgggaggccgaggcaggtgaatcacttgaggtcaggagtttgagaccagcctcgccaacatgatgaaaccctgtttctactagaaataaaaaaattagccaggtgtagtggcgtgcacctgtaattctggttacttgggaagctaaggcagaagaatcacttgaacccgagaggcagaggttgcagtgagccaagatcatgccattgcactccagcctgggtgacagagcaagattataaagtcttctcaataaaatcgtctcaaaaataataaaaataaaagcagaagttaatgaaatagcaaataaaattgatgatagtaattagctggtgtttgaaaagaacaataaatagaaactcaacaaatctgaggaag

SEQ ID NO: 258531 - DNA, 1577 bp, Homo sapiens
ccattccattttatcttagacataatatttattagttttccaagcacgacataaataataaatacctgacttaggattccaaaataggtcttgaatttttctgcaggagctcctcaaagtctctgaattcccacaaccttttattagatcacttatcccattgtattataattatctgtttaacaatttttcctcacccctaaaggaccctgagcttctggaaggtagggactgtatcttaaaatcttggcatttctgatgtctagaatatttcatttaagagaagggcttagtaactgttgtgtgggtgggttgatgagttaactgtcaggcaggtgaactaataggctgaagataaagtttttcactgttggaagtgaatttgggattagtcatcctaatcccctcacttttagagatggggcaactgagtcatgcgcggtggctcacgcctgtaattctagcactttgggaggccaaggtgagcggatcacctgaagtcagggatttgagaccagcctggccaacatggcgaaaccccatctctactaaaaatacaaaaattagccaggcatggtagcaggagcctgtaatcccagctgttcgggaggctgaggcaggagaatcacttgaacctgggaggcggaggttgcagtgagttgagatcgcgcaattgcgctccagcctgggcgacaagagcaaaactccacctcaaagaaaaaacaaaacaagacatggggcagctgaggccttttgtataccaggcatttatcgagttattcatgtgggccagtttctgtgataaatgatttgcaaataatacccaacttaatctgtattgttatttttatttttacagatgaagaaacagctcagatttgaccaagatcacacaagtaggagttgaggaattggaacccactatgactgactccaaattaatatagtgtttatagccacttacataataatggtaaaggttttatttttttcactatacaatatgtagtagataaatttactgaggaaatgagacagcacgtgacaaatccttaaaggatacacacatgacaggaaggattagaagaggaaacagaaacaggtaacagagaagcagaaaaagtaaaatctcccaaaataaaaatagaaggaattaaaaataaaagcagactccgggtgcagtggctcatgcccagcactttgggaggccgaggcaggtgaatcacttgaggtcaggagtttgagaccagcctcgccaacatgatgaaaccctgtttctactagaaataaaaaaattagccaggtgtagtggcgtgcacctgtaattctggttacttgggaagctaaggcagaagaatcacttgaacccgagaggcagaggttgcagtgagccaagatcatgccattgcactccagcctgggtgacagagcaagattataaagtcttctcaataaaatcgtctcaaaaataataaaaataaaagcagaagttaatgaaatagcaaataaaattgatgatagtaattagctggtgtttgaaaagaacaataaatagaaactcaacaaatctgaggaag

SEQ ID NO: 258532 - DNA, 1159 bp, Homo sapiens
tattccatggcttttcgtgtggacaaatcgggaggtggtgtaaactggtttttggtgaaattcggctcggcctcatgcgaacctatctaggtccgtctctggagtggcctgtcatcgatcgcgccctccatcgctgagcgacacaagtggaaccccccaggactgcattctgcgaaactaccctgcttttcccccagttttggtctgtgaacacatttgggaaattcttctgatcctaccgctactctcttgagagagagaaacaagggaaaaaaaagttaattgcctgaggatatactgctagtgttgcgggacaaatagagacgggagaggccaaacagaattcaggacaaccctttattattaagatgaagaaacagctcagatttgaccaagatcacacaagtaggagttgaggaattggaacccactatgactgactccaaattaatatagtgtttatagccacttacataataatgagggtgttgctatgctttcctctgtacaagctggtggtgtatcaattcgttcttccttaactttgggactgtcacagggttcctgcaattcgtttttgacaatgttcaacataatattcaaggggttttcaactggtgtcttgctgggagatggtgtacaatcaaatgaagatgtctacaaaatgaaaggccctatgagtactgatgaaagttcaaaattctcacattaaataacatttagtcttgtaagacccttgtatgaacaagagaacacacatacaaccaaatgcaaatgaaacacctgcctcccaacaaaatgtgccataaagacaaccagaaataaaatatatattgcacgttcaatatgtactcagcagtgagttaagcagttaacagctaagttataggacattatacagccaaaaaaagttgattagacatgcttctacattttaatctctacatagatgttaaactcatacatatatcctgggacttgttactaccctaatttcaaatagtctgaggattttttaaatccccacaaaccatcaccctcaacactagtcttctgacaacctaaataaaccttccaaattgcctccaacccattatctctaaaaacctatttattccattacttgattttaaaaacagactacaaatatgaccatttg

SEQ ID NO: 258533 - DNA, 1135 bp, Homo sapiens
tattccatggcttttcgtgtggacaaatcgggaggtggtgtaaactggtttttggtgaaattcggctcggcctcatgcgaacctatctaggtccgtctctggagtggcctgtcatcgatcgcgccctccatcgctgagcgacacaagtggaaccccccaggactgcattctgcttttggtctgtgaacacatttgggaaattcttctgatcctaccgctactctcttgagagagagaaacaagggaaaaaaaagttaattgcctgaggatatactgctagtgttgcgggacaaatagagacgggagaggccaaacagaattcaggacaaccctttattattaagatgaagaaacagctcagatttgaccaagatcacacaagtaggagttgaggaattggaacccactatgactgactccaaattaatatagtgtttatagccacttacataataatgagggtgttgctatgctttcctctgtacaagctggtggtgtatcaattcgttcttccttaactttgggactgtcacagggttcctgcaattcgtttttgacaatgttcaacataatattcaaggggttttcaactggtgtcttgctgggagatggtgtacaatcaaatgaagatgtctacaaaatgaaaggccctatgagtactgatgaaagttcaaaattctcacattaaataacatttagtcttgtaagacccttgtatgaacaagagaacacacatacaaccaaatgcaaatgaaacacctgcctcccaacaaaatgtgccataaagacaaccagaaataaaatatatattgcacgttcaatatgtactcagcagtgagttaagcagttaacagctaagttataggacattatacagccaaaaaaagttgattagacatgcttctacattttaatctctacatagatgttaaactcatacatatatcctgggacttgttactaccctaatttcaaatagtctgaggattttttaaatccccacaaaccatcaccctcaacactagtcttctgacaacctaaataaaccttccaaattgcctccaacccattatctctaaaaacctatttattccattacttgattttaaaaacagactacaaatatgaccatttg

SEQ ID NO: 258534 - DNA, 307 bp, Homo sapiens
taaagggcacaattaaattttattttgcaagtcgagcctaccttaaaatcagcttaaaaaggtgaaatatccgctggctaatgaaaaaacaaaacctttttatttttcccattacttggttctttttagcaacgatgcattgttctgccactttcaccccaatgttggtttcaggttcaccttagagcaaagtgtaggatgatactgtccattgccgattttctgattttttttttttttttttttttttgagaccaagtctcactgtcacccaggccagagtgcagtggcacaatcttggctcact

SEQ ID NO: 258535 - DNA, 538 bp, Homo sapiens
tcagcctcctgagtagctgggattacaggcgcccgccaccacacccagctaatttttgtatttttagtagagacagggtttcaccatgttggccaggttggtctccaactcctgacctcagttgatccacccgcctcagcctcccaaagtgctgggattacaggtgtgagccatcgctcctggcctcattaactgttttcaaaagtaaaagtacatggataatacaaagttaaattttgtagaatcataaagaaaagcaacaccttcccatcttaactcccctagtgcctctactccctccacagagacaaatatcttaccagttggttgtgttttcttttccaaactgtatttctaaaatgtgtcaatatctcttccttttattttttattttttgtagagacaggggtctcactgtgctgcctaggctggtctcaaactcctggcctcctacctcgacttctcatagttctggcgtgagctactgcacctggcctcccccttattatttttttaaacatgaatggaagcatactat

SEQ ID NO: 258536 - DNA, 526 bp, Homo sapiens
tcagcctcctgagtagctgggattacaggcgcccgccaccacacccagctaatttttgtatttttagtagagacagggtttcaccatgttggccaggttggtctccaactcctgacctcagttgatccacccgcctcagcctcccaaagtgctgggattacaggtgtgagccatcgctcctggcctcattaactgttttcaaaagtaaaagtacatggataatacaaagttaaattttgtagaatcataaagaaaagcaacaccttcccatcttaactcccctagtgcctctactccctccacagagacaaatatcttaccagttggttgtgttttcttttccaaactgtatttctaaaatgtgtcaatatctcttccttttattttttattttttgtagagacgggtctcactatgttgctcaggctggtattgaactcctgggctcaagcaatcctcctgcctcagcatctcaaagtgttgggattacaggtgtgaaccatagtatccaacctattatgttttt

SEQ ID NO: 258537 - DNA, 626 bp, Homo sapiens
tgaatagcgtctttttatttaacaatccttatctaacatcaccaaattcacattgcagagaaacttcagaaatataagaaatgtgggaaacacttttacctgtccctcagctatactttttcataacagaatttgtacaggtgagaagcctaatgaaagcccgatatgtgtaaagatctactctcacaatatactcaacattatataatgtatagtgtgattaatataggaaatccttgattttgaaattatcaattatggaatagcaaacaatttgtaagtgaagaaaatccagtgactgtaaatttttttacctcataattcacaatttattaagcatcagaatttatatggaaaaaatagaatatcaattattaataaaaacattaccactaaaattttatttgacttatagagaatagcatatagagaataatcatgttgactttgtgaatgtagaaaagcttttatctattacacgaatctttttcagcatcattatactttcaccagtttccacgtctgttttattaccaagtaatttaaactgtatacttcagattacaaatttcttacattgtgataaggttattgtgaagattaaatgagtttatccaaagactttg

SEQ ID NO: 258538 - DNA, 279 bp, Homo sapiens
cgaccgcacacctggctaagtgtggggcttggagcacattagccagcttttctgagcccggcttccttccttgtggggtgactgtgaagatgaactgagttaacgctcacacagtgtccagcacctgttagatgctcaattaaattctaatcatcattctgatgattaggttcttatgtatgttcattttttcaccccacaaatggtcactgagtgcctcctctctgttagatgtggggcccaggcaggttggtcaaagggccttgtacccccgcaaag

SEQ ID NO: 258539 - DNA, 539 bp, Homo sapiens
atttgcccgtagctttccttcattgaccttgttgcatttctggaacacatgcaaataaaaatctcaacttgcctgctgcttgagaatacttaatatctgaagaaaagtatctcgagccatctaaaccatcacttctattcaggctaaacatcctgtttcttctaatgtttgccatatgacatagttttccgacacttcatcagctgcttgcaggttttggaatatatttgcttctttgtattccttctaagatgtgatgtctgtatgtgctggatgatacagtgacacacagggccataacctcccttattctagataatgtgcttctgtttttcagcttaatacaacattgactttttggcagccacacttcgtgattgcgtcactttgtatcattgtcactcatgatgccacatagtcctgtttctcccactctaatcttataaacgcacatttagatcgaagtggctcttatttattcttgttaaatttcatcttgttgtattccatcaatcattaaagcttgccaaaattgtttt

SEQ ID NO: 258540 - DNA, 221 bp, Homo sapiens
tgtttcctaaattgaacggtggcagaaggaattgggatggtggctaaaggctttcatgctggcgtgatgaaaatgttataaaactgtgttgaaggtttcacaactttgtgactacattaaaaactactggattttacactttaaatgagtgaattggatggaatgtgaattatatacaaagttgttaccaaaagaaataaaaaagaaatacagagttttca

SEQ ID NO: 258541 - DNA, 510 bp, Homo sapiens
caaaaacgtggctcccacatggtgaagttacttacatttgtgacttcaagttcaaacaattcagccttgccacattttcaaagaagggacacgttgccctcctgaattttcattaaatgacaatatttgaaaatatatatttaagccctaagggagtattcaggcaaaaatcaatttaagaagtaactaagatatgcctcgtatgcaactaaaagttagatgagaaggccagtcattcccttctttcccaattcccactgcattacaatttctaagtacatagacttgaacttgaagcaatccaatggacatgtccagtttagccaattattatagtttcctaatgtcctcagagattctgatgattagaatcaggagagggtcactcccgagcttacaagcagcaagtgtttttttaaactggagccactgctaacacgaaagattttctttgcttcatattggcaaacatgtaacacgttcctatgtggtatgaacgtttcagaaaaa

SEQ ID NO: 258542 - DNA, 370 bp, Homo sapiens
tgagcatccctatttatgacctgtttggtaacatgatgtgcatgtctacctgagtttttggatttttcttcccagtcccactagcatattgaatggaaatggaggtgtttggggggtcatggctggtctgtctctttctaggcaggagaggaagagaactgatacctgctgctagggaggattaatggcaagaaatggacttgttttcaaatagtctgatattctaaactagcagttagagagtacctatctcatacaaaacagtcttctaagctctgtggaggtacatactaagaattaaacagcaaccagctcttacataaaactatagtttacaacaggggttgacaagctatagcctacaggccaa

SEQ ID NO: 258543 - DNA, 541 bp, Homo sapiens
gccaaatatgtaaacaaatggcaaattaaattgaggagggagtgtcactttattcttggaataaagtttttgttttgaagtaatacagtttttttatattaagaataacaacatctggagtgctagtttctttttctcattgttggaaattgctattccaattcaatttgacagttttagcactagagggcaggcttgcttctagattgtgaagagttctacatgaattaatatagccaaacagcgcaggttgaacatccttaacttgaaaatctgaaattcaaaatgcttcaaaatccaaaactttttgagtgttgacatgatgccacaagtggaaaattccacacctgacctcatatgatgggtcacagtcaaaatgcaggtgtacaacagtttactctgttcccaagagaaaaataaaattagctgcaggctatgtgtaaaaagtgtatatgaaacataaatgaatttcatgtttagacttgggtcccatccccaaggtatcttattatgaatatgcaaatattcaaagatcaaaaaa

SEQ ID NO: 258544 - DNA, 107 bp, Homo sapiens
cggccacgtcctcttcctcttcctctgcctctgcctcttcctgcaacagcttcccttttcttagatttcaccttaggttcaacatccacaagtagtgtatccagagg

SEQ ID NO: 258545 - DNA, 269 bp, Homo sapiens
cagttatgtcttcagcaaagcctagttaattttttagaccctgagggcagttagagcggagtccaaggccacaggtaaacttaacctttaacatctgctttggtttcttgtgttttctacagtgtcgtaccacattagcattagcacttctggactaaatcctttttgccatctcaggaaaaagaaatgtgtttgcagtttacctttgtattcctagaactactttaaagtctaaaaatgaataaacaaataattaaatgttaaacatg

SEQ ID NO: 258546 - DNA, 234 bp, Homo sapiens
agagccctcatgaactgatcacctcttagaggttccacccctcaacactcttgcactggggattaaatttccaatgcatgaacttcaggcaatgcattcaaaccatagcaacaccttatagttatgacagtctgttttaagctaatgacaacttaaattgaatcacatataacaactctacactttaggagttggagaccagtctgggcaacaaagaaagcctctatctctaaa

SEQ ID NO: 258547 - DNA, 382 bp, Homo sapiens
gcaaaactaacaggaaaacattcactctgcctctagctttctcttcctaaactctgcccttcattttacctggagaacttgccttttccttctgttctccaaatctaattaagcagctgattcttggaggggttgacatttgccactgtggctggagctgaacagcactaatgatccttgttaaggtggggacacttcagagagggctgtccctgttgggtgacaggcagtctaatgagtcctagtgagttcttgagtaggctagggatggtgtcttagtagttcctaaaataatttgactcctactcctcattttgcattgcctggtgattttaattccattaggctgctataggttcctaaccaaccttaaggaaaaaaa

SEQ ID NO: 258548 - DNA, 883 bp, Homo sapiens
atgaaactgaatctgaggaaaagaagaaagctgaaaacacactgaggattatgggagaggggcaagtgcatgaagcttctcaatgacatacagacactctaaaagctcaagagatcaattattcaacttcaagaactgaaatttgaacacagattttgagcttccaaatcaggagaaaaagaagtgttctataagaaatttggacaagactctgcaagaagttaagagcaggtccttaaaggcaactgtgaattaacggagactagttttgagaaaatcagtcctgatttgtttctcctggagttttcttctttatgtgatccttcataaaagctgctaatatgggaaagattgaaatcagcaagtttctggctgtaagctaaaagaggctcttgaatcatatttccgcctgcttagcaaatttctcttgcgacaattggatgttatttggggttccatactagcaggaagaagtacaagcaaagctaagtcattttgagaataaatattatctctctatatatttgtaaatgttattttctttttttttgaggtttatgattgatccttggcatgtgtccccttgtgtattgctctactaaaaatagcctaaaaaagaattttcccctcgatgtggagcttctctttagttacaattctactttctccttcacttgagtatcagtcttcagagaactaccataacaaaggagtggatacagatatacgcaaaaaagtctatgagaaaattagtacattaaatttgtgaaagctcatttaaagtaattttctactaacaattttaatcaaatgtattaatcatatttctatgcttagtgatgttaaataaaaatttaaaaggtggcaatcaataaacagagat

SEQ ID NO: 258549 - DNA, 722 bp, Homo sapiens
atgaaactgaatctgaggaaaagaagaaagctgaaaacacactgaggattatgggagaggggcaagtgcatgaagcttctcaatgacatacagacactctaaaagctcaagagatcaattattcaacttcaagaactgaaatttgaacacagattttgagcttccaaatcagctgctaatatgggaaagattgaaatcagcaagtttctggctgtaagctaaaagaggctcttgaatcatatttccgcctgcttagcaaatttctcttgcgacaattggatgttatttggggttccatactagcaggaagaagtacaagcaaagctaagtcattttgagaataaatattatctctctatatatttgtaaatgttattttctttttttttgaggtttatgattgatccttggcatgtgtccccttgtgtattgctctactaaaaatagcctaaaaaagaattttcccctcgatgtggagcttctctttagttacaattctactttctccttcacttgagtatcagtcttcagagaactaccataacaaaggagtggatacagatatacgcaaaaaagtctatgagaaaattagtacattaaatttgtgaaagctcatttaaagtaattttctactaacaattttaatcaaatgtattaatcatatttctatgcttagtgatgttaaataaaaatttaaaaggtggcaatcaataaacagagat

SEQ ID NO: 258550 - DNA, 583 bp, Homo sapiens
  misc_feature (26)..(27): n is a, c, g, or t
ggatcaatagaagaaaaaaaaagcanncttcagctgctaatatgggaaagattgaaatcagcaagtttctggctgtaagctaaaagaggctcttgaatcatatttccgcctgcttagcaaatttctcttgcgacaattggatgttatttggggttccatactagcaggaagaagtacaagcaaagctaagtcattttgagaataaatattatctctctatatatttgtaaatgttattttctttttttttgaggtttatgattgatccttggcatgtgtccccttgtgtattgctctactaaaaatagcctaaaaaagaattttcccctcgatgtggagcttctctttagttacaattctactttctccttcacttgagtatcagtcttcagagaactaccataacaaaggagtggatacagatatacgcaaaaaagtctatgagaaaattagtacattaaatttgtgaaagctcatttaaagtaattttctactaacaattttaatcaaatgtattaatcatatttctatgcttagtgatgttaaataaaaatttaaaaggtggcaatcaataaacagagat

SEQ ID NO: 258551 - DNA, 422 bp, Homo sapiens
agtatatcttcctaccttataaaagatctaccttataaaagacccgttgaatacttcctgggcctcagggctggattgcaggtagcaggatgtccacctctggtcacaggtaggcatctgatccaaactgggccaatgaaattttctcttaggacttgagagggaataaagaaaatcagtctggctatgatatgtatgtaaactcagaagctgtgggatggccattgctttcgactcatgtggattaagaagaaacaggtattctgtagaaggagaagcataaactaggtccaaagagaactgcttgggctctgatggtttttcagttcttccctccagcctgttcgaatttctgttgttggatattatgagatgtctgtgtcctcataataaagtctctctttttgtttttgctaaaggta

SEQ ID NO: 258552 - DNA, 686 bp, Homo sapiens
ggtaaattataaatatatgctattgttattattccacctcctacacatttttcaattaagtcctgttgtctctgtcctaactcatatccttttatctcacctgggtataccacactatccccttaatttcagaatggatctccttaactccttttacctctatgatgtatccaaacactgtgacactcagaattggtcctaaacacaaatctgagcaattcagggtaattttacaatctactggtgatttctcactgcccatgagataagcttaaaattccaatttggcattgtaattctccaagaatagattcaggcagcagaacagaaagtcatgagaagcccagaggtgcctctatgtacgataattgcttgcaggaggaatgaatggatttaaacattaagtctggtctttagttttacctctatcacaaattagctatgatgtgctccagtggttttagtttcctcacctagaggctgattatcattatcattcgtttctttgcttaaatcctataatctacccagctttcctgccatggctgaaagcctaaactacgcttgttttactttattctctctaaataacttttcaccttactagttgttccttttgcttaaaaatctttctgccccttcccgtcaatatctttctgggggaaactgtaccctctctataatat

SEQ ID NO: 258553 - DNA, 691 bp, Homo sapiens
tatgacaaaaaagcatcacatctagaggacttgataccaactgaagatatactctaccttgggcttctgcccaaggtagaagagataactcttcagatatctctttggtttttctatgaggaaaatagtccatttatgtgtgtagacacaatctataacttttacatcatcattatttaaataaaagagacaataaggtcattacagattagttaatttgaatattttgaataaactcaaatgatgtagtctctctgaacactttcttttccccttagaaaatctctagaggaaaaacatgtgggtctcaccaagaacagtagataaatgccaagtaatgtgaaaagcctataatgtgaaaaatatattctaaagtaacttgaacaataaattatgagtttcagattatgaaatactgaggtaagataggtaatatttaagccagaatgaaggggggaaccagccccagcttctcttctctaatcatattcccagcaagaagggccttatccctcctgttagaaagtccatgcccaagaagtcctgaggctcagaggcagagagcctaagaatggaagttgatattctgattcttggaaaaatagatcatcttagttctgcagttttaggttagagtacaggctttgatcaaggcctgaatctatgtcagaatctatgtccattaattcaa

SEQ ID NO: 258554 - DNA, 127 bp, Homo sapiens
gggctggggggttgaggtttgtactcaatccacttcgtttgacattttcagggagaaaatgatagaatacaattagacgtcctgcagaattactttcctagactgagaaagagctagagatttcttt

SEQ ID NO: 258555 - DNA, 276 bp, Homo sapiens
gtcacctgtacttttgaccgacctgttacaaatcaggggttcccataactgtcttcttgggtttaataatttgctagaacagtttacggaactcagaaaaacagtttattttctttttttctgagagagagggtcttattttgttgcccaggctggtgtgcaatggtgcagtcatagctcattgcagccttgattgtctgggctccagtggttctcccacctcagcctccctagtagctgagactacatgcctgcaccaccacatgtggctagttt

SEQ ID NO: 258556 - DNA, 94 bp, Homo sapiens
ttcatgaagtttatttataaatctttctttatgaccagaactttctatgtgctgtttaagaagtgttgcctgcaataaagtgataaaaatatta

SEQ ID NO: 258557 - DNA, 627 bp, Homo sapiens
agcgtcttcagattttttccagggtcaatctatttattaatatagtcgctttgcaaagtgtagggaaaatgactaataaaatatgtaaacagtgcttcgtgtgcatccgatcaatactcaacaaactgctgctctccaacgcaaacatttccaaatccaatttgatttcaactcgtataacctcttttcattgcttcttattgctgtagccccaaagtgcaagcgagatttcccaaacccgcgcttaaagtgacacaacacgtgagtggtcttcacttggtacactgagtgaggtggggggaaaaagtagttgcaattagaattaaagcttccggtctctgaaatccctagaatcctgaaggatgagacttgtttcagaaattccgggcgggagggagggggagtggtagggagaaggattgcagaaagcgaaacaaaaagacgaaagagtcgggaggtgggggtgactaaggttagggggtgggccagggttttagggtctggccttggacattggccgcgatgcccagcacagcccagggttctccccgcactctcctctcgcatcaaccacctccaccgccaccacttacaaaacaataccagcaacagtacgcaggcttccca

SEQ ID NO: 258558 - DNA, 528 bp, Homo sapiens
catagaactaaaaatgaaacctgagattgacccaagcacctatctgagattggtatataatatttctataatgatatattttatagtagatattacaatagcatctgactttgagtcacagaaaccttaaactgaggagacaatagttcagaacctttttaagagccattctaaaagtgaccagcaggagggatctagtagtgaataatatcttaatagcaattttaggagaaaatgactctttcgtccagaagagctctgcagaaccagggctcccgtttatcttgtgctatctctgtagtattttcatttgagagaggaggctgagtttccagagctttgctttcatttatttttatacacattgtctctctatatctgcttgtggatattgttattttgaagagaaatggtttgtggttgtccagtggtatacaactgacaggcatttcattaagcacatagaccagactttgtgaatggttcagatattttttcattaaaaaacaaggtatggcagatggactt

SEQ ID NO: 258559 - DNA, 432 bp, Homo sapiens
caaagataaaataacagtatttgcaataaagtcttgttctggcttaaagccaacaaagataaagagtcaaagtacattaggctagaaacacatttgcctctagaaccatcattgtaacctccaggtaggattagacagtgggacttttgtaattatataaagattacatcctgtattttattggtttaactagatcaaacatgaatgctagtcaatctggctttcaaagagtttatataagttcaatcaactgcacccagccgttatttcaatgacattttccaagtcttttcatttctagccttttgatttttccttaaagaaagataactcttcaaaagcttcaagtaaagaaaacacatcattcatgcaaagacaacacacacgggaagaataaagataaatggaaactagttctctagatcccaccat

SEQ ID NO: 258560 - DNA, 267 bp, Homo sapiens
aagtgagtttgggaggctggcaagtgaagagaacaggcttgggaggcaagtgcaggtgggctgggatccagcctctgccactttccagctgtgagaccattggcaacttatgtaacctctctgagctccagggattttttttttaatttgttaaaaaaaaattagaataactgtttcattggattgttgagattattaagatcatcaataggatatgtttaatatattcagtatttttattaaaagatagcaatttttttttctacc

SEQ ID NO: 258561 - DNA, 723 bp, Homo sapiens
ataaggaaagagaggcaatcaacgggtaagtggcagccagaattcaaatccaggcctgcctatcatgcaagttcctccctctttgctgcaccacacaagcccaccttgtctagcactgggataaattaagagaagagcctggagtctggggatctgaggacagaaagggaaagacattccacatgatggcaggtcagccaccaggaaggcattgagggaacatttctaagagtatttttgttagctgggccttctctacacacggccataccacgcatatacgttccaggagtccaatctctttcctcctgaggtggctctgagctggtgctggccacgagctcttgcaggcccagaggggaggcatggccctagcaagcggcctgagctccagacaaagctgagcctcatgaaaccctgacacgagagctgtcagccctgcccagcaaattctggattgtctttggagtgtgatccacctttggttccagagaagctgttcatctggtgcccaggaagccaggacggtcactcaggtcaccagtttctggtttccccatatatctgaaacctccacctggacaccctcagactcttggcctcctggaaagcaggcagaactagggggtgagtgggaagcgggcagacatactccttatacaccacagccacagatgtccatcaccctggcatcgtgacaaccagagccctgccatgcctgtg

SEQ ID NO: 258562 - DNA, 438 bp, Homo sapiens
gtgggaatctgcatattcagcagcaagagtaaggggtaaagggtcttctcttctttacctcaagcctaatagggtaagttcctcaaaagattatttagagaacctagctgaactctaagttgacatgacaatgaattggtatctggcttccttcttgaacacctagagaccttgaaaaatgaggagctaccacagcagggccaaaagaaagttgctgctgagctgagaagtaattgtcttcccttctaacaatgggcctgaggtgcaaaggtcctgaggacttgttgtgaagcctgccctgtgaccctgcctatgagggcttccatctgagagtgagagtctgtgtaggatggtccatcagaaaaaaaaaatagaagctgagagaagactgagagggcacagggaaagggcaatgtgtattgcccgcatcatagaagt

SEQ ID NO: 258563 - DNA, 224 bp, Homo sapiens
gattacaggtgtgagccaccgcgcccggccagtttaatctttaaatatcattccaacaaagaccagaatggaaagcaatatggcttttttttttaatagttaaaaaaaagtagaggcagggtctcactatgttgcccaggccaatctcaaactcctggggtcaagcaagtctcccgccttaacctctcaagtgctgggattagcaatatggttttaaaatgatc

SEQ ID NO: 258564 - DNA, 480 bp, Homo sapiens
cagagcagcctggacttagtcacttagcgaacatttatggagcacctactgtgtgcaggcactgccctagtgccaggacaggaaaggaacaggtacatctctgtccccaaggaacttaccacctagctaatggaagcagctctcaaacaactaattatgcaattaatttttctgtggattgctccatcatcattgggttataccaaattactgataaatatttgaatcctgcagtgggtaaagtaccatgcaatgtacaaatgggcataccgaaaaagatgaaacagtctgtgcctcccttccgagttcacagtttagctgacaacacaggtacacactcatgccactgaataaccttccaatacaagttcccacttgtcagaatcatggggagctgcagcttccaactttggggatcaggaaaggcttacgtgaagaaagtgggatttgagcacagcctggactgtgattaacaataag

SEQ ID NO: 258565 - DNA, 482 bp, Homo sapiens
ataagtcttctagcctttgctgagtggttctttctttatgttggagtatgcattcaatgcttttgtgggctgatcaaaactctgccttagcctttgcttcctacttgcacagagccttaaggtcagccagagatgagagactgaggccttctcagggactaggcttatatatagacttgcacttgcatggttttctgatgccaggaatatgtcagagcttttcaaaggctatatatgtgcctggttctctgtggctggggcttttggggagctccaactctgttcttctctccttccccacagtgctggctaggctgctggattccataagctactactattctgaggcaattgatttttgaagcaatcaggagctggtggggtggggatgagaatagtacaagttaaaatgccacatatctcactattcttattgagattcaattgatttccctgaataaatgctttttggattactgcaa

SEQ ID NO: 258566 - DNA, 435 bp, Homo sapiens
ggactgcccggggctgcgcgccgggaacctcgcggggctggcgggcgccgcaccccctccctggccgcctgcgccccggggaggccgcccgcgcgcgacgggaccggcagcatgagcagcggctacagcagcctggaggaggacgccgaggacttcttcttcaccgccaggacctccttcttcaggagagcgccccagggcaagccccgctccggccaacaacatgccgtgggaagcacgagttgggaaaagatgggaagggaacttgtgccagtttcgccagctgtagccgtgttttttgggaggccttcccgaaacggggcacgtcggctggactgaggagcccggtgctagagcccgcggcctcctggcactaggagccgcaccaggggagccgggccaacccggccacgctcacatcagattacagaagat

SEQ ID NO: 258567 - DNA, 682 bp, Homo sapiens
ggactgcccggggctgcgcgccgggaacctcgcggggctggcgggcgccgcaccccctccctggccgcctgcgccccggggaggccgcccgcgcgcgacgggaccggcagcatgagcagcggctacagcagcctggaggaggacgccgaggacttcttcttcaccgccaggacctccttcttcaggagagcgccccagggcaagccccgctccggccaacaagatgttgagaaagagaaggaaacccacagttacctcagcaaagaggagatcaaagagaaagttcataaatacaacttagcagtcacagacaagttgaagatgaccttgaattcaaatgggatttacactggcttcattaaagtacagatggaactctgcaaacctccacagacttctccaaattctggaaaactctctcccagtagcaatggctgtatgaatacacttcatatcagcagcacaaacactgtcggggaagtgatcgaggccctgctcaaaaagtttctcgtgactgagagccctgccaagtttgcactttataagcgttgtcacagggaagaccaagtctacgcctgcaagctctcagaccgggaacatccactctacctgcgtttggtagcagggcccagaacagacacacttagttttgttcttcgtgaacatgaaattggagaggtaa

SEQ ID NO: 258568 - DNA, 586 bp, Homo sapiens
ggagaatggtgtgaacctgggaggcggagcttgcagtgagccaagatcacgccactgcacaccagcctgggcgacagagcaagacttcttctcaaaaagaagaagtatagtatagtaaataaataaaccagtaatgtattatttattatcattatcaagtattatatcctgtacataattatatctgctatacttatatacaactggcaacatgatgtttgtttacactagtattcccacaatcacatgagtaatgccttgtgctgtgattttacaatggctaggacatcaccagacaataataattttttagcttcgttatagtcttattggaccaccataaatgtactttgtccttgaccaaaccattgttatatggtgtgtgactgtacttaggtgacatgggggctgaaatgaaaggaattacccctcattgctctgagacttgactttggtagagtctttccacctgaagtgtttatgttagttatggaaaaggctctggttttatttcacttgaattatttttcctctcctcctgccagagtcacataaagtgttcttacttggatccttgacaacctgg

SEQ ID NO: 258569 - DNA, 443 bp, Homo sapiens
agacccagagaagatgtggagggagctcagaggttgtcctggaggagacgtggagacagctcagaggctgtcccagagaagacgtggaaagagctcagaggctgtcccagagaagacgtggagagctcagaggatgtcccagagaagacgtggagagagttcagaggctgtcccggagaagacgtggaaagagctcagaaactcagagactgtcccggagaagacatggaaacagctcagaggctgtctgcaagaagacgtgcagagagttcagaggctgtcccggagaagacatggagagagctcaaaggctgtccacaagaagatgtggagagagttcagaggctgtcgttactgctgcacttggctgtttttctttggataattattgcaatcaattttagtaattcaggtgttaaatcacagtcaagcacctatttacc

SEQ ID NO: 258570 - DNA, 399 bp, Homo sapiens
tgtgaaatgttttctgagttcatgcatatttgtgtctttttagtgtttttcttcaggaaaacaacttggttggttataaaatttgtttttgttcaaaagctgtagatttttttttttaaatttaacattataaaagtgaggctaatctgtaattttcccttctccctctaccccattatcctgaaagtttatgattgttttctttattattttaatgttaaaaatttacccaggagtgtctaattatggatttattttcccaggaatgaagtgaactgtttcatctgtgaccccgaagaatcttcaaaatttagatacttctttatttataagtttgaattttgtcagttgttttggtctcttcctgagagaaaaatagaattcttagtttgattctct

SEQ ID NO: 258571 - DNA, 327 bp, Homo sapiens
gaactgataacttgaggcactatgtaactatgcttcaacacctcaaaaaggctccagcaggcacttctgaaaatgatttttaaagcccttttttacttgaatgctgttcaacattctcacaacttggcttatgtttttatgctgaacaaatgattcatgaccctttattctgggggctggattacttgaatccaaagtgatgtgatgaataacaaggatctaggcgttgttgcccagttgatagtcacaaaatacttggccttaataagtcaggaattattttccccatatttctcgaattacattaaagaatataaggtttttaaa

SEQ ID NO: 258572 - DNA, 839 bp, Homo sapiens
ggaaaaatgcatttacagaaagtcccaggacttgagaagcaagctcaggtttttcatagtgatgtagagaagcataaatgttcattaattcagttactcattctaaaaatattaagtacttactgtatgccagttattcacctatgaataagacaggcaaggactatggagcttatagtctttccactgaagaccaatactaaggaaatatttatgagtgatatacattacaaaagaacaaacagttcttttcagctatttagagaatgcagatacaagttgagttgtaaagcaaacatttctaggtgataataataaaagcattaatttttcattctctcaatgttttggatcaggagaaagagacccagaaaaggtctcttatccaaggttatataacaactggtatatctggtacctcggtcccctgcctcctagtgtaataatatctgccataagaaataaagcaggaatgtgaaagagaagaaagtcaggcaggatgcctagaaagttcaaccagacactggatttcagtgtagtctatataacaggaggaatcacatttttaaaacttcttttatgcttgttttatacatttcttttcagtttcttttagcatttactaaatctttcaggactttgctaagttccatacatctacaaaatttctaaacaggagtcttatgtccctggaagcaaactatgttggtactatggttcctaaatctcatctctacaaaaacttttcagggttgtatcttttttcttttttctcggtaaagaaggttgttttctttaattaccttgaatttaataagtacagtcttatgattgctgac

SEQ ID NO: 258573 - DNA, 396 bp, Homo sapiens
gctttgacagttgagtttggagcctctgcttgtggcattgtgctaaagcaaaaaggaatggaatttgcaatgagagagcctttcaagttcaggctcagcctttagctgtgtgaacttgaaccactcacaatttttctgaatctcaatttcctcatctgtaaagtttatctaatatgttggtggtgaggtaatcatattattatctcaaataggagattgtatatgaaagggctttggaaaggcaaatcccattatttgtttaaatcaattttttcccctaaaaaagatagctcataaaagaatgtgaacttaatctgtatgtgtaatttctttcaagtcctatctgatgttgcttgtgactttctgagatttcctttggcttcttaccagtttggc

SEQ ID NO: 258574 - DNA, 266 bp, Homo sapiens
gcgccagcctgttggtacccgggaattcgcggcgcgtcgatgaaaaccagagagttaagtgcacaagtacatgacccagccctgcaacaaaggaaagatgagtgaggtttttgatctccttaacctaggagcttggggcttaacatccacatggagactggatataaacgccttgtaccctaataattcaggattctaacttgggccctgcataaaacatgaactagaaagaacaatgcactccccctgccgcccccactccccac

SEQ ID NO: 258575 - DNA, 277 bp, Homo sapiens
gttaagctctgggggagtcaaaagttatacatggatttttagctgcagggaggctggcacccctaacctccacgttgttcaagattcaattatattctaaaatttattctggtgatgttgcagaattctgtgaatatactaaaaaatactgaattttacactttaaacaatttcatgaattatgaaaaagattgtgcaaatgtccacttttataaaccattgaaaattttcttaattggaaaatgattttataaataaagttgcattattgctttgt

SEQ ID NO: 258576 - DNA, 409 bp, Homo sapiens
acaataaatgtaccattctggtacagactttgagagtagggaaggttgtgcatgtgtgaggacagagggtatgtgggaattctctgtacttttgctcaactttgctgtgaacctacaactcctgtaaaaactacagtttattaatttctcaaaaatggacaaatgatataaacaattaaaaaaaggaacttagatgtccaataatgatttaaaaacatatttagctttgtaaactaaaacaaaatactgtctttttctcttggaaacaaaaacaacaaaacagaccataatcaagtgttagtgaggatttgtggcaacgggttttcatacattgctagttggaatataaactggtataaccaactgggagacaatttgacagtactctgaaatgaattatgtatatatt

SEQ ID NO: 258577 - DNA, 645 bp, Homo sapiens
cggatcatacaggcattaaaggaacattaaagaaatactattaacagcttcctatcaacaaatttggtgatttagatggaatgaacaaatttattgaaaggtataaactgctgaatgttgtttaaaaagaaactgaacacttctatacttattagaaaaaaaaatcaatttgttatttaaaaaccctcccacaagtgtaaactagttcgaccattgtggaagacagtgtggcgattcctcaaggatctagaactagaattaccatttgacccagccatcccattactgggtatatacccaaaggattataaatcatgctactataaagacacatgcaccacacgtgtttattgaggcactattcacaatagcaaagacttggaaccaacccaaatgtccatcaatgagagactggattaagaaaatgtggcacatatacaccatggaatactatgcagccataaaaaaggatgagttcatgtcctttgtagggacatggatgaagctggaagccatcattctgagcaaactattgcaaagacagaaaaccaaacacttcatgttctcactcataggtgggaactgaacaatgagaacacttgggacacagggtgggcaacatcacaccctggggcctgttgtggg

SEQ ID NO: 258578 - DNA, 296 bp, Homo sapiens
aggcccatcagttcttaagtttgagaaacccctaatatagagccatttctcagacgggagagcagagttccagatagggaacatgaaatgtccaacctcatgcatctatcaagtgcccacaagccagcacaggcagtgtggggtaatgataagaactcacttaggatcgggcatggtggctcatgcctgtgatcccagcactttgggagactgaggtgggcggatcacttgaggccgggagttcgagaccagcctggccagcatggtgaaaccccatctctgctaaaaataaaaaa

SEQ ID NO: 258579 - DNA, 491 bp, Homo sapiens
aaattagactttgatcactgacctaataatcttattttctcaaacttcagtgaatatatgcaagcccttgatgactcacatattttttgagttatgatttataaggtggaaagtagttcctgataaattcagatctgtgaatgtaaaaattagttaaaagtagtagctaaaagtaaggtaatttaaagtacctcatcaaccttttgtatagcaggatataactgttcatctcttgtcctaactcatgtttgtatagtctttaaaaaaatcatctcctttaaaattttgcacattctacttttcgtcctggcctaacatggtacgtgttatgtttggaggaaactaatataaaataattcatacccccaaacaaaaaagtacagttagtatatttatttcatttactatttgtaatgtcttttgcatccaagatgatttttccaagtttataatttttttcattatgaaagtcatacagatatacttcgaga

SEQ ID NO: 258580 - DNA, 602 bp, Homo sapiens
aacacgagctgagagttgaataaaaaataagtgaagtagttgttcattgtcaggtcaggtttgaattctctcatacttgaaatccctgcaactgtgaaattgcctgtaggaattgcaggttgtgctaaacaatcaaacgaattggtaggttggctcccataggcaaaatcttgaggctgtttggggctccaattttctggggaagcaaattgcattgcactttgttttattttaaaaaatgatgtgaaaatacagagcatcacagcacagacaaatatcttacaccagttttcacaataaaatccccaaatgtgaaagctctccctttttgcaaaggcactttggaagcaataatgtttgtgtgcatagttgagtttatcagagtatactgattttttatcccatgaggttttcaaggaaagtgcagctggtcaacctttagtgttttctttgccacagggtatagttctgtttctgtccgctcaaatacagtctttcaggaaacgaattctctgtaggataccttaaaatgtctttgtgttgtaacacagggtagggggcagtatgtttaataggttagtgtggatacgtgggtcctgaaa

SEQ ID NO: 258581 - DNA, 723 bp, Homo sapiens
gtctttggttctttaacatctactttttgtcatgctaattctgtatttcagacaatgtaatggcagctgaagaacaaattaatacggtctgctataggtttaactggctgtggaaaattctgtgaatgaatcaagcagcagtttttcttcagattctttaaatttagggaatcctatttctagtttccgaaaggagaagtgaatcattctgcgtagtgttttagctgaatatgttaaatctgtgtattaaatttaacataatactgtatctacagttaaaaaaagaatagtatttagataacaattaaactgaattatctcatatttccctctttagatgacaatagcatttaagaacttacataaaatcctctttgcttcataatctgggacatatgtactctctcagctggcagtgtagtccttactaatgtttatgttaatagaaggatacataaaagttcctgaaagtaccataagtgtcttttagtgtttggtgtcattgacatattaacaaggagtctgaagatgagtaacacacccacatctgtcagtgccacagccggcacttgagcgacacaccagcacctcagacagagcatacagcttctttgctggtgcgcttgtgttctgggaaggagcaaatgaaatcattcacaaatcaggaattcctggcacaatatagaatcaggaaagctttttctagatgtgattgtaagtgat

SEQ ID NO: 258582 - DNA, 246 bp, Homo sapiens
ggtgaggattgaaaaactacctatcagagactatgcttattagttggctgacaaagtaatctgtatatcaaacccctgtgacatgcaatttacctatataacaaatctgcccctgaacctaaaataaaagttaagaaaaaagaaccctttccctgcttcctgacacatcctaaaatattgtgtcttgcataacagatgaccttgaaattcaaagcatggcttcaaaataaatagttttattacact

SEQ ID NO: 258583 - DNA, 1140 bp, Homo sapiens
gaatgtcatccctcactcacagaccctcagacggaaaatcaaagacatcctgggaggagcttcttcccaggaaccctcccgaaactccccgaaactcctccgaaattatccagaaagtccgttagggagattctcattcaacaaatatgtgtttcctgtttgctaggcactcttgctgaggttgggaatacaatggtgaatgagccacagtccctgccctcagtagcacacccaggggagggtcagctccacccgcccagacagacaccgaactggagaggataccacccctaacctctaccccagatacacctgacaagctgatcccctgcccacacacccagcaggtggctccaaggtcagagcctgcagaacacagacgcaatagagaaagactcagcgctgtggaaagacacccccacctacccacgacagtggccacagggccacccccagccaataacaccattacaaagacacgtgccttcagataatgcctgcagaaacgtgcatgctccaagcactctagaaatcccgtctcaagcagtgagtgccccgacagccacagccagaggagacacactcaaagctcctggggtcactctcagagggtctctgagccacgaacccacatccaggcacacacagagtcgtcacagagacacagtatggagtccacagcagcacgaacataggatacgaacgccgcaccacaggacagatctatctttagggagactcagagaactttttatttttaatagagacagggtctcgctatgttggccaggctggtcttgaactcctggcctcaaagcattcctccagctttggcctcccaaagtgctgggattacaggtatgagccagcacactaagcctgattcagagctttgaaccctagacatatgaacagactcagcttcgagttccaaaacaccaatgccacctccagaaacagagacaagcctcccaagataggctcaacctggtccagttagtgaccagcacaggagaaaaatctgtttcactcctcaacccagtgtatagttagagacatatataccaccctaccccctaccaaaaaagattttatcctcctttttttaatgctatttgtgagtctgtattaactgatttg

SEQ ID NO: 258584 - DNA, 265 bp, Homo sapiens
gtgtgctgggctgatttagaggatcccgcaggttatacagactcagcttcgagttccaaaacaccaatgccacctccagaaacagagacaagcctcccaagataggctcaacctggtccagttagtgaccagcacaggagaaaaatctgtttcactcctcaacccagtgtatagttagagacatatataccaccctaccccctaccaaaaaagattttatcctcctttttttaatgctatttgtgagtctgtattaactgatttg

SEQ ID NO: 258585 - DNA, 867 bp, Homo sapiens
gcaggtcagcaggtcagcaggtccgggagccccagtctcccggaacctggagggattcttgaggggccaagattagatgtggattaaatgccagccgtgtgagaatttgagtgtggctcgcagtctgatgcatcttagagtgtttccttcctctaaaacttttggacaactctttcctctttttaaaaataactttttcccccgaatattctcattttcattttaaaataccataaagatagatttggacaccaggcacaagtttcataatttggcttgaaatgaatatccagagggccttttacagaatggaggaaactaactagggtgtcctaatgtctccaagaacctctgcgcaggtgttccaccaaagacctagcccggtgtacctcttactttcctgctaaggtatttcttagttcatacccctgtggaacgtgaaatgtgtttcctagacactcagggcatagcggttcaaaagaacttttaatgtgatccttgacgagacggagtactagaggaaagtaacaaaagaaaagggcccgtgagtttattatgcccccagatgtttttttctggtggcataacgtggtttaaacaaggtgccggtactagctactattcattttaaaatctgggtctccagagagaaatttcagaaaggaaaactttgtcctttttcataaacctagagcagcgattttccctctggcctcactggaataatgggtggcacatgggccaggacgatgatgctggctggcgaaattagcaaggatctgctgagaaatactttataaagtcttctagtggtatttcctgtctgctcaacgtgtgttgtgaaaggtctaagaaatttaacttcat

SEQ ID NO: 258586 - DNA, 307 bp, Homo sapiens
actaggtaccagcagcaacttcacagttgtggcaaccaaaaatatctccaagactttgccaagtgtcctctggagagaaaaccactcttagacaagaaccactgctatacagcaaaaacattcaactaagatgcttttggttttgattgtgtgtttactataagactaactgaccagccagcattgactttgaagcaattatcagattgtacttgaacatgaactttgtgcaaactggagagcacggctccaggaagattcaatctgctggagcaggtccgggttaggcatcagcaaattggttttg

SEQ ID NO: 258587 - DNA, 403 bp, Homo sapiens
tgcctttctcactcctccctcctccttcttcccttccttcctttggaataaattagctcaaataatagtaaattattcctttggaataaattagtttggaggattctgatagattaattaccgtatatgtattcaacattaatatctttttgggtatgataaaagagaatgcacagtgagcagcacatcaggccagaagtgcaaagaccacctatttccatggggcaattaggctatctccttattgtttggttcttggtttacatttttttctcatttgtagatgataaaactataatagtgactgagctcagtactttgaaatctgtgtgtgttgacattaaaggctctgagaagtcttgcagtaaatgaaaatgtttcaaagctaaattcattttagtaa

SEQ ID NO: 258588 - DNA, 660 bp, Homo sapiens
gacctcaggtgatccacctacctcagcctcccaaagtgctgggattataggtatgaaccaccacacccggccttgttctataattcttgttccttctcccaagagctgtaagatgggccccagggggcacccaagaccaggtccaaaggggacaaaggaggggatgcacagaggtaggaagccacagtgaacctctctcgaagtatttgctaccacgtgtctgcatgcagcccgggcgaggctgtttgtattgcatatatgaggtgctgggtttttctttctttcttttttttttttttttgagacggagtctcactgtcgcctaggctggagtgcagtggtgcgatctcggctcactgcaagctccgcctcccgggttcatagcattctcctgcctcagcctccccagtagctgggactacaggtgcccaccaccacggctggctaatttttttgtatttttttacatcaaacaaagttgctcgcatacctacatgttgcacacaactgtctgtgcttggttctcactgacctgaacactaaatttgtgtacatcatggatgctggaagtaacctaaagaagtgttcctgtccaaccaactggttcagtgtctaatgccgtatcctactttgggagcccctgtgggaggttattttttt

SEQ ID NO: 258589 - DNA, 390 bp, Homo sapiens
caaagattagatatttgaaagaccactgtaaaacaagaatgttgttctcagcacatgacaaaattaagttcaaagtgattaaatgacttgcccaaaataagcaccaagtgaaaacacagccaagatttaaatgcaaataaaccaaattagtgtgtttcaaactgcatgttcttttcattgttctacacttccttaaagatgctacagagatgagtatttgttggtaacctgttgtatttgtaaatgtttatggggatatatatatttactgcttctatttgcataaatttgaattttgctgcattttttattattatggaaataatatagttccagatccattcttttcaaatgcaatttttaaataagcagtaagtggacattttcatt

SEQ ID NO: 258590 - DNA, 319 bp, Homo sapiens
atttgacggtctccatggtactccaaatcaagttagaattaatttgaaactcatttctctttcaggtctaggtctgataattttcattcatttctttcatggacatggtgactcttttcttgccatccttaaggagaaaagccatggacactacaaaatctttgaggtttgaagtgggaactaggagattcaggcttgaagatgaactagaattggagacagggtaggggaaatatgaaaggccctcttattgcaagttttaggagccactaaagcataggctttagattcttttgatagtgatgtcactattgacatg

SEQ ID NO: 258591 - DNA, 490 bp, Homo sapiens
atgagctaagacatagggagacgttggaaaggcatgattgtgttttgaaatgtgaggacgtgagatttggtaggggccatgggtggaatgatatggtttggctctgtgtccctatccaaatctcatcttgaattgtatttaccattatccccatgtaccattagaggtacctggtgggagctgagtgagtcatgacccatgctgttcttgtgatagtaagcaagttcttatgaaatctgatggttttataagggacttttcatccttttcttggcacttctctctcctgcagccatgtgaagaagaacatgttgcttccctttctgccatgattgtaagtttctggaggccttcccagccatgtgcaactgtgagtcaattaaacctcttccctttataaattacccagggtcaggtatttctttgtagcagcatgagaatgtgctaatacaaatgtttatgccttttttgaagttttaatgttcttagt

SEQ ID NO: 258592 - DNA, 372 bp, Homo sapiens
cttatattaaccaaacctctgtcacacggccctagccaactgccagaaaaaaaaaaaaaaaaaaaaaaaaaaaaaagaatggaaaaagtcttcctggggcccttgaaagaggaagcaatatagtaaattcataatagggtctttgccctcagaaaccaaggaagaaatatctcctgctaatgaaaaaaatattaattccattgacttggaagtcaaaattgccattaatgggcccctcataacatagaagaatgggccaaaaaatgacatgtaatattgatgcactgattgatcctgatcatacagaaatgttattattgctttccaatggagatgcatgttgggaatgtagtgtgtttttaagatgtcttt

SEQ ID NO: 258593 - DNA, 916 bp, Homo sapiens
cctcatttgacagatgaagcatttggggctcaaaggggttaaggactgtgtgtttatagattcctcaggcgctcatggtccagagaacatcatgaatcatcttggctccataatttttggggttacagatacttagagagatggacagggggtgtagttaccacactggcctccaccatgtggctgaaggccatggcttgattagttatttcttaatacacatctgctggctgcaattgcaagccgggggtgtgagctccaggcagaggcagagggtggcaggaacttccagagacttactggcagagcatagattagctgttctcccccttgacaattgccttgggccccttgtgttccagagggatggatgatccagatgcaaaatagagtgaagatgaagatacagattggagagaaaatggactgagtccatagggaacttcctttgggatattccatgagctggctgctcactccttctctctttcccaacaaactacgatgccctcaataaactatatgtatttaccaagcaaatgtgtcacgcacactttgagactcttgcgatactagcagaattagatattctttctctgtgcccctaagataaatagatggtgaatatcactgtcagggtatttgctgtgttacctgtgtatgtttgtctctctgcctttctctgtgtgtgttcattgggagctacgattatgttgttattatcatgaatcttcgtgttcctaatgcttaacagagtgcttaaaaatggtttttcaataaagaaatgtagttttggataaagaattgaggaaatggccataacaagcttgtgtactgttatttacagggagacaaacagatccgaaaacagatctgtcgattaaaaaggctgtgacataagtctatgccagactgc

SEQ ID NO: 258594 - DNA, 222 bp, Homo sapiens
aaaaaaaaaaaatgccaccgtgactggtagtattaaaaagcttctcatgctgggtgcagtggctcatgcctgtaatcccaacactttgggaggccaggaccagaagattgtttgagcctgggagttcagggaccagactgggcaacaacgtgagaccctgtctctgcaaaaaattaaaaaattagctaggtgatcacacctctgcactctaacctgggcgac

SEQ ID NO: 258595 - DNA, 754 bp, Homo sapiens
ttaaccagtttttacatgtgaaggtatatgcatatgcataatttgtttatataaagcatacatacacacatacatgtttgagtgcatatgtttgtgtatgtacatgtacgtatgctgttttgcattaaaaaaaaactctgaatcagacattgtttaattctaagcctagatagttttcctaaactgtgttttctacatctttattttgtggtgtcacaataggtaaccatattcatttcctatactaaaccccgagaatccttatttctctggcattttaaggttaccagagaacatcagacatcatggaaaaattcactaaaaatagtattatgaggattttattagtagcttattaaacagaggaaaaagtacttgtatcatctgtattcagcaagcaaaattgttaatcatgattaattttagaatttgaattataagtggcttaatttaaaaggaaaaacttaggctgggctcggtggctcatgcctgtactcccagtactttgggaggccaagacgggcagatcacttgaggtcagtagttctagagcagcctggccaaaatggtgaatccccatctctactaaaaatacaaaaaatagcctggcatggtggcacgtgcctgtaatcccagttactcaaaaggctaagtcacaagaattgcttgaatctgggaggcggaggttgcagtgaaccaagattgcgccgctgtactccagcctgggtgacagagtgagaccctatctcaaaaa

SEQ ID NO: 258596 - DNA, 2666 bp, Homo sapiens
  misc_feature (1021)..(1021): n is a, c, g, or t
  misc_feature (1762)..(1762): n is a, c, g, or t
  misc_feature (1894)..(1894): n is a, c, g, or t
gaattccggggtgtcaccgctttcgcttctgcttgatatatgtttaatataccatacagcagaaaattggaggccgaagctgacaaaattggactactgcttgctgcaaaggcttgtgcagacataagagccagttcagtgttttggcagcaaatggagttcgttgatagcctgcatggccaacccaagatgccagaatggttatctacacacccttctcatggcaatcgagttgagtacttggatagacttatacctcagatttggtgagtcttgaatgcccctgaaaaccattctgctccatttcaaaagtacttcccagtcttcgtattttacctaaacgcaaattcactgccttggagagtgtgagtccaagaagaaatcctttgggctatttccttggcttctctccatgacgattcctgactcgtggccccggcaatcttgggaagacatcatccagcttcttcagtccagaccctgggcaccccccttttgccaggatcgtccccacccagcctggacacattgactgaactgttttctaggacactgcactcagcaagacatggtggtgagccctgactctcagtcttcatgattgaagaactcttttgtacaacacaaagcactcaaaaagagtgaatgaaatgtgcagctcagagtgtcatttctgaagggaggagtctttctcttggagaagagtcctcaatgagcctggccgaggcccgggatctgtgtgaagtggactaaggattaagtaggatgtcaactgagacagaacttcaagtagctgtgaaaaccagcgccaagaaagactccagaaagaaaggtcaggatcgcagtgaagccactttgataaagaggtttaaaggtgaaggggtccggtacaaagccaaattgatcgggattgatgaagtttccgcagctcggggagacaagttatgtcaagattccatgatgaaactcaagggcgttgttgctggcgctcgttccaaaggagaacacaaacagaaaatcnttttaaccatctcctttggaggaatcaaaatctttgatgagaagacaggggcccttcagcatcatcatgctgttcatgaaatatcctacattgcaaaggacattacagatcaccgggcctttggatatgtttgtgggaaggaagggaatcacagatttgtggccataaaaacagcccaggcggctgaacctgttattctggacttgagagatctctttcaactcatttatgaattgaagcaaagagaagaattagaaaaaaaggcacaaaaggataagcagtgtgaacaagctgtgtaccagacaatattggaagaggatgttgaagatcctgtgtaccagtacattgtgtttgaggctggacacgagccaatccgtgatcccgaaacggaagaaaacatttatcaggttcccaccagccaaaagaaggaaggtgtttatgatgtgccaaaaagtcaacctgctgtgacccaattagaactttttggggacatgtccacaccccctgatataacctctccccccactcctgcaactccaggtgatgcctttatcccatcttcatctcagacccttccagcgagtgcagatgtgtttagttctgtacctttcggcactgctgctgtaccctcaggttacgttgcaatgggcgctgtcctcccgtccttctggggtcagcagcccctcgtccaacagcagatggtcatgggtgcccagccaccagtcgctcaggtgatgccgngggctcagcccatcgcatggggccagccgggtctctttcctgccactcagcagccctggccaactgtggccgggcagtttccgccagccgccttcatgcccacacaaactgttatgcctttgccagctgccntgttccaaggtcccctcaccccccttgccaccgtcccaggcacgagtgactccaccaggtcaagtccacagaccgacaagcccaggcagaaaatgggcaaagaaacgtttaaggatttccagatggcccagcctccgcccgtgccctcccgcaaacccgaccagccctccctcacctgtacctcagaggccttctccagttacttcaacaaagtcggggtggcacaggatacagacgactgtgatgactttgacatctcccagttgaatttgacccctgtgacttctaccacaccatcgaccaactcacctccaaccccagcccctagacagagctctccatccaaatcatctgcatcccatgccagtgatcctaccacagatgacatctttgaagagggctttgaaagtcccagcaaaagcgaagagcaagaagctcctgatggatcacaggcctcatccaacagtgatccatttggtgagcccagtggggagcccagtggtgataatataagtccacaggccggtagctagatagcgcaggtctgggagccagagcctctgtacgcgcagatcaacagacctaagaaatagcatcgatgcgagctcgtggtgggtgctcaagactggcatggacatcagcatcacgacaggctctcttgtattctttcacctcttcccacaagaaattcatgattgcccaatggaactcgctcagaagagggaactaagcatttttggcaaccaatggcagatatctatggcagcacaca

SEQ ID NO: 258597 - DNA, 2543 bp, Homo sapiens
  misc_feature (898)..(898): n is a, c, g, or t
  misc_feature (1639)..(1639): n is a, c, g, or t
  misc_feature (1771)..(1771): n is a, c, g, or t
ataatctaattaaggtagcataatatagagccagaagtcaggtggtatttacaaggtacagaagagatcttggactcaaaaggcatggagtccagtcctatttagctggaaaatctgtggcttatatcatctccaaccatggtaaaatgaggacagcaccatgaagatgaaatgaaagcacaaaagagaaggtatttggcaaaccatgacagtcgttgttagaaaggaaatgtcaaatgagtgcacaaagagggacccgaggggaccctcctaaaaaactgcaagatcctttcctttcactgttgctatgttctgacaaggtttgttgtcttcctgttaaatgggaggtgagtgtggagtggagaaagcgagttgtttgggcctcaggcctcaacctccacttgaagcctacacaagctcacctttgctaccctgcagagaaggcaaaaggagttaatgatgaaatgtcagaaaggcccttgggagcttttagaaattctcaccagcactcaaaaagagtgaatgaaatgtgcagctcagagtgtcatttctgaagggaggagtctttctcttggagaagagtcctcaatgagcctggccgaggcccgggatctgtgtgaagtggactaaggattaagtaggatgtcaactgagacagaacttcaagtagctgtgaaaaccagcgccaagaaagactccagaaagaaaggtcaggatcgcagtgaagccactttgataaagaggtttaaaggtgaaggggtccggtacaaagccaaattgatcgggattgatgaagtttccgcagctcggggagacaagttatgtcaagattccatgatgaaactcaagggcgttgttgctggcgctcgttccaaaggagaacacaaacagaaaatcnttttaaccatctcctttggaggaatcaaaatctttgatgagaagacaggggcccttcagcatcatcatgctgttcatgaaatatcctacattgcaaaggacattacagatcaccgggcctttggatatgtttgtgggaaggaagggaatcacagatttgtggccataaaaacagcccaggcggctgaacctgttattctggacttgagagatctctttcaactcatttatgaattgaagcaaagagaagaattagaaaaaaaggcacaaaaggataagcagtgtgaacaagctgtgtaccagacaatattggaagaggatgttgaagatcctgtgtaccagtacattgtgtttgaggctggacacgagccaatccgtgatcccgaaacggaagaaaacatttatcaggttcccaccagccaaaagaaggaaggtgtttatgatgtgccaaaaagtcaacctgctgtgacccaattagaactttttggggacatgtccacaccccctgatataacctctccccccactcctgcaactccaggtgatgcctttatcccatcttcatctcagacccttccagcgagtgcagatgtgtttagttctgtacctttcggcactgctgctgtaccctcaggttacgttgcaatgggcgctgtcctcccgtccttctggggtcagcagcccctcgtccaacagcagatggtcatgggtgcccagccaccagtcgctcaggtgatgccgngggctcagcccatcgcatggggccagccgggtctctttcctgccactcagcagccctggccaactgtggccgggcagtttccgccagccgccttcatgcccacacaaactgttatgcctttgccagctgccntgttccaaggtcccctcaccccccttgccaccgtcccaggcacgagtgactccaccaggtcaagtccacagaccgacaagcccaggcagaaaatgggcaaagaaacgtttaaggatttccagatggcccagcctccgcccgtgccctcccgcaaacccgaccagccctccctcacctgtacctcagaggccttctccagttacttcaacaaagtcggggtggcacaggatacagacgactgtgatgactttgacatctcccagttgaatttgacccctgtgacttctaccacaccatcgaccaactcacctccaaccccagcccctagacagagctctccatccaaatcatctgcatcccatgccagtgatcctaccacagatgacatctttgaagagggctttgaaagtcccagcaaaagcgaagagcaagaagctcctgatggatcacaggcctcatccaacagtgatccatttggtgagcccagtggggagcccagtggtgataatataagtccacaggccggtagctagatagcgcaggtctgggagccagagcctctgtacgcgcagatcaacagacctaagaaatagcatcgatgcgagctcgtggtgggtgctcaagactggcatggacatcagcatcacgacaggctctcttgtattctttcacctcttcccacaagaaattcatgattgcccaatggaactcgctcagaagagggaactaagcatttttggcaaccaatggcagatatctatggcagcacaca

SEQ ID NO: 258598 - DNA, 1546 bp, Homo sapiens
  misc_feature (898)..(898): n is a, c, g, or t
ataatctaattaaggtagcataatatagagccagaagtcaggtggtatttacaaggtacagaagagatcttggactcaaaaggcatggagtccagtcctatttagctggaaaatctgtggcttatatcatctccaaccatggtaaaatgaggacagcaccatgaagatgaaatgaaagcacaaaagagaaggtatttggcaaaccatgacagtcgttgttagaaaggaaatgtcaaatgagtgcacaaagagggacccgaggggaccctcctaaaaaactgcaagatcctttcctttcactgttgctatgttctgacaaggtttgttgtcttcctgttaaatgggaggtgagtgtggagtggagaaagcgagttgtttgggcctcaggcctcaacctccacttgaagcctacacaagctcacctttgctaccctgcagagaaggcaaaaggagttaatgatgaaatgtcagaaaggcccttgggagcttttagaaattctcaccagcactcaaaaagagtgaatgaaatgtgcagctcagagtgtcatttctgaagggaggagtctttctcttggagaagagtcctcaatgagcctggccgaggcccgggatctgtgtgaagtggactaaggattaagtaggatgtcaactgagacagaacttcaagtagctgtgaaaaccagcgccaagaaagactccagaaagaaaggtcaggatcgcagtgaagccactttgataaagaggtttaaaggtgaaggggtccggtacaaagccaaattgatcgggattgatgaagtttccgcagctcggggagacaagttatgtcaagattccatgatgaaactcaagggcgttgttgctggcgctcgttccaaaggagaacacaaacagaaaatcnttttaaccatctcctttggaggaatcaaaatctttgatgagaagacaggggcccttcagcatcatcatgctgttcatgaaatatcctacattgcaaaggacattacagatcaccgggcctttggatatgtttgtgggaaggaagggaatcacagatttgtggccataaaaacagcccaggcggctgaacctgttattctggacttgagagatctctttcaactcatttatgaattgaagcaaagagaagaattagaaaaaaaggcacaaaaggataagcagtgtgaacaagctgtgtaccaggtatacctgtgaatttatccttgcgctggagatcgggccttcaaataaacacatgtaaaaactgacagtcaggccttctcttcctgctgccaagtagaaataaacgaagatgaaagattcctgtgtaaattacaggacccaaagcaagccattagaaattattccttattctcttaaactctagacatgttagatgaagtgaaatctcgaatccagagaaagatttcaggggtggaggacccaagaaacacaattgcttttgctgttgttaacagtgcgggtggaggtgggagtggctctaaggattttgacttttttgtgttttttctaccttgatggcccacca

SEQ ID NO: 258599 - DNA, 240 bp, Homo sapiens
tgatgacgcctgcatcacggactgcatggtcgggatggcggagtgaccacaggctcgggaagtgacttgggacggtcactgtggctgagttagcagttggctgcttgttgttttcttccgtttgtggcgatcctttctttcccagatgacccctgttttgtgacgttcattcttcccatttgtcattgaaagccgttgctgggataacgctctaataaaaaccagtgccagaaaagatgc

SEQ ID NO: 258600 - DNA, 558 bp, Homo sapiens
  misc_feature (513)..(513): n is a, c, g, or t
ctgagatgaaggtgaaggtgtcagtatccaaagactggaaattctaagagaaatatgtcgcttggagaaagccctttaatttaaaaaaaacagtatatattttgctaatagttacagtaaaaacagataaaaccaagagaacatggccatcattgttcaaggcctcatactctctgatgcaaaaagggtacatgtgcaggatgtgcaggtttgttacataggtgaacgtgtgccatggtggtttgctgcacctatcaacccatcacctagtgaaaatggtgataaagtgaaggacatgctccagggaatctgctgatgtctccaaaatgtcatcggcaaagcggcggagaaaaatgagaaaatcacccaggttatctgcaaaaaattctgaaaaagaaaatattcactggaattagccaaacatctgtatatctgtactaataaacaacatttaaattcctttcaccctacttaatgaaggttaaaaaaaaccctaaatgttttgttggtacnagagatggtcgttaagtcaataaatgtaaaatctcctttaaatgt

SEQ ID NO: 258601 - DNA, 611 bp, Homo sapiens
  misc_feature (566)..(566): n is a, c, g, or t
ctgagatgaaggtgaaggtgtcagtatccaaagactggaaattctaagagaaatatgtcgcttggagaaagccctttaatttaaaaaaaacagtatatattttgctaatagttacagtaaaaacagataaaaccaagagaacatggccatcattgttcaaggcctcatactctctgatgcaaaaagggtacatgtgcaggatgtgcaggtttgttacataggtgaacgtgtgccatggtggtttgctgcacctatcaacccatcacctagcctaaacagtgacagaaccaagctttcagcacttcacctttctatgcttccagtgaaaatggtgataaagtgaaggacatgctccagggaatctgctgatgtctccaaaatgtcatcggcaaagcggcggagaaaaatgagaaaatcacccaggttatctgcaaaaaattctgaaaaagaaaatattcactggaattagccaaacatctgtatatctgtactaataaacaacatttaaattcctttcaccctacttaatgaaggttaaaaaaaaccctaaatgttttgttggtacnagagatggtcgttaagtcaataaatgtaaaatctcctttaaatgt

SEQ ID NO: 258602 - DNA, 131 bp, Homo sapiens
  misc_feature (129)..(129): n is a, c, g, or t
  misc_feature (131)..(131): n is a, c, g, or t
caccacgttctcctgcccccgtcaccttgtctcttctaactcattagcctttccttcctttgtctgttttcttctcccagctggtttaagttcttgatcatccctggcaccacctaccctaaggtcttnan

SEQ ID NO: 258603 - DNA, 127 bp, Homo sapiens
gctgaatgtctctctccccctacaatgaaaaaaagatagagatgtcacctgaacttgccatttttgatttggccccattcccttaactttacatccatctaatcttttttttttttttttttttttt

SEQ ID NO: 258604 - DNA, 655 bp, Homo sapiens
tagttcgttagtggcacgagaggaaattgcatttattataattgcctctaattgcaccagattagtgattacaattattgatggcagctgattattcattaggcatcaaatcaatccccgtgcttcttcattactcgaaacagtaactctgatgagaggtctaaaggaggccatgtccaccctttccactaaatggcaggctgctccccgtcctgcctcgaaacaaacacctgaaaataatttaggacttaaagtgacagagaaccatccctcgccttccgccaggtgtggtgattcatgtctgtaatcccagcactttcggaggccaaggtgggaggatcacttgaggccaggaatttgagaccagccagggcaacaaagttgagacactgtttctaaacacaacacaacgaccgcacaataaacaaacaaaccattgtttggccggcccagcggcctcaagagaaacttcctcaaacacccacgcccgtggaggctggcgacccaggagagtaacaacacaggggcaaaacgggtccaaagaaaccggcagcaaaagcgatggactacacaaaataaaaaagccgggggaaccgacggtgtaaaactaacggagcgggcccagggacgcaagggccacacgcgaaaataccgg

SEQ ID NO: 258605 - DNA, 384 bp, Homo sapiens
tagttcgttagtggcacgagaggaaattgcatttattataattgcctctaattgcaccagattagtgattacaattattgatggcagctgattattcattaggcatcaaatcaatccccgtgcttcttcattactcgaaacagtaactctgatgagaggtctaaaggaggccatgtccaccctttccactaaatggcaggctgctccccgtcctgcctcgaaacaaacacctgaaaataatttaggacttaaagtgacagagaaccatccctcgccttccgccatgtaatgcctcatcccgaacccagcactaactgatgaaattacggaggctgttaaacatcaccaaagactatttggaggtcccagaacgctccagaattg

SEQ ID NO: 258606 - DNA, 288 bp, Homo sapiens
caaaagcacatctaacaccaagaggcactgctcgtggggagggtgcagcgtggcacatatggaatcccggagctgcaggcgaacatctctcaggcaaccagtgcgtcgcgttctgccaggtgccctcacatgcactggggccccagtcagtttctttaagcccaatccggatcttccatcctttttgcttccaggcgatatttgtgatccactgctgtctcttcgtggtgtctcctgatgacatctgcaggggccccctgtgaactctttctagttaacaggcatcac

SEQ ID NO: 258607 - DNA, 323 bp, Homo sapiens
gaaccctggttttctaatctgtgcatgggaataataaaaaataataatagtactgtactctaagaggaacaggggagtgtgagtttgtcttttgtttgtttgttcattttcagagagacagggtcttgccgtcacccaggctggaattgcagtagtgcagtcagctcactgcagcctccaactcctgggctcaagtgatcctcccacttcagctactcgggaggctaaattgaggatcgcttgagccctggagataaaggctgccgtgagccgtgattgtgccactgcactccaacctgggcgacagagtgagactccatcac

SEQ ID NO: 258608 - DNA, 313 bp, Homo sapiens
tagaaagctggtgcttcagttacatgcactcaaaggagaagaatctactttgaatggaaagctcccgggtattcccacaccttctttgtttgtctaaggccatggctctgcagagctgcaataaacctgcgtacccaccctgcagaaggactgggccacagctagcttgtaaaacaaaactaagtcaccaaatttatttcctttaacacagtctcttagcagaacctttctatgctgactgtggccttggctcaagcaacagcaattgcagctcctgctggttctactaaggaggtaaaaataaaggcgactc

SEQ ID NO: 258609 - DNA, 559 bp, Homo sapiens
aaaagaggaacagacagccattaacttctaatccacttaaagatgattcaggtatcagtaccccttctgacaattatgattttcctcctctacctacagattgggcctgggaagctgtgaatccagagttggctcctgtaatgaaaacagtggacaccgggcaaataccacattcagtttctcgtcctctgagaagtcaagattctgtctttaactctattcaatcaaatactggaagaagccagggtggttggagctacagagatggtaacaaaaataccagcttgaaaacttggaataaaaatgattttaagcctcaatgtgtttctgtcagaccggcgtctgtttctgaacaaaaaactttccaggcatttgtcaaaattgcagatgttgagatgcagtattatattaatgtgatgaatgaaacttaagtagtgataaaaggaagtttagcataaattatagcagttttctgttattgcttaatttaccatctccatagttttatagctactattgtatttcacttgttgaattaaagtatttgaattcttttaaa

SEQ ID NO: 258610 - DNA, 655 bp, Homo sapiens
aaaagaggaacagacagccattaacttctaatccacttaaagatgattcaggtatcagtaccccttctgacaattatgattttcctcctctacctacagattgggcctgggaagctgtgaatccagagttggctcctgtaatgaaaacagtggacaccgggcaaataccacattcagtttctcgtcctctgagaagtcaagattctgtctttaactctattcaatcaaatactggaagaagccagggtggttggagctacagagatggtaacaaaaataccagcttgaaaacttggaataaaaatgattttaagccttgtgtcttttatgaaatcgatcgtgaacttccgagactgattagaggccgagttcatagatgtgttggcaactatgaccagaaaaagaacattttccaatgtgtttctgtcagaccggcgtctgtttctgaacaaaaaactttccaggcatttgtcaaaattgcagatgttgagatgcagtattatattaatgtgatgaatgaaacttaagtagtgataaaaggaagtttagcataaattatagcagttttctgttattgcttaatttaccatctccatagttttatagctactattgtatttcacttgttgaattaaagtatttgaattcttttaaa

SEQ ID NO: 258611 - DNA, 683 bp, Homo sapiens
cacgtatatgggaaacggccacacaccaaattaaaccattcactgacacccgggcacacccattttcaccactctgctcttgcccgtgccattgcctttgcatccaagggattcttccttctgtggcaatctgtatgacatccttactaagaaggcctccctcagtgcccttggccctctcacagccctttccatggccttctccactagactgtgaggaacccagtgtctggaacagttcatggcattgttgttagtgttgtcattttgttgttaagccttctgctgtcagtggtcatttcatatgtttgcatatttacgccctgcctctttttggtatgcagtgtggaccctattgcacggctacttgtgtttcagtggctttgtcctattccaccttctatgccacttactctgaatgcctggcacattggtaggtgcccaataccaacttggaaagtgaatgaatttgttttctcattaccttttgaaatgcctatacagatgttcctccacttatgatggagttcattctgaaaagctcatgataagtagaagatattatgtcagaaatgtattttattgtattttttattttttaatctttctttctctttctttctttctttcattcattcattctttctttctttctttttctttctttcctttcatctttcttt

SEQ ID NO: 258612 - DNA, 279 bp, Homo sapiens
tttaccaaaccatttgaaagtaagatgaaaatactgatattttgccccaagtactttttataatgtgatcacaatatcctcatttccaggggatttaacattacagtttgtattcagatttctcagttgtccccaaaatgttctttatagctctttgaggcgggtttattcagtctaattaaggattgttctctaatctagaacattgtccccacttttttcattctttcatgccattgcacgccagcctgggcaacaagagcgaaactccatctcaaa

SEQ ID NO: 258613 - DNA, 417 bp, Homo sapiens
aggagtttgaggctgaaatgagctatgatcacaccaccacacttcagcctgagcaacagagcaagaccctgtcttgaaaacaaacaaacaaacaaaagaggttttgcagcataaatgttttgacagaactaataaagaatgtgcctctgtctggccgggcgcagtagctcatgcctgtaatcccagcactttgggaggccaaggtgggtggatcatcaggtcaggagtttgagaccagcctgaccaacatgatgaaaccccgtctctactaaaaatacaaaaaaattagccaggcgtggtggcacgtgcctgtaatcccagctactcaatcgcttgaacctgggaggcagaggtggcagtgagccaagattgcaccactgtactccagcctgggcgacagagcaagactccatctaa

SEQ ID NO: 258614 - DNA, 641 bp, Homo sapiens
actgaggccacttaattgagccttagcagtgtttgtatacacagcaattactttttaaaaatctaaatagctgtttcaaagtgaagcagaaacattaataattcttggacccctccaggggatacttctggactttaaatttagagcttagagagttcctgagaatgattcaaaatatgtttgtttccttttttgaataacagcagttaaatatctaagtcaaagatgtttgctataattctaattttaaagataacatttattgactttttctagttataaagataacacttttctgtacataacttaaaattcttatcatttcatcctaaaaagagttaacagtttgtgtaaaactttattttttatagaaaatatatatgtttaagttggattcatataacatatgatcatatatttgtttatatatgtttaaattatatatgcttagacttatgtgatatacaattttataatctgattgttaaatttaactgtatgacaaacttatcttgtcatcatattttctgtaaaatgttattttaacaggtgcataatgtagcaaaatatgtatacactgacatattaatagacatgtaagttctttggaacttttcactgtgttatgtggacattgttgt

SEQ ID NO: 258615 - DNA, 2901 bp, Homo sapiens
  misc_feature (2)..(3): n is a, c, g, or t
  misc_feature (5)..(5): n is a, c, g, or t
  misc_feature (7)..(7): n is a, c, g, or t
  misc_feature (9)..(9): n is a, c, g, or t
  misc_feature (227)..(227): n is a, c, g, or t
  misc_feature (369)..(369): n is a, c, g, or t
  misc_feature (377)..(378): n is a, c, g, or t
  misc_feature (882)..(882): n is a, c, g, or t
  misc_feature (915)..(915): n is a, c, g, or t
  misc_feature (920)..(920): n is a, c, g, or t
  misc_feature (937)..(937): n is a, c, g, or t
  misc_feature (983)..(983): n is a, c, g, or t
  misc_feature (1076)..(1076): n is a, c, g, or t
  misc_feature (1419)..(1419): n is a, c, g, or t
  misc_feature (1506)..(1506): n is a, c, g, or t
  misc_feature (2023)..(2023): n is a, c, g, or t
  misc_feature (2270)..(2270): n is a, c, g, or t
  misc_feature (2454)..(2454): n is a, c, g, or t
  misc_feature (2564)..(2564): n is a, c, g, or t
  misc_feature (2829)..(2829): n is a, c, g, or t
gnnangntntttaagtgtaacccttacttgtagggtgccaagtaaggagaattgggttgcttacgcttgacacccgacctcccagatggcttaaacgtaagggtttatggaggcagggaggcataagttataggcaaggtcataaatcaacacagggaggctatacattggtttgacttaaaaagacaggacatctccaagcagaggcccacaggtcataggtggantccaggattttctgatttgtgattgattaaggagtcaaagctttgtctaagaatgtgtgatcggcagaaaagaaggtgagctctggttcataggcatgaccttctccaggcccctcaggaagaaatttagaacaaagaatancaatcagnnttgagtcctcagcctctccttacctgagatctgtgtgccagtggctccatttggtggggtctaggtttctggaaaacaactcagggacatattttaagatgttgtctttggtttttacagggaaccaaacatcttgtgactttagtttgtttggctattaagtttttttttgttgttgtggtttattaagtttttatttacttttttaggactagttaagtgactggaagttttttgaatgcaccgaagattaaaaaaattatgtctttgggggcccacaggctcctaagaggggttcctgctctgttttaaggatccttaacttaatcatatctatgatgtttcagttcagtttcagttcagggtcttccctgaagttattagatgtcaactgggactgtaatcgtccgaaggtttgactggggctggagggtccacttcaggatggtgaactcctatgactggcaggtggtatctggctatatgcaggagggctcagttccnttccacatggcccgctccatatttttcccatanggatncttgagtgtccatatgncattgtggatggcttcccccagagtatgcagcaatcaaggcagtantagattttatgacctagccttgggaagcacacactgtcaccttcacagtattttattggtcacatgggtcagccccattcaatgggggagggnactctataagggcacaaatgccaggaggcctcagaaacataaatatttttgctatgggtatagattcatgggttttaggctggaagaaaccacaaaaataccctggttgacagtaagaatcagtcccattgatgataaaagatggaatttaaaagcttaatagggacaattttcttctgcaaagaggtagatggggtggcatgaatttcttgtgttagagacagttttaacagatgaaccctcaggtgccaagtcagttaaccagagctgggttgacaatcagggatttaggagggaaaaacccaaggcaaggaaagtccttgtgaatgtgaccaggtggagnaacaggtagatgacgatttgccaactccatgttcaggggctgagctgaggccagagtcggcagctggtatttcttctccaatgggcnacttagggtggctttttgggctcagtggcactccagaacaagtctagcatattggctggtggtagcaggaccttactgacattccatatggaatggagctggaagcagtcctgtgaggtctgggtgacactcgcacatcctgtaaggatggagaagcaatggactagggagctgagacccccaagaccatcattcttgcccaggcttcagagacaactgaacttcttcttggtcattcacaccagactggagatggctgagtggttgttccgtaagagcaaggagagagaagccggctccgggaattaagggcgtgtgcatcgggtagaatgcaagccaagcattcagaaatggtccagtccagtgaaatggaggcttgtattgagtctggggcccaaggctgagagaaggctggctccgtcgaaccagaaacagcactgagaacctggctggtggcaccggcttcagctgcacagagagggggtcagcaggccacacagggtcatcctgaccagcngtcttttttgtggggtgtcgtgaagaaaagcaatgctcaagggtagataacgaattttctaagactgagcagccagcttagtggcagagtgaaaatgagaatagaagtggaagtacactggaatgaagatggctgcttagttttatctgcctcacccactagctagaacgtggctttagccataataccaatatgtatttttggaacattcctttgctcttttcctttgactttggatagcagatgnggtctattgcattgctgtgattttcagatgaaatcaagcacagtggtttacttttaaccaaaccccagtcatacttcctctctctgactcagcttccttgtcgtacgtaagattgatgacacacgccaccagctcacatttacaaaggcgttctaggtcttttgatgaacacctatatggcatntatattaatataattttctctgtgagaggagagatttaaatgagagttgtcttagtagctgaggaaacagatacatgattaggggaatagctaatttcttgcctgatgtnatgtatggaaactgagaaaagcctggaaaaggaggttggaaaactgaaagtgggtgggcaccacttttcacacccaaccctctttccatgcccaaaacaccgtggggcatcccctcctcacagggcctgtgtgctgggctgcactgacatgcattccggctcagagttggcttcacccttaacagcgggtactgggactctgtggacacatggacaactttacttaactctaaatcggggtgtccagtgttttggcttccctggnccacattggaagaagaaaaattgtcttggaccacacataaaatacattaacactaatgatagctgatgagct

SEQ ID NO: 258616 - DNA, 261 bp, Homo sapiens
gaagggctggaggctaaggattgacttgcttagttaactagagaagcagatggggttgggaggttctgtgctatgtctctccctccacagacaaggctgaacctgggagcaaaataaggagttggggttgggtgtggttgctcacacctataatcccagtgcttcaggaggctgaggcaggaggattgcttgaggccaagagttcaagaccagcctaggcaacctgggagagtctgtctctacaaaaaaatttttttaatt

SEQ ID NO: 258617 - DNA, 472 bp, Homo sapiens
ggcctttttattaccacttttcacctgtgaactggctctgttctaccttgcgttgcctatgcaaataaggataaacaaactccattctctcttccaagggggagagaattagcagcaagagggcacatatttctctttgttaaaacctgggaatggcatcactcctttctttccctagtgactaatcttgtaaagtgttaaagagaagtctaagtcccccagagggacttagaaagccctggccattcatgcccaggtggagccactttagtaaaaaaaatagcatttttgctgccatgtgatgcacaggtaaaacagaccactggatactgctggtttgcattcctgcttcctgggaagttctcccttccatttcatgagcctctttgggaaaggtacaaacttagggaattactgacacagaataggaacaattggcaatcctttcactctttcacatatactgatcttt

SEQ ID NO: 258618 - DNA, 408 bp, Homo sapiens
aaagcagataaggaactatatattcaaatatctccagggactaggcaactaacaaaaatgagtaagtggtttgagagaggactggagtgaactggagaccacaggccttactatcagggggcagccttattcagctccagcagattgtgctagaagaaagtgaaaactactgcaagggcaggcatatgcctttaatgcctttagtcacagctactcaggaagctgaaacaagaagattgtttgagcccaggagtttgaggcaagcctggggcactccatcacttaacaacaacaacaacagcaaaaaaccctagtgccgccagaactttgcaaaagaagcttgaaatcctaaatgtgtacgatttcccaatgtctaaatgttagcaaccaattcaattactcaaaact

SEQ ID NO: 258619 - DNA, 695 bp, Homo sapiens
ctgggtcttggacttccagctcccaaaactgtaagaaatacatgtctgccatcaataagccacccagtctaaggtattttgttatagcagcccaaatggactaagagaagctttctgaaggccaaatatcctttaatgcagagactatgaaataaacaagaaaacagtggtcgagaaagctaagagcctcctcggctagaagccatggtctagccaccaatctgccacctggatgaaacctaaacagactgtggacgtctcccactgtcccttcttaatctctggttgatgcactgggcaataacgctacagaaagccatttgctaattgctgcaataaggtaaaatgttgcattaaagggaaaaactgggtgattcatctagttagtgattagcagcctgagatttctcagatattactctctctatttcagcaggttaatagataggaaaattagcagataatttaaataatggctcatttaacacaacgattcctaattatattagcagcccatctgctgaagtctgccggcaagccgaacccacagcagcagtggcctctgcagcccagccacgcggggctgtttgcccacagttattacatatgattgtaggcactgattctgttaatcaggctctttcagcgcttcagttctagaaatgaatctcatttacttaaacacatcttgttga

SEQ ID NO: 258620 - DNA, 679 bp, Homo sapiens
tggtattctatgttgaaaggaaaattttactatacttaagtgctgttccaaggttaaatactcatacatatatttaatgttccaattctagaaatcaaacttaagaagtaacacttttggtggaaccacaaacggaaaagagtcttgggtcctgaatcatggtttggagaagacctttatgcctattaggagccaaaagcctaaaactctaaacttaaaacacaagcaatagaatgttgattctgtcctgtctgcagtatacaggattagctttttctgttaagataaaactaggaaataaagttgtgtgtggaagcaataaaaatctgaactattcctacatgtaattctagaaatttataggtgctacattttttgaaaattttaatgacatatataagaaggaaaatcaaattaaaaattcaagttgatgttatctttaaaaaaaagtaatagttcatcctgttcattcataatctaaattaggtaaaaaccagtgataaaatattgtgtgttattttaaaatatatgtatatctacacaaacgatattatatatacaaatactcgtactcatgtacacaccctatcattaataaagcatcattgtttaattttaggaaaaaaataactacaattgggaataaaattgattgccctattacatccaaaagtcacca

SEQ ID NO: 258621 - DNA, 1775 bp, Homo sapiens
aaaggtcacagggaaatcaaaggcggggtacagggccagagggaggaggaaacaacttcccggttgctttcagacgcttcagagatcctctggaggcctgggggagcttttgagtactttatttcagttggtccctgagctcggtgagtggggcgggtagagccaccaggggaatcaacagtggtttctcgtgcccctcagggtcaggagcagtctgatcaaaaggagggcatccactgtccggggccattcccacagctcccggatgctgggtctggaggctgcgcccttcccctgcaggagctcagcccagtgggcagtctgaagatggccaattacacgctggcaccagaggatgaatatgatgtcctcatagaaggtgaactggagagcgatgaggcagagcaatgtgacaagtatgacgcccaggcactctcagcccagctggtgccatcactctgctctgctgtgtttgtgatcggtgtcctggacaatctcctggttgtgcttatcctggtaaaatataaaggactcaaacgcgtggaaaatatctatcttctaaacttggcagtttctaacttgtgtttcttgcttaccctgcccttctgggctcatgctgggggcgatcccatgtgtaaaattctcattggactgtacttcgtgggcctgtacagtgagacatttttcaattgccttctgactgtgcaaaggtacctagtgtttttgcacaagggcaactttttctcagccaggaggagggtgccctgtggcatcattacaagtgtcctggcatgggtaacagccattctggccactttgcctgaatacgtggtttataaacctcagatggaagaccagaaatacaagtgtgcatttagcagaactcccttcctgccagctgatgagacattctggaagcattttctgactttaaaaatgaacatttcggttcttgtcctccccctatttatttttacatttctctatgtgcaaatgagaaaaacactaaggttcagggagcagaggtatagccttttcaagcttgtttttgccataatggtagtcttccttctgatgtgggcgccctacaatattgcatttttcctgtccactttcaaagaacacttctccctgagtgactgcaagagcagctacaatctggacaaaagtgttcacatcactaaactcatcgccaccacccactgctgcatcaaccctctcctgtatgcgtttcttgatgggacatttagcaaatacctctgccgctgtttccatctgcgtagtaacaccccacttcaacccagggggcagtctgcacaaggcacatcgagggaagaacctgaccattccaccgaagtgtaaactagcatccaccaaatgcaagaagaataaacatggattttcatctttctgcattatttcatgtaaattttctacacatttgtatacaaaatcggatacaggaagaaaagggagaggtgagctaacatttgctaagcactgaatttgtctcaggcaccgtgcaaggctctttacaaacgtgagctccttcgcctcctaccacttgtccatagtgtggataggactagtctcatttctctgagaagaaaactaaggcgcggaaatttgtctaagatcacataactaggaagtggcagaactgattctccagccctggtagcatttgctcagagcctacgcttggtccagaacatcaaactccaaaccctggggacaaacgacatgaaataaatgtattttaaaacatctaataa

SEQ ID NO: 258622 - DNA, 1650 bp, Homo sapiens
tcctgctctggggaagtgggcacacgttaaaagaaatgtttatttcagtcttctgaaatagggaattactctggctaaaatgtagctccagaaagggaaagtggggctgtatgaatccaggtccagtttgttgtttcctccaggataaggcagctgtcggaggggaaaatcatctcccatttctccacagggcagtctgaagatggccaattacacgctggcaccagaggatgaatatgatgtcctcatagaaggtgaactggagagcgatgaggcagagcaatgtgacaagtatgacgcccaggcactctcagcccagctggtgccatcactctgctctgctgtgtttgtgatcggtgtcctggacaatctcctggttgtgcttatcctggtaaaatataaaggactcaaacgcgtggaaaatatctatcttctaaacttggcagtttctaacttgtgtttcttgcttaccctgcccttctgggctcatgctgggggcgatcccatgtgtaaaattctcattggactgtacttcgtgggcctgtacagtgagacatttttcaattgccttctgactgtgcaaaggtacctagtgtttttgcacaagggcaactttttctcagccaggaggagggtgccctgtggcatcattacaagtgtcctggcatgggtaacagccattctggccactttgcctgaatacgtggtttataaacctcagatggaagaccagaaatacaagtgtgcatttagcagaactcccttcctgccagctgatgagacattctggaagcattttctgactttaaaaatgaacatttcggttcttgtcctccccctatttatttttacatttctctatgtgcaaatgagaaaaacactaaggttcagggagcagaggtatagccttttcaagcttgtttttgccataatggtagtcttccttctgatgtgggcgccctacaatattgcatttttcctgtccactttcaaagaacacttctccctgagtgactgcaagagcagctacaatctggacaaaagtgttcacatcactaaactcatcgccaccacccactgctgcatcaaccctctcctgtatgcgtttcttgatgggacatttagcaaatacctctgccgctgtttccatctgcgtagtaacaccccacttcaacccagggggcagtctgcacaaggcacatcgagggaagaacctgaccattccaccgaagtgtaaactagcatccaccaaatgcaagaagaataaacatggattttcatctttctgcattatttcatgtaaattttctacacatttgtatacaaaatcggatacaggaagaaaagggagaggtgagctaacatttgctaagcactgaatttgtctcaggcaccgtgcaaggctctttacaaacgtgagctccttcgcctcctaccacttgtccatagtgtggataggactagtctcatttctctgagaagaaaactaaggcgcggaaatttgtctaagatcacataactaggaagtggcagaactgattctccagccctggtagcatttgctcagagcctacgcttggtccagaacatcaaactccaaaccctggggacaaacgacatgaaataaatgtattttaaaacatctaataa

SEQ ID NO: 258623 - DNA, 1531 bp, Homo sapiens
aggaagctgcttcggggggtgagcaaactttttaaaatgcagaaattatgatctacacccgtttcttaaaaggcagtctgaagatggccaattacacgctggcaccagaggatgaatatgatgtcctcatagaaggtgaactggagagcgatgaggcagagcaatgtgacaagtatgacgcccaggcactctcagcccagctggtgccatcactctgctctgctgtgtttgtgatcggtgtcctggacaatctcctggttgtgcttatcctggtaaaatataaaggactcaaacgcgtggaaaatatctatcttctaaacttggcagtttctaacttgtgtttcttgcttaccctgcccttctgggctcatgctgggggcgatcccatgtgtaaaattctcattggactgtacttcgtgggcctgtacagtgagacatttttcaattgccttctgactgtgcaaaggtacctagtgtttttgcacaagggcaactttttctcagccaggaggagggtgccctgtggcatcattacaagtgtcctggcatgggtaacagccattctggccactttgcctgaatacgtggtttataaacctcagatggaagaccagaaatacaagtgtgcatttagcagaactcccttcctgccagctgatgagacattctggaagcattttctgactttaaaaatgaacatttcggttcttgtcctccccctatttatttttacatttctctatgtgcaaatgagaaaaacactaaggttcagggagcagaggtatagccttttcaagcttgtttttgccataatggtagtcttccttctgatgtgggcgccctacaatattgcatttttcctgtccactttcaaagaacacttctccctgagtgactgcaagagcagctacaatctggacaaaagtgttcacatcactaaactcatcgccaccacccactgctgcatcaaccctctcctgtatgcgtttcttgatgggacatttagcaaatacctctgccgctgtttccatctgcgtagtaacaccccacttcaacccagggggcagtctgcacaaggcacatcgagggaagaacctgaccattccaccgaagtgtaaactagcatccaccaaatgcaagaagaataaacatggattttcatctttctgcattatttcatgtaaattttctacacatttgtatacaaaatcggatacaggaagaaaagggagaggtgagctaacatttgctaagcactgaatttgtctcaggcaccgtgcaaggctctttacaaacgtgagctccttcgcctcctaccacttgtccatagtgtggataggactagtctcatttctctgagaagaaaactaaggcgcggaaatttgtctaagatcacataactaggaagtggcagaactgattctccagccctggtagcatttgctcagagcctacgcttggtccagaacatcaaactccaaaccctggggacaaacgacatgaaataaatgtattttaaaacatctaataa

SEQ ID NO: 258624 - DNA, 255 bp, Homo sapiens
  misc_feature (10)..(10): n is a, c, g, or t
ctcccggggntgggcagggacgtttctccttcgcctcctaccacttgtccatagtgtggataggactagtctcatttctctgagaagaaaactaaggcgcggaaatttgtctaagatcacataactaggaagtggcagaactgattctccagccctggtagcatttgctcagagcctacgcttggtccagaacatcaaactccaaaccctggggacaaacgacatgaaataaatgtattttaaaacatctaataa

SEQ ID NO: 258625 - DNA, 533 bp, Homo sapiens
agattatgatctcttaattgccaaatccagtcaactctttccagtcctcatgttaattggcctctctctttcagcagcatttggcacaggtggccacagcttttccttcctttctttcctcctctggctcctaatcacatatgtttatgctatttctgctgtcaccatttcttctcaatttccttagctgactctactttttctgcctccctcttaaatcttggtgctcctcagagttctatcctaggaattttattctcattctgtaatacatactgtacgtggattaccttatccattcccatggcttctactatcatgagtatactggtgacttcctaatctatacctcaaattgtatttggaaagatagattaggttcagtgagatgagacaatagctgggatcataggtgtgtgacattgcacgtgtcaggtgcaatgatcccagctattagggaggctgaagtgagaggacagcttgagttcaggagttcaagaccagcttgggcaacatagtaagacctgtcttaa

SEQ ID NO: 258626 - DNA, 258 bp, Homo sapiens
agattatgatctcttaattgccaaatccagtcaactctttccagtcctcatgttaattggcctctctctttcagcagcatttggcacaggtggccacagcttttccttcctttctttcctcctctggctcctaatcacatatgtttatgctatttctgctgtcaccatttcttctcaatttccttagctgaagtgagaggacagcttgagttcaggagttcaagaccagcttgggcaacatagtaagacctgtcttaa

SEQ ID NO: 258627 - DNA, 1584 bp, Homo sapiens
ggggagaggaagagtggtagggggagggagagagagaggaagagtttccaaacttgtctccagtgacaggagacatttacgttccacaagataaaactgccacttagagcccagggaagctaaaccttcctggcttggcctaggagctcgagcggagtcatgggctctctggtcctgacactgtgcgctcttttctgcctggcagcttacttggtttctggcagccccatcatgaacctagagcagtctcctctggaagaagatatgtccctctttggtgatgttttctcagagcaagacggtgtcgactttaacacactgctccagagcatgaaggatgagtttcttaagacactaaacctctctgacatccccacgcaggattcagccaaggtggacccaccagagtacatgttggaactctacaacaaatttgcaacagatcggacctccatgccctctgccaacatcattaggagtttcaagaatgaagatctgttttcccagccggtcagttttaatgggctccgaaaataccccctcctcttcaatgtgtccattcctcaccatgaagaggtcatcatggctgaacttaggctatacacactggtgcaaagggatcgtatgatatacgatggagtagaccggaaaattaccatttttgaagtgctggagagcaaaggggataatgagggagaaagaaacatgctggtcttggtgtctggggagatatatggaaccaacagtgagtgggagacttttgatgtcacagatgccatcagacgttggcaaaagtcaggctcatccacccaccagctggaggtccacattgagagcaaacacgatgaagctgaggatgccagcagtggacggctagaaatagataccagtgcccagaataagcataaccctttgctcatcgtgttttctgatgaccaaagcagtgacaaggagaggaaggaggaactgaatgaaatgatttcccatgagcaacttccagagctggacaacttgggcctggatagcttttccagtggacctggggaagaggctttgttgcagatgagatcaaacatcatctatgactccactgcccgaatcagaaggaacgccaaaggaaactactgtaagaggaccccgctctacatcgacttcaaggagattgggtgggactcctggatcatcgctccgcctggatacgaagcctatgaatgccgtggtgtttgtaactaccccctggcagagcatctcacacccacaaagcatgcaattatccaggccttggtccacctcaagaattcccagaaagcttccaaagcctgctgtgtgcccacaaagctagagcccatctccatcctctatttagacaaaggcgtcgtcacctacaagtttaaatacgaaggcatggccgtctccgaatgtggctgtagatagaagaagagtcctatggcttatttaataactgtaaatgtgtatatttggtgttcctatttaatgagattatttaataagggtgtacagtaatagaggcttgctgccttcaggaaatggacaggtcagtttgttgtaggaaatgcatatttt

SEQ ID NO: 258628 - DNA, 303 bp, Homo sapiens
ataactagtagcagactgtttttagtttctttctctatagtagatactttttctcctataaagaagggaagaatatcaaattttcccaaatatctatagggaatttagtaatgcaccatgcagcaaggaaggagggctcatgttaaagtgtaaatgggccttctgagtacacagaaatcaaccagtgttactttcagaatgtggctcttgctaagccctggatatgagatcacaaaaggctcaggtgagctgattcccattagaccaggtaggagctgattattgtgtggtgcaatgatatgc

SEQ ID NO: 258629 - DNA, 247 bp, Homo sapiens
gaaatggactggatgactactagcgtgattttcaggacaatggctggcatgaaggccttaagcaaaacaacaaaatgtgcataatgttttcttttcccactttgtgacttttagcatttctacactttcacaccctttccaatccaagatattttacttactctgtttccttaagtctaggacagcactgcttgtaaaatgcaattctatgttaaaacaaataattgggatttctgattttagaaat

SEQ ID NO: 258630 - DNA, 2221 bp, Homo sapiens
tgaaagaaccatctggttgagtctaaagttggaagatcaccatatccaccagaagacccaggatggatctgcaacaaagcaccaccatcacttccctagagaaatggtgtttggatgagtcactgtctggctgcagaagacattatagtgtcaagaaaaaactgaagttaattcgagtcttaggccttttcatgggtctggtagccattagcactgtctcattttcaatcagtgccttttctgagacagatacacagagcacaggagaggccagtgttgtaagtggccctagggtagcacagggttaccatcagagaactctcttagatttaaatgacaagattctggattatactccacagccacctctttctaaggaaggcgagtctgagaatagtacagatcacgcccaaggagactacccgaaagacatcttttcccttgaggagagaagaaaaggtgcgatcattctgcatgtcattggaatgatctacatgttcatagccttagccattgtctgtgatgagttctttgttccttctttgactgtcatcactgaaaaactgggcatctctgatgatgtggctggagccaccttcatggctgcaggagggtcagccccagaacttttcacatctctcataggggtatttatcgctcacagcaacgttggcataggcacaattgtaggttcagcagtattcaacatcctctttgttattggcatgtgtgctctgttttctagagaaatcttaaacctgacatggtggccgctctttcgagatgtgtctttctacattgttgacttgatcatgctgatcatatttttcctggataatgtcatcatgtggtgggaaagcttgcttctcttaacagcttatttttgctatgtggttttcatgaaattcaacgtccaagtagaaaaatgggtgaagcaaatgataaaccgcaataaggtcgtcaaggtgacagcaccagaagcccaagcaaagccatctgcagccagggacaaggatgaaccgactctaccggctaagccgcgtctccagcgaggtggaagctctgcctccctccacaacagtctcatgaggaatagcatcttccaactcatgatacacacccttgacccactcgccgaagaacttggatcatatggaaaactaaaatattatgacacaatgactgaagaagggaggttcagagaaaaggcttcaattctccacaagatcgccaagaagaaatgtcatgtggatgagaacgagcggcagaatggggctgccaaccacgtggaaaaaattgagcttccaaacagcaccagcacagatgttgaaatgacaccatccagtgatgcttcagaacctgtacaaaatggaaatctctcccacaacattgaaggtgcagaagcccagaccgctgatgaggaggaggaccagcctctcagccttgcctggccttctgaaacccgcaagcaagtcacgtttctgattgttttccccatagtgtttcctctctggattacgttacctgacgttcgcaaaccttcatcgaggaagttttttcccatcacgttctttggctccattacctggattgcagtattctcttacttgatggtctggtgggcgcaccaggttggagagacaattggcatcagtgaagagattatgggcctgaccatcttggctgctgggacctccatccctgatcttatcaccagtgtcatagtggcccggaaggggttaggggacatggctgtgtccagctctgttggaagcaacatttttgacatcactgtagggctcccactgccctggctcctgtacaccgtcattcacagattccagccagtggctgtcagcagcaatggccttttctgtgccatcgtccttctcttcatcatgctgctcttcgtcatcctctctatcgccctctgcaagtggcgaatgaacaaaatcctgggcttcatcatgtttggcctctactttgtgttcctggtggtgagcgttctcctagaagacagaattcttacatgccccgtctccatctagcaggaaaagccatatcttgcaccagcagcatgaatggtccctccacactctgggctctgggctccttgacctcttgagaagaggcagctggcacacagccctgggtgccaagtgtccctccttggtgaatttgaggagagatggattcacactgggcccattcacttcacagg

SEQ ID NO: 258631 - DNA, 2170 bp, Homo sapiens
tgaaagaaccatctggttgagtctaaagttggaagatcaccatatccaccagaagacccaggatggatctgcaacaaagcaccaccatcacttccctagagaaatggtgtttggatgagtcactgtctggctgcagaagacattatagtgtcaagaaaaaactgaagttaattcgagtcttaggccttttcatgggtctggtagccattagcactgtctcattttcaatcagtgccttttctgagacagatacacagagcacaggagaggccagtgttgtaagtggccctagggtagcacagggttaccatcagagaactctcttagatttaaatgacaagattctggattatactccacagccacctctttctaaggaaggcgagtctgagaatagtacagatcacgcccaaggagactacccgaaagacatcttttcccttgaggagagaagaaaaggtgcgatcattctgcatgtcattggaatgatctacatgttcatagccttagccattgtctgtgatgagttctttgttccttctttgactgtcatcactgaaaaactgggcatctctgatgatgtggctggagccaccttcatggctgcaggagggtcagccccagaacttttcacatctctcataggggtatttatcgctcacagcaacgttggcataggcacaattgtaggttcagcagtattcaacatcctctttgttattggcatgtgtgctctgttttctagagaaatcttaaacctgacatggtggccgctctttcgagatgtgtctttctacattgttgacttgatcatgctgatcatatttttcctggataatgtcatcatgtggtgggaaagcttgcttctcttaacagcttatttttgctatgtggttttcatgaaattcaacgtccaagtagaaaaatgggtgaagcaaatgataaaccgcaataaggtcgtcaaggtgacagcaccagaagcccaagcaaagccatctgcagccagggacaaggatgaaccgactctaccggctaagccgcgtctccagcgaggtggaagctctgcctccctccacaacagtctcatgaggaatagcatcttccaactcatgatacacacccttgacccactcgccgaagggaggttcagagaaaaggcttcaattctccacaagatcgccaagaagaaatgtcatgtggatgagaacgagcggcagaatggggctgccaaccacgtggaaaaaattgagcttccaaacagcaccagcacagatgttgaaatgacaccatccagtgatgcttcagaacctgtacaaaatggaaatctctcccacaacattgaaggtgcagaagcccagaccgctgatgaggaggaggaccagcctctcagccttgcctggccttctgaaacccgcaagcaagtcacgtttctgattgttttccccatagtgtttcctctctggattacgttacctgacgttcgcaaaccttcatcgaggaagttttttcccatcacgttctttggctccattacctggattgcagtattctcttacttgatggtctggtgggcgcaccaggttggagagacaattggcatcagtgaagagattatgggcctgaccatcttggctgctgggacctccatccctgatcttatcaccagtgtcatagtggcccggaaggggttaggggacatggctgtgtccagctctgttggaagcaacatttttgacatcactgtagggctcccactgccctggctcctgtacaccgtcattcacagattccagccagtggctgtcagcagcaatggccttttctgtgccatcgtccttctcttcatcatgctgctcttcgtcatcctctctatcgccctctgcaagtggcgaatgaacaaaatcctgggcttcatcatgtttggcctctactttgtgttcctggtggtgagcgttctcctagaagacagaattcttacatgccccgtctccatctagcaggaaaagccatatcttgcaccagcagcatgaatggtccctccacactctgggctctgggctccttgacctcttgagaagaggcagctggcacacagccctgggtgccaagtgtccctccttggtgaatttgaggagagatggattcacactgggcccattcacttcacagg

SEQ ID NO: 258632 - DNA, 1110 bp, Homo sapiens
tctttgtgtcttttactgtgatgttgtagaacttggatcatatggaaaactaaaatattatgacacaatgactgaagaagggaggttcagagaaaaggcttcaattctccacaagatcgccaagaagaaatgtcatgtggatgagaacgagcggcagaatggggctgccaaccacgtggaaaaaattgagcttccaaacagcaccagcacagatgttgaaatgacaccatccagtgatgcttcagaacctgtacaaaatggaaatctctcccacaacattgaaggtgcagaagcccagaccgctgatgaggaggaggaccagcctctcagccttgcctggccttctgaaacccgcaagcaagtcacgtttctgattgttttccccatagtgtttcctctctggattacgttacctgacgttcgcaaaccttcatcgaggaagttttttcccatcacgttctttggctccattacctggattgcagtattctcttacttgatggtctggtgggcgcaccaggttggagagacaattggcatcagtgaagagattatgggcctgaccatcttggctgctgggacctccatccctgatcttatcaccagtgtcatagtggcccggaaggggttaggggacatggctgtgtccagctctgttggaagcaacatttttgacatcactgtagggctcccactgccctggctcctgtacaccgtcattcacagattccagccagtggctgtcagcagcaatggccttttctgtgccatcgtccttctcttcatcatgctgctcttcgtcatcctctctatcgccctctgcaagtggcgaatgaacaaaatcctgggcttcatcatgtttggcctctactttgtgttcctggtggtgagcgttctcctagaagacagaattcttacatgccccgtctccatctagcaggaaaagccatatcttgcaccagcagcatgaatggtccctccacactctgggctctgggctccttgacctcttgagaagaggcagctggcacacagccctgggtgccaagtgtccctccttggtgaatttgaggagagatggattcacactgggcccattcacttcacagg

SEQ ID NO: 258633 - DNA, 637 bp, Homo sapiens
ggtgaaacccgtctctactaaaagtacaaaatattagccgggcatggtggcaggcacgtggaatcctagctacttgggagactgaggcaggagaatcgcttgaacccggaagatggaggttgcagtgagacaagatcaccccattgcactccagcctgggtgacgagtgaaactccgtctcaggaaacaagttaaaagtaaaggaatggcaaaagattcatcagaacaaagtggctatattaatatctgacaaagtagactgcagagcaaagaatatttctaggattaaagaacatttcatcataataaaggggtaaattcatatagtgaacataaaaattacatttatacaaccaatgacagagctttaaaatatgtgaaacttgatagtactgcaggaggaatagataaatccttaattatagttggagagttcagtacaacttctcacattacttgaaagaacaagtagagagaaaatctacaaagatatagaaaacttcattattgttaactaacatgacctaattgatatttatagaaaacgccactcaatatcaaaagaatgtatatgtttttccaactgcactcgaaacattaactgaaaaggattctaagccataagacagatctcaat

SEQ ID NO: 258634 - DNA, 434 bp, Homo sapiens
gccgcaagttgttcaccatgtggatcctctcatcgtcctccgagatgagaaaagcaaagctcaagagaggatgagtgatgggctcgaagatgcacagtgagtgactgaacaaagatgaaaacccagggctgctgggtccctcgttcaatattgtccaaaatcactggaaagggaggaagcggattttaaatttgactctcatttgtgtgtgtatgcaagtcctctctaaaaggacttaggagaagctagggagagtgtttacctacagggaggagactggacaccggaaggttgtggaaggttgtggaagggtgtggtatggcgtgggaaggacactctttactggtactcctttgtatctcttgaatgaattaaggcatgtattacctctttaacaaccaaataaaagttgatccagttctttccttcctgca

SEQ ID NO: 258635 - DNA, 687 bp, Homo sapiens
ggttagtatcagaatgagtgacacagataaggtatactgtgggaactcagagacagaggagataaatatatccttcacctatgtaaagccaccaaaaaatctgagaatcgagctaagatttgttaaatttgtaccaaataattttcttaaattaaacaactttggatacaaaatcaacataaataatcagttgcatttctatatgccaacaacaaataatctgaagaagaaatccagaaagtaatcccatttacaatagctacaaataaaataatatactaggaataagctcaaccaaagaagtgaaagatctctgtgatgacaactacaaaacatggatgcaagttatttaagagaacagaaaaaaatggaaagctatttcatgttcatggattggaagaattgatattgttaaaacatctatactacccaaagcaatctacagattcaatataatctctaaatctctatcaaaataccaattacattattcgtggaaatagaagaaaaatgctaaaacttatgtggaaccacaaaaaattcagaagagccaaatccaatctaagcagaaagaacaaaatttgaggaatcacattatctgacttcaaattatactactgagctatagtaaacacagcatggtactcacatcagacacatagacccatggaacagaatggagagccc

SEQ ID NO: 258636 - DNA, 417 bp, Homo sapiens
tgttttgtagtttttagcagttggatcttgcttgtattttgaaatcttacacatttatttcatgtttgtggtactgttgtgaatgatacttctcaatttccagttggtgattgctagtatataggaaggtgattttatgttatatgctgaccttggattctacaaccttgctaaactcatttttagtactagaagcttttttgtagatttttggaattttgtgcatagacagtaatgtcactggcaaataagggcagtttaatttctttgttttcactttgtatacttttatttccttttttttttttgagacggagtttctctcttgttgcccaggctggagtgcaatgcagtgagccaaaatcgcgcccctgcactccagcctgggcgacagagtgagactctgtctccccccca

SEQ ID NO: 258637 - DNA, 949 bp, Homo sapiens
ctgtgactgtgagctgttctgttcttttgcctattaaactcctgctccaaactcactcgatgtgtgtgtgcatgtccttgacctcaatatctggtcgtgtgaccaagaacctcagtattcaccccagacaacaaggctgcttcattttgagggctcgtctgggatttgaaggtgacttcatcagaatgctttgctgctaaagggatctgcagtccagctgaaaacctgcccttgcctgagcccagccactttctcccagagaaaactggagaacctaaacatgattgtgaacagaatggcttccggtggcctgggactccttggggaaacagaaaatgcaccacaaatcccattttaggaaaaatctgttttcctcggagcccctggaattaaagaaaccatcaagcttcagatggtgctgaaaatggagccgaaaatgaaactgccctcctacgagggacccttaaatcaaccccaggaggagccctagctgctgttccccacacaacgccactctccagcaggaagtagccagaagaaatcgtcacccagtttcccctagcagcagcgcagtaagattgaggagctaaaaacagacttgggtggatgtctgcagctgcaagaagatgtgtgggaacagacacagaaactctccctcccagataagcaagacaaagaaacacagaataagagtccatctatgtggtcagagaatgggataagagctgatttaaaaaaactctgctctatatagaaggcacacctggtcccaaccaaaccactggaccctaggaggataagacctcctctgctcatgagccccctcctcagtagcccatttataaaaaccctgacaattttactaccacttggcaacccgctcgggacccctctctgtgatggagagctgttcttttcttttgcctattaaactcctgctccaaactca

SEQ ID NO: 258638 - DNA, 720 bp, Homo sapiens
tcttaatactcatatttagaacctatattctaaacctccttgtgaagtttatctcttctcgcttagaaaccatcaagcttcagatggtgctgaaaatggagccgaaaatgaaactgccctcctacgagggacccttaaatcaaccccaggaggagccctagctgctgttccccacacaacgccactctccagcaggaagtagccagaagaaatcgtcacccagtttcccctagcagcagttatggatttcattcctgaggggggaaatatgttataggaggcagaaagaaatgatttaggtagacatttagggtaaagtgagtccccagcagaaaactttccttttaacaaaaagcactaaaaacagacttgggtggatgtctgcagctgcaagaagatgtgtgggaacagacacagaaactctccctcccagataagcaagacaaagaaacacagaataagagtccatctatgtggtcagagaatgggataagagctgatttaaaaaaactctgctctatatagaaggcacacctggtcccaaccaaaccactggaccctaggaggataagacctcctctgctcatgagccccctcctcagtagcccatttataaaaaccctgacaattttactaccacttggcaacccgctcgggacccctctctgtgatggagagctgttcttttcttttgcctattaaactcctgctccaaactca

SEQ ID NO: 258639 - DNA, 483 bp, Homo sapiens
aaaaggttcaggggtgtgggcatgttgaaatttatatactccgtgcatctagaagacatttgagacgatcatattccacatgaaggtgtaaataacacgtcatttataaagatcattagacataggatgatgaaaggggcactgatgtcactaaaatattcagtgatggctcatctctgtaggcaagaatgacaatagaaaggctgttccagaacttggctgggtgatagcactggggatgataggatcctaagacaaaagaggccattctgggacatagtggggaccaaagaaaaaaacccaagaagccaaaggcaacacttagctggcagaagtcagaggattgcaattatagcagccagcagggtctgagtggcagccaaggggacctcacttgtatggttatagaactggtcaataaacatggcatccctggaggcaaaacaggtgggcagctaagaagggtactactcagctggcaaa

SEQ ID NO: 258640 - DNA, 430 bp, Homo sapiens
  misc_feature (60)..(60): n is a, c, g, or t
aaggggggccaacttgaattgttccacttaaaaattattcccagggatggctcatctgcnccgaatgtctgacagctgatactggagattggctgtcagacattcggagctgatggctcatctctgtaggcaagaatgacaatagaaaggctgttccagaacttggctgggtgatagcactggggatgataggatcctaagacaaaagaggccattctgggacatagtggggaccaaagaaaaaaacccaagaagccaaaggcaacacttagctggcagaagtcagaggattgcaattatagcagccagcagggtctgagtggcagccaaggggacctcacttgtatggttatagaactggtcaataaacatggcatccctggaggcaaaacaggtgggcagctaagaagggtactactcagctggcaaa

SEQ ID NO: 258641 - DNA, 639 bp, Homo sapiens
gacaacagaaggtctagaatagtccataaacttagctgagaaagcagcagcaggagttgagaggattgacttcagttttgaaagaagttttactgtggataaaatgctatcaaataacctcacatgcttcagataaatcttttgtgaaagaaagattcaatagatgcataaacttcattttttttaattttaagaaattgctttagccaccccaaccttcagcaatcactaccctgatcaatcagcagccatcaacatcaaggctaaaccctccattggcaaaaagattatgatcgctgaaggctcagatgattattagagtttttaatttaattttttattagcaataaaatatttttaaatttaaggaatgtacatttttttaaagacatagtgctatttcatacttagtactctacagtaatgtaaacacaacttttcaatgtactggaaaacaaaacaaacaaagtctcattttattgtgatatttgctttattgtggtggtcttgaaaaaaacccataatatttttgcgatattatgcctatatgaatagaattaaaagcaaaatatatatacttaatgtattataaaaaagaaaaaagataaaacaaattattgaataaatatatctacatgc

SEQ ID NO: 258642 - DNA, 7021 bp, Homo sapiens
caacgtgctgagctaatagcgacagatagagggcagacagattcctgctagcagcttagtgttagttgcttgtggtaactaaggcaggtggcatacatctcagaacgtggagaatgatggtatgctttctgagttaacatgttgaactgttttgcttttctaaaaattttcctagtaacattttcttgatgatatgagagtggatatcaatgcctcacagaaacaagaggtggaacatgtgaatgaatcgtcttggaactagattatgagcactggttctttttaaagggatgtgcaagaggcagccttggcaagaaaacttgctgcataatcttacatggactaaagatgaaactttaaaccgcaaatcagctttgagtgaactttgacagaagatgtttcgacagttttatctctggacatgtttagcttcagggatcatcctgggctctctctttgaaatctgcttgggccagtatgatgatgattgcaaactagctaggggaggaccaccagctaccatagttgctattgatgaagaaagtcggaatggtacaattctggtggacaacatgctgatcaaagggactgctggaggaccagaccccaccatagaactttctttaaaggataatgtggattactgggtgttgatggatcctgttaagcaaatgcttttcctgaacagcaccggaagagttctggatagagatccaccgatgaacatacactccattgtggtgcaggtccagtgcatcaacaaaaaagtgggcactattatctaccatgaagtgcgaatagtggtgagagacaggaatgacaactcacccactttcaagcatgaaagctactatgccacagtgaatgagctcactccagttggtaccacaatattcacaggattttcaggagacaatggagctacagatatagatgatggaccaaatggacagatagagtatgttattcagtataatccagatgatccgacatccaatgacacctttgaaattcccctaatgttgactggaaatatagtgttaaggaagaggctcaactatgaagataagactcgctactttgtcataatccaagctaatgaccgtgcccaaaatctgaatgagaggcgaaccaccaccaccactctcacagtggatgttctggatggagatgacttgggtccaatgtttcttccttgtgtccttgtgccaaacactcgtgattgccgtccactcacttatcaagctgccatacctgagttgagaactccggaagaactgaaccccattattgttacgccaccaatccaagccattgatcaggaccggaatattcaaccgccatcagataggccaggaatcctctattccatccttgttgggactcctgaggattacccacgatttttccatatgcatcctaggacagcagaacttagtctcctggagccagtaaacagagactttcaccagaaatttgatttggttattaaggctgaacaagacaatggtcatcctcttcctgcctttgccggtctacacattgaaatactggatgaaaacaatcaaagtccatattttacaatgcccagttatcaaggctatatcctggaatctgccccagtgggagcaaccatttcggacagtctcaatttgacttcacctttaagaatagtagctctggacaaggacatagaagatacaaaagacccagagcttcacctttttctgaatgactacacctcagtcttcaccgtcacacagactggtattactcgctacctcaccttacttcaaccagtggacagggaagaacagcaaacttacaccttttcgataacagcatttgatggtgtacaagaaagtgagccagtcatcgtcaatattcaagtgatggatgcaaatgataacacgccaaccttccctgaaatatcctatgatgtgtatgtttatacagacatgagacctggggacagtgtcatacagctcactgcagtcgacgcagacgaagggtcaaatggggagatcacatatgaaatccttgttggggctcagggagacttcatcatcaataaaacaacagggcttatcaccatcgctccaggggtggaaatgatagtcgggcggacttacgcactcacggtccaagcagcggataatgctcctcctgcagagcgaaggaactccatctgcactgtgtatattgaagtgcttccaccaaataatcaaagccctcctcgcttcccacagctgatgtatagccttgaaattagtgaagccatgagggttggtgctgttttattaaatctacaggcaactgatcgagagggagactcaataacatatgccattgagaatggagatcctcagagagtttttaatctttcagaaaccacggggattctaaccttagggaaagcactggacagggaaagcactgatcgctacattctgatcatcacagcttcagatggcaggccagatgggacctcaactgccacagtaaacatagtggtgacagatgtcaatgacaatgctccagtgtttgatccttatctgccaagaaatttatctgtggtggaagaagaagccaatgcctttgtgggtcaagtaaaagcaacagaccctgatgctggaataaatggtcaagtgcactacagtttgggtaactttaataatctttttcgtatcacatccaatgggagcatttacacagcagtgaagcttaacagagaagtcagggactactatgaacttgttgttgtggcaacagatggagcagtacaccctcgtcattcaactctaaccttggccatcaaggttttggacattgatgataacagtcctgtgttcaccaattcaacatacactgtccttgttgaagagaatttgccagctgggactaccatccttcaaatagaggccaaagatgtcgaccttggagcaaatgtgtcttaccggataagaagcccagaagtgaagcacttttttgcactacatccatttacaggagaactatcgcttttaaggagtttagattatgaggcatttccagaccaagaagcaagtatcacttttctggtagaggcctttgatatttatggaacaatgccacctggtattgctactgtcacagtgattgtaaaggatatgaatgattatcctcctgtctttagtaaacgaatatacaaagggatggtggctccggatgcagtcaagggtacacctatcacaacagtttatgctgaagatgcagaccctcctggattacctgcaagtcgtgtgaggtatagagtagatgatgtacagtttccttaccctgccagtatttttgaagtggaagaagattctggaagagtaataacacgagtcaatcttaatgaagaacctacaacaatttttaagttggtggtggttgcttttgatgatggggagcctgtgatgtccagcagtgccacagtgaagattcttgtcttacatcctggtgagatcccacgcttcacacaggaggaatatagacctcctccagtaagtgaacttgccaccaaagggaccatggttggtgtaatttctgctgctgccattaatcaaagtattgtgtactccattgtttcaggaaatgaagaagatacatttggaattaataacatcacaggtgttatctatgtgaatggacctctggattatgagaccaggacaagctatgtacttcgagtccaagctgattccctggaagtggtccttgccaatctccgagttccttcaaaaagcaatacagctaaagtatacattgagattcaggatgaaaataatcatcccccagtgtttcagaaaaaattctacatcggaggtgtatctgaagatgcaagaatgtttacttctgtactcagagtgaaggctactgataaagatactggcaattatagtgtcatggcctacagactcataataccaccaattaaagagggaaaagaaggatttgtagtggaaacatatacagggcttatcaaaactgctatgctcttccataatatgaggagatcctacttcaagtttcaagttattgcaactgacgactatgggaagggactgagcggcaaagccgatgtactcgtctccgtggtcaatcagctggatatgcaagtcattgtttccaatgtgcctcctactctagtggaaaaaaagatagaagatcttacagagatcttggatcgctatgttcaggaacaaattcctggtgccaaggtcgtagtggagtccattggagctcgccggcatggagatgccttttccctagaagattacaccaaatgtgacttgactgtctatgcaattgacccccaaaccaacagagccatcgatagaaatgagctttttaaatttttggatggcaaactacttgatatcaataaagactttcagccgtattatggggaaggaggacgcattctggagatccggactccagaggcagtgaccagcattaaaaagagaggagaaagtctaggatacacagaaggggccttgttggctctggccttcatcatcatcctctgctgcattcctgccatcttggtggttttggtcagctacagacagtttaaagtacgtcaagctgagtgtacaaagactgcacgaattcaggccgcattacccgcggctaaaccagcagtgccggctcctgcaccagtggcagcgcccccgccgccgccgccgcctccgccaggtgcgcatctctatgaagaacttggagacagctcaattcttttccttctctaccattttcaacaaagcaggggaaataactcagtctcagaagacaggaaacatcaacaagttgtgatgcccttttcttccaatactattgaggctcacaagtcagctcatgtagacggatcacttaagagcaacaaactgaagtctgcaagaaaattcacatttctatctgatgaggatgacttaagtgcccataatcccctttataaggaaaacataagtcaagtatcaacaaattcagacatttcacagagaacagattttgtagacccattttcacccaaaatacaagccaagagtaagtctctgaggggcccaagagaaaagattcagaggctgtggagtcagtcagtcagcttacccaggaggctgatgaggaaagttccaaatagaccagagatcatagatctgcagcagtggcaaggcaccaggcagaaagctgaaaatgaaaacactggaatctgtacaaacaaaagaggtagcagcaatccattgcttacaactgaagaggcaaatttgacagagaaagaggaaataaggcaaggtgaaacactgatgatagaaggaacagaacagttgaaatctctctcttcagactcttcattttgctttcccaggcctcacttctcattctccactttgccaactgtttcaagaactgtggaactcaaatcagaacctaatgtcatcagttctcctgctgagtgttccttggaactttctccttcaaggccttgtgttttacattcttcactctctaggagagagacacctatttgtatgttacctattgaaaccgaaagaaatatttttgaaaattttgcccatccaccaaacatctctccttctgcctgtccccttccccctcctcctcctatttctcctccttctcctcctcctgctcctgctcctcttgctcctcctcctgacatttctcctttttctcttttttgtcctcctccctctcctccttctatccctcttcctcttcctcctcctacattttttccactttccgtttcaacgtctggtcccccaacaccacctcttctacctccatttccaactcctcttcctccaccacctccttctattccttgccctccacctccttcagcttcatttctgtccacagagtgtgtctgtataacaggtgttaaatgcacgaccaacttgatgcctgccgagaaaattaagtcctctatgacacagctatcaacaacgacagtgtgtaaaacagaccctcagagagaaccaaaaggcatcctcagacacgttaaaaacttagcagaacttgaaaaatcagtagctaacatgtacagtcaaatagaaaaaaactatctacgcacaaatgtttcagaacttcaaactatgtgcccttcagaagtaacaaatatggaaatcacatctgaacaaaacaaggggagtttgaacaatattgtcgagggaactgaaaaacaatctcacagtcaatctacttcactgtaatgttgcttttcttattttagtcgggcaaacctcttgttgatcatagtcttcaagttgaacatcaaatttgaacgtcaaagaagactctattattttaccccaaattcaatgaaatgcagttttttttctcgtttttaatttaaaaagatattaacctcatcactactaactcactcatataatagatttaccttactttttaaaaactacaaagtagcataatttgttctacatttatttgaaaagtaagtaattttaatctcttttttagtgggaatatgtgggcatgaaaattagatacccaacttaaaccaaaggcatgtctatcatgtggatgcagtaacatttacatttagtttttgatcgtagttttatatgaatgttccaagaaaaaagcagactgttacaaataagttaaaactgatatgattgataggttctgttttttcttgaagcctatgtatttggtaagaagaaatactaccgaagtaaaatataatgtacctagattgtaggagatgacagacataaggtatttcaaaataaatctcaggtgctataacatgtagtcatctgttttctgataagaacatcttttactctgacttgcttttatcttagtagtatgcttatggatttagtagtatgcttatggatttgataaatcttatactttttcagttgctgtcttattctctttatttctcattgtgctttcccttcccttctttataatgaaaataaatcttgagtcgttg

SEQ ID NO: 258643 - DNA, 6828 bp, Homo sapiens
caacgtgctgagctaatagcgacagatagagggcagacagattcctgctagcagcttagtgttagttgcttgtggtaactaaggcaggtggcatacatctcagaacgtggagaatgatggtatgctttctgagttaacatgttgaactgttttgcttttctaaaaattttcctagtaacattttcttgatgatatgagagtggatatcaatgcctcacagaaacaagaggtggaacatgtgaatgaatcgtcttggaactagattatgagcactggttctttttaaagggatgtgcaagaggcagccttggcaagaaaacttgctgcataatcttacatggactaaagatgaaactttaaaccgcaaatcagctttgagtgaactttgacagaagatgtttcgacagttttatctctggacatgtttagcttcagggatcatcctgggctctctctttgaaatctgcttgggccagtatgatgatgattgcaaactagctaggggaggaccaccagctaccatagttgctattgatgaagaaagtcggaatggtacaattctggtggacaacatgctgatcaaagggactgctggaggaccagaccccaccatagaactttctttaaaggataatgtggattactgggtgttgatggatcctgttaagcaaatgcttttcctgaacagcaccggaagagttctggatagagatccaccgatgaacatacactccattgtggtgcaggtccagtgcatcaacaaaaaagtgggcactattatctaccatgaagtgcgaatagtggtgagagacaggaatgacaactcacccactttcaagcatgaaagctactatgccacagtgaatgagctcactccagttggtaccacaatattcacaggattttcaggagacaatggagctacagatatagatgatggaccaaatggacagatagagtatgttattcagtataatccagatgatccgacatccaatgacacctttgaaattcccctaatgttgactggaaatatagtgttaaggaagaggctcaactatgaagataagactcgctactttgtcataatccaagctaatgaccgtgcccaaaatctgaatgagaggcgaaccaccaccaccactctcacagtggatgttctggatggagatgacttgggtccaatgtttcttccttgtgtccttgtgccaaacactcgtgattgccgtccactcacttatcaagctgccatacctgagttgagaactccggaagaactgaaccccattattgttacgccaccaatccaagccattgatcaggaccggaatattcaaccgccatcagataggccaggaatcctctattccatccttgttgggactcctgaggattacccacgatttttccatatgcatcctaggacagcagaacttagtctcctggagccagtaaacagagactttcaccagaaatttgatttggttattaaggctgaacaagacaatggtcatcctcttcctgcctttgccggtctacacattgaaatactggatgaaaacaatcaaagtccatattttacaatgcccagttatcaaggctatatcctggaatctgccccagtgggagcaaccatttcggacagtctcaatttgacttcacctttaagaatagtagctctggacaaggacatagaagatacaaaagacccagagcttcacctttttctgaatgactacacctcagtcttcaccgtcacacagactggtattactcgctacctcaccttacttcaaccagtggacagggaagaacagcaaacttacaccttttcgataacagcatttgatggtgtacaagaaagtgagccagtcatcgtcaatattcaagtgatggatgcaaatgataacacgccaaccttccctgaaatatcctatgatgtgtatgtttatacagacatgagacctggggacagtgtcatacagctcactgcagtcgacgcagacgaagggtcaaatggggagatcacatatgaaatccttgttggggctcagggagacttcatcatcaataaaacaacagggcttatcaccatcgctccaggggtggaaatgatagtcgggcggacttacgcactcacggtccaagcagcggataatgctcctcctgcagagcgaaggaactccatctgcactgtgtatattgaagtgcttccaccaaataatcaaagccctcctcgcttcccacagctgatgtatagccttgaaattagtgaagccatgagggttggtgctgttttattaaatctacaggcaactgatcgagagggagactcaataacatatgccattgagaatggagatcctcagagagtttttaatctttcagaaaccacggggattctaaccttagggaaagcactggacagggaaagcactgatcgctacattctgatcatcacagcttcagatggcaggccagatgggacctcaactgccacagtaaacatagtggtgacagatgtcaatgacaatgctccagtgtttgatccttatctgccaagaaatttatctgtggtggaagaagaagccaatgcctttgtgggtcaagtaaaagcaacagaccctgatgctggaataaatggtcaagtgcactacagtttgggtaactttaataatctttttcgtatcacatccaatgggagcatttacacagcagtgaagcttaacagagaagtcagggactactatgaacttgttgttgtggcaacagatggagcagtacaccctcgtcattcaactctaaccttggccatcaaggttttggacattgatgataacagtcctgtgttcaccaattcaacatacactgtccttgttgaagagaatttgccagctgggactaccatccttcaaatagaggccaaagatgtcgaccttggagcaaatgtgtcttaccggataagaagcccagaagtgaagcacttttttgcactacatccatttacaggagaactatcgcttttaaggagtttagattatgaggcatttccagaccaagaagcaagtatcacttttctggtagaggcctttgatatttatggaacaatgccacctggtattgctactgtcacagtgattgtaaaggatatgaatgattatcctcctgtctttagtaaacgaatatacaaagggatggtggctccggatgcagtcaagggtacacctatcacaacagtttatgctgaagatgcagaccctcctggattacctgcaagtcgtgtgaggtatagagtagatgatgtacagtttccttaccctgccagtatttttgaagtggaagaagattctggaagagtaataacacgagtcaatcttaatgaagaacctacaacaatttttaagttggtggtggttgcttttgatgatggggagcctgtgatgtccagcagtgccacagtgaagattcttgtcttacatcctggtgagatcccacgcttcacacaggaggaatatagacctcctccagtaagtgaacttgccaccaaagggaccatggttggtgtaatttctgctgctgccattaatcaaagtattgtgtactccattgtttcaggaaatgaagaagatacatttggaattaataacatcacaggtgttatctatgtgaatggacctctggattatgagaccaggacaagctatgtacttcgagtccaagctgattccctggaagtggtccttgccaatctccgagttccttcaaaaagcaatacagctaaagtatacattgagattcaggatgaaaataatcatcccccagtgtttcagaaaaaattctacatcggaggtgtatctgaagatgcaagaatgtttacttctgtactcagagtgaaggctactgataaagatactggcaattatagtgtcatggcctacagactcataataccaccaattaaagagggaaaagaaggatttgtagtggaaacatatacagggcttatcaaaactgctatgctcttccataatatgaggagatcctacttcaagtttcaagttattgcaactgacgactatgggaagggactgagcggcaaagccgatgtactcgtctccgtggtcaatcagctggatatgcaagtcattgtttccaatgtgcctcctactctagtggaaaaaaagatagaagatcttacagagatcttggatcgctatgttcaggaacaaattcctggtgccaaggtcgtagtggagtccattggagctcgccggcatggagatgccttttccctagaagattacaccaaatgtgacttgactgtctatgcaattgacccccaaaccaacagagccatcgatagaaatgagctttttaaatttttggatggcaaactacttgatatcaataaagactttcagccgtattatggggaaggaggacgcattctggagatccggactccagaggcagtgaccagcattaaaaagagaggagaaagtctaggatacacagaaggggccttgttggctctggccttcatcatcatcctctgctgcattcctgccatcttggtggttttggtcagctacagacagtttaaagtacgtcaagctgagtgtacaaagactgcacgaattcaggccgcattacccgcggctaaaccagcagtgccggctcctgcaccagtggcagcgcccccgccgccgccgccgcctccgccaggtgcgcatctctatgaagaacttggagacagctcaattcttttccttctctaccattttcaacaaagcaggggaaataactcagtctcagaagacaggaaacatcaacaagttgtgatgcccttttcttccaatactattgaggctcacaagtcagctcatgtagacggatcacttaagagcaacaaactgaagtctgcaagaaaattcacatttctatctgatgaggatgacttaagtgcccataatcccctttataaggaaaacataagtcaagtatcaacaaattcagacatttcacagagaacagattttgtagacccattttcacccaaaatacaagccaagagtaagtctctgaggggcccaagagaaaagattcagaggctgtggagtcagtcagtcagcttacccaggaggctgatgaggaaagttccaaatagaccagagatcatagatctgcagcagtggcaaggcaccaggcagaaagctgaaaatgaaaacactggaatctgtacaaacaaaagaggtagcagcaatccattgcttacaactgaagaggcaaatttgacagagaaagaggaaataaggcaaggtgaaacactgatgatagaaggaacagaacagttgaaatctctctcttcagactcttcattttgctttcccaggcctcacttctcattctccactttgccaactgtttcaagaactgtggaactcaaatcagaacctaatgtcatcagttctcctgctgagtgttccttggaactttctccttcaaggccttgtgttttacattcttcactctctaggagagagacacctatttgtatgttacctattgaaaccgaaagaaatatttttgaaaattttgcccatccaccaaacatctctccttctgcctgtccccttccccctcctcctcctatttctcctccttctcctcctcctgctcctgctcctcttgctcctcctcctgacatttctcctttttctcttttttgtcctcctccctctcctccttctatccctcttcctcttcctcctcctacattttttccactttccgtttcaacgtctggtcccccaacaccacctcttctacctccatttccaactcctcttcctccaccacctccttctattccttgccctccacctccttcagcttcatttctgtccacagagtgtgtctgtataacaggtgttaaatgcacgaccaacttgatgcctgccgagaaaattaagtcctctatgacacagctatcaacaacgacagtgtgtaaaacagaccctcagagagaaccaaaaggcatcctcagacacgttaaaaacttagcagaacttgaaaaatcagtagctaacatgtacagtcaaatagaaaaaaactatctacgcacaaatgtttcagaacttcaaactatgtgcccttcagaagtaacaaatatggaaatcacatctgaacaaaacaaggggagtttgaacaatattgtcgagggaactgaaaaacaatctcacagtcaatctacttcactgtaatgttgcttttcttattttagtcgggcaaacctcttgttgatcatagtcttcaagttgaacatcaaatttgaacgtcaaagaagactctattattttaccccaaattcaatgaaatgcagttttttttctcgtttttaatttaaaaagatattaacctcatcactactaactcactcatataatagatttaccttactttttaaaaactacaaagtagcataatttgttctacatttatttgaaaagtaagtaattttaatctcttttttagtgggaatatgtgggcatgaaaattagatacccaacttaaaccaaaggcatgtctatcatgtggatgcagtaacatttacatttagtttttgatcgtagttttatatgaatgttccaagaaaaaagcagactgttacaaataagttaaaactgatatgattgataggttctgttttttcttgaagcctatgtatttggtaagaagaaatactaccgaagtaaaatataatgtacctagattgtaggagatgacagacataaggtatttcaaaataaatctcaggtgctataacat

SEQ ID NO: 258644 - DNA, 442 bp, Homo sapiens
gttaactgaaggatgtacgcggtcttagagacatgtatgtctctattcttttaaatctgaaagcattatctaaaacccaatcatcatatacctgtagggaaaaagcctaacacagccatatccaaaagtcatagtccgtcagaagtatgttaaatgttataaaattacttgacctcagcatttctgagttttggtgttttcaatttataatataataggtgtttggtttattttaaccaaacttaaaaagcaatgatgtctgcaaagcctctgattggaccaaaagtcaccatttatactctgacattgaggccaggcacggtaactcacacctgtaatcccaacaatttgggagaccaaggtgagaggatcactttagcccaggagttcgagaccagcctgggcaacacagcaacaccccatctctacaaagaataattgt

SEQ ID NO: 258645 - DNA, 737 bp, Homo sapiens
cccagtacactcacctactacaggctgcatgatcttattacttcactgaactgtttccttatctgtaaattgtttgattatctacaaatgtgtagcttgctacctgacagcattagatattggataattggttgtcattgctattaataaacacggacttagagagttcttgaagttttagttttatgctgagaatccatgtaacactggcaatctgtgtctatacctgtatctatagcaaaagccagaatttaccacaaattttgctgttgtatcaggaaatacatcttgacaactgatacttattcttaatattattattctgttatttcttattctaggccccaaaaacttttattaaaatgcttcaaattttaggttagcatttttgttgatgtttggacatcttaaattcattatactcatgcaaaatttttttttttttttttttttggagacagggtctctgtcacctgggctggaaaatatatctttatagttttatgcacatttggcaatcagcagaaataataaattgttgtactatgtctatgctttgctatctttatgtgaccaagacattactgtgaaactgaatactatctggccacatatataaccattgctattaagaaagttatgattgtgacttggaaatagtcatatggagacagttctgatttaattcccaggtaactttcatattcccaccattttgccgtgtgcatttcaaaata

SEQ ID NO: 258646 - DNA, 415 bp, Homo sapiens
agccttagcaaagagataaaaacagaatatgacacgagtgataatagagtggtacagtagaggagatgacgtctggatatttgaaaagcagtaagtatgtaggtgtaagtaaacattactaatgatacgatgcaatggaaagaacactagcacaggagctcattctgtcctcgaggcttaccatgtgtgatccaaagtaatactctgttcctgtgtttctttatctgtaaaatgggtataacaccacattgcttatgtcctaaggtagagaagcaaataagagctgtgtatgtggaagcactttgaaaactttacactgctatacaaatgtctaacattattactattgtatcgccaaaaatagtggagaatcaacataacaaaatgggtgattcagaactaaacttatttcacc

SEQ ID NO: 258647 - DNA, 686 bp, Homo sapiens
taactactcaggaggctgaggtgggaggatcacttgagcccaggaggttgaggctgcagtgagctgtgattgcgccacagcattccagctctaacctgggcaacagagcaagatcctgtctctaaataaataaataaataaataaataaacagaataaggtagatttatatgttctgacatggaaagatcttgaagatatagttaaatgcaaaaacaagtggaccaatagagtatgatatcatttatgttttttttaagtttaaaaaactgctatggggtagcatgtgtgtgcacatacatgtgtatctgtgcttacagacacatagaaaatggtctgaaagaacatacattaagaatctactgagcttgcatgtgttgggggtgggacccgtggcttccccctgtgcctccaggccaccgaggtctgcatctgccctgtggagttcaacccccacttcgtggcacctatgatacccaaggtggagtgggcggtgttcctggaggtggctgataacttgcacctgacccaggtgctaaagggccggttgagggatatgaggagaacgaagagtttctgaggaccatgcacctcctgctgctggaggtggaagtgatggggggcaccttgcagtgcccagagtctggatgtatgttctcaatcagccacaggatccccaacatgctg

SEQ ID NO: 258648 - DNA, 657 bp, Homo sapiens
ctgcataaagcagttgcctgccacacccaaagaaaatgataagaaatgtgcctcttttgcatgctgtgattcatttccactttgaataagagggaatagaaaggagattctaggagaaggctttggcttagaatcaggggtagagagtcattctataagttaataaatataaagaattcagtatgatgccagacacaaagtactcagtaattactagctattatttttattactatttatattttattgataatgtcagcagcagtgcagggaacctggcatctatttctagtattgtgtgtcaaggttgctgtaaatctagagaatggcagcatctatgctctcttttcattgcaatgcccccagtacagctaattttttattgtctcacctggatcagatcacagctgctagcatggcctccacttgcaagggcttccagtttaccatccagttcattctctttaaatgttgcaactatcttccttaaggacatctttggttatttaacacttccttctgcgatggtttctaagggctcaccaaataacagtgaatgcccttaccataacatttgaggtcctctaaagtctagcctcaaactactattagcctttagtttccatcatagggctaaagagtggatataaagatgca

SEQ ID NO: 258649 - DNA, 1649 bp, Homo sapiens
tccttttctttttaaaaaaaaaacactgcaactggaacagtttctgatctcaaaaggcaagcctcttcccgtgtgatctttataatttacactcttttccgtgagctttcttacctccctttttttataactctccatattctctattcatacatatatccattatattagtagtggaataatttttatttttatttattttttttggctttagtacttgcaccctcacacacactctcccgagaaccagaagtcggttgggtgtttatataatgaagaattatggggctgtttgatcgaggtgttcaaatgcttttaaccaccgttggtgctttcgctgccttcagcctgatgaccatagctgtgggaaccgactattggctctactccagaggggtttgcaagaccaaaagtgtcagtgagaatgaaaccagcaaaaagaacgaggaagttatgacccattccggattatggagaacctgctgcctagaagggaatttcaaaggtctgtgcaagcaaattgatcacttcccagaggatgcagattacgaagctgacacagcagaatatttcctccgggccgtgagggcctccagcattttcccaatcctgagtgtgattctgcttttcatgggtggcctctgcatcgcagccagcgagttctacaaaactcgacacaacatcatcctgagtgccggcatcttcttcgtgtctgcaggtctgagtaacatcattggcatcatagtgtacatatctgccaatgccggagacccctccaagagcgactccaaaaagaatagttactcatacggctggtccttctacttcggggccctgtccttcatcatcgccgagatggtcggggtgctggcggtgcacatgtttatcgaccggcacaaacagctgcgggccacggcccgcgccacggactacctccaggcctctgccatcacccgcatccccagctaccgctaccgctaccagcgccgcagccgctccagctcgcgctccacggagccctcacactccagggacgcctcccccgtgggcatcaagggcttcaacaccctgccgtccacggagatctccatgtacacgctcagcagggaccccctgaaggccgccaccacgcccaccgccacctacaactccgacagggataacagcttcctccaggttcacaactgtatccagaaggagaacaaggactctctccactccaacacagccaaccgccggaccacccccgtataaagaccgcgggcctcgccagaagaccgcgggaggagggcgcggtccccgggggcggggcggggcggggagacccagaccctccgctgggagaccttccaaaagcaaaaacaaaaaacaaaaaaaacaaaaaaacaaaaaacaaaaaaacacacacacacaaaaaaagagaaaaaacataacaagtaaattttaaaaaaaagaacaaaatataagaggaacaaagaagcaaaacaacaggaaatgtgggaaaatataaacgagggaagaaaacaaactttaaaaaaaagcgagagggataaaaaattaaaaatagaaaataaatctaaaagaaaatgcatgatttcccatgtaccattattttaacatttaataaaaatcaatttaaatgaaaaaat

SEQ ID NO: 258650 - DNA, 403 bp, Homo sapiens
tcatgaaggcgcgggaccggggaaggcccacacagctgtccccgtcctttacggctgccctgtggccgacttcctgagaaactaacgtccttctctctgatcccccaccccgccaccctgcgccccgcaggtctgagtaacatcattggcatcatagtgtacatatctgccaatgccggagacccctccaagagcgactccaaaaagaatagttactcatacggctggtccttctacttcggggccctgtccttcatcatcgccgagatggtcggggtgctggcggtgcacatgtttatcgaccggcacaaacagctgcgggccacggcccgcgccacggactacctccaggcctctgccatcacccgcatccccagctaccgctaccgctaccagcgccgca

SEQ ID NO: 258651 - DNA, 244 bp, Homo sapiens
agacaagacacgatgacctgcagcatggttggcattttcaaccccaagaattgagagaacccaagaacggagtggaagtaaaagcaagtagaatgaaggtagcagctgagactgaaattatccctccctaccccgctttcatgtaccctggcagtgggaccactgctccatgataatgatattgaagagtgaaaaggacatgaacttttaaatgaagagtaatgagatagaaagacataagaat

SEQ ID NO: 258652 - DNA, 470 bp, Homo sapiens
gcacttaatattgtaattggttttccagcgctttctctaagtttctgctcgattgagttaaaagcgctgctgtccttaatttgcttaaggcttcaaacacgatctaaaagaagtggtgcacagagctctcgtcatgtgagaacaattcaatgtgatgtcttgccaggaatgataaactctggtgacttgataaatctcagagttcagatttcagatgaagttagctttcagcctggcattcccgtccaagcacatgtaaggctccgcaaaattgatgacaccataaaggagtccagtttccaccaccacgatgctccgtcctcaaagagagcacatcccagtcgcctctctctggagggctttgaatgcctctctgatcagtcaacaggacccttgaatgagcacttattcattgtgccagtaatcttttcagaggacagcagtggcagcaggtagtacatacttactag

SEQ ID NO: 258653 - DNA, 506 bp, Homo sapiens
cttctgtaggttgccttttcactctgttgactgtttttttttgatgcatggaagtttttctgtttgatgtagtcctgtttttctgttttttcttttgttgcatgtactttgggtgtcatattcaagaaattattgccaaattcaaatgtcctgattctttccccctaggttttcttctaggagttttatagtttttggtcttaccttcaggtctttaatccattttgagttaatttttgtatatggtataaggtagaggtccagctttattcttttgcttgtggatatctggttttcccaacacctctcacaacattttgaagagagtggtgtttcccctttgtgcagctttggcgtccttgttgaaaatcatttggccgtctacgcaagagtttatttctgggctccctattctgttccattattatatatatctatgtcagtacctactgttttgattgctgttgcttgcagtgtgttttgaaataaaaaagtgtgaagcttcc

SEQ ID NO: 258654 - DNA, 292 bp, Homo sapiens
gctagaacaggtatttagaacaggaactggcatttagaaaacacccccaaaatgctagttgttgttactaccagtggcccttgaagccaccacacacctgtcctaccttttcatctcgacatatacacagcctgacctgtttcagcctctcacctcacagcttttccctcccactggggtaacctttgagaacaaggaccttgtcttactcccctctgtaagttttcccagccccttgtgtagtaatttgaggttattgctgaatgtatcaaataaaatgttctccatcaga

SEQ ID NO: 258655 - DNA, 891 bp, Homo sapiens
atgagtgcctgcgggaggaaggccctgaccctgctgagcagtgtctttgctgtctgtggcttgggcctcctgggtatcgcggtcagcaccgactactggctgtacctggaggagggtgtgattgtgccccagaaccagagcaccgagatcaagatgtccctgcactcaggcctctggcgggtctgcttccttgcaggtgaggagcgggggcgttgcttcaccatagaatatgtgatgcccatgaacacccagctgacatccgagtccacggtcaatgttctaaagatgatccgctcagccacaccattccctctggtcagcctcttcttcatgttcattgggtttatcctgaacaacatcggacacatccgtccccaccggacgatactggcctttgtctctggcatcttctttatcctctcaggcctctctctcgtggtgggcctggtgctctacatctccagcatcaacgatgagatgctcaacaggaccaaggatgcagagacctacttcaactacaagtatgggtggtcgtttgccttcgccgccatctccttccttttaacggaggtaaagcccgtcaccctaagtatggataggctgggcctgggcactgccccactgagccggggagagtggggatgggggagaagggacattccacaaccattttggaccccggaccacccactctacttcccttcctcatcccagaatgtgtcactgtcttacctttctgggtctcctccggccaggatgtccccaggaccctgctcctgtccccacgtccacttcccaccccactcgagctgtgtcctgtgcagaccccagccaagggagatgaggcaggccccagcagcgagcccatcctctgctgtcttctccctgtag

SEQ ID NO: 258656 - DNA, 274 bp, Homo sapiens
  misc_feature (1)..(3): n is a, c, g, or t
  misc_feature (5)..(5): n is a, c, g, or t
  misc_feature (7)..(8): n is a, c, g, or t
  misc_feature (14)..(14): n is a, c, g, or t
  misc_feature (19)..(19): n is a, c, g, or t
  misc_feature (22)..(22): n is a, c, g, or t
  misc_feature (133)..(133): n is a, c, g, or t
  misc_feature (145)..(145): n is a, c, g, or t
  misc_feature (148)..(148): n is a, c, g, or t
  misc_feature (185)..(185): n is a, c, g, or t
nnncnannctcggngaatncgntcacatggaaaatctctcttcttctctttctctcgcacacatacacacacatgcaaacacacagagagagaaagagcctgttgtagagtaagacgctgggcaggccaaggntcaggtcctgantgncactgaccagctgtgtgagcccgtgcatgtcactttncctctctgcaactcagtttctcatctgtgcaggggtcaagcaaaaccaactccctctttggattcctggacttcagaaacggtctggga

SEQ ID NO: 258657 - DNA, 231 bp, Homo sapiens
cccttttattcttttaggcagttcctcaaatctctaccctggcttggtacaccacactagtgcccctgcttgtggtgctgggcgtcactgcaatcaaagacctggtggacgatgtggctcgccataaaatggataaggaaatcaacaataggacgtgtgaagtcattaaggatggcaggttcaaagttgctaagtggaaagaaattcaagttggagacgtcattcgtctga

SEQ ID NO: 258658 - DNA, 494 bp, Homo sapiens
cagcttttcctttcctaactcccctttcagaattgctcttgactcatgttacaacaagcaaggcagacttctcgcccctcccagatcttctcattgtacacttctccaggatggaaaattcccttgcatcatgatagcagaggattagctagaagtattggtattggtattggtattgaaaaagtgaatgacctaaactcaaggtaaaaaatccttttgcaactcatatggtttctaattcttcggtttcaacagacttaagggagatgtaattgagttaacagctgatagttttcacacatcaaatatttttaataagctatgtgattttgaaggatttagtaacattgccataacaaaacatccttctcatctacttagtgaacagtttcagttctttcataaacagagaaaataaaaaatagaaaaaaaatgtatgtgaaaccttatactagcaatgagtaacattcattcagaggcctataaactatttt

SEQ ID NO: 258659 - DNA, 404 bp, Homo sapiens
agtctcagttccatagagcattttgctagactcagctgggaacagtgcacacaaggtctgattttaatttgtgtagaatttccatgaataacaaagtctaattaagacatccattaaaagtccttaacgttaattcagtgtggaaaatcttagagttccattggattttttttttaactgatgtcttaattaggcactgttaggggaaaaattatgcaaattaaaatcaggcccttagtgttacacatttctttaattattcagtgcttgttttacgtatatttcaatttctttataagttaagagggcatattaggtgataatctgcctatattgttctcagtttttcttcactttttcaagatacatatcaccttctaaggaagcatattactctcatctca

SEQ ID NO: 258660 - DNA, 384 bp, Homo sapiens
gactcagctagttttttgtgttttttagtaaagacggggtttcaccatgttggccaggctggtctcgaattgctaacctcgggtgatccaccctccttggcctcccaaagtgctgggattacaggcctgagccgctgtgcccggcccccgtttttgtgtgtgtgtgtgtgtgtagggcttggggaggggacttttatccaaatatctctgaaggagatgctggtcacagcctccacctctggggagcgaaccaggggtctgggaatcggtgggggacatacttgcacatttctctatgtaccttttgtaaaaattgcatttttaaaaaccatgcacatgtgtcacttattacaaattaaaaattaaaaattgtttttaaaaatg

SEQ ID NO: 258661 - DNA, 384 bp, Homo sapiens
gctctcaaggtcctcccaggggtcatggagccatttggatccctaatatctcccgatccccttagcctatctttggagcagtcaggaactatctgcctcctcttccctttcatctgtgtccacgtgtcccagctgtctcctgagaaatcactcctttcctccagcccagtcagcatgtctgccttcatcatgctgtaattttccaaagctccagtgtttcaaaccggtgtttcaaggcagttcacttgaggccaggagtccaaggctgcagtgagctatgactgtgccctagcaagcccagcctgggcaacagagtgagaccctgtctcaaataaaataaaatataaaataaaataataaaataaaatactactgttttccatg

SEQ ID NO: 258662 - DNA, 368 bp, Homo sapiens
acagggactcctggactcttactttctaaccagcctggcgcccatggggtggggttgggcattctgggaaaggctgggcctggaggctttggaggggagggcctgagtgaccccttgatgacttttgtctccctttcccgttattctccctacctgcccccccccacctgccccccaccccatgtctctatgggcacctacttggcccctcatcccccctcttccggccctctcctctctacccctcgcttcccttcctgtctctccagcctggtgacagagcagaactctatctcaaaaagagagagagagagagggagagagagagagaggaagaaaggaaaggaaagaaaaaagggagagaggga

SEQ ID NO: 258663 - DNA, 612 bp, Homo sapiens
tttttatcttgtcaaaaataactcttcttcctcagtccatgtaagccatctaaaacttttctactcattccacagttgcctgaaaatgtgaagatcagaaatggactgaggcaaaagtgataatgaagacattctcataggcgttgggttccgagatcaattccttaaattttaaaagattcttgctatgatctcatctttaatccataatgtgctattcatttctctatttttccttgatgctccagaagtatattctttaacgtggctttacacaccaaagtagactagattttctgcctgttaatgatgatgggcttcttacttacagtatagtactgagttgtgtttcttattcccatcccgcaatgtgtgtatgtgtgtgtttcctgataatacaggtaaagcactgataaatgaagataaattgttggctttgttccaaaacaagcttattgttctaggaccccaaactgtctcaaacatcattaagaagcagcaggccacctaaggttgtgcatcaattagcaattaggtcacacattgggtggttgcaggcactcagcctttggccttgttcctcgcagcacactcaagcagggcaccagtatc

SEQ ID NO: 258664 - DNA, 283 bp, Homo sapiens
atagaaagaccactcctgcccaaaacagaactctccttctaacaccctgggtaatcattttccatcattttccttcctttctacctccatactaccttttactcctgtagaagcataatcctaaacccttcctaactcttccttgtgtacctgtatagtcctcgaatattttattttcacttatctcctctctcatttcttcaatctttctctttctgccccaaaaggtgcccaagtccctatttccaggagaaccctttcatttgaccccatccttctcagc

SEQ ID NO: 258665 - DNA, 1106 bp, Homo sapiens
atggatgaaacaggaaatctgacagtatcttctgccacatgccatgacactattgatgacttccgcaatcaagtgtattccaccttgtactctatgatctctgttgtaggcttctttggcaatggctttgtgctctatgtcctcataaaaacctatcacaagaagtcagccttccaagtatacatgattaatttagcagtagcagatctactttgtgtgtgcacactgcctctccgtgtggtctattatgttcacaaaggcatttggctctttggtgacttcttgtgccgcctcagcacctatgctttgtatgtcaacctctattgtagcatcttctttatgacagccatgagctttttccggtgcattgcaattgtttttccagtccagaacattaatttggttacacagaaaaaagccaggtttgtgtgtgtaggtatttggatttttgtgattttgaccagttctccatttctaatggccaaaccacaaaaagatgagaaaaataataccaagtgctttgagcccccacaagacaatcaaactaaaaatcatgttttggtcttgcattatgtgtcattgtttgttggctttatcatcccttttgttattataattgtctgttacacaatgatcattttgaccttactaaaaaaatcaatgaaaaaaaatctgtcaagtcataaaaaggctataggaatgatcatggtcgtgaccgctgcctttttagtcagtttcatgccatatcatattcaacgtaccattcaccttcattttttacacaatgaaactaaaccctgtgattctgtccttagaatgcagaagtccgtggtcataaccttgtctctggctgcatccaattgttgctttgaccctctcctatatttcttttctgggggtaactttaggaaaaggctgtctacattcagaaagcattctttgtccagcgtgacttatgtacccagaaagaaggcctctttgccagaaaaaggagaagaaatatgtaaagtatagtttaaacccatttccagtccaaaccaatgaaaatagtttcccaaataagtattttgtcaaatcatttacaaaaaaaataaaaattttactta

SEQ ID NO: 258666 - DNA, 691 bp, Homo sapiens
gggcagatgccacaggtcctgggcaagaaaggggacatcagggatccccaaacccacagcctgtagtttcttcctcccctgcgattaccccattttatagccgtggaaactgaggctcagggtggatgtaaccacgcattcaaggctccaatagacttttgccaagttgctaagcgtttgtcttactcgtttgggtttggagcccccagcaccaagtgcacagccgggcaggtcctggaagcccaatggacaccttcttggcatccccacatacgagtatcaaaggcacctcaagttccttcagtcccaagccagtgcacggctcactctgtgttggcacaccccaacctctcctctgggacattttctgatcccggatggcagcccccaggccgcacgcggtctcttgagagccctgcagagccccaggcactttccgcgggaccacccagcactcaggagcctgtccatgctctcagtcccctcagccaccgccccctggcagcccctgccacgcctccacacctctgattccacgctctccggagcctccctccacgcagcagccaaagggggctttttgcagcaaaccgcggacgtgtcctctcggatggactctaccttgctctcattgcccgagggtcccgaccgctgccctctcaggcctcaggcctggatgcccgggcccttt

SEQ ID NO: 258667 - DNA, 1034 bp, Homo sapiens
ccaacacaggcaatatacttcatatttcacctcttccgaaaccgttcttcactcccctcatttctggctcagctcctgcccacaagtacccttttactatttagatcatctgaccttggtacattttggagtttcattgattgggcttaaagttggacttaacacttggcccaggggaagtacatgcattcttttattcctctcaactttttattttggaaaacttcagacctacagaaaagttgaatgaatggtgggtgaataaccatatgcccttccactagattcaccaacttaatatgttatcatatttgctcgcatttatttcattttcttggctggctaatgagaatcccaatgcagacatgacgttacttcattcctatgtacttttgcatgaatctccaaaaatcaaagataggtttttttatgttatactctgaaaatttaacattgatatggtactgttacctaatatacagtacctattaagattttcccaaatgtttcaataccttgtatagctgtttttcctcctgatccagcgtataataaagatttcagttcatttttcatgtttctttaatcatgaacagttcccccagcctattttttttacctttcataacgtttgacttttttttaaaggagtctacaccagttcttttgtagaatgtctctcaacttagatttgtgtgattgttttttcgtgatgagattgaggttaaacatttttactaatgttttgttaaggtgatatcaccagagttctttgtaaaagtactttttcctgtgtaatctgtggagtgtcattttaagaccgaatggatttcttattccctaacagtcttttactctgtagttttagcattcattgataatttttgcctgtatccattattaacttgatatttgtaatatggtgatgttctaattctgtcatttcttctatagagagaagatggttttcttatgtaaagaacaactttccttttttctcccaccatcaaaagaaataatttattgtcagcata

SEQ ID NO: 258668 - DNA, 362 bp, Homo sapiens
gccacctcagcctcctctgctaaaactactagccttggcacttagcttctcctgccttctcatcacaatagaggagactggcaggacctgccatctggtcctagaacattgcaacacatacccatctcagaacttacacatagcatgtgtgtaatacttttaacctcacttttctaagctaattcgtacacttaagatcttagcttaagcagctcatatttggagaagctttcccttacctctccctcccccatgttatataatctcttagctgctgtatttctccttcagatcatgtttaaactaattaaataatttgttgtgtataatgctcttattatttcacaatgcttgaggttgca

SEQ ID NO: 258669 - DNA, 289 bp, Homo sapiens
acaaggtctatactgtcctacttgagccctttgcttcagcgacactggcctcctttccatccctcaaacatatctgtctctttcttacacagaactgaggaatttgatgatcttcctgtctaaaacattcttcctcagctatcacaggggacacaatcccagctttaaaaacagttgagatacaactcctcagagtgaatgtgtgttgtcatcaaacactttgtacaatatatccctatttatttttgtgcatgtagcactcaataaagtttattattccatttctcca

SEQ ID NO: 258670 - DNA, 533 bp, Homo sapiens
cctacacccaggacatcttacgtgcactccttcctaccccctcccctagtgcttctggaccccgctagttcactcactctgcattgcaaaaccttccgcttcagccgtgatcccagcactcatcgtctgttgtgagcatatagctattgcttctgtacttaggcggtgtttgcttctcccactagagggaaactctgcctgagggatctatcaccaaggtattcattgttggggatgacatacgtgatgttatcgccctacacctggcaatgagatccctgtagaggtggtattaaagatggtcactgagattaagaagattcctggtatttctcgaattatgtatgacttaacatcaaagcacccaggaactactgagtgggagtaataaacttcttgttctattaaagtaccgtgtgcagtttaaattgattagaaatcattcaccattagtgacaggcagtactgtgtaaagagttatctggagcagctacatcacagtctgagttctccacagcaaaaagctactggca

SEQ ID NO: 258671 - DNA, 414 bp, Homo sapiens
cctacacccaggacatcttacgtgcactccttcctaccccctcccctagtgcttctggaccccgctagttcactcactctgcattgcaaaaccttccgcttcagccgtgatcccagcactcatcgtctgttgtgagcatatagctattgcttctgtacttaggcggtgtttgcttctcccactagagggaaactctgcctgagggatctatcaccaaggtattcattgttggggataacatattatcgcccaacacagacatcaaggggcctgacttctctgaataccgccgccttgaagttttagatagtacgaagtcttcaagagaaagcagcgaggctaggaaaggtttctcctatttggtaactggagtaactactgtgggtgtcgcatatgctgccacgaatgccgtca

SEQ ID NO: 258672 - DNA, 770 bp, Homo sapiens
tacaatcatacagactctttcaagcttagagctggagctcctggaagctatttcgtactctagtgcaagagcaaaaaaccacaacatgaaaggaattaagtcctgaattattggcttcattacatccaccatttccaccccaaaatgacccaaaagaaacagtgaccacaccctgtaggccttttggtgtaaaagaggtgatgaactggggcaagaacaggtcatgaagatttgtctataaaagtccttttcaggtgagtttgtacaccaccatagagcaattcgcctcatatcaattagggttaggaaaccaagtttcaattctcaggaagtcacaatttcattcatttactcaatatgaatttacaaagtgcccacatattaccagcttccacttgcagtcatttctagataaaaaagaagcctggtatctctagagggaccaccaagtttcccccaagcctacagctgaattacttttgcgataatttgtaattcctgtaattatttttccaaaaatttattcttattttactgtataaaagtattgatttgagtaaattggacattttttaaaatactggtatttcacatcagttagtctgagaatcactgctcgataaaacacccacattgcctaatgatgtaggcaaattacctgagtccttattaaaaatgtgtatattaagttctccctgtagaatgataatctaatggatataacattcaagcatcaaaagttttcttcttccctccctcagcatcttaaa

SEQ ID NO: 258673 - DNA, 359 bp, Homo sapiens
taactgcggtttcccgtcacgacagcataactctgttcgttatgtaaaactctcacggttactacttcaagcagatcatatgtatccctgtagatgataaccaagagagataatacttattaactgtataaaagtattgatttgagtaaattggacattttttaaaatactggtatttcacatcagttagtctgagaatcactgctcgataaaacacccacattgcctaatgatgtaggcaaattacctgagtccttattaaaaatgtgtatattaagttctccctgtagaatgataatctaatggatataacattcaagcatcaaaagttttcttcttccctccctcagcatcttaaa

SEQ ID NO: 258674 - DNA, 647 bp, Homo sapiens
caggatgggcaggatggagggagaaggaagggacagagagaaggtcagacagaggcaagggctgaagctgaggccagcacagaagccacaggaagccagaggccagacagcctggggcggtgcctgcaccgcagaactggtcccgggccgggcaagcaagcacagggagaggtggatccctgggggctgtggctttttaagcctgggcttcctcaggggcagtgctgcctgtctggggatcatgtctgcagttgacaagggctcggtctccccagtgccacactgttcagggcagtgctgctgtcccggggcccaggctggagctcagcagatttgccttgattggaggaggagggcatcctaggaggagagggagtgggggctacctcagggacggggaggtcaggctgcagaaacacataggccctgattgggaagaagggaacggaaaataagacttaaagaatttaaacaaaaagagccattgcagcgggatgagaccacatcatcaggttttgggaataggactttagaggcgtaggatccattacagcatcaccgaaccagaagcaggaaggctgagctaagcagagcagcagcagtggagataggaaggaagggagggaggggccgaggaaggaaggaag

SEQ ID NO: 258675 - DNA, 291 bp, Homo sapiens
cccagtcactctctacaaggtaaagctgtctgacttctcagtctagcaccaaagtcccctcagtctgaatctaacccactttctaactttagctctgtgcattgcctcgcttggaatgtctcctccagccagattcatatcattttaatcacccagcctatctcgcacctttcctctctctacattcccagtctttagatcctgactgcacacttcctcccaccaacttagaatctacccacccataaagtcgcgattcacgttctctttcaggaaggatttcctaaccac

SEQ ID NO: 258676 - DNA, 487 bp, Homo sapiens
ccacccttgcctggctttttcctgggcttccggtgccaacatcatcttagttacccctcaaaactagaaaaaaagacaagttacacctgattgaaaaaacaggaaacaaatgtaccagaagaactataccaaaaacaatgtagctgttcttagagaaaagttactggtgaagcagaaaaatctgtccttatatagcaatgactggggagctccaaataagattctgagattaaaaaaaaaaagtttcactacctcaaaatatagaattaaagtaaaccaggcttcctggaataatagaaatggcctgttatgctagaatagtttattataccctgaaggccctgtcatgttttacagtcacacacatgctatatctctgatgtacatttttaccactcaataactgcatttacaattaatgtgttttcaaacttttggatttttttcaagtttctatgaatattaaatttacaatagactcatgttt

SEQ ID NO: 258677 - DNA, 679 bp, Homo sapiens
tgaatggttgaatggatagactattctacttgtttaaattttaaatattatgtctaaataaatttcattctgacacttgagcttataattgagtgaagttcacactcagcatcaggaaaagtacagcctgacattttctgctaaaaaaatcaattaaaacaatttagaaagatgttttatgtaactgtaaagtgtttcattagattttttggatcttcttacaaaaatgcaacattttccagtatgttttgctgtttcttgcttcatttgcctccattctcccttccctctaattctcattgatagcccatgaaattctagggtcacaaacttaattcccaatgttggagtggaacatgtaacctgctatttacagaaataatatggtgtacttttagttaattgttccatattcttttcttaagtaattttgattttctattactaatatttctaaatctctaagacacgttctactcttctggtttctcgtgtatgtattgttccatcttcctttcaagtccatagacctccatatttatgtctgacccactttctctccttgatttgatgatcttgctgttcatcgattcagctattactttctctaggttcttgattttgtctcctgttgcttctctacagatcattgttcttagatgctgccatgatgaaaatt

SEQ ID NO: 258678 - DNA, 839 bp, Homo sapiens
tgtttccagcgcatccatgagcctttcccgagagggcagtgtgagcctggccattgcaggagtagtactgaccagcaggacagctgcagaagcagacatggatgcagcagcgggacctcccgtctccacccggcagagcaagagcagcctgagtggacagcatggaagggagcgaacccaggccagcgctgaaggctgcaaggaggggagggaaagaagggaaaaggacagggctctcggaaggagttcccatcgccgcaggacaggtgaaagccgccacaaaacaaggggagacaagattgcccaaaagtcctccagcaggtcctcattcagccacagagccaatagagatgacaaaaaggagaaaggctgtggcaacccggggagcagcaggcacagggactcgcataaaggtgtcagccacacgcccatctcaaaggagtccaggacctctcacaaatctgggaggagcttatggaccaccagttccggttccagcaagggacttggcagggtcagctctttcctgaggaacgtcagagccaaccttactacaaaagtagtgggcacaccacatggcagagatgtggacgtcatggctaagatggcggagaggagcaccaacgtggccatcgccgagacagcagagggtggccaggggctggagatggttggttctatgacaccggacatcatggagacagtgacctttgaagcccattaaataagacccagagctggaagctgcaaaggagcccagagctcatgggagtgtccctggaaagcctattccagcgttctttactgccgtttaaataaagaatcatacatctgaaaat

SEQ ID NO: 258679 - DNA, 407 bp, Homo sapiens
acggagggcgcgtgctgccctctctgggggctctggccttcctttgcttgtggtctcaggaaagcacaccccgggcagatgtccgcctgctgcccatggggcccagggcaggaatggcccagctgcttatggccttattcttttgtgtgcaggacattaaattgcctccaattaggtccttcaacctctttggtgcttggatttcctgatctggtggggtctgtcggcttctcttcagtgcgatatatttaaatggataaaaatatgttagttcccaaagaattgtattatgtctattacgtcaagataccgttgttgaaatattttcaaaaaatacattagtgatgtggaaatgttatttctttactaatggaccaaataaaatctggtataatgggcacctttaa

SEQ ID NO: 258680 - DNA, 425 bp, Homo sapiens
ccacatcctccccttttttagtggcttaaaacaacatttttgttgagtttggagatctcttaaagaactaaagatagaactactgttggacccagaaatcccgctactgggtatctacccaaaaaaataataatagtcattgggctgggcagagtggctcatgcccgtaatcccggcactttgggaggctgaggtgggtggatcacttgaggtcaggggttcaagaccagcctagccaacatggtgaaacccacctctctactaaaagtacaaaaattagccaggtgtggtagtgagtgcctgtaatccaagctactcgggaggctaaggcaggagaatcgattgaacctgggaggtggaggttgtggtgagccaagatcgcgccactgcactcccgcctgagtgacagaaagagactctgtctc

SEQ ID NO: 258681 - DNA, 259 bp, Homo sapiens
gtaatcacaagggtccttaaaagagggaggcaggaggatcagagttagtggtagcagacatgataatggaaacaagaagtcatgtgagaaaaaggccataatccgaggaatgaaagtggcctttggaagctagaaaaggcgaggaaacagattctcccctgaagcctccaaaaggaacactgccctgctgacacaccttgatcttagacttctggtctccagaactataagaaaataaatttgtgttgttttaagctac

SEQ ID NO: 258682 - DNA, 398 bp, Homo sapiens
tatatatatatatatatatatatatatatatatatatatatatatatatatatatatatatatatatgtatgtatctgagacagggttatacaactgaattagagaatactgaaacattgctcctaggagaaatgcagaattagacactgtaagcctctggttataatattttttgtcaaccaatcattatataacctgttgtatgtgtgtttctgtatgaagatactttatttaatatatattgttgattcattaacactgaacttacaggtaacaatatgactcgcacttgaatgaagcaccaactgcagaaaggacacttgcttaaagtatgagagcttgcttggcacagtagctcacacctgtagtcccagcactttgggaggccaaggcgggc

SEQ ID NO: 258683 - DNA, 413 bp, Homo sapiens
agccctccctcctcccacaatatctctcatatgcattcctgtcccatgccttctgcttaagctgttcccacagcccggagtctcctccctggctgagggaaatcttgccggctcacatggccgtgatccccatcatttcctgcagaaagcttgcccagctctccgacacggggaccttctgcccctcctgagccctgagtcccctccatcttaactgggaggtcacctgtttgcgtggtgtctgctcagcttgcaggcaaggccaccaacaccctcctttcctgtctttccttcctaccatcctctcctgtccaccctctgcctctccctcccttcttctcttctttccttctagttactgagccatgcatgtgttgcatgcagcaaggatgaataaaataaaataaacctac

SEQ ID NO: 258684 - DNA, 510 bp, Homo sapiens
ccaggggaagcgtgtgagagagtgagaccgacagagtgagcacctccccaagccgctaccaccagccctccaacatggcgcctggcacgtcaccctaaaaagtcatttcttggagaagcgatggatgacagagattaatctgagagttactattaatggagaaacttagaacttaccatttttcctgtgaggtttcggtgctgatacttctattctgtgagttctggcaattgtgtccgttcacccagcctggtgatgcagcaggtgtcacagaaggaccctgtcccagctggtcctgctccactgctaggatggtgtggcctctgatctgtgaccgtgtcttgaggggagaccaggcccttgatcacaagcgtatccatggtgaggttccgtggatggaagctcatggatgttccttcctgatgttcatctgccaccttgctattgaatgcatcctgtttataactgtcttctaaatattgaatagaaataaagcatttgtacagtaag

SEQ ID NO: 258685 - DNA, 458 bp, Homo sapiens
gggcaggtagatcacgaggtctggagttcgagaccagcctagccaacatggtgaaaccccgtctctgctaaaaatacaaaaattagctgggcatggtggcgggcacctataatcccagctactcgggaggctgaggcagaagaatcgcttgaacccgggaggcagagattgcagtgagtcgagatcacgccactgcactgcactccagcctgggcgacagagtgagactcctcaaaaaaaaaaaaaaaagttgggggggtgtagcccctcccctttgctcgcttccctactgctccagttatataaaatgtgcttgcttgcccttctgccatgattgaaagtttcctgaggcctcctcagccattcttcctgtacagcctgtggaactgtgagccaattaaacctcttttctttataaattatttaatttcggtatctatagcagtgtgagaatggac

SEQ ID NO: 258686 - DNA, 202 bp, Homo sapiens
gatccccaaagggccgcagctcttctctcctcttagtcacccataaagtggcaagttgtggcggggtgctgtttcagccctgtttgtcttacagctcttctccccttctccttgtctctcgcaagtagcaaagagcagggaggggagcatgtctcagccctgttggtgttacagctctttttgtcctgccattcggcagatc

SEQ ID NO: 258687 - DNA, 1598 bp, Homo sapiens
gcgtctccgcagggaaaactgcggctggcggtgcgggaagtgctattagtagttgtttatttgtttgtttgcagaaataattgcttgggtacgaaggtcaaacgagaatgaagcaagtatattatctagtttgtatgtctttaaatagtttctcctccacacgtctaaacatacgcacctgctagtaggtgcgcaaatgttaaaacctctttgggaaagcaatgtggcaaaatctagtaaaagttttcaattactaaaccccagcactctgctcctacctatatgtcttgtagaaactttggtaagtgaacaaggatgtacgtaacagcgctgtgggtagaagcaaaaaattagaaacgtccatcaataacagaataaataccttatgggatgttaggatgtagtattatacgccaataaaagaagactgaactcagaaatgtgatgaggcaaaaagagaaagatgtagaaaaataaatagtatgacaattcatatacattcaactctaaaacttgtaaaacaatgctatatattgcttagttatgcatacatatgtagttaaagaagtcaagaaatacaagagaatgaaaatcaagttgagaaaagcagtcatatctggtaaggaggggacaataaagggaggctttaactgtattgaccattattaaaccgggtgttaaatatatgggtggccattgttttattcactacacctttaaaaatagatattattttcttaatgtagtttatttaaattgagataatgccatatacccagcatccagtttcccctattattaacatctcatgctaatatggtacatttgttgcaattaatgaaccaatattttacactgttattaactaaggttcacattttattcagatttccttcggttttacctaataccctttttctgttccaggattccatccagaataccacattacatttagttatgatgtctccttatatgcctcttgtggctgtggcagtttctcaaactttccttacttttggtgaccttgagagttttgaggagtactggtcatgtattttgtaggatgtcctaatcatggaatttgtctcatgtttttctcatgattgtatgtatttttaggatgcatttttaaaaagtcagctaagttaacaaaatcccttatcagactgaatataaataatatcgtccagtcgcttttgaaatttgcatgtcttcgactcactctcctgatgcacctgaaagttgtaatttctaagaactgcgtcagcaccattttttaaatgtgtacattctgtgaccatcgtcatcagcacttaacatcatttgctgaagaacttgaggaggaataggatttggtattgattccttcaatacgttgactcctccagactttcactgtaaccattagcccttggcttctagattgtctttaacttaattttctgtagttcattattacagtcactctgttagcactcacttcctcaggtcacttttcctttcccattactttctttctttctttgagaggttgcagtgagccgagattgtgccattgcactacagcctgggtgacagagcgagactttgtttgg

SEQ ID NO: 258688 - DNA, 536 bp, Homo sapiens
gggtagttacatgaaaatgtttaagtaggaaataacagaaattttctctgttatttctgcatagtagtttgatttaaggaaatcaaatagttcatgtgtcaaaatatagaaattaaaatacatgaaatcactttttttttttttttttttttgagacagagtttcactcttgttacccaggctggagtgcaatggtgggatctcagctcaccacaacctctgtctccctggttcaagagattctcttgcctcagcctcctgagtagctgggattacagtcatgcaccaccatgcccagctaattttgtatttttagtagagatggggtttctccatgttggtcaggctggtctcgaactcttgacctcaggtgatctgtccatcttgacctcccaaaatgttgagattacaggcgtgagccaccgtgcccagcctaaaatcacattttcataagttgctaatgtcatggacgtttagaaatttgcagaatgaactcctattattaactattcctaaaatagtttttttgtttaatg

SEQ ID NO: 258689 - DNA, 424 bp, Homo sapiens
ggtagatggattttttctatcagaaaaaaattatgcatattctacaacttgtcctcataaaatttaattcaacggtatatttttaaaatgcaaacttgagtttgaatttacaaatcagcctcttaatatttaactcaatgacaatgacttcattgatcttcctagtctcttggacttagcaggggaaacctgcttttttcccatgtgttaattacaaagctagtaaaagtaaattatggctaaaacatgagtacttaaaacaatctcaacttttcctaccatgcttagtagcatcagtagaggaggtacaaagaggaggtgagatgatgggagtggtgtctgagtggccactccttcccttcctgtccccatgaagatgggtaaatgcagccagaaacaaaatagattcacacccagatggact

SEQ ID NO: 258690 - DNA, 479 bp, Homo sapiens
acatagtgagaccctgtctctataaaagaactttaaaaaattagctgggtatggtggcatgcatctgtagtctgatctactcaggaggctgagttaggaggatggcttgagcccagagttcgaggatgtagtgagctatgatcacaccactgccctccaacctgtcttttaaaaaaaaaaagtagcatttaaaatttgggggctctattatctgtattacatgaatgttgagagaagtgaaaagctagaaattaaaatattaaggacactttttacatgactgatttagtcagtattttctacttcttctggaaaccaaaagcaatgaggagaatggggaaaatgttaaaaacccacaaatcccattttaagcaaaactaggaagcagatatgatctgcagacttcaaacaattttaagggttgccaaaagctgccaagatcaggcagaagctgtgcaggaagaaaaaggaaaaggaaa

SEQ ID NO: 258691 - DNA, 539 bp, Homo sapiens
gactaaggcctgtcatcaaatgtacaaaaattttcaactctagttctaaataactaggtcctgcctatgcttttcacatacatctaaaactgccatttgttaagtcagcgcaccccaaaattgcttcatcccatataaaaagagcactttcttgccaaatactgatttctcaaatgccaaaatgcaagcatatatcatgtggagacaaaaatcatcttacaatattctccaaagatgagataaacctctattctctttgcagagctaagaaacttttgctaagtgatttagtccaagcagtgacctgcacaacaacaaaaacaacaacaaaagtaatccaaaaatatcaggaagaggaatctaaaagttttaaataatcagggcggattctaaataaagcatatatttcagtgaaagttaagcagaattaaactaaaaaaaatttcatatgtaagctataagtaatacatatgcaaaaatttaaaaaaaatttaagccagaagcagtggctcatgcctataatcccagcactttaggaa

SEQ ID NO: 258692 - DNA, 262 bp, Homo sapiens
agtggaatatggactttgcctctttggctcttctgcttgcccagtgctttgaacagtgcctggcacaaggtgagtatttgttgaattcattccagctgaagactccagaccccgcaggtgtcactctgctataggtttgtcttgtccccttgctcaagggtcctgaagcaactcctaatatttaccccacagggggaatgagaaagaagcagtcttatcctagaatgctggaagaaatactcaacaatgataagcaatatgg

SEQ ID NO: 258693 - DNA, 464 bp, Homo sapiens
tacaaaaaccattgtgtcaaggtaaggagattattctggtttaatataatgccatttgaatgaggagtcagttttctttctggataaaccagttattaggtgaaatttacttcttgacagtgtccatcatttaaaagggactggaagaactcgtgttgaagtttccttaaaaatcaggatggggccaggtgcggtggctcacgcctgtaatcccagcactttggcaggctgaggcaggtggatcacgaggtcaggagatcgagaccatcctggctaacatggtgaaaccctgtctctactaaaaatacaaaaaattagccgggcgtggtggcgggcacatgtagtcccagctactctggaggctgaggcaggagaatggcgtgaacccaggaggcggagcttgcagtgagccgagatcgcgctactgcactccagcctgggcgacagagcaagactcggtctca

SEQ ID NO: 258694 - DNA, 418 bp, Homo sapiens
tcgtcgcttgcctaagctgctcccctaacacgccctcccgcggtcggggaggggacctggggatagattcccaggggctgggagggccaccgcagcctctgcagcggggcctggctgcgggtggatggttcggacaagtctcgaactcgccagctctgaccgcacacactgcatccgtgccagggaaagaaaagcctgggaaaggccagggtatggctgtaacactccaaggccttcaaaagggcagaccagcagaccaggagccggaaagacttccctgactttggtgccatccacgctacatctcctcttggtacacagtatgaacatgtttaattagacctagacaatttgtcaatgacccagcaattccactaacaaaaatgtattccaaataaataaacgttgttatgttaaa

SEQ ID NO: 258695 - DNA, 512 bp, Homo sapiens
agaaaaaaaaatcctgtgttcttttttttttccagaatggagtaggtcagtgagcaatgtgattaataaatatttcaatgtctgtgacttttgatttattttggagacagggtcttgctctgttacccaggctggagtgcagtggtgctatctaggcttactgcaacctcacctgtcactttttaattgcaagaaagctgaaaggtttttttctattatatcagttataatgagaaatactgtatatactaactatgagtaaaatactatattgcctaacttgtattattaagcaattctgctaacctgtgaccttacattttcatctgaaaagcaggggctggacaccaattgccctatgaagctattgctagtcctaacattctttgttttgtttgcttttttggcacacttaagtgtgtactatgaagtttatgatgctttaatgaaattttctgtctctaccattgtaatgagaaaggaataaaatactttattttgcaaatctaata

SEQ ID NO: 258696 - DNA, 364 bp, Homo sapiens
gctgcaccactgcttagtttcctggtccctaatactttaaggagccggatgggagtgagatctgaacaactcactctcactttctacaattctgtaagggtagggagtaggaactagaatggggtgctttttttccctgtgagaattgctatcgatcctgtggagggtttctcagccaggagactccatcactctggcctctctgaactcagagctcactcacctccctttcgaagctaacgtggcagagctggctgggaggtggttactggctcagggccctgaaacactgagtaattcctatgatggctgggactggagacaccattccagacacttccacgttgtctaaaagcaaaaaaaa

SEQ ID NO: 258697 - DNA, 353 bp, Homo sapiens
agcttgttaactgctggaaaaaccacatactggggctctgcagacccacagggtagagaatcccaggagccaggacttctgtttgaccactcttcaaatctgctagagccagggagagggcacggcatggccagagggccccactcacagagaattctgatactctgttgactggactcaccctcagacgggagtagcaattcgcaaagcaaatgctgtgttttctgagagacctgcccaacatttccatctgccatggtgggcttgtgccagaagccccaacaagacacactgggacttctccgagggccctctaggaaggggctgccacaaccattgtccctacaagaggt

SEQ ID NO: 258698 - DNA, 445 bp, Homo sapiens
aattcggcacgaggcagaatagagacagatgcacagagcaggccctgtgaggacagaggcaggtctcagcccggatcagcgtggtccaaaaggacttatcgttaaaagtgctggtcccagaacccaaggggaagacatgctggttctctgatgagctgggccgcctcctccaggaagcctcctccttggagctctgtagccatcgtgggcttgcaagagtcaaagggcctggcccacagcggcgcccggcactgagctggacagtgtcctgcccccaaaattcatgtccgcccagaacctcagaatgcaaccttccctggtagtagggctttgcagatgtaattaaggatctggggacgaggtcaccctggattgaggctgagtcccaagtcagtcactggtgttcctccatgaagagcagagcagaatagagacagatgcacag

SEQ ID NO: 258699 - DNA, 643 bp, Homo sapiens
tcacccatttctctccagcgctgaaggaaaccccccagatgcttctccactcacccaccgaagcaggtctcggttgcccccagccccgggccctcccgagaacactgcaagcccccactggtcccctcccggcaaccccacggcccatccccgacctgcactcaccctgtggggcctccaccctttggaggaaggacgtgtcaaagcttggaggtgcgcggcctgtctaacctccgcccaaggcgcgcggcaggcgacaggtctcagcccggatcagcgtggtccaaaaggacttatcgttaaaagtgctggtcccagaacccaaggggaagacatgctggttctctgatgagctgggccgcctcctccaggaagcctcctccttggagctctgtagccatcgtgggcttgcaagagtcaaagggcctggcccacagcggcgcccggcactgagctggacagtgtcctgcccccaaaattcatgtccgcccagaacctcagaatgcaaccttccctggtagtagggctttgcagatgtaattaaggatctggggacgaggtcaccctggattgaggctgagtcccaagtcagtcactggtgttcctccatgaagagcagagcagaatagagacagatgcacag

SEQ ID NO: 258700 - DNA, 251 bp, Homo sapiens
tgcgctgcccgggaggccttactgcttggtgtcagactgcccagctcagagtccccgtcagggcctgtgatccgcgtccgagttcatggtgcgccgctgtggggcctgctgcagtgggagtgtgtggaacaccttgaccaaaggggagctttgtcttgtgtgttttgaaaaaggcttaatgaagagaatgttgttcattcttagtagtatagtttgcaattcttaatgacaaatagtaagtttcagtagaa

SEQ ID NO: 258701 - DNA, 444 bp, Homo sapiens
ggacaaacagaatcatgaaagctgagagacagagagagagagagagcgaatcccagataacctacgaagaaagaacaacaattaaagcgactttcccattaccaaccacaggacagctgaaggtggaagacaatggagtgtcttcagtgggttaagaacaggcttgcaatgctgtaccacgctgactttcattcaaagttgagggcaatatgaaaagcattttcagacacactaaatgtgcttgctcataaaaaagaacaactaaaggatagctccagtaagaagaaaagcacacctagaggggaagaagtggcagaaagaagaaatgacaattaaataggtgagaaaagaaaagttttatgtgaggaatgcaagtctttttcattaccagccccagagagacattaaaaggagacagcaaccagtccccacttctccttccct

SEQ ID NO: 258702 - DNA, 465 bp, Homo sapiens
ttctctttgcctgaatatctcacaaggctaaaatcaaggtgtcaattgggctatcgttattccaaggttcaatcagtgatgagtccactttcatagtgactcaagtagctgttggtgggactcagttcctccatggttattcttaattggtggttggcaagaggcctacttcactgttttaccacatggatgttacccataaagcatctcacaacatggaagcagcttcaacagggctaataaataagaaggcaaaaaagaatgtgcaagaaaaaagtcaaaggcttttgtcatctagacttggaagtgattaagctcaagtgtgattaatctcaagccaactatcaagctgaaaggacaggatatgaatattaagaaaaggggatcactgaaagccatttaggaaactgcctacaaattatgtggatatggatgttttacgaaaataaaattccttgtcttaga

SEQ ID NO: 258703 - DNA, 820 bp, Homo sapiens
gattaaatatgtgagtcctctttttaatggtgctttttgtaacctttaatgctgaggtacagagctgcttttcaatatttcataaaggagtggcagacaagagtggattttaaagctgttcttcaaacgtaatttgtcactggactctgacacacctggaaattatatgatatgatacatacagaaatgttgtgggttttttccataaaactttaataaaagtattatacagccaaaaaaaaaaaaaaaaaaaaaaaaaaaaaagcggccgctcgaattcgcggccgcgtcgactacggctgcgagaagacagacagaagggacaattcactctggaacaccctgcacagcaaaggcatgggggctggagatcacatctcatgccaggaacagtgagtgggcagtaggaggtgcgacagacggctggaggacatgggtgggtagcccagatctcagagagccttgaatgccaggcctgggagttccaactgcaatttctataaagctacgattattaaaaatagataaaatgtacttttatgccaacaaactatccaactgctttcctaggaggtggtaaacaaatcctatcaccctgtttcaacagaagactacaccatggctcctgatcacacctaaaattccacgataatcacattaaacaatcttttatttgtgttttattacttaaaaaattttatattgtttattactaaaaaaacaaatacacacaacgtgaatgtacttactgccactgaactgtgtacctaaaaatggctaaaatggaacactttatgttttgtatgttttaccaaaatta

SEQ ID NO: 258704 - DNA, 351 bp, Homo sapiens
gtgacatatacacacaatggaatattactcagccttaaaaaggaggaaacttctgatatatattacatcttggatgaatcttgaagactttatgataggtgaaataagtcagtcacaaaatgacaaatactgtgttaccccacttttatgaactcctagaataatcaaatttaaagtggaatggtggttgccaagggctggaaggcagaaggaatgggagcttattggttcttgtttttgttttgtttttttttttttgagacgggagtctccttctgttgcctaggctggagtgcagtggtgcaatcccagctcactgcaacgtctgcctcccaggttcaagtgattctc

SEQ ID NO: 258705 - DNA, 131 bp, Homo sapiens
agcaaatggcagagctagaatccaaactcaggccttctaaattcagtacaatctataacaaactgtgcaagagtaaagaccaaagagggcttttggtctcttggaaaaaatattttaagccaccttaatag

SEQ ID NO: 258706 - DNA, 580 bp, Homo sapiens
gggccattatccatcctaggcccaacggcctccaagtggggtttccagaattccagaacccaaagagaggagtgtgggaaaggctatctggtcaccaaagtcatcagcaactgcatgggaaggagctggacaatgagcatctcctgtcaggcttccacatgggctgaagccattaggaggccagaggccaggggagccctttaagacagctcagcctcctgggacaaacagcagggtggaaaagggtggagacggggtaggggagcaattggaagacatccaacatacataactggctaagataagtcttagctaagcagaaagtaaagtccatgctaaatggtagggataagaaagtgatatgggtgcagagctgtgaacagcagagccagtatctgcagatgtgcagagcaagacaccaaaagggatttagtccccctgggctccatctgccctataccaaggtcactctctcagactgttgtggccatgggctctccagaactcactgagagcagaacattgccttttatttctttcatgttcctccacagcacccaatacaatgtgattaacttca

SEQ ID NO: 258707 - DNA, 419 bp, Homo sapiens
catcaccttaaatatttatgttttctttacactaggaacattcgaattctctttagctattttgaaatgtacaatagtttagtgttaatagatcagtcatcctactgatatatcgaacaccaggtcttatttcttctgtctacatagacatatttagaaatgcaaatctcttaggaaattaatctgtaatgtcgatgcacactgatttgtattacttgctttctttgtaggcagtatagtgaaatggttcattaaatggatgctaaatatgactaaatgatcaatttacagtgtagttggcaccaagtaataaatgctcagtaacatagctactatggctgtctttaaaagtggattggtttgacttcataggaaggactctatttttaaaaaagagaaatattaaaaaataaaaagcc

SEQ ID NO: 258708 - DNA, 397 bp, Homo sapiens
tcacacactttaattcctaattacacattgtctttttatagttttttagttgtgtgtccttcctcaagggggaaggaaaataacattcactatgtgtttcccaccatgtgccaggcaactcacaaaggttatctcagttaaccacaggacaaccgcatgaagcagatgccatgagattcaatttacaaaggaagaaactaatgttcagaaaggtgaagagacttgcccaagaccaatgaggtagtaagtggcagagccaagatggatgggtggatgaatggatgggtgcatggatggatggatgggcagatggatgggtaaatggatggatggatgggtggaaggatggatggatggagtaatggatgtttggatggaggtgtaggtaggtgaatag

SEQ ID NO: 258709 - DNA, 466 bp, Homo sapiens
gactagcactcttcttcctcaaccaccccttcccaagacacacacacacacacacacacacacacacacacacacacacacacaaaattccccagagtgaacttttgccaactgtaccagactgggacattcctcacatcaaagaacttttaccagaaatgactgtgattcccaagctagcctcaatcatacctctctagtgccctctacgggaaatttttaggaaaactatcttgggaatgtatttttccagtcccagagagtgttaaattggtgagtttggaattcttaggatgctttttctttttaatgagggacaaataaatgccacatatttaaccgtggttaactaggaactgcttgactttgagtttcttttttgttttcttctaaataaaacctggttaaaaaaggagtgctttttcgttgtgcacaagtaccctagaacttaaagtataataaaaaa

SEQ ID NO: 258710 - DNA, 680 bp, Homo sapiens
ccctggcagtatgtagccttaccagcagtgggtgagagtcccatgtccccacattctttctacactcaatattgaaagccaggtggtttttttaatgtaaagaggagagaaagagagattcagagaggagagcatgtaaatggtgtgggggcacaactgtagcttgacgcagccccaggcatcctggggtggagggtgaggcacacatgtgctgttcccttggtctgtgtagttccaggccctccacagtaagaggcttccaagggtggtaggaactctgcccacacgctgactttgcaacctcaccttcagcatgccgtggatgccgttgtctggttcgggatgtgggactagttctgatcacacaaggtgccaactgatctcctgatgcgcaggtttcacagattgcttctgttagaaagaacagaggccgccagggatctctaaaacacagcatcaaggaactcactttgggacaagctccccaaactgccagctcagtaagggagctcagtggacgggattccaagcacacagcctgagaagctggccgagcttcctgggctcatccagggctgtcgggcaccccccacaccgctgatgccctgggcctcatctgttggccagggaagttcagtccagggaggagtggctctacagggggcaccctgggtggcttt

SEQ ID NO: 258711 - DNA, 498 bp, Homo sapiens
ccaaagagcaggaacttagattcatctccaacagaaattagctggcaaaacaacaatctaaacttagctgaaagggagaacacaggcttagtttccaccagattaaaaattaaaaggtagctttcaaagccaagacccaaaagaaggccttgagctcaaggtgtctgcccttatattagaagtataagactagggagacaaaataatctattttaaaaaattaaatacaaataaatcgaaaatgcattcaaatgtctccaagtggaaatgtgtctaagtatattaaatattcctgctttacttatatcaatcaagaaatgaggataaaaaactttcaagaaaagcaaagtgatttgagatgccagtaatacaaattaatctcttgggttagtaattcagctgaaagtgtaacgacaataacaaaatgtaaattcaaaggaaatttaaaagcctgaggagttatttcagtggaaattcttaataaaactattatattat

SEQ ID NO: 258712 - DNA, 481 bp, Homo sapiens
ggtggggaaagccttaacacatcctgaaaaggtgcaaacaagcactagcacggactggtagtccacagcatggacagttctgttaagtctgtaaccacgcttttacaaggcatggcttctacttcccgaattcctgggggccaagtgggcccctgttgcgggttgttttgagcacaggttaagcactgtttacaaatggctcaagtgatggcagagagccgtggcacatagaaatggcattttagtaacgtttctagtgccattttttccatgagttccttgatgaatttgctttacaaacatatgagcttaaatctttgaaatggctaatctcccatcgaagaatttccaccaccctccttgaatatatttttcagcctcctgggcaaaccagggtctttcatttggtgtataacttgggttttcttggagaggaggttctgggaggagagccatagctaaggcttcctctgatttaaaa

SEQ ID NO: 258713 - DNA, 494 bp, Homo sapiens
gcacgagcattatcttgagcatatataggttgtaaattaactgtacactcacataatctcttgttgggagaaaattgcataagtacctggattgtctcaagattcaatcacagaaacttctaagcagacataattagataagtgagcagtgcaagggagtgcctgggggaaagaaggagagtaaaggtcattattttattattaacaagaaacaggcaccaaataagggagggaagtaaaaaagaaaaaaaaaggacaaaaaaaaaacccttaaaaataggttactcggttacaacaccactagacttggaaaagttactaattgtcccctcagtccataacagatcattcgagggtgggagatggtggaagaatgaggaaacactggaagcatttgtgcaaaagtcaggaacattgcaaagatacccactggcgtgactattatttaacattgtactaaagggagccagctgagagagatactagaagttagg

SEQ ID NO: 258714 - DNA, 511 bp, Homo sapiens
acttgtatatcaatgttcatagcaacgttattcataatagctaaaagtggaaacaacacaaatgtccatcaactgatggatggatacgtacaatgttgtacatccatataatgaaataccgtttggcaataaaaagaatgaagatctgatacttgatacaaaatgaatgaaccttgaaaacattttttatgtggaagaagctagtcacaaaggactacatattgtatgattttatttttatgaagtgtctgaaataggcaaatctacacagatagaaaacaggactgggagggagtaggaggcggttgggggtgatggctaaggcatgtgggtctttttggagagtaatgaaaatgttgtaaaattgattgtggtgatggatgcataactctgtgaatatattaaaagccattaaattgtatacttcaagagggtgaattgtacagtaagtgaattttatctcaacaaagctgtttatgaaaatcaaatgaactaatccttagagaaatgc

SEQ ID NO: 258715 - DNA, 471 bp, Homo sapiens
ttctgccctttctccttcccaaggtgcttatcactcagtaaggatgactgcacacctaccttacaccaggcaagaaggaagccagaaatactgatggagctttctttggggaatccaagtgggaacctgggggagagggaaaaggggaggagttccctttcttccctacatagctccctactgtccagtttacaacataattggctagggaggctggactagagggaagacacttctacaaattacccagcaagaactgtgtgttaaggtgggtgtggtagcgtgcacctgtagcctcagctactggggaggtggacgggggtgggtgctgagttgggaggatgttttgaggccaggagttgaaggctgtagtgtgctgtatttgtgcctgtgaatagccactgaactcctgcctggacagcataacaagaccccatattttttaaaaagttagaaacaaaagaagaagaa

SEQ ID NO: 258716 - DNA, 123 bp, Homo sapiens
gcagcaggtggtaaagaagtatgaactgaaactgccatatggcggtgtgaaggaaatgtttctctccagagaaatacttgaaagtgtcataaaaacagtaaaaacatttaacagctcaaaagg

SEQ ID NO: 258717 - DNA, 361 bp, Homo sapiens
tatcttgcaatacaaactagaaagaagttatctgtgaaattattttttgttgtgtgaattcagctcacagttaatccttgcttttgattcagcaggttggaaacgctttttttgtagaatctgcaaacggatattttggagcccactgaggcttatagtgaaaaactgtatagcctatgacaaaacttttgatgaaaccatgtgtgaaactactttgtgatgcctggattcagctcacagacttaaaccataccattgattcagaaggtttgaaatgctctttttgtacaatctgcacaggaacatttcaaagcacactgaggcctatagtgaaaaaacaaatatcccacaataaaaacta

SEQ ID NO: 258718 - DNA, 574 bp, Homo sapiens
gtgtgtgtgtaatataaattcatcccaacaaataggtcaatttgcttattaatattccctttcatgtttgagaaaaaaacccatgaaaacttaattcagtgggaacagaagtgaggaagcctgttggggtaagttactattaaagaattatttaaatgaaggctgggggcaaattgtctttctttctttaattccatgagcctgaatggtctaaaagatcttatttgcccaaaatagaggagctgaccacgtagttcaacaaccaacttctgttttgtagtcttcaaaaaaatgctgggtgattaaaatatgtgtcatcatgagtgcagggcaggaaaaggcaactcatataaaatgccagcttgagactactacacggaagttgcacaaccatacacttaaaatctgaagtgtatatactcactcctgatggctgtgagaaaaagtgaaagcataagtcatggatttgagaattttaaagttcttaaattgcatgattaaattttatcagaaataactgtattgctctcataaaattgttttaattaaaacctaatctatactttgtattact

SEQ ID NO: 258719 - DNA, 445 bp, Homo sapiens
atgtgggtactttgcaattgtgtgtttgtaactggagcaattgatctatattacaatctagaaactgaccactttggcaatttaaactgtttttactcctgcttctcagataaaggaaaagcttatttttaatagcattttccaggatttacgtagctaacccaatatcacaggaataagatcaccagtgggctgaatcttagaggtctaggcatcccattttgaccccagagtcatgctgaaaaataaaggttttaaaataatatattaataataataagatagctatgatgttgtgagagctataagaaaaataacagacaataaataggactagaaaacttccatttctgaccaggcgaggtggctcacacttataatcccagcactttgggaggccaaggtgaaaggatagcttgagcccaagagctaagagcttgagacc

SEQ ID NO: 258720 - DNA, 264 bp, Homo sapiens
ttcccacaatgagttgaagattgtgttattcacatcttaactgataaattagtagtaagcagtaaaagccagtgcaaaggtataaggcaaataaaaatgtttatttaactgtttgttttctcttcctgtagagatataagtgtgtctaattttggtgctttcttgaggaagcatagtgatagataaaaccatcactctttttttttaaatgtcactgaaaaaccatccatgcaaatttgaaggaaactcaacagaaatgttaaa

SEQ ID NO: 258721 - DNA, 467 bp, Homo sapiens
ctgctttctgtgctgttctcaacaccagggtcctttcctccagaagtgggacctcttaagtgtgagaaaagaacttgttcttttaagatggtacctgaatgacttttgaaatttaattagaacctgtagtttttcaaagcctcctgttatagaccgaatggtaccctcctacattcatataccgaagccctgaccctggcgtggctgcatttggagatagggtctctaaggaggtgattgaggttaaatgaaaccataagaatggagctccaatccagtagtgctggtgtccttgcaaagaagaggaagaggcatcagagatgcacaagcatggagaaaaggccatgtgaggacacagcaagaaggtggctgtctgcaaacctggaagagtgtcctcactagaagccatccatgctagcaccttgaactccagaaccatgagaaaataaatttctgtttttaagcca

SEQ ID NO: 258722 - DNA, 435 bp, Homo sapiens
attagatgatgtgagtattgcattcctcctacagttctttgtgattgtgctaagtgccaggctgggattcaaacatgagaattttgattcaaaacctcatcctctttcctgtttactatgcaatctccaagctataaatatggaaatacagaaagattaaacatttgtgataaaactgtgctgtcatttttatattccctgaaaaactgatctacccatcctcctttactcccttgccaggcatcgtgccaggtgatgggtgcataatgaagaacaaactagccagagtcacaccattatgggcatgagaatattgtcaagtggagcaagactggcatcaaacaaatagaaagcaatatgtagttaaaatgtacacaaagtgctaggagggagaacagaggtgctaagaggtatcattaaagggggccgacttaa

SEQ ID NO: 258723 - DNA, 511 bp, Homo sapiens
actgggcatctatccacagagcacatagctgtacccgtagatgactccccctccccaggtcagcctgcgatgtttccccttagtcctcatgcgtactgagcatcacatgggctgcttgggagaggtggagataagggaggggggctggttcagaacccaggtctccattcagatcctggctggccaacaccctggggcagagtggccacacccctggtgccacagtctcctgtcttggcctccctgtggccaaaatctacccttggccacctcaagcatggtagtgaggagtcagtgagctatagtacagcaggagcacccagggcctggcatgagctcaattctgtatcactgactcaggcctcctaggagccttggagcatttagtcagtcaagtgtcacaaaagaatggaaagtgtcagccctctaggagttgggggtggtctggaaggagaaagctcttccaggcagagtggggcttggctcacacatcattgctggtggttggatg

SEQ ID NO: 258724 - DNA, 506 bp, Homo sapiens
atatcaactaatcatcaagtttgccaaagcaaaaaaaaattgaaatataattcctagttaattggtttaccattcattattacttctctttgaattcagtaacttatcaatgattaaagatgtgcttcaacaagttaattctttaagttcaaataactggaaaccattttctcaatggtgcagcatttcttaatgtcagttcaagatgtttggagacatattgctgattttagaagctgatgtgtgctgatttatgaaggaattgtttagcttgtactctgggctctgatcaagggagatacactctcagatacagcctggcatttaagggtacctctttcctagctgattatctgcttcctgagttcagttgtaatagcttgcgagcttctcccatcccatatgactggattctgatttcttattttctgatagcagggtaaactttgttctcccttattactaaacgttgacttgacaaataaatagacctcctgcattttaat

SEQ ID NO: 258725 - DNA, 709 bp, Homo sapiens
gggtcatgggggcagagctctcatgaatggcttgcagctgttctagaggtaactgaacacttgtattaacagtagtgagttcttgctctcctgagactggattagttctctgggaatgaattatttcccacaagagttggttggcattaagtgagattccttctcctgtttgatccctctttgcacgtgtctgtctcccctttgtgcatctcaccatgttatgatgcagcatggaagcccttgccagaaaccagggccatgcccttgaacttcccagcctgcagaaccatgagctaagtaaatgtctcttctttataaatcacccagtctcgggtattctattgtagcaacaccacaaaacagattaagactggtcctaagacataaataagagaccagatcaattgctttcatgctttaatcctgtgacaagcttacagtaagctacaagatatgcaaaacaggcatgagactgatggtgctcagagactaatcatgctctggcagagggaaatttctttccaaataattgaatggagataccagttgttctgaactactgggcaagatgttgttacttgctgtgtaaggaatatataattcagccacacatccacttgcaggaaagagctgtctgctgcttgcttgttgaactatggaagcagaatgatatggctatccacagaatggttcctgaaaaacaccacat

SEQ ID NO: 258726 - DNA, 817 bp, Homo sapiens
cggggaaatttagtatgtccttaatttttaaaaaaatcaacaagtctcttatactaattgagataagtataaccaaatgaggaaagagattatcgttaagaatggtaagcaaatttaatttcctatgacaaacataacttaaaatattcagtggacaaacattaaaaaatgatgtcccataaatgtaggctcaatattactaaaaaatctgaatattactggaaagttactttccctttcttgtaatagattttaatagaaattcaactttatgaagtaaaaatacataaaggcttacctcttattttatggtaactatgcaaacatctattaacttttatggataattctttttgaacaaaactaatctcatattttggattcttaaaatggctttggtttcaactcgttttaggcaagcctgatcaaaacttctcaggttttatttttaatttgtgcgataggattattatttttattttgtttagctgtactaatcatttttagaagaaaatgttcctttcttgataaaacttttaaaaaaaatacattttgtgcagagttcttaatttccataacagcccacctgatgtgtaaaatatgttggtgcacagtaaaatttcacagtgtgtgctttcctgtccttctttttcctggtatagttggggtgtaacttgacttagacactactaattgttataaacctccagtacccttgatttgccaaataagtttgaagaacaaagtgtatcattttctgttaccttaactctcacaatgctgtatcacataataaagcctcaacagacttggatta

SEQ ID NO: 258727 - DNA, 315 bp, Homo sapiens
atctatgaaggagaagacaagccctcaccagacaccaaatctgctgatgctttgatcttggacttcccagcctccagaactactatcgatttacagcaatggattggtcaaggaaggataaagaaacttggaaagaactatcatgatacctgccctgagaagccaaaatttggtttaactttgtgttgtttactgtttggttctataaaagctaagtttataaaatattgtatgacaggtgaatttaaatgttactaaccatcttggatgtcctgctcttctgctgtacagcaataaagtctctctaaatgcaat

SEQ ID NO: 258728 - DNA, 230 bp, Homo sapiens
catgagcgtggaagaaatttacaacaggacatttgttgagcaaacacttacctgtcacctgttctgtcttagttctggctaagaattggtggtctaaagatgagccaggctggggcagtggctcacatctgtaatccccagcactttgggaggtggaagtgggaggaatgcttgagcctgggagtttgagagcagcctgggcaacatagtgaggccctgtccctaaatac

SEQ ID NO: 258729 - DNA, 387 bp, Homo sapiens
gaggattaacactaaggctctgtcccctgatttccatcccagtggtctctttccagcacacaggctgtgccacagattttataggcatctggaattttgctggcagggttacttctaagaaatctttcggtggaatctctttaagtggcccctggaatgtaagcactatgggcagtctgtagtgacccagagctccaaaacagagtttctaaacaggcatggcagcaaatcccagcaacatcaggcagatgctttagacatttaaggatctgcagatactgcagaatccctcagttgtgtggtcagcacattacaactcacataactgtaaaattttgctgcaataaaaattatttttataataaaaaacatactgttataaaagta

SEQ ID NO: 258730 - DNA, 448 bp, Homo sapiens
acatacactgaagcactttttagtgtgctctatcaattgaatattatagtgttcatattggctttttataataggtatactactattattgatattaacacaataatgtgttcaaactattgaaataggattacttaaaaactgcgttaatattcaatagcttaaatctgaattgtaattacttttagaactttatacactaagtgatttctaaagtgactaaaatagggaagaatatttcttgttttgaaggagcataatgatttgcaaatcatggatgataggttcaaagaaaaataattggttgaaaaacaaactgttgggtaccatgctcactatctgggtgacaggatcattcatactgcaaacctcagcatcatgcaatatgcccatgtaacaaacttgaacttgtacccctaaatctaaaataaaagttgaaattattaaa

SEQ ID NO: 258731 - DNA, 488 bp, Homo sapiens
taaagtagaataggaggcagaagaggagaaacagtcagaggaaagtgtggctacagaagaaaggcacagagatgccatgtggtggctttcaaggagaacgagacccatgagccaaagaatgtgggtgccctctggaagcaagaaaagcggttctcctctagagccttcagaaaggaacacagcattcctgacaccgtgattttaacccaatgagacccgttcgaacttctaactacagaaatgtaaggtaataaatttgtgttatttaagccactaagtttctggtaattcattaaaacagcaataagaaactaaaaatatgcatcaaatcaaaatctctgaatataagatcaaggaatgtgccttcttatcaatttcccgggtgaatcttttgtactctaacattggaaaacaactggtctcgagcagtttaaaaaaaaattgaagatattttaaaggaaagataaatttcttacctttataatgta

SEQ ID NO: 258732 - DNA, 390 bp, Homo sapiens
agttaccccttttgagaaatctgtgctaaaaggacccaaacaatgctgatgacaatgatcaggataataagtacgctgggaagagaacaaaatgatttagatcttagacaagtcattctaggtgtctccactgtttcagttctcgcgttcgttcattcttgtgctttttcgttttaccaaataaaatagccccttgatgtcatatgaatccacgctatgcttaatgagtattggttagtaaaatgcctataactagtaatcttcatctatgcaattaaatattaattcataaaacacttcaaatgtaaacaataattagtaaatgaaaagtacataatacctcgattagaaaaaaatcactccattaaaagacattatttgtgtgataaa

SEQ ID NO: 258733 - DNA, 554 bp, Homo sapiens
ttcatcattgaatgattgacaatatttatgtataaacttgataaagatcatttgagaataatctttgttttgtgttactgtagctacataagagaaagaaattgtatatattaaatctctcattgtatctagccatagctaaaataactgctttatagtgggaaaaaaaaagattattttattttggaaataagtacattttcaagtttgaatcaaaacctttcacacttactaaaatatatctgtacacacaaaaccccagagtaaatattcacattcatgtcacctccctataataactacatttactcatatttatttctgtgaataggggttctggaaccattatagtagctaaaatgtggtgcaggagataagagtgtttaatcaaggttcacaatgatttgcaatggcaggagacagtttgtggctagagataacattcagcagcacgtgtttatgagtgagatggacacctgtctgatagtaccatgagccagcctgtgtgctttgctgatgcaggtagtgctgaaagcattaaaattgtgcagtga

SEQ ID NO: 258734 - DNA, 249 bp, Homo sapiens
gaggggcgaatgaggcagccaagtgggagggggtccctggaaaaactccaaccagcctgcacactggggtggagccttgggaagttcatgccatttgcaacagggaggtgcctgactccttctctctgtgtggaacctgggattcaagttgcgagcgggaagcgctctagcagggactctggccttgtgagagtccctgtttcccccctttctttctttacatccaataaaaccctgtcttaccattca

SEQ ID NO: 258735 - DNA, 392 bp, Homo sapiens
gaccaaaaacccaccaattccggacacagtattagccgactttcccattttcccccagtttcatgaatatgaagtggatggtacatcactgtaatttactctttcctagaattttaccttttccctgaattttacttattcaaggcttttaaaattctctaaaccagtattgttcaatagaactttcttgccagggtggaaatgttctccctttgatgggtttctttccactttagtgagtcctctaaactgccatccattttcctacaaaggaaatctgatcatgtcaactaaactttaaaatgtgacaaaactggaaaaagtttagattatctgtggtttatttattgcctacaggctgcaccaaattataaagcttggaccacaagggt

SEQ ID NO: 258736 - DNA, 647 bp, Homo sapiens
ttcagatcagttaattactggtatgctgcccctccccagtcaaggatcttttattaccctaccatagaatcacatttctttccttagtgcacttctctcacttgagaaatgcccccattaatgttattacttgattaatatcgacctcccttttctccttccagggctgaaattgtgtctggttttgctcatcatcttatagcatatagcaggagtgtaataaacaattgcttaaaaaaaaaaaaggaagcaggtctccttggaagaatggctgactccaaggctggggcagagaaggcgtaaggtcctgccatgagatgatacagcaaggaggccctcaccacatgccagccccttgatcttggactacccagcctccaaaactactcctgcaagatgagtagtcagtgacttcctgagtagaaatcaaatgatctacaatggttttaaaaacagagaacagaagagtaaagctgaaaaatactttgtcactggccaggtactccctttagaagcaggtcacctgcctgtggtcccagctacttgggaagctgaggtgggaggatcgcctgagtccagaaagtcaaggctgcagagagccacattcactgcactccagcatgggtgacagagggagaccctgtctc

SEQ ID NO: 258737 - DNA, 518 bp, Homo sapiens
ttcagatcagttaattactggtatgctgcccctccccagtcaaggatcttttattaccctaccatagaatcacatttctttccttagtgcacttctctcacttgagaaatgcccccattaatgttattacttgattaatatcgacctcccttttctccttccagggctgaaattgtgtctggttttgctcatcatcttatagcatatagcaggagtgtaataaacaattgcttaaaaaaaaaaaaggaagcaggtctccttggaagaatggctgactccaaggctggggcagagaaggcgtaaggtaagtctgggccaccttgttgtgcctgaaaatgggaaaatgctcagagtgaggacaggtcaaaaggaaaaaggaatcagcctgaggagctcccactggtcagatctggagcaattcagcatcaagataaagactgataataacagattataatccattaaataagaatctaataaagggggagaaagctctcagagtgaaacgacagctgatg

SEQ ID NO: 258738 - DNA, 371 bp, Homo sapiens
tctccctcactctctcttgcccttccaggtcctgccatgagatgatacagcaaggaggccctcaccacatgccagccccttgatcttggactacccagcctccaaaactactcctgcaagatgagtagtcagtgacttcctgagtagaaatcaaatgatctacaatggttttaaaaacagagaacagaagagtaaagctgaaaaatactttgtcactggccaggtactccctttagaagcaggtcacctgcctgtggtcccagctacttgggaagctgaggtgggaggatcgcctgagtccagaaagtcaaggctgcagagagccacattcactgcactccagcatgggtgacagagggagaccctgtctc

SEQ ID NO: 258739 - DNA, 523 bp, Homo sapiens
  misc_feature (23)..(23): n is a, c, g, or t
  misc_feature (76)..(76): n is a, c, g, or t
attcctctaccagattgtatatntgaagccagtgtctttccttttttgttttaagatagagcctcgctctgttgcncaggctgaagtgtagtggcacaatctcggctcactgcaacctctgcctcccaggttcaagtgattctcctgcctcagctactcgggaggctgaggtgggaagatcatttgagcccaggaggttgaggctgcagtgagctatgatcttgccactgcactccagcctgggtgacagagtgagaccttgcctcaaaaagaaaaaaataaagaaaagaaaatctgaaagggaaagcaggcatcaacttccagggatctaataacttcctaacttaaagcaacagaacttacctaacttttggacttttcattttaaaactttgcctctagcagtggacactgtcctcaacacagctacagtttatgtaacacagagtccatattatatggggcatgtctgtatcaaaatgtcatatgtagaaataaagtattaaatattaaagtggcataa

SEQ ID NO: 258740 - DNA, 354 bp, Homo sapiens
agttgcatctgatgttctatgtattttttgaacgatttcttcttatttgaaaaaatctttctttgaggccaggcacagtggctgatgcctgtaatcccagcactttgggaggctgaggtgggctgatcacctgaggtcaggcaggagtttgagaccagcctggccaacgtggtgaaaccctgtctctactaaaaatacgaaaaagtaactgggcgtggtagcatgtgcccttaatcccagctactcgggaggctgaagcagaagaatcgcttaaatccgggaggtggagactgcagtgagccaagatggtgccattgcactctagcctgagagacagagcaagactccatctca

SEQ ID NO: 258741 - DNA, 206 bp, Homo sapiens
agctatgaccccccttcttcctttcccaattaaacttcttgaaacacttgtcttcactgaccgtctttgcttcacagattccgcttttgctagatcaacaatacatcttgtttgtttttgttttgttttgagatgaggtctcgccgtatcactcaggttggaattcagttgtgtgatcacagctcactgcagccttgacctcctgg

SEQ ID NO: 258742 - DNA, 408 bp, Homo sapiens
caaatgagctgctttgctatatgcaataagtgtgtctgaaaaaccactctttttgctttttggttaaaaaaataatatttcccatttcttaaaatgtttgatgtttcagtaagttctatagttaatttttgttgaaacccacaaatggatccatgaaaaagatagttcactgattatctttggtggtgaggggcctctgagaatttcaaatgagatagtggaaattgctttgaaaactgtaaagaattatacaaaactaaggtactattttgatttggtgacagtacaaagaacagcaacgaaaatatttgcattttggtcttgtctaaagaagtgcacagatgttttgttgggatgtattgaaaaggaggagtaaagaaacacccacctcttaaccccacgaatgag

SEQ ID NO: 258743 - DNA, 349 bp, Homo sapiens
agaaaggctcttaagcccaggcctttttgcctcatgtgcagagtattaataacagccctactgatgtgaacctcaaggaaggaggctattaaattaatccatcactggagatactaatacctcaaacaattaaaacactgaagactctgctggttgccttccacattgtttataacctttttaaattcagtcatttggatcaagagaaataaatggttggtttcatatggcttttgccacattagcacagacacatctaccaaatgtagaagtccagactgagtggatgcatgagagcaaacagatctgtaatatgattgcatttaatcaccgcccgcccaaattctgt

SEQ ID NO: 258744 - DNA, 212 bp, Homo sapiens
cccctgcccctctgagcctcagatgggacgctagaccctccctgattatagtctgcgagacactgaacctggactcctggtctatgggagctgttttaagttttaagctgttaatttttggtaattagttatgcagcaaatggctgtgttgttattcccatccccctcttcccacctgtctcctttaaataaaaaccagcatttcaggtctg

SEQ ID NO: 258745 - DNA, 278 bp, Homo sapiens
cctgctcataaccctaaacctagcctgaatcctagccgtagccatcacttaaccctaacttaactctagtcctatccctaaccctacccctaaatcaaatcctaatcctaaaaacagccctagcttcaatcctaactctaccataagccctactctagccctaaacctaatgctaaatctaagtgaggtttgcaaaatgaacccggtgaagctgatactaaactttcctcttttattctgttgcactcaggccaaatgagtcttgaggagttgggaaa

SEQ ID NO: 258746 - DNA, 338 bp, Homo sapiens
taaggacctgcaaacagcctctaggagctgacagcaaccctaattaacagccaccaagacagggacctcagtccttccaccacaaggaactgaattctgccagcaacctgcatgactttagaagtggattcttccttagtcaagtctccagaccagaatgcagctcagctcaactcaagcatgttgtacttggactttggacctacagaaccatgagataatgaatgaatgaatgaatgaatgaatgaatgttactttcagctgataaatttacggtaatctattatgcggcaatagaaaaccaatatagattctaataaaaagatattttaaaaatc

SEQ ID NO: 258747 - DNA, 132 bp, Homo sapiens
ggtgaatgggtttgggctgtcatcttcagaaactgatttcatctagaacagtttgtgacgggcagatgtggaataaaaccactggatgcatcaggcgtcactgccaagggtgcaaggggctgctccatgctg

SEQ ID NO: 258748 - DNA, 452 bp, Homo sapiens
aatcccacacacttaatagaaatttacctcacagttctggaggctgcaagtccaagatcaaagtaccagcaaggtagatttcatcttgaggccacttctcttggcttctaggcagccaccatctccctgcctgctcacatggccactgggagagaaggagagaaagagtgagctcccctgtttcctcttcttaggaggacactaatactatgggatcagggaatcttctttctttctttctttctttcttctttttttttgagatggagtctcgctctgtctcccaggctggagtgcagtggtgcgatctcggctcaatgccagctccacctcccgggttcacaccattctcctgcctcagcctcccgagtagctgggactacaggtacctgctaccacgcccggctaattttttgtatttttagtagagatggggtttcaccgtgttagcc

SEQ ID NO: 258749 - DNA, 346 bp, Homo sapiens
gcaatagaagagatcaagccctggacaggacattggattggatgaggccattttggcccagggactgtatgatttttagggtcagagggacccatgctgaagagtgtagatggccaagtctctggctactgactgcatccaagttcataaccacctgcatctgacgacagaagtactgaccgcaaagaagagctcaacatctgcacacatcccactgtaaggaagtagactaaaagacatgcatttaaccagtaaaacttttcagggaccccgtaaaaccattatttttctgttgggctgtcctaactcagaagaaacaataaagccacagcatattcaagatcat

SEQ ID NO: 258750 - DNA, 353 bp, Homo sapiens
tttttagctggtgataaatgaagtagctgaaattgcaacatatgtatttggcttacctatgacacaaatctgatagaagcattttctagtgactagatgagaggatgtgacaaaaaatcagatggactgtctgagatcccctacttccaaaacatacctcaggtttaacatgtgtgtaggatgagagcctggagagagagaggttggaagtacacttaatagaataagctgaattgtcagaggggaaaataaaaatgcgttgaaaatgtaaaagcactgtcaaaactagctatattgaaatttagatcatggttctatgaacatgtgtaaaaactgcaaagtttcccaagatt

SEQ ID NO: 258751 - DNA, 478 bp, Homo sapiens
tctcgaccacccccagctcacacacccctgcagtgggacatttcccagaataagggagcagagctcgcgagctggagtgacagtgccctccactgccagggtggctctcaagcccagggacggcagtgggccctgagatgcggccccttctgaattaattcttggctatctgtgccagaccctgcttaggagcccaaagctggggagaaagcatgggggttccaggacttgcccatcctgtggaaaggtgggtgtggtgccttcagccccactcttggtgtggagggcactgcaaggcactgaagagttggggctccagaccccactcagggagcctccagatgagtgttctagaaacctgcttccactccagctaagcttgttttcatttacatattcattatgtcatcacttatggtttgctcaaaccctttctgaatgagatggacctaatttaataaaaattacactgacaagt

SEQ ID NO: 258752 - DNA, 110 bp, Homo sapiens
ttaaagagacagagaaagagactcagagattgagactgagagcaagacagagagagatactcacagggaagaggggaagaggaaaacgagaaagggaggagagtaacgga

SEQ ID NO: 258753 - DNA, 685 bp, Homo sapiens
gagagagagaactgcaccccgactcccagaggggctactggacattctcagtgggacgaggatagggaaccaaggaacactatatgcatggaagagctcagaaatacactctcggcacggcgggaccccgagtctctgacaaagtaccgggcagggacagggcgggggtcagggagcctgaacccacactgcctctcctgcaagggggctcaggagtccatagccttttggagggagttgggtctctctgggagtgggggcagaggctggattctgcccacaggagacggccagacagctattgtactgctggctccaagcccaagggtccacccttagcaaggcattcattcctcagtgtgcagaacacccctcttgagggtgaagacagaaatcacaccctaccctggaaggaggctgagcccagagctttgagcattcctgctgccggggagctttatacagccccaccctccaatacctcgccctctagggactcctccctcttcctagcccttgccttccctggggggctgccctcagcccagcctgctcaggagttcccccacgctatcccctaagcctggagaggaatttcctgtttgcttgtcttgctcagggtggtggctgaccacagagaacagtgcaatagcatccagtggaatgagtgaatgagtaccgtgtc

SEQ ID NO: 258754 - DNA, 484 bp, Homo sapiens
cagggccacacagaggaagtgaccaggatttgagcctgagtctttccagccttctgcaccatgatgccgtaagggaaaactttatatatgtgaaaacagctccacggccccctcagtgtcttctcttccccacagaaaacatctcctaggcctcagggtttcgttttgtgttctgccaccatcctggcccctatcctcttgacaggctctaatttgttactgtctctcttaaataaatagcttgcagacttattccagctgtcttctgaccagtgcagaataggaatgcactctcacctcctttattctaggggctctgtttttgctaataacacctaagatgatgtggcccttggaccattcacattatgctgatggctctctcatacttaatgatcttcaatctgcaagaataacaagagcctttgtgctctgaacagctcgtagcagtcattgcagatcttcatttcaggtaatagaacct

SEQ ID NO: 258755 - DNA, 991 bp, Homo sapiens
ggtcagagtggaaatgtaaaaatactaattagagaataatgtgaatacaacaggaatcctgttggtattctatttatattgtaagcagcagttcaattgttttgtaaaagtaatttcaattttaatcactgaactaaagaaatgggcaaggctgacttccgtaatataggttctacctaaccatctctaacaccgctgtcaaggaggaccagtgttaaggtacattactaacaaccacacaaatttttaaaagaaaagaacactcttagcagcctatggtactttgaaatgaaatattgcctctcattctcacttgtgttgccattccaaaagtatgaatttgctgaggtttatattctgggtattatataaccattggttctgtttggcataaccctattaaatggtgcgcagagctgaattacctacagaaactttctggtttaattagcataaattggtataaatattagtgagcccatacttctgtgatataattaaaccaacttaatgattctcacataaggtgtcaatttattttactaatgcattcataatctatgctttgtagcaacatttttcaaatgtttaaaatgctaaatcttctcaattttccaatcttttcttgaatctattagatacctatagtgtagttactgaatagctgggaaacaaatacacctagttagaaatggcactgctttataaaaggcactagagaaaagacgagactattcctatatttaaatgctgctggcaagtgaattcctttgtatataaatgaaagataccattcattaaaatgaaagacttgttttaagtgtgattcttacatttcattcatttatgatagagtaaatggctttataattactttaaaatttaactcactagtacattaaatctgttcattgcaagattagaatcaactgtgaggggaactaatttaaacaagcccttccttagtcttattgagtctcatatttgctga

SEQ ID NO: 258756 - DNA, 405 bp, Homo sapiens
aaccaatcaattatactggaactctatatattgatacatatctttactagtaaaacaaacagggtctgatatggtttggctctgtgtcccactcaaatctcatctcgtgttgagggagggacctggtgagaggtgattggatcatgggggcagcttcccccatgccgttctcatgatagtgagtgagtaacgctgtcaatgtcacagagatggttccttagagtttctccaggcccctctctacatgtggaggaatctaatcacagttgtcaactgaggcctggcctatgtgggcagatcctcgaatgttttttcttttctgaatattactttctttcaaatgctaataagggttaggcccaaagcattttgttgtgcccttcaaataaagaaaaactacaatgc

SEQ ID NO: 258757 - DNA, 389 bp, Homo sapiens
gataaattaggaaatatatgtggagggatgatggttttggatatgtagaacttgaagctctgtgatggagatctctttggatcaagtagaaatgtgttggagctcagaggtaaaggctaaaatattaatttgggagtaagttacattaagtgaaaggtgaagctatggggaagttgagaccccccaagggagaagtggttgaagatagaaacttaaaaaaaaatgcctttatttaaactttttcttgtattgatccagtgatatatgtaagcatggagcatggaattttttgaataaatcccacttgattaactattgttagctcatgtctcctacaaataaaatgaaaaggaaatcattcttcgtgtttgaatgccaatgatttggcc

SEQ ID NO: 258758 - DNA, 351 bp, Homo sapiens
tttttttttcatttggccttagctaggttcctgaattatttctttctttctcctaaataagtaataatccccctttccattgtgctcttattgctcttactttgtggagtgctttacaatttccaaagcatttttacaaatattattttatttgattcttgcaagaaaggatatatgccttctttgaaggcaagaaggacacatgctattatccgtattttacatttttacatatatttgtatggaaacttagaaagacttgcccaagggcacacagagtcctttctctgtccctttataaactgtgctgtcttatatgtgatttaatatcatcagcctctacagatctat

SEQ ID NO: 258759 - DNA, 421 bp, Homo sapiens
ccattctcttgtgtttctgtttctcctcggctgtcagcacttctctgtctcattatgtctgagctctcaccaacaggaacccacccaaaggcctgtctacatgttgcctggttgtcttatttaaagctgtattttaatttttaaaaatacattttttgtggggtgtgatggctaatgcctgtaatcccagcactttgggaggccgaggtgggtggatcacttgaggtcaggggttcgagaacagcctggccaacatggcaaaaccccatctctactaaaaatagaaaaattagccaggtatggtgacgcagcctgtaatcccagctgctcgggaggctgaggcaggagaattgcttgaacttgggaggcggggcccctgcactccagcctgggtgacggagtgagactgtgtctcaaaaaa

SEQ ID NO: 258760 - DNA, 374 bp, Homo sapiens
actggagaagtatgaggaaaatcaggagtgtatagttaaggaagccaaaggaagagagagtttgaaaaagaagggagtgttttatggttctgaattcagctaagagttcaagtaaaatacaaaaagattgtttaaattaaaaaagccattggattttgtaactaaaaagcatcagtggccttttagaagcctttttggtagtctggtagtttcaggagttcagtaaatttggttaaagagttaagtgggaggtgattggataggatcatgggaggtgggaggtcatactttcatgcattctggctacaaagaagagactgaagatggtatgtgaaggtggtattgaaatgggaaaagttcccttgtcccccttg

SEQ ID NO: 258761 - DNA, 281 bp, Homo sapiens
ggaggagatcctgggaagaagcattgcctccacaaccctttcaaccaggcaagggatttgtagagaagcttctgggatctctgaagtgtctacagtggttcccatcttaatggaaagtgggtgctcccttttcctgtgaagttatggggagagtggaacacagacaactcacatcgggaggtgcagccccaaaggaccacagcccctaggctggacaactccttcagtttgcccagccccatttgttggggctcctgttcttcctgggttacatgcccaag

SEQ ID NO: 258762 - DNA, 434 bp, Homo sapiens
caggcaccatctgccggtgcagggtcagagagacgcacgaggacttgaaggagcctctcaagaaggtgatgtgcaccacgtccctagcagaggagcagagagggctgagtaacccagcagcgccccctgccacctccccgtggggctctccctctgcctctggctccgggctgcccattggtgcggacactggacactgaactccctgttttgggattcatttggcagggtctctcatagtgtccccagtgtgtccggcaagcaccccagcaattccacacccagggacgtactccatggaggcagggcctcagctcacagagctgggggacagtccggggccctggcacttttgctcttgtcccctgcctccatagaaacatgaaaacccagattttacaactgcgttggtataaagatgaatatgacccagg

SEQ ID NO: 258763 - DNA, 673 bp, Homo sapiens
tgtagtacgtgctgcataacatacgtgtgcatgtcatcttatgggctagttttcatacagtcctctcttacacaaaaaagctgtatggaggtataattcacacacacacacacaccattttaaggcattgctagactcacatatatctttcaccttgaagatgaagcaagattccaaaatgtcagaaaatcttgaaagtgtcttagatacgagcaatatggggagagagccagcaactgagttattcccaagctcatttagtgacaaagttgtgggttggttaggcttgttagagctcaacaaagcacttagtgaaggaaatatgaaaattagaaaccactgtaggatataaattaagactatttggaggctagaaagatttggggattttttttgttgttgttaaaatatctagccaactcctgaaaaataatgagtggttgccatagcaactgtgttttcgcttgacacacgaaagaacatgaaaagcattggaatcaaggaaagccacctggttttagactttaattttggagaaacaaattcatccaaaatgatttataaaacaaaccctattttattttccttccaaaatgattgtagattttttaaatttttttaaattcaaaacattgagggtatctcaaaggaagtgaaaatacattcttttcca

SEQ ID NO: 258764 - DNA, 455 bp, Homo sapiens
ggtgctggttctcgggcagccagctgacccccggcctctatgcccaggccctgctgcacctgctgctgctgtatgggctggtggtgagcacagcactgatctggcatcccatcaacaaactggctgccctgttactgctgccctacctagcctggctcaccgtgacttcagccctcacctaccacctgtggagggacagcctttgtccagtgcaccagcctcagcccacggagaagagtgactgaggccctagggcatgggagaggagggacgcccagggtggggaggaagagtctgcaagcagggctgtggagttagggttcaccccaatgggaccaccctcctgggtcccctggtgccgtttttccttagaaatcagagaaatgggaaagggggggaaactgattttacacttaaataataaaatcctattagtaactctgaaaaaaaaatgt

SEQ ID NO: 258765 - DNA, 568 bp, Homo sapiens
gccaccatgtctccacagctatgcctcctacctggtgtggaaggacctgggagggggcttggggtggcccctggccctgcctcttggcctctatgctgttcagctcaccatcagctggactgtcctggttctctttttcacagtccacaaccctggtctggccctgctgcacctgctgctgctgtatgggctggtggtgagcacagcactgatctggcatcccatcaacaaactggctgccctgttactgctgccctacctagcctggctcaccgtgacttcagccctcacctaccacctgtggagggacagcctttgtccagtgcaccagcctcagcccacggagaagagtgactgaggccctagggcatgggagaggagggacgcccagggtggggaggaagagtctgcaagcagggctgtggagttagggttcaccccaatgggaccaccctcctgggtcccctggtgccgtttttccttagaaatcagagaaatgggaaagggggggaaactgattttacacttaaataataaaatcctattagtaactctgaaaaaaaaatgt

SEQ ID NO: 258766 - DNA, 483 bp, Homo sapiens
taaatttctcttcaataatcttactttgctgtaactttattttataataacttaaattttaaaaaactttttggttcttttgtagtaacacttagcttaaaacacaaacacattgaacagatgtagaaagatattatctttataatctttataagcttttttctattttaaaagttctttcttttttcatttatacctttttttgttgttgttaaaaacaaagacataaacttacacattagcctaggcctactcagggtcaagatcatcaagatgccactgggcagtaggaatctatgggccaccatcatatatgccatcccttgtttactgaaatgtcattatgcagtacatagctatattgcaaaaccattttaaataatgtgcatttgtagctaggtgttatctacaattagacgataatcctgaaggatcaactatataaatacgaaagacaagttctcaaaatagctatagtatttt

SEQ ID NO: 258767 - DNA, 426 bp, Homo sapiens
tctgctcaattctggtcaaggaggtgaagggaggtttccctttgagtcagagaatgtagtggataaaaaggacatgaatagctggggggatttcctgaggccattgtagaccagctcacacactgttaagaggctcattttcatgagacttttggttgcatttgtaacacttgctctaggtcccctagagcattgagtgccacatcacagcactacaataacaggactaaatgcaagaaggtacattacaaggttctttttctttcagctctgaatatccaggagtttgtagatgttctcaagactttttttccccttcgtttttccttctcccccaacccccacacactcccttcaaatagaactaagtggaaaggactgttttgtttttaggtaaaaacctaaattcttgtacttaaaaaaaaa

SEQ ID NO: 258768 - DNA, 660 bp, Homo sapiens
cagaactgagggttcctcccccttttagaccatgtacggtaacttcatgacgttgccatggcatttgtaaactgtcatggcgatggtgggagtcttttagcatgctgatgcattataattagcgtataatgagcagtgaggacgaccagaggtcactttcatcaacatcttggttttggtgggatttggccgtcttctttactgaaacctgttttatcagcaaggtctttatgacctgtatcttgtgtcgacctcctgtctcatcttgtgactaagaatgtcttaacctcctgggaatgcagcccagtaggtctcagccttattttacccagcccctatttaagacggagtcattctggttcaaacacctctgacaatagtaatcataacccaaacgtggattccctgctccataagcccttgcctccccctgtatcctcaatttgctgtcacctctgcccctagtgtagtggtggtggtggtggtaagggattttggtaggatctcatctcactgctacattaaaaacaaaaaaatatatatatttctacttgggaggctgaggcagtagagtggcatgaacctgggaggtggagcttgcagtgagccaagatcgcgccactgcactccagcctgggcgacagagcaagactccatctc

SEQ ID NO: 258769 - DNA, 307 bp, Homo sapiens
gaggctgcatggtagggtggaaaaaatgtgaaatttggagccggaaggaactgagctggaattttagctctgccacacacctagttgtataatcttgagcaagtcactttctgtttcttcaccttaaagggaaatcataacgaccattttgatgggacaataatacatatataagtatgcatgcatgtatatatatcagcaccatatataattcagtgaatggtaactactattatgaatagaattacctaacttatttgttaacaatgtaaataaactgaacaaacataaaatgtcaatttttaaa

SEQ ID NO: 258770 - DNA, 284 bp, Homo sapiens
cagttgaaatgggtattgagagagttaattgtatagtacctatcacagttatttctcattttgtactggtcccagctaaggtggagagattagtctgttatgtatgaaatgaagtaccagttgagccgaaaatctgaaatccgaaatactcccaaatctgaaactttttgagcaccaacataatgctcaagggaagtactcatcatgcatttcagattttagattttcagcttaaggatgcccaactggttaagtatataatgcaaatatttcaaaatgtgaaa

SEQ ID NO: 258771 - DNA, 518 bp, Homo sapiens
tttttttttacaattttgaagtgggcaaacatatattcaccataaaaattgaggaagtctttaaacttacaaagagctaaaataagtgcaactcggaactgcattctgcaattcaaaggtacgtacatgtaaatacattcatacacaacaggaaaaaatacaaacagaaaacaaaccatgaagtgctttaatggtgttctctcaaaaacttacaggttaacctttcataaaaaaagggtggggggtaaagaaaaatgtttaaggattacttgaagcaaactacacagataatactaaaatccagcagattcatatgaagcaagagaaagaaaacctatgttcaaaagacacaaactatgcaacattctcattaaacaggcaagtatgaacaatccaatgaaacatgcgataaagcagatgatggtccattgaaaaagttcagtgcaggatatactaatcggaaaaaagcaaattaacggcagactaaggaattggctttatgaaatattgagataatg

SEQ ID NO: 258772 - DNA, 433 bp, Homo sapiens
acacaggaaccaggaagcaagagactctccttcaatgtctgtagcgccctctactgacaaagcctcagcatcacttgcaaaggaaaatatttaaagggcccagaactgttatttacagagccatcaaaaaggatgaatttggaagaggcaataaattggcaatgggcacataaggtcatacacacaatgacacttattgcaggatttttttgtaatgtttaagccctagaaataacttgggtgttctcaataagagaatgattgactaaaatcatggtatacccatcccactggatattgtggcagctacttaaaatatatgttagagccatatcaagtgctctagaggggcttctgtgagctttggcaaaatgaaaccagaaatttcagaggaaagcctgggtgacagggggagaccctatctcaaaaaaat

SEQ ID NO: 258773 - DNA, 364 bp, Homo sapiens
aagaagcgccggcccgagctccgcgcggagggatctactacgagtcactggccccgtccgcatccttctccagcggccttaactcgatcagggctgcagcggctcgctggcttgaccagtgcagaaggggcgtggaggtgagcggggtggggtaggactctgaacttcaagcactggagtttgccgggatcgtgaacttgcagggagaggcggtcctcatccagtgaggtctgtatcgccacctacacccacacatccacacactgctttgctagctagaggaatgctctggagtaggaccagtgctgtcaaagaaggaaagtgggccaaggcgccaaagtccattaaaaaggaatagagccat

SEQ ID NO: 258774 - DNA, 286 bp, Homo sapiens
cttggctgatggcagcacacaaccatcccctcagtaggtaccaatactagccaatctggacccatgtgttcgctgctctctgaatctctcccgtgtgtatacaaagagacccccactggaccgtgaacccctggccagagacaagacttctgtcccattcctagggggtgcagagcactcttcttggcattgtgagcgatccaaaaggagacatgtccctgtccttgagctgcttgcaatctagttggtgctcctagttggtgcaccgggagacaaggcaaatgca

SEQ ID NO: 258775 - DNA, 207 bp, Homo sapiens
tgctgttcccctgggtgcagcgtgtccctgtgctcacgctctcagtccctctttaccttaggaagggacaggccttttcccagccgcggtggatggctggattggcgctttcatctcggttactctgtgtgtggtgtcctggaacggttgtgtgacagccctctcccctcaagagataagattaaaaaggaggatagtctgtaatca

SEQ ID NO: 258776 - DNA, 288 bp, Homo sapiens
cgtctggtcgtcgggttgaaggcgtctcttgctttaccgaactttaactgatcgtagtctcatttatttccttccgacctagagcacctcttatccagaagccaccacctgctgttgctcagtctgcccaggagtatagacttgtcggccaagcttcccctggcaacctgggagttgaagcaaataagaaaatttggaagcacctgctgaaggctgtttagtacccagggctgttgggagatttgccccaataatataaaagtagcctcctgggctttgtgcagagga

SEQ ID NO: 258777 - DNA, 487 bp, Homo sapiens
cacaccccgctgatttttttttttttttttttgtaaagacaggttcttgctgtgttggccaggctggtcttaagcagtcctcctgcctcagcctcctaaagtgctgggattaccggcatgagccactgggccctgcctggctgttctgttttgtatcaattaatgcagtgtgttttgtggccaatgtcctgggtgtctttgtagcttatggtgcacacggactcccattaccctaaaacacaagaaatcttgtgaacagccaacaagacctggcctcttccctccagaatgaattcacagcctcatcaggagtacatatgaaacagctagctcacaataagcagccgtgcatgactccatgctaaactgtgtggtgcaaataataaaagacacagtcatcaaaggagtcaaggacaatggtgtagaaaggtggggtatgactgtgcttctgactctaaggaagaagaaaggacattgcagaggaacg

SEQ ID NO: 258778 - DNA, 513 bp, Homo sapiens
ctcccatcttttctgattagcttcaggagagaaagaccttcaccagtaaacctggctagggattctggggatctctcagattttttctatggatgcacctgctccattcctcttgttccctcttaggggtaattcttaagattttgtgccttctctcaattctgaaaagacaagcctggtgccgagaaactccttttattttttctatggtcctgatgtgtttgaggttgagcatcgtcacctaatccaacagccaagccagctactgagctctgcatctgctgttgagatatgcatgctgtctgtggaggctcacatgtactgtgtgggataccatgcatgggtaagcatgggctgttggctgtggggatgatggtatgagaggtcctaggagaatgcattgacttgttaggtgagtcttcaagttttacaataggccttttgatggagtctgtaagctggttatcaggatctgttggtagctgttgaaagatacccatatcctcctggaaa

SEQ ID NO: 258779 - DNA, 465 bp, Homo sapiens
tggctaatttttaaattttgtttagagacaaagtcttcctatattgctcaggctagtctcaaactcatggattcaagcattcctcccgcctcggcctctcaaagtgatgggatttcaggatgagcctctgtgcccagcctgaactcctatcttatagcatagttcacatatacagctatgtgtgagtctgcatctttatctgcatctatatctgatgcgtctttcttagctccgttattcaatccatgatccttaagtgcatggtctggctaatatttatccttatattcatatagctcctagcacaccgtgtgactcataaaaacactcaaatatctgtagcatggattaataaatatgcttaagggttgtcatcaattgttagaggtgaaattaatttgttacttgcagttgtatgtaagaataagagaaacaacttgtcattttgatatcatgtagatgaaa

SEQ ID NO: 258780 - DNA, 304 bp, Homo sapiens
ttcttttttggggatttaaaaaatatttttatttgtaattgacacaaaaaaattgtacacatttatggggtacagtgtgatgtttccctctacacatactttgtataatgataaaaaatgactaaaaaaggtaatgtagataaaatgtttgatgcaaaaataacattaatattatatgaaaatatgtacattgctaaaaagtaaaagcactgatactcatacatttagatgggtcaaataatgcagcagaaaattcacagacaggctaaagaaatgtttgaaatgtgctcaagatcaataataa

SEQ ID NO: 258781 - DNA, 289 bp, Homo sapiens
caatgattcattcaatatttattaactacctactgtgggccagtgtacactccggacttgagtctgtagaggggcactcttattccaatcagtagaataaacgtggcgtgagctttacagtgttcctctgggtaaggcaagtaatgcttaagtagttgtacttttaatctagtgctaattaatggcctcttaaaagtgcagtgttgggtcaaatggtatttctagttctagatccctgaggaatcgccacactgacttccacaatggttgaactagtttacagtcccac

SEQ ID NO: 258782 - DNA, 420 bp, Homo sapiens
atactatgcttattcctgtgctttcattaataccctcatctggtacatgctttctatccagttctcacctgtttttccaaggtcagtttaaggcagatttgtaaagtcttctctaatctctaatctaaatctgacctcattttgtaaaaattcagtttattaatgtttattattagacactaagttctttatgtgtattaacttatttaaccttcactatttttaagtaattgcacatagtctgaatctgttcattcagaaattacatattgagcaaatactgtggatcagtggcagtttctgggttctcagtgacaaatttgtagactcttcatatctttatggaataagtggaccactggtgttaccaacctagatgatttcaagaaaagtggcaattaaatgcttcatttgtatttt

SEQ ID NO: 258783 - DNA, 472 bp, Homo sapiens
ttgtatttttatacctaggaaatatttttcctttttgtaagaatgataatgcagatgaactgttattcaacctggcaccaccatctgtactcaaaaagtcattatttccttacattttatagtttttttgtttaagagacagggacttgctgtgttgcccaggctggagtacactggcatgatcttggctcactgcagctcattcctgggcccaagctattctcccacctcagcctcccaagttgctaggactatctgaagctactatgcccagcttaatctacttttttttgtagaggcagagtcttcttgcctaggctggtcttagactcctggcttcaagcaatcttcgcacctcagcctcccaaactgttgggattatgggcttgaaccactgagccactgtgcccagcctatttttatagtttttttgagtctctgttgcccaggcgacagtgtgagactccgtctc

SEQ ID NO: 258784 - DNA, 888 bp, Homo sapiens
tgcttacgtcttatatttaatattttcacttcactgaatctgatcatcctagatctccttggtgtgaagcaggtggcttaaggttatctctttcactatttttttttttttttttttttactaaataaatcagtcaagagtattctgagtgggaaggctaaacaattagcatattgatgtgatgaaacacaagctctgttaccacaattgtctagtagagtggttcattcctcaagtaagtttatgcttttactattaaacttcactaaataaatagatgttgggtgccctcccaattaatattacaattatttttcttctatgagtgtttttatgtcctaagaacataaaaactaatatttaataagttgcattacatttggtaacaggaataataacaacaatggttaatagtcagcttatgttcttttctcacagagcttgcgtatacattttggttttcttctaatctgggataaaccaacatcttcaacaagcttaaaattttctagtatagaaagaacaatgagacacttttacttatattaaaatatgttgaagaagaaatacaaaataatcaaacacaagcttaatggggaagaaaacttttttcatacaatatgttttgaactggtcaagaataaaatactactgtttgtattttgtttccatggaaaagatgcattctctaatgtttagatcaaaatttacctaagagaaaaatagaacaattttccaaacatcagaaatgcattattatttcgatatattggtttagcaaaacataatattgacatatttttattattaataattaacatatcaatatatttttatcataattaacatattaatttttaatataaatttaacattaacataatatta

SEQ ID NO: 258785 - DNA, 871 bp, Homo sapiens
gaaatggggaagatggtctgttttgacagaaactgacaggaatcaatcaaaacaatcgaattttgaattgagtaaagtgcaatttcattggatagctaaatatctttgtaagatagagattgttgaaaattctatttttgtttttctagtcctttcaccccaggactctaaattattggggtaaaaaacagccttgcaagaaaaaggggagctatttttgctttttatgttttttattgttaaacttgtatccctttaaaaactgaaggaaattaaaaaaaaaaaaacaaaaaaacaaatctaatggtgcttttaccacaatatgttaactacattaaatgctaattaattattttctgttatcaaagcacatgactaaaatgaaatcatggtatctgttaattttataagctagaagtcactataatggattacgccaattctaaaaaattttacacctatctggcatcataggatttatcagttatcagacacctcattgtaccagagattgtccagaagttttaaagacctttgcatccctgaactgggctatgggaaataataatagtaataataataataataataatgatgaaaccaatactgacacaaatgctggtgcccattcagatcaagggtacttgttagggaaaaaaaaaaaagtttgcacccccaaacgtcctgtatcttatgaaaaaaaaaacaaaaaacaaaaacaaaaaaaaaacacaaaaaaccacagaaacaaaaacaaaaaaaagtgcaagtgatttttctaccagacagcgaagcacccctttgcttcccatgcgacttcaagaaggtttcctatactatacatatatatacgttctggttggcaagccct

SEQ ID NO: 258786 - DNA, 376 bp, Homo sapiens
ggatcccccactttccacagtagcagagtaggttggtgacgtgggggaggctgcaccgccttctgttgacgtggttggaggctttgtgtctggcaccgccaccaccgatggccaggcctgtgcctctgccggtgccagatcaagggtacttgttagggaaaaaaaaaaaagtttgcacccccaaacgtcctgtatcttatgaaaaaaaaaacaaaaaacaaaaacaaaaaaaaaacacaaaaaaccacagaaacaaaaacaaaaaaaagtgcaagtgatttttctaccagacagcgaagcacccctttgcttcccatgcgacttcaagaaggtttcctatactatacatatatatacgttctggttggcaagccct

SEQ ID NO: 258787 - DNA, 730 bp, Homo sapiens
ggatcccccactttccacagtagcagagtaggttggtgacgtgggggaggctgcaccgccttctgttgacgtggttggaggctttgtgtctggcaccgccaccaccgatggccaggcctgtgcctctgccggtgccagacacaaagcctccaaccacgtcaacagaaggaggtgcagcctcccccacgtcaccaacctactcgacacccagcacctcccccgcaaaccgattcgtcagtgttggaccacgggatccaagctttgtaaatatccctcaacagacacagtcctggtacctgggataaaagttgcagcgtcccaccatccaccagacagaccacctgaccccttctcaactctgtaacatggacgcaacctcaacccagcgcagttacaacttcactatcagcggaaggggagaaaaaccgattcaaatcaacttgtacatggaaacagcaagcattatggtcaaacagcaaaggccataaccttttgggattttttttttttttaaaatactttagggactgttgtaatttctcatatggtgctggaaatggttgggctttgtaacatttgaagtgtttccatggtagcgtgagcattaggtgacgtggctagcggaggactacccttggctcaactgacttcctgttgtaacacactttccttacggagcctggctgtttcacagtaatttcatgaatttacccacacaggtgtgatcctc

SEQ ID NO: 258788 - DNA, 227 bp, Homo sapiens
gaaaaaaaaaatgtctgcaaacttcccaagtttggagaaagatatggacagtagaaaaggtaagcaagccaggcacagtagcatgtgcctgtagtcccagctacttagagggctgaggcaggaggatggcttgagctcaggaatttgaggctgtggagcagcttcgattgtgcgtgtgaatagccagtgcactgcagcctgggcaacataactagactgtctctcaa

SEQ ID NO: 258789 - DNA, 631 bp, Homo sapiens
ctcagcctcccaaagtgctgggattacaggcatgagccactgcacctggccctagggaaaaacatttttaatttcagtatacagatggagaaattaggctcaaggaagccaagcaaattatgcaaaatcagcttgtttgtaagagatggggcctgattctgctttacttcaaagcccacatattgttaatcaccattctttccatattgtccattatattgttagtttttttttttttttttctttttgaggcagagtctcgctctgtcacccagactggagtgccatggtgcgatcttggctcactgcaagctccgcctcccaggttcaccccattctcctgcctcagcctcctgagtagctgggactacaggtgtccaccaccacgcccggctaattttttgtatttttagtagagacggggtttcactgcattagccaggatggtatcaatctcctgacctcgtgatctgcctaccttggcctcccaaagtgctgaaattacaggtgtgagccaccgtgcccggcaggttttttttttttttttgaaagaaggcataaagtgcttctgctcatcagagcggctgggatctcaggatagtgggaccattctcccacaagagatttttgt

SEQ ID NO: 258790 - DNA, 294 bp, Homo sapiens
ggcccagattgccttattccacctatcatggaataaaaaagaaatccagaaaaaagaaagaggctatgctgtgatggctgacagactctgaggaaattgcaaatacactgaggaccttggagagcagcctcagatgatcacttctgcacctgtcttcttggagaacaggaattttctgatctttgaaaaactacagattcatcgtccaagaaaacccagctaatttgttttcaatcagtttcaaaaaggcatattttcctgtaaactggcaatgtacctgggaagctaggacat

SEQ ID NO: 258791 - DNA, 471 bp, Homo sapiens
agatttcagatctgtatttctttgcaatattcttttcagtctcccggtcctccttaaactttactttccctctaggcatgtgagctcccttaaataatcaggcccagaaaagcatttaacatgtggcaacagtcacatctcactccctcttgagctaaatcactatctctccaagccacttgctttgcaggctctagactaactgatcccaagtagccataaaatgccatataccctatagttccacaatgtatagccaattgctaactaatgttatttctgtgaaccaatgagaattcttgacaaaaaaattttgtaattgttgcttcccctgattcatcttttttttctttaaacacttgagcatctgttttgttctccagagcactcccaaggcaatttggaagtgtttcctgggctgcagtccttaacctttgtgcttgaataaactctcttaaaatagactttgaa

SEQ ID NO: 258792 - DNA, 592 bp, Homo sapiens
aaacatttggctcatggttctggaggctggaaagtccaaggctagggcttcacttagtgagggtcttcttgtggtatcatcccatggtgaaaggcagaagggcacaagagtatccacaagagagcaagaggggtttgaatttgcttttataacaaacccattcttcagataactaatgcactcccctgataatgacattaatccactcacaagggcagaatcatcataatctagttatctcttaaaggtctcacctctcaaaactgttgcattggggatgaaattttcaacacaagatctttgggagacctattcaagccatagcaccctccaacaacaaaatgttaataaacactacatacacacacatatatttttcaactggagaattgaaaaaaaaagatatctgacttttattttacattgcttcaattatgcagtgggacattcagatccttgatggtcatttgctgttgttactgttttctcaaactatcttacgttttgtaaattgtctactaatattgtctatttctttattgtgtatgtttttgtttaattaataaaattatcttattttctgccatagttg

SEQ ID NO: 258793 - DNA, 467 bp, Homo sapiens
gcaggaaccaaggactagacattttcaaaatggcagctccatcttcccttctctgccagtcatgtgtatggtaaggagcagacaagatggctccaatcaactggaaagtccatttgcataagaagattaagatgggacgaccagtcttctcctcttctctatgtaaatgtcatgcctgattgaaccaatctatgagtcctatctaaatcagacactgcctcctcagactggactataaaacttggggcatttgccactagctggtctttttccgcttggagacaccttcctttgttgaggaagctgtttccctttctcttctacctattaaacctccactcctaaactcctcatgtgtgtccatgttctaaattttcctggtatgtgacaacaaacgccgggtttataccacttcacaagctcactgcacacattcagtttgacaattcaaggttcccctttaatta

SEQ ID NO: 258794 - DNA, 399 bp, Homo sapiens
taagcagggtggttatttgttctgcaatcaaattgcctggattcaatttccaactcaccatagactaattttgtgaccttgattaacttaactgtgctttgactttctaacctgtaaaagtcataattttaccttatgtctggataacaaattgaatagcagtgggacaattattgtacctagctcatagcaatgtgaacattcatgagataattcatgaaaaggacttaatacataactgatacacaataaacactcaacacatgtttaactattataatttttattggagtagataactgcattttttaacctttttccttgatgccaatatttttgtacttttagtatgttacttaactctgattgtaggtaggaattactctatcttaaactaaa

SEQ ID NO: 258795 - DNA, 443 bp, Homo sapiens
tctcgcgtgtagagttgaggttaggagcatggactctggattcatcctgcctggatttgaatcccagctcccccacttacaagctgtgtaaccctggccgagttccttaacctctctctgcttcagtttctcacctgtaaaatgggaataaccatagaaccttcctaattgggctgtagttaagattaggtgagttaataaaagtaaacttaaggcattgcctgccatacagtaatggcagttgacatgacatcaatgactatgatgatgatgatgatggtgaagaaaatgtcctccccataaacaaaacaaaattgtacacacacaaatatatattacctctatcttgtattctactgaaaattaacatctctttatgcttactagatagatagttatacactcgttatcttcaatactaataaagttcctctcttgtatgt

SEQ ID NO: 258796 - DNA, 144 bp, Homo sapiens
tctgtccctacagagatatagcctgagttctgccaggagaggacccatattgtttcctttaaacaacagcttattcattattgataagatccaaggacatctccatcatccactaccctaatttaataaaatatcttgttcact

SEQ ID NO: 258797 - DNA, 782 bp, Homo sapiens
ctttgggtaaggcatggggtgatggcccatgctctccccatgctcccattccctgacaaactggagggggctctgccacctatcaggcccacccatggtggtgggtcagacaacttggcttgttggaccggaaatgtgtgatttaaacctcacaacaccagacaaatataagatcctcagtgatggtcattggaagccattatccttaatgcagtaatgtatgccttgccctgaataaaatgggattttttttttgcttcccaattaactgctgttcttcctgaaatccctgttaccatggaaaacagagagttagctgtactgtcaattctaggtcacggtgtttgaagatacctaattcaatgggtaactaaaaatggggcttctctttctactaattaataatgtatcctgatcagagccttacaactgtagcaggttaaactgaaaacagattttcactgtttcctacaagaaaatgctctcagtctaccattggtcccaagtgggttctctgctacagggaagaaaggtgtctgttctcttctactcttcttacaagaaggggcacgacagagagcttttgtgcgacttccctgataaggtgaccagcctttattcagccctggaaacagttacagttcattcatgcctcattaatattacagcttgtttgacttgggtatttgtgtaataactatatttaactctaggatattttccttcatgtccctgttttcccctaacagtttatacaggattttggcttcttctaaactgac

SEQ ID NO: 258798 - DNA, 226 bp, Homo sapiens
ttttttttgaaaatacactaccccattttggaggacaaagtttattgctcaccctggcaccagcaggccacacaaggaatgccggctatctttcctccagctacctgcctcaagactggggatggaggatggtagctgttacataaaataccaaattttaccagcccttttcttcatcaagcacttccctgaaggctgcaactatttgactaaattccagagctcc

SEQ ID NO: 258799 - DNA, 627 bp, Homo sapiens
gttgactggggtgctcttgtgttaaaaactatcgtggtaacattttttgttttgtcctctaaacttgatttatctgcaaatctacaagcgttttaattatgtaaatagatatctgtgcgggcaaaacactttttgctcacatgatcttgagaaggaacttagattctggtgtcttaaaacgtggcaccttttttatgtccttggggcttttgagtcaccatataaatgaggtctctcatgttcgtatgccagggagatcaaccacctctgattttaaataaaacactgcaaagaaagcttccgggaggaatgagagcatgccccaaatcacgactctgtaattagtctttgtgcagagcggacagaaatttcgtcccaaagccaccgtccttgctctggttcctttctctgtaagcatgtcacacgaaccacactcctgcgccatgcatcgcaatttaaagctttccttgtaaagtttccccagcttgattgcttatggaaagagcagctccggttcccaattcgtttaatacatcctgtccgagcgcgttttattaccgaatgttacccacgttgtgataacaaggggacgctgtgtcctcccccggtgaactcactccctgtccc

SEQ ID NO: 258800 - DNA, 196 bp, Homo sapiens
ttttgattaattacgaatgtaaacattttatatttagtatacccacccagataaaaggcactgacaatttttacatagaccagcaggtaagtgacattcataggtaagtgacagaacagaaaaacaggaactacaataatagaataaatgttgcacacttattagttacctgagactacaacttttaggaataatg

SEQ ID NO: 258801 - DNA, 586 bp, Homo sapiens
tagactaaagcgtgaaagccgagtatcgcgtgagagtccggaggcgctgaagggagggtcgcagcgccgtgactttcgctttactaggaatggaggcacattgttttcaaaataaagattacattatactagcaaagattagaaatgtgagcatatgatagtcttttttatggacttagagctaaaggtttgcaagtcacttttacttttctggtctcccaatccttgcggcgtttgtgaggtgggtgtggctctatgccccctttaactgtgagctaaataaagataaagcttagaatcgaaatggcagaccgggaatataaactatttttcttacttaatttctaacagggtgctttccctttggatagcgattggtagttacccgggacctctaagcctataataatagagacaaagtcaaaggaatccaactcttaaaaccctcacaccccccacacctgaaaaaccctgacagtcaccgtgctttttttaacagcagaacttctaaggttcttaattcattcaataagggttaacttttagtagcctgtgaagttttggcaatttgacttacgatacaata

SEQ ID NO: 258802 - DNA, 693 bp, Homo sapiens
ggcagatcaaagtatccttttccaggcaagttgcagttatgctttgggaaatagacacgtgatattcaagtgtcagagtggatattgaagaatccagggggaaataagggcagaaacacacctacagctgtagacaaatgccaaaaaggttctgccctttctttgcaattcaatctaaagcacaataccatgctatgtagagcagtgcttctcaaactttaacatacatatgcactacttggggatcatgtaaaacttcagattctgatttagaaggtctgggatggggctaggtttctgcatttctaacaaaatctcaagtgaaactgatactgctgaaccaaggctcacacttttattataacaaagatgtcccttacttaggtatgccagaaaaagtgtgggctttggaatcagttaatcaattgcactctctctataaagaggataggtggatctgtaggtgggtttccatcctcccaccctcttatacatgacctgctaaaaattctgcttggtagataatcttggtcccatctgttctgttgagagagttagaagaaactttggaattgatgaatattagtggtaaaggagactggcagatttcaaaggagaaagaaaacttcaccaggttggagagatgaaacaaagaatacgattttgcctacaatgccagaaacatgcacaggg

SEQ ID NO: 258803 - DNA, 212 bp, Homo sapiens
ggctaactcttacttgtccttcaagtcaggggtgctcccacaggacccagtacttcttggatctcagctcctgtcacacagtattgtgaccgctgagctgactgcttgtcagtctctccactagattggaagcccatgtgtcttactcatccgtcactcttctgtccgcccactcacacaggaggcgtcaataaaagacacattggatataa

SEQ ID NO: 258804 - DNA, 305 bp, Homo sapiens
cctctctttcaaaagtctgcgctcagagtgagattaatgcagcaaacagggttcggttgctgccttttagaaaggcttgcccacaatccacaagccagacagagccacttccacagggtcatgctcctccttcccaaaggggcttctgccttgtcctcttttcccgaatcataaggactattggagcaaaatgagaaagccagcttgcaggtaagagaaaatccaaaatattattctaatgattctttctcccctcaagccttctactaaataataataatgacatacagttgtggtcattgtta

SEQ ID NO: 258805 - DNA, 2130 bp, Homo sapiens
  misc_feature (602)..(602): n is a, c, g, or t
  misc_feature (611)..(611): n is a, c, g, or t
  misc_feature (1236)..(1236): n is a, c, g, or t
cattttctacaaaatgagaggttaatcaatgttaatttgagtttatagactgaacataactatgtttcacagattttgtttattctcctagaataagccttttgtcaagctctgtatttcagaaacactactctattatacttggcaaaacaaaacggcattcctgagagtgaaaccctagtaataaggatttacattatgaaattaagacaaaacaaatgtagctgttacggattttaaaagttaggtcactacatgagtctagtgggaagaagttatgagaaccaccagaatcatctagaaatttttataagagaacatgactaaaattagctaaaacttaggaattagattagaaaaacagatacatccattcatttgaattgcttctataagcaacagtgtttcttttctaaaatattaatacagtaatcatcactctcctaaagctctccttctgctaggaggaaaatatttcctcaccctactgatgttgggcttagtcatgtgatttcattcacattaattaagatgcagaattttatctagaaatattacatgacttagtctaacattaaaaattaggttgacaaaataatcantttacctangaatatctagttacttttaaattagagttaaagcattaaaataatgcatccagttttctgtattacatttgtttttccataagtacagataaaataatattaatgatatatcagatagttttaaaactaaacactggcaggattctattttattatataagtaaaagtttagaattcctttctccacaccagtaattttgcagaaaactaatcaggaatattctgaaaatatgttggcactcttatttctattaactgcatatggtttgggattcaacttttagaataagccacgatgcatgatgcattagattttaaccagctgacgacccttggctatgtgattgtaaaggagatggcaaaatatcattgaagatggccatgtaaaacatcaatgagataagattcactcttacccaagatttttctatctatatcagatttttctatacagcagcaggctattcctgagaatgtgtccttcacttttttactttcatttgatgcgggtaagtaaatgtattcaatgagtttcaagtgtgtgaagaaagtgatataaagtaagggaaaattatggcacaatggctgtaactcctggaaagtaatgaaaagacagaatgtctcnagcatttgactggaaatagaagagactgcatcctggtgaactgagttaatttcaaatatattactctatggttttctatcatgtgtactctcactggctatattaataaatgaaatagtgatgaatggttctgggaacttgtagtgaaacttattaatatttcaacattatcaccgagtatctatgtcaacacacatcaaaaatgcatgagaaatgactacctacactcactagttacacccattagaaaaatatctatgagaagtataaatgacacacataaatttgcaatgtgattataggtagaacatacagcaagaaaaaagctacaggaagatatcacgtggtgaagtatgtgaaacaaatgaaagcaaattaattcttgcaatcggtttggaatacactgtatgaccacattaaataccattagatttgaaattatgagttcttagaaattactaacactaaaaaaatttcaacataatttaaaagtaggaaaaataaatagccactatcaaactgtaagtggctcatcagttctatccatggtgtaattttggaatcccctacttaaaaaacaaaagtaaaaacaaaacctttagttttcaaaagtttgttctactttttaaattgatgaccaagaggtaataaattcacattagaatgaggcatggccgtttaaacaataaatcaacacttaacccaatagtttccaagttgttaggtaggcttaaaaaaaaaagtctgtttatacctatatcagaagacattcgatttagttggggggtgtctgtcaaattgattgtttagcattatgcgtagagtataaaatgtcaaccatagaaatggagacagaaatcactttcaaaatagcaacatctgtgtagtagcttt

SEQ ID NO: 258806 - DNA, 535 bp, Homo sapiens
aaagattaagttcatatgttttttttttacaatgtttttctttaaaaaataatacacagttggccctcctatatccatgggttttgcatctctggagtcaaccaactgtggattgaaaatactctgaaaaaaaaaaaaaaaaccacaatggatggttgtgtctttattgaacatgtataggcttgtttcttgtcattatcccctgaaaaatacagtctaacaattatttatatagaatttacattgtattaggaattataagtaatctagaaatgatttaagatacacaggaggatgtaagtaggttatatgcaaatactataccattttatataagggacttgagcatccatggatttttgtcctttggggatcctgcaaccaatcacccagggatactgagagatgactatatttagcctcagctatgctaggaaaacactttatacctcccccttcctctaagtcagagaactgtattatcttactgtatctaggagtcagacaattgtatcccataggtgaaattggatta

SEQ ID NO: 258807 - DNA, 368 bp, Homo sapiens
ctctcagaactctcttggtctgtcccttctgtggcctgggatgtctcaacccctattagtggaacttctccaggcagctccctgccacagagtcctgatcaaaccaaaattctgaatgcagagagagaagaaaattattccctgacttcagccttaggactgcttgtccaagcccttgtttcctgacccagtattgacccttccccaggatgattgatgggggaaatagccattctcttcagggggaaaccctacccccacccatagaggtgtggtccaatatataattgattgacataagcacattccctaaagtctgggttatttggtcttaaataaaagcacatgtgggatctcagcagctttgg

SEQ ID NO: 258808 - DNA, 312 bp, Homo sapiens
ggttattgtcaggttctgataccctgttttcctctgaccttggttcagccagtaatacccgctctggcttcttcacaagtacatacttaccacaagaatctctacattttcagttcagagtcctcacaggtcagcaaatttggaggcttaatggttttcttataagctttcccacactctttgccttggctcaaacctcaatgtagtatcatttatcataagttaactatgtgaccttcaaatttaaagcaggacctggcaatgcagccacactacaatggcaagagaagctgagagccttgcttttctcaa

SEQ ID NO: 258809 - DNA, 299 bp, Homo sapiens
  misc_feature (251)..(251): n is a, c, g, or t
cggcacgagggagcctgacagccacttgagtgaggtcgctgccactgacagccaccccgactcccaatagcaaagcagctgcgcaccgacaggctttctccacccactgccatctccacagccgggactgccaccacccaagcacgccgctggggggcgcctaaaaaaggtacctggggagttgtgaggggtgaggtacagtgatttgtaagcaggattgccaaaggagacatcacacatcagacaactgnagagtaccccaggagcagaatttctgaaaaacccatagaagtagtcca

SEQ ID NO: 258810 - DNA, 339 bp, Homo sapiens
cggcacgagggagcctgacagccacttgagtgaggtcgctgccactgacagccaccccgactcccaatagcaaagcagctgcgcaccgacaggctttctccacccactgccatctccacagccgggactgccaccacccaagcacgccgctggggggcgcctggggattgcccactctgccaaccacagcctgagccctgagcacaacataggggattgggttgtctgagggtaggaccacaccaccaagcaaagcctctcccagtgcctgagcacactgcccaggggcctggggatccatggccctgtcccacccgtagctccgcgtatgctcctgca

SEQ ID NO: 258811 - DNA, 351 bp, Homo sapiens
aatattaacagtctgtcttctctctgtggacagtggaccttatctatactccccaactccacattcctcaaagtttgttacaggcccagcgagttcctgcttacctccctagcatggctgcagggtcacaagaccaataagtttaggtggcaagacatgtttctctcaagatataagaaatgtaatgctgtctttgtttcttgcttctgtaacttgcttcccgcctcacgtagttcctgccttaagatgtttacaagtagaaaaagccctttgttcggggctcaaactttctggacctatgtccggctgagctggtgatcaccttaatttaataaactctcctgaaccttt

SEQ ID NO: 258812 - DNA, 471 bp, Homo sapiens
aatgggtgctgctgcacagtcatccccttgcacagacagggaggcatggagtgactgcccaaggtcaaacgcttctattatttccatgtttctgtgacaccaagttcagtgagccactacacatcagcccaaagaacactgcctgagtctcttgtgttcccggagaatgtgtaagctgctttggggacagcaccccccgcttttcaggcatggaccctggttgtcactgttttagtgaaacagaagggcttcaagctattagaatgccagaaaacagagcaaagccaccatagctggtgtgggagaggctccccggagccctggcaaccctgaggtggttgagaagactctgcagggctcatgggctggtggcccatggtctggaaggcaccgtgccaaatgccagcccacacggtgctttgtgagatattttccttagctgccaatatgtaaagattgggaggtcatgca

SEQ ID NO: 258813 - DNA, 979 bp, Homo sapiens
  misc_feature (256)..(257): n is a, c, g, or t
gcggacctgcagcctgtttcaaaataatgatctataccagttgacttagagtgatttccacgatgctctggtgaaaaagaaaagttagttttagagaagacgctcatgaattcgcggccgcgtcgacgggatatagacaggcttgagcacctccacctcacagaatttggactaaaattggggcaaaaaatatttttgttaaacaaaagagattttttttattttatattattttgaaacaggttcttgctctgtnncccagggtggagtgcagtagcacaaggtgcatcccgggatcaagccttcctcctgtctcagcctccccagtagctgagactgatacaggaggtagaaagaaattatttaggcagatagtgagggcaaatgagtcctcagcagagcttcctttctaacaaaaagcagcccaagaaattagttttctcctaacaaaaagtagcctgaaaaatctagctgcaaacataggtaagcaagctggaacattgcacaggggaatgctggcagctgtgtcaatagaaaagggtactgggggccaggcatgtccatcatggaagcttcatcttcctttttgttagcacgtgtacagtaagaaagaagtgggcaacatggcacagcttaggctgaaaacccgcctgcataataaaatactggggtgggggctgccagaaaatcgtgccccatgcaaatggcacacctggtcctaaccagctttttgtgccctacgtagatcagacacaactttccaaccagctcatctataaaaccttctgcatttcaccgtgggtcgacaacccatttttctgggacccctctctgtagcagagagctattttctttcttttgcctattaaacttcctgctgttaacctcactcttgtgtgtccatgtccttgatctctgtggctgtgagacaatgaacctcaggttttaccccagacaatgaggctgcttcaagactaca

SEQ ID NO: 258814 - DNA, 231 bp, Homo sapiens
aaccaagggacttggacttggactaagtgggtgggaagctggggaagggatgtaagcagagcagtgatatgattgtgtagaaggaccatgtggctgtagggagacaggctcagcatcaaagacagaaacaataaatcatggtggcatgggctagaatggtggccatggaggaagagagaagtgctcaaatgttgctgaatgaatagtgaataaatgaacttgctcaatgat

SEQ ID NO: 258815 - DNA, 829 bp, Homo sapiens
actgtctaatgaaacataatataaacaaaaaatgctggccatcctaatattttgaaattttctagcagtcacgttaaaaaaagaaaaatcaggcaaaattgattttaataacattttatttacttaaacacgtccaaaatattattatcataccaatatgagcattaagtgtatattattcattcttttttcttaccaagtctttgaaacctggtgtatattttacattattacagtacagcatatctcaattggataagccaaatgttcaatagccacatgtagttaattactggctaccctcttggacagtgtaacattagagtgtcaaattataatgacttctctatctaaaattttattccaagtattttaaatatgaatttaagtgcaaattccatttgtacataaatcacatggtgtgaactttgtattaatatttacttttcagaaattcaaaaaaacatatactaaaatgaatgtgatttcatctaagggacaaacatactcgtatatattctcaacataaatagaatatttactttagaaagagttacatcaaatgtatttatcgtattgtattttttggattcagagatgtgtttgtcacatggatatatgctgtaatggtggggactgggcttctaatgtacccgttacccaaagggaagattttaccaaataagtaatttttcaactctcactcccctcacaccctcccttttttggagtccccagagcctattatttttattattatttatttatttatttttatttttattttttttttgacggagtctcgctctgtcgcccaggctggagtgca

SEQ ID NO: 258816 - DNA, 299 bp, Homo sapiens
tctccacctcgagacgcgcatagcacacagagctgcagaggccacgcagataaaccaccagcactccagactgggcaggagccgctgtcaggacagaggacacctatccacacccgcctggcctcagaagatcctgggtcaaagaataattctcttttcatgtatatgtgttgaaagaatttcagactagcaagcaagccgttttgactgtttcttaagatacgtagggagtttgttctttctttattagcagaaagccacgttttaaggattaaattttttccataagaacgtaagga

SEQ ID NO: 258817 - DNA, 504 bp, Homo sapiens
catggttttctgggaccagaggcattctctacaagggaagcaccaaagcaattaatgacttgataaaaacacgactctgccccattgccattcatgtcaaaaagggacacttgtagtgttagcaattcaagtacatatacatacaaatttataagagctactatgctttaagctatctttaaacaatgtatgtttttctctctaccatcacttggataatgaattcaataataagttgagaactaatttgttaaaatggtaccttcatttatttacactgtaagtcactcaattaaacttcaagtcttcataagagagaaataggccttctttctctttacttctgtgtaattcctgtaattctgtttcttctcttgaactacagtcctatttttgcatactaagttctcttaccctctatttatctctgcctccttcacaaatagggtctcattatgtgttctctgaaacttccttacatttgtcattccattgatgtaaacg

SEQ ID NO: 258818 - DNA, 235 bp, Homo sapiens
aaaatgtgtgtgctacaaggcaatttgccatttcattttaatagaatgttccatgctgaaaatgtctaactgctcagaagtggaataggagtgtaaatttattatctgagaaaagaaaattaattgacacaggccaaaaatgtaatggaattagacccatgtgccttagtgagaacttaggaactcgatctgggctctatggagtgacaaaattatgcaaaaaaaaaatgaagta

SEQ ID NO: 258819 - DNA, 983 bp, Homo sapiens
atgtgtaacccatgggtggcgtggttaggagtgctaccactctttatcctattaactcaggcagccctcaaaccagcaatgcctccggtgatcaagagccagcctttcaacattttctgggcagccccaacaatgtattgtatgccttccttcaacgtggatataaatcttcaagtatttaacattatatcaaatcctttagagactcagagtgggtcaaaaattgccatattttatccaaatgaattagggtattacccttacttatctcaagatggaaaatcctttaatggaggaataccgcagaatgtgagcctttctgaacaccttaggaaaactgctgatgacattggagaaggtgtcccttggtggagatcagaagaacttgttgttattgactgggaaagttggaaaccccaatgggatagaaatcagggcagcagaataatatataaaaaccactctttagccttcactagaaaccatcatccttattggtcagaaatgaaagtggaaacagttgcccgagaggaatttgaaaatgctggaaaaaatttcatgaacattactctcacattggctttagaaatgagaccaaaatgtttatggggcttttatctctatccagactgctacaattatgattacagaataaatccagagacgtacacaggtaattgtccaaattgtggctgtgggaaaaaagcgcagcactttatccttcaatacatttggataaaatactgaagtcaagcttaaatgctttgaaatttgttcactatcgagttagagaagccatgagggttgctgaaatggctagacatgactatgttttgccagtttttattttttccagaccattttatttgcatagtactgaagctctgtcacaggaggacttagtgcatgcaattggcgaaagtgcagcattgggggcagcaggagtaatattgtggggaggatatgaatattctgcttcaaag

SEQ ID NO: 258820 - DNA, 667 bp, Homo sapiens
ggccagcaaatcaggttgtgctcacacaacccagtatggcaacacgttcctcattgttaacaatggtgtggcatttttaatgagtgactatctttttaaacattgtattgaagtaaaacatatatagagggaataaatgaattgtaagtgtacagcttaatcaatttccagagtgaatacacccagatcaaaaataagagtattgctgcctgattttgaattctacataaataggactatataatatatattttcttatgttgacttctttcataattatatttttttaatttttatttttatttcaatggtttttgagattcaggtggtttttggttacatggatacttggataagttctttagtggtgattgctgaaattttagtacacctgtcacccaagccgtgtacactgtacccagtatgtactcttttattcctcacccctcctcccaaccttccctgctaagtccccaaaatccattatgtcattcttatgcctttgcatcctcatagcttagctcccacttatatgaaagtgaaaacgtacgatatttggtttttcattcctggattacttcacttagaataatggcctccagcttcatccaagttactgcaaaagacattattttatttctttttgtggctgattagtattccatga

SEQ ID NO: 258821 - DNA, 635 bp, Homo sapiens
cagggttgagcctcaatactgtgtccttcctgagaccatttctgcttttataacattttgtttatttgattattgaaactattattgctgataatgtggtgtggcctacactggcgcattgaaaacgtgtggtagccagcctgagtggtcaccaggagaaatggaccagaccagagagggtagtcccatccaggtttggtcacattgtctgagtatccaggatcaacggggaagcagagtggtatagtggaaagagtctaggctttgaaatgagagaggcctgagtagcccacgggcaagtcattgactcttgagcccttttccctgatctaaaaatggagataataatacttacagggatattaaaattaaatgagatgatctgtggcaaacactgagcacagcgtctggcagatagaattttaattaagagttaggtgtgaagtgaaaaccaaaccataaaaaagttgaagacaatataagttttatagcccactctatagttatggaagcactttctaacttcaaaagcaatggaaagtatcaaaaaacaaagagtgaaaaaattaatttgagtatgtaaagatccataattttgtacatgaaaacaaatatagctaaaaggtaacttggat

SEQ ID NO: 258822 - DNA, 293 bp, Homo sapiens
agcaggcagacacacaagcggctggacttctagaggaacacattggcagaagaagacacagcggctggacctcgagagggcgttgagaggagcatgccggcagaagagaacacgtggcggaagagcacatgacaaatgccagcaggccgtggaacgaagcagagtttggctggggcatttggagaagagcctgggccgctgagtagctgaactccaggggaaaaccatctcccttctggctccccaatctgctgagcattactttcactcaataaaaccttacactcattctc

SEQ ID NO: 258823 - DNA, 619 bp, Homo sapiens
gttttccatgatgattccaacacgctgatccttcatttgtctaaactcatagaaattttgttgttctgacaacttgttgggtacatatcagtatacgacattaatatatctccctgtccccaattaggttatcagtcacttgatggaggagattgtatgttatatattactttgtattcttcacagtgtctaatataaaggacacaagtcctttctaagaaaagagtgctgggattctctctacaactcaccaaaatatcttctgtcacatttcccatctaaactctgaaatataacccaattttattatttgtgaatttggaatcagagcagactctcattctcctcaaatcccctgctgtaatggatgatatttcttcctagagttcttagtatttttctgagggcctttaaaaaaatatagagccagaaataaataaggtgaggagcatagaacatatacataatagcctaaattcttctttttttttttttagacagagtcttgctctgtcactcaggcactcaggcagtggcacggtctcggctcacagcaacctctgcctcctgggcttaagcaattctcttgtctcagactcccgagtagctgggactacat

SEQ ID NO: 258824 - DNA, 463 bp, Homo sapiens
tatgattccgttgtatctcctttgttgacttctttgtcccatctcttcgctttctgttttagtggttgctgtagaacagggtttctcagctctggcactactggtattttgagccagataattctttgttagggggtggggggttctcttgtgtattgcagagtgtttagcaacatccttggcatctacccactagatgtgggtaatacccatccacacattgtgacagatatccccagggagcactcctaaaactacagctctaaggcttacagcataaatctttaacttatcaagcaaatgttatacgactgtatgtatagtatcagaaacttacaaaagtgtacttccctctcccacaccccatcttttttgtcatacatttttcttctacatatgctataaaccccacaacacattgttatttctactttttaaaataatcttttaaagagactttaaa

SEQ ID NO: 258825 - DNA, 659 bp, Homo sapiens
aagtaagtaacctcttactgaaattgtaactgactgtcaaaatgatactgactgttgaagattaaaatgtgaaaacattaaacgatttttttctgttgtgattgtgtctgtatatatatgtacataaacattctaactgtagtagcattctatttttgacacagatctgagaagcctggttaggatttaatcagatatgtatagatacctcacagatgtatttggaataatattctgtagcagaaattaaatctagtcccagccttaccctaactagtcagtggcaaagcagccttctacagtctgttactttgaaatgtatgtttcagaataactataaattaacagctttgatcatgtttatgccatgtaggtatattttataggaagatataagtaacattcaaatggagaaaaacccaatgttgaaaagagaaattgaactagtttaaattgccagtcactgtttctgcatatagatctaatttttttcataatgactgataattgtttctgtcttctaatatatacacacatatatatatttatgtatatgtatacatgttatatgttacatgtacatgtatattattttccagattttgactaaaactttctaattctatacctcttttattctggcttccaactaagcctct

SEQ ID NO: 258826 - DNA, 672 bp, Homo sapiens
gtcacttggtttctctggcctcagttttctcatctgtcaaatagaagtaacatttatgcttcagtagatctccaatgtcctcaagacagtgttcaaaccattaatataatctacaaaacccatcatgatatggcctctgctttcctctctgtcatcataccttgtacctcttctatcagcactttaaatccagaattctgaactactttcaaatccctaaatggcccatgctctctctagcttccaggattttgcttaatctgtttggctaaccagctaatcacagcctggctgtatccatcacttattccactctagccttaggtgacatcaccatcactaggaaacttttcttggcctctaaagcccaggatggatctatcatcagctcccacagcaacttgtgcatttgttgtaattatcttcatttttctacaatcctcagtagatttgaaatgaatgatttctcaatcttattcaacatatttctagggtctaaaagaatgcttgacacatagttgtctttcgtatgatatttaattgatttgaggttgtcatcaattttgagatgtgtcattatttcatctattactaaaaaaaagattgccaatgaaaccataacacatcatgaattgcaagatgcatcttgatttcacaggtgttaaaaagtga

SEQ ID NO: 258827 - DNA, 358 bp, Homo sapiens
gaaatgttccttttggctcagtaatagttctgcttcaatgcatgtgggctgagcctgccaatagtcatggaaatggtgcactgaggtttaaaaaagggacgtttgattgagaacaaaagtcacagagaacttttctgaaggtctttggtcagcacgagaattattctttaatggcacagggagaggggaatcttaagcagctctgaccttttatcaatcgtgaagaattggccatcattgtgtacatcattgaatttcaaagcatttaagctcttgcttatccagtactccccctagcagtctgcacgaagtgggttaactgggcactcacacactgttggtaggaggacaaatggct

SEQ ID NO: 258828 - DNA, 682 bp, Homo sapiens
ataaggctctggaaagaaaaggccaattggggctttgtctgaagaaataacagagtatttttctgccagagaaagcaagtccaagggaggaattttcagattgaccaaagagtattggtctacatcattagtactttcagtgagaaataactgaaaataaactagagcaaaagttccccaggtgtggttccaggaccagcaactgaaacatcacctgggaactgttaaaaatgcaaattcttgggctctccgccagaatcactgaatcagaaactctgaaatgggacccaataatcagcagcttaacaagctctccaggtgattcttatgccaaataaagtttgaaattccctggtgctggcgctggaagcaaatgagtcacagctgtgaagaatccctaccattaataccctgggtgggataaataaaaatgggaaactaaaaagttaaatgatcagaggttggctgtagttcaaaagtaaggatatacctgaatataaaattctttcttaacctaaatgcaaaatgggaatatgtttaatcatttatatagcatctcactggttttttccagcttgagacatgattcacaaaaattgtatatatttaaaatgtacatgatgttttgatatacatatacattgtgaaacaattaccacaatgaagttaacataaccatgaa

SEQ ID NO: 258829 - DNA, 737 bp, Homo sapiens
gctatatcttatatataaaaatgtacctttgaataatttctcagtttaactatttttagaaatggagcaaagttttgcccattggtacatgatattgtggattaagtgaaagaatatgaggctgggtgcggtggctcacgcctgtaatcccagcactttgagaggctgaggcaggtggatcacctgaggtcgagagttcgagaccagcctgaccaacatggagcaaccccgtgtctactaaaaatacaaaattagctggccgtggtggcgcatgcctgtaatcccagcgactagggaggctgagtcaggacagttgcttgaacctgggagatggagtttgcggtgaaccgagatcacaccattgcactccagcctgggcaatgagagtgaaactccatctcaaaaaaaaaaaaaaagaatatgacacagaattttatgtatagagttccaggtaccctgctcactacagactgaaattctgtgcagtctaataaatgaatcagagcctttccatcttgtctgggtagtccctaggttccctttttaaaggggttttgtttttagagtgattataaattcatccaacagtgcactttcagtgcctcctacctccctctaccaagtatgaactgcatgcatggctgaaatatgattttggctattatcgcttcatgtgcattgttcactattttgtaactgttattaaagtaaaatactgacttggaacatgaatttta

SEQ ID NO: 258830 - DNA, 274 bp, Homo sapiens
ttgaatcgtgggtcagaatttcctctttttaaagaccaatattccattacatgtatgtactgtgtcttactcatccattcgtctgtcagcgggcacttgggttgctcctaccccttggctcgtgtgaacagtgctgctatggttggacagtgccgagaccctgctttcggttctttggggtatatgcccggaagtggaatttctgaatcatacgggtattctctatgtaattttttgagaagccaccatattgtttcgcacagtggctgtgcca

SEQ ID NO: 258831 - DNA, 514 bp, Homo sapiens
cagggactatgactttgttcctggaactgagtagttacaaattcagctctgcactggatggtgagaacatagttactatggatatattcattgataataattcttcacttatttttcaatcttctgaaatgataacatcctttactggatcagatgcataggatcaaaataagtaaagtatgcatttagtttttgaccccttttcattaaggattattgagggtggccatataattttcttgaacactcttgggcaaacaagatatttggttattatggtacccaataactgatttgaagatgagggtcatcttttagttatttctgaaacaagcagagtgaaggcagatcctccattccaaatatagttaccttaaatttagcagttttggattaattacttgaccctttaattaaacttatttatttgatcctcatattgaaatgtatatcccttttccagaatgctcctatattcttaatgatttagagaaatgataactataattctctt

SEQ ID NO: 258832 - DNA, 325 bp, Homo sapiens
agatggaaagtaaagacaattataaaacatatcttttttgacaatttactcagtgttttattttgcttttgtttttattttgagacggagtcgtactctgtcgcccaggctgctggagtgcagtggtgtgatctcggctcactgcagcctctgcctcccaggttcaagtgattctcctgcctcatcctcctgagtagctgggactacaggcacatgccaccacaactggctaataattttttttttttttttttttttttgagacagagtcttgctctgtcgctcaggctggagtgcagtggcgcgatctcggctcactgccagc

SEQ ID NO: 258833 - DNA, 964 bp, Homo sapiens
tgtcggtggaagctctggtgtgattggttggctcttcttccaattgcaccaatctcaagctcttctctgcagagccctaactacaaaattgaaagtagagaggagggggcagccaatggaaaaaaaaatttgcacagcagccaatcctcctgcggcgttttgtgcctttgcccaacaggaaaatgtgtctcatgcagaggggcgttacccagtctccaatgggcgggagccggtggaacggaggagccaatgagtgcgagatgttgagtgacagctgtccaatggaggccctccgtgctagtacggcttgcggcttaagcgccgccgcggtctgcggaatgtcaactattcaacatggaggcggaggtcgataagctggaactgatgttccagaaagctgagtctgatctggattacattcaatacaggctggaatatgaaatcaagactaatcatcctgattcagcaagtgagctgtcaccactgactaaagaagagaaaactgcggcagagcaattcaaatttcacatgccagatttatgaagaaatggacttggaaaggaaattctaacagagaagagcttaattccggagaaatttaggaagatgtcttgttaacccttgatgtctagagattgggggctggtgaagggggtttggcttcaatgactggataatgatatctttcatgagagagattataagaagaagggcagataatatatgaataaagttcagccaaaaggatcaaatgagaataaaacgatttaaatatatgtacacacgcatgcacacacacacttagtcttgtaatttcaggccagaaattctcaacactattttgcatctgttttctttttctaagtcatgataatatagatgttctggtctatcataaaagaatgtttatgtacatttcagtcattcggtatgtggctttgtaaattaaagtataggcaaaaca

SEQ ID NO: 258834 - DNA, 1054 bp, Homo sapiens
tgtcggtggaagctctggtgtgattggttggctcttcttccaattgcaccaatctcaagctcttctctgcagagccctaactacaaaattgaaagtagagaggagggggcagccaatggaaaaaaaaatttgcacagcagccaatcctcctgcggcgttttgtgcctttgcccaacaggaaaatgtgtctcatgcagaggggcgttacccagtctccaatgggcgggagccggtggaacggaggagccaatgagtgcgagatgttgagtgacagctgtccaatggaggccctccgtgctagtacggcttgcggcttaagcgccgccgcggtctgcggaatgtcaactattcaacatggaggcggaggtcgataagctggaactgatgaaaaatccagttacactcttaaaggaattgtcagtgataaagtctcgatatcaaactttgtatgcccgctttaaaccagttgctgttgagcagaaagagagtaagagccgcatttgtgctactgtgaaaaagactatgaatatgatacaaaaactacagaagcaaacagacctggagctgtcaccactgactaaagaagagaaaactgcggcagagcaattcaaatttcacatgccagatttatgaagaaatggacttggaaaggaaattctaacagagaagagcttaattccggagaaatttaggaagatgtcttgttaacccttgatgtctagagattgggggctggtgaagggggtttggcttcaatgactggataatgatatctttcatgagagagattataagaagaagggcagataatatatgaataaagttcagccaaaaggatcaaatgagaataaaacgatttaaatatatgtacacacgcatgcacacacacacttagtcttgtaatttcaggccagaaattctcaacactattttgcatctgttttctttttctaagtcatgataatatagatgttctggtctatcataaaagaatgtttatgtacatttcagtcattcggtatgtggctttgtaaattaaagtataggcaaaaca

SEQ ID NO: 258835 - DNA, 650 bp, Homo sapiens
catcacatctacccccatataaccacaaaactctccttccagaaagctgagtctgatctggattacattcaatacaggctggaatatgaaatcaagactaatcatcctgattcagcaagtgagctgtcaccactgactaaagaagagaaaactgcggcagagcaattcaaatttcacatgccagatttatgaagaaatggacttggaaaggaaattctaacagagaagagcttaattccggagaaatttaggaagatgtcttgttaacccttgatgtctagagattgggggctggtgaagggggtttggcttcaatgactggataatgatatctttcatgagagagattataagaagaagggcagataatatatgaataaagttcagccaaaaggatcaaatgagaataaaacgatttaaatatatgtacacacgcatgcacacacacacttagtcttgtaatttcaggccagaaattctcaacactattttgcatctgttttctttttctaagtcatgataatatagatgttctggtctatcataaaagaatgtttatgtacatttcagtcattcggtatgtggctttgtaaattaaagtataggcaaaacaaaagaaagcaatataaaattggcctcgctgggcctta

SEQ ID NO: 258836 - DNA, 2696 bp, Homo sapiens
  misc_feature (14)..(14): n is a, c, g, or t
  misc_feature (24)..(24): n is a, c, g, or t
ccaggtctgttccnccgcgggtanggatatcgtcgaccaggcgctcgggtcgataagctggaactgatgttccagaaagctgagtctgatctggattacattcaatacaggctggaatatgaaatcaagactaatcatcctgattcagcaagtgagctgtcaccactgactaaagaagagaaaactgcggcagagcaattcaaatttcacatgccagatttatgaagaaatggacttggaaaggaaattctaacagagaagagcttaattccggagaaatttaggaagatgtcttgttaacccttgatgtctagagattgggggctggtgaagggggtttggcttcaatgactggataatgatatctttcatgagagagattataagaagaagggcagataatatatgaataaagttcagccaaaaggatcaaatgagaataaaacgatttaaatatatgtacacacgcatgcacacacacacttagtcttgtaatttcaggccagaaattctcaacactattttgcatctgttttctttttctaagtcatgataatatagatgttctggtctatcataaaagaatgtttatgtacatttcagtcattcggtatgtggctttgtaaattaaagtataggcaaaacatttgtgttatacatgatatataatttcattttgtaaatgttgattgcacatgtggtcacattattgttgagactgcttttatgtgacctgtagtctcccacagaacctaaagtaataagctggcttttctgtgatagccacgtttgcgtatttctttccctatttcccttgcctgctaatgttgaacagcatgaacttgctttctgatgctgttttagactgtccctgttgtatctcaataatatctttgttttccttcagcctttattactataattgttcattctacatgaaagctaggaaactgaaattagaagagcacttatctgctacttgccagttttgcgtgagtgtgttatatgtatgtgtcaatttccctttaaaataactatttattttaaaataactattggcaataaggaaactgttcaaagtagaggcagatcttgatagaaagatgttaatcacagggttgtttataatagcaatatacatacacatttggctagtactaggtgaataggaaaataaatcatgctgtatgtatacaataagaggtcaagttgccaataaattattactgttaatgttctgggaaatgctgaaactatgctaagtgggggagagggaaagcaggtattgcagttttgtagtgaagattgggctttggagtcatatctgagatgtaagtagcagcttttaaattctagctatgaccctgtgcagatcacttaacttttgagtgtcaggatgtttggaaggacaagacaggaaagtgttttaatacagggttcagtatttagtaagccttcaataagtgatattacatacatgtaataaaaactaagcattgaaaggactaggaaaaatgcatcaaatgttagttctgcaggttatagaattatacttttatgtaattttaaaatttcagttatgaacatgtttgtccattaacaaacttataatagctgaaaaacagggttgtgagaacagcttcagttaaaattgtcctgtctagtttgaatatttcaagaacagaaagcctttttttttttttttttttttttgagacggagtctcactctgttgcccaggctggaatgcagtggtacgctctcagctcactgcaacctccacctcccaggttcaagcagttctctgccccaccctcccgagtagctgggattacaggcgcccgccaccacgcccggctatttttttgtatttttagtagagatggggcttcaccatcttgaccaggctggtctttaactcctgatggtgatccacccacctcggcctcccaaagtgctgggattacaggcatgagctaccgtgcctggcccccttttttttaattacagagaaataagttacaccttagtatcagatattaattttcttcagtgttcaggcaattagtatttagaaagctcttgtcatgagatggctctgggatgtgatgatgattgttgggattgaaaaaatggtagtatcatggagagatcataataaattcttagtattaaaagtggttttgctttcagttagggagaaaaattagattgtactatttttcctctatgatttccttcagttatcttccaaatgttgttttttccccacagcccccttaacattgttctctatgcacttctcaatacattttcatttgtttctcaagcctctttgtggatgactcctaaatataacttcttccactagctctagatccgtatttccaataaaatcccctacctgaatattcaagttaaacatgtccagaatacttactgattttattgttaatagccactattctgttgtctggaattaaaacctgtataactaatttgcatccctttatcttcttagtcaataaaacctacaatcctctttctaaaaaaaagaaggagcagagagcgccaacacacaaacaatgtcgagcggagcaagggcccataaacaacctacgagaaacccaaaccctggggaaagcgcgcccccaagcggcacgcgacacctgggaaacaagggggacaaaagagac

SEQ ID NO: 258837 - DNA, 3191 bp, Homo sapiens
tgtcggtggaagctctggtgtgattggttggctcttcttccaattgcaccaatctcaagctcttctctgcagagccctaactacaaaattgaaagtagagaggagggggcagccaatggaaaaaaaaatttgcacagcagccaatcctcctgcggcgttttgtgcctttgcccaacaggaaaatgtgtctcatgcagaggggcgttacccagtctccaatgggcgggagccggtggaacggaggagccaatgagtgcgagatgttgagtgacagctgtccaatggaggccctccgtgctagtacggcttgcggcttaagcgccgccgcggtctgcggaatgtcaactattcaacatggaggcggaggtcgataagctggaactgatgttccagaaagctgagtctgatctggattacattcaatacaggctggaatatgaaatcaagactaatcatcctgattcagcaagtgagaaaaatccagttacactcttaaaggaattgtcagtgataaagtctcgatatcaaactttgtatgcccgctttaaaccagttgctgttgagcagaaagagagtaagagccgcatttgtgctactgtgaaaaagactatgaatatgatacaaaaactacagaagcaaacagacctggagctgtcaccactgactaaagaagagaaaactgcggcagagcaattcaaatttcacatgccagatttatgaagaaatggacttggaaaggaaattctaacagagaagagcttaattccggagaaatttaggaagatgtcttgttaacccttgatgtctagagattgggggctggtgaagggggtttggcttcaatgactggataatgatatctttcatgagagagattataagaagaagggcagataatatatgaataaagttcagccaaaaggatcaaatgagaataaaacgatttaaatatatgtacacacgcatgcacacacacacttagtcttgtaatttcaggccagaaattctcaacactattttgcatctgttttctttttctaagtcatgataatatagatgttctggtctatcataaaagaatgtttatgtacatttcagtcattcggtatgtggctttgtaaattaaagtataggcaaaacatttgtgttatacatgatatataatttcattttgtaaatgttgattgcacatgtggtcacattattgttgagactgcttttatgtgacctgtagtctcccacagaacctaaagtaataagctggcttttctgtgatagccacgtttgcgtatttctttccctatttcccttgcctgctaatgttgaacagcatgaacttgctttctgatgctgttttagactgtccctgttgtatctcaataatatctttgttttccttcagcctttattactataattgttcattctacatgaaagctaggaaactgaaattagaagagcacttatctgctacttgccagttttgcgtgagtgtgttatatgtatgtgtcaatttccctttaaaataactatttattttaaaataactattggcaataaggaaactgttcaaagtagaggcagatcttgatagaaagatgttaatcacagggttgtttataatagcaatatacatacacatttggctagtactaggtgaataggaaaataaatcatgctgtatgtatacaataagaggtcaagttgccaataaattattactgttaatgttctgggaaatgctgaaactatgctaagtgggggagagggaaagcaggtattgcagttttgtagtgaagattgggctttggagtcatatctgagatgtaagtagcagcttttaaattctagctatgaccctgtgcagatcacttaacttttgagtgtcaggatgtttggaaggacaagacaggaaagtgttttaatacagggttcagtatttagtaagccttcaataagtgatattacatacatgtaataaaaactaagcattgaaaggactaggaaaaatgcatcaaatgttagttctgcaggttatagaattatacttttatgtaattttaaaatttcagttatgaacatgtttgtccattaacaaacttataatagctgaaaaacagggttgtgagaacagcttcagttaaaattgtcctgtctagtttgaatatttcaagaacagaaagcctttttttttttttttttttttttgagacggagtctcactctgttgcccaggctggaatgcagtggtacgctctcagctcactgcaacctccacctcccaggttcaagcagttctctgccccaccctcccgagtagctgggattacaggcgcccgccaccacgcccggctatttttttgtatttttagtagagatggggcttcaccatcttgaccaggctggtctttaactcctgatggtgatccacccacctcggcctcccaaagtgctgggattacaggcatgagctaccgtgcctggcccccttttttttaattacagagaaataagttacaccttagtatcagatattaattttcttcagtgttcaggcaattagtatttagaaagctcttgtcatgagatggctctgggatgtgatgatgattgttgggattgaaaaaatggtagtatcatggagagatcataataaattcttagtattaaaagtggttttgctttcagttagggagaaaaattagattgtactatttttcctctatgatttccttcagttatcttccaaatgttgttttttccccacagcccccttaacattgttctctatgcacttctcaatacattttcatttgtttctcaagcctctttgtggatgactcctaaatataacttcttccactagctctagatccgtatttccaataaaatcccctacctgaatattcaagttaaacatgtccagaatacttactgattttattgttaatagccactattctgttgtctggaattaaaacctgtataactaatttgcatccctttatcttcttagtcaataaaacctacaatcctctttctaaaaaaaagaaggagcagagagcgccaacacacaaacaatgtcgagcggagcaagggcccataaacaacctacgagaaacccaaaccctggggaaagcgcgcccccaagcggcacgcgacacctgggaaacaagggggacaaaagagac

SEQ ID NO: 258838 - DNA, 3366 bp, Homo sapiens
tgtcggtggaagctctggtgtgattggttggctcttcttccaattgcaccaatctcaagctcttctctgcagagccctaactacaaaattgaaagtagagaggagggggcagccaatggaaaaaaaaatttgcacagcagccaatcctcctgcggcgttttgtgcctttgcccaacaggaaaatgtgtctcatgcagaggggcgttacccagtctccaatgggcgggagccggtggaacggaggagccaatgagtgcgagatgttgagtgacagctgtccaatggaggccctccgtgctagtacggcttgcggcttaagcgccgccgcggtctgcggaatgtcaactattcaacatggaggcggaggtcgataagctggaactgatggtgagtgcaaagtgaaggagatctactgggtagtttatttttcccccatggcctcggaggtggggcacaatttggagtcgccggaaactccgggcggcggaggctggaccagagtcgagttccctcctcctgcaccaaagggagccgccaccgtctggtgtctaaaccgcctcggttccagaaagctgagtctgatctggattacattcaatacaggctggaatatgaaatcaagactaatcatcctgattcagcaagtgagaaaaatccagttacactcttaaaggaattgtcagtgataaagtctcgatatcaaactttgtatgcccgctttaaaccagttgctgttgagcagaaagagagtaagagccgcatttgtgctactgtgaaaaagactatgaatatgatacaaaaactacagaagcaaacagacctggagctgtcaccactgactaaagaagagaaaactgcggcagagcaattcaaatttcacatgccagatttatgaagaaatggacttggaaaggaaattctaacagagaagagcttaattccggagaaatttaggaagatgtcttgttaacccttgatgtctagagattgggggctggtgaagggggtttggcttcaatgactggataatgatatctttcatgagagagattataagaagaagggcagataatatatgaataaagttcagccaaaaggatcaaatgagaataaaacgatttaaatatatgtacacacgcatgcacacacacacttagtcttgtaatttcaggccagaaattctcaacactattttgcatctgttttctttttctaagtcatgataatatagatgttctggtctatcataaaagaatgtttatgtacatttcagtcattcggtatgtggctttgtaaattaaagtataggcaaaacatttgtgttatacatgatatataatttcattttgtaaatgttgattgcacatgtggtcacattattgttgagactgcttttatgtgacctgtagtctcccacagaacctaaagtaataagctggcttttctgtgatagccacgtttgcgtatttctttccctatttcccttgcctgctaatgttgaacagcatgaacttgctttctgatgctgttttagactgtccctgttgtatctcaataatatctttgttttccttcagcctttattactataattgttcattctacatgaaagctaggaaactgaaattagaagagcacttatctgctacttgccagttttgcgtgagtgtgttatatgtatgtgtcaatttccctttaaaataactatttattttaaaataactattggcaataaggaaactgttcaaagtagaggcagatcttgatagaaagatgttaatcacagggttgtttataatagcaatatacatacacatttggctagtactaggtgaataggaaaataaatcatgctgtatgtatacaataagaggtcaagttgccaataaattattactgttaatgttctgggaaatgctgaaactatgctaagtgggggagagggaaagcaggtattgcagttttgtagtgaagattgggctttggagtcatatctgagatgtaagtagcagcttttaaattctagctatgaccctgtgcagatcacttaacttttgagtgtcaggatgtttggaaggacaagacaggaaagtgttttaatacagggttcagtatttagtaagccttcaataagtgatattacatacatgtaataaaaactaagcattgaaaggactaggaaaaatgcatcaaatgttagttctgcaggttatagaattatacttttatgtaattttaaaatttcagttatgaacatgtttgtccattaacaaacttataatagctgaaaaacagggttgtgagaacagcttcagttaaaattgtcctgtctagtttgaatatttcaagaacagaaagcctttttttttttttttttttttttgagacggagtctcactctgttgcccaggctggaatgcagtggtacgctctcagctcactgcaacctccacctcccaggttcaagcagttctctgccccaccctcccgagtagctgggattacaggcgcccgccaccacgcccggctatttttttgtatttttagtagagatggggcttcaccatcttgaccaggctggtctttaactcctgatggtgatccacccacctcggcctcccaaagtgctgggattacaggcatgagctaccgtgcctggcccccttttttttaattacagagaaataagttacaccttagtatcagatattaattttcttcagtgttcaggcaattagtatttagaaagctcttgtcatgagatggctctgggatgtgatgatgattgttgggattgaaaaaatggtagtatcatggagagatcataataaattcttagtattaaaagtggttttgctttcagttagggagaaaaattagattgtactatttttcctctatgatttccttcagttatcttccaaatgttgttttttccccacagcccccttaacattgttctctatgcacttctcaatacattttcatttgtttctcaagcctctttgtggatgactcctaaatataacttcttccactagctctagatccgtatttccaataaaatcccctacctgaatattcaagttaaacatgtccagaatacttactgattttattgttaatagccactattctgttgtctggaattaaaacctgtataactaatttgcatccctttatcttcttagtcaataaaacctacaatcctctttctaaaaaaaagaaggagcagagagcgccaacacacaaacaatgtcgagcggagcaagggcccataaacaacctacgagaaacccaaaccctggggaaagcgcgcccccaagcggcacgcgacacctgggaaacaagggggacaaaagagac

SEQ ID NO: 258839 - DNA, 2754 bp, Homo sapiens
gctagctgaacgactctcttaatttccaccgctacacaaaaatccagttacactcttaaaggaattgtcagtgataaagtctcgatatcaaactttgtatgcccgctttaaaccagttgctgttgagcagaaagagagtaagagccgcatttgtgctactgtgaaaaagactatgaatatgatacaaaaactacagaagcaaacagacctggagctgtcaccactgactaaagaagagaaaactgcggcagagcaattcaaatttcacatgccagatttatgaagaaatggacttggaaaggaaattctaacagagaagagcttaattccggagaaatttaggaagatgtcttgttaacccttgatgtctagagattgggggctggtgaagggggtttggcttcaatgactggataatgatatctttcatgagagagattataagaagaagggcagataatatatgaataaagttcagccaaaaggatcaaatgagaataaaacgatttaaatatatgtacacacgcatgcacacacacacttagtcttgtaatttcaggccagaaattctcaacactattttgcatctgttttctttttctaagtcatgataatatagatgttctggtctatcataaaagaatgtttatgtacatttcagtcattcggtatgtggctttgtaaattaaagtataggcaaaacatttgtgttatacatgatatataatttcattttgtaaatgttgattgcacatgtggtcacattattgttgagactgcttttatgtgacctgtagtctcccacagaacctaaagtaataagctggcttttctgtgatagccacgtttgcgtatttctttccctatttcccttgcctgctaatgttgaacagcatgaacttgctttctgatgctgttttagactgtccctgttgtatctcaataatatctttgttttccttcagcctttattactataattgttcattctacatgaaagctaggaaactgaaattagaagagcacttatctgctacttgccagttttgcgtgagtgtgttatatgtatgtgtcaatttccctttaaaataactatttattttaaaataactattggcaataaggaaactgttcaaagtagaggcagatcttgatagaaagatgttaatcacagggttgtttataatagcaatatacatacacatttggctagtactaggtgaataggaaaataaatcatgctgtatgtatacaataagaggtcaagttgccaataaattattactgttaatgttctgggaaatgctgaaactatgctaagtgggggagagggaaagcaggtattgcagttttgtagtgaagattgggctttggagtcatatctgagatgtaagtagcagcttttaaattctagctatgaccctgtgcagatcacttaacttttgagtgtcaggatgtttggaaggacaagacaggaaagtgttttaatacagggttcagtatttagtaagccttcaataagtgatattacatacatgtaataaaaactaagcattgaaaggactaggaaaaatgcatcaaatgttagttctgcaggttatagaattatacttttatgtaattttaaaatttcagttatgaacatgtttgtccattaacaaacttataatagctgaaaaacagggttgtgagaacagcttcagttaaaattgtcctgtctagtttgaatatttcaagaacagaaagcctttttttttttttttttttttttgagacggagtctcactctgttgcccaggctggaatgcagtggtacgctctcagctcactgcaacctccacctcccaggttcaagcagttctctgccccaccctcccgagtagctgggattacaggcgcccgccaccacgcccggctatttttttgtatttttagtagagatggggcttcaccatcttgaccaggctggtctttaactcctgatggtgatccacccacctcggcctcccaaagtgctgggattacaggcatgagctaccgtgcctggcccccttttttttaattacagagaaataagttacaccttagtatcagatattaattttcttcagtgttcaggcaattagtatttagaaagctcttgtcatgagatggctctgggatgtgatgatgattgttgggattgaaaaaatggtagtatcatggagagatcataataaattcttagtattaaaagtggttttgctttcagttagggagaaaaattagattgtactatttttcctctatgatttccttcagttatcttccaaatgttgttttttccccacagcccccttaacattgttctctatgcacttctcaatacattttcatttgtttctcaagcctctttgtggatgactcctaaatataacttcttccactagctctagatccgtatttccaataaaatcccctacctgaatattcaagttaaacatgtccagaatacttactgattttattgttaatagccactattctgttgtctggaattaaaacctgtataactaatttgcatccctttatcttcttagtcaataaaacctacaatcctctttctaaaaaaaagaaggagcagagagcgccaacacacaaacaatgtcgagcggagcaagggcccataaacaacctacgagaaacccaaaccctggggaaagcgcgcccccaagcggcacgcgacacctgggaaacaagggggacaaaagagac

SEQ ID NO: 258840 - DNA, 3189 bp, Homo sapiens
tgtcggtggaagctctggtgtgattggttggctcttcttccaattgcaccaatctcaagctcttctctgcagagccctaactacaaaattgaaagtagagaggagggggcagccaatggaaaaaaaaatttgcacagcagccaatcctcctgcggcgttttgtgcctttgcccaacaggaaaatgtgtctcatgcagaggggcgttacccagtctccaatgggcgggagccggtggaacggaggagccaatgagtgcgagatgttgagtgacagctgtccaatggaggccctccgtgctagtacggcttgcggcttaagcgccgccgcggtctgcggaatgtcaactattcaacatggaggcggaggtcgataagctggaactgatggtgagtgcaaagtgaaggagatctactgggtagtttatttttcccccatggcctcggaggtggggcacaatttggagtcgccggaaactccgggcggcggaggctggaccagagtcgagttccctcctcctgcaccaaagggagccgccaccgtctggtgtctaaaccgcctcggttccagaaagctgagtctgatctggattacattcaatacaggctggaatatgaaatcaagactaatcatcctgattcagcaagtgagctgtcaccactgactaaagaagagaaaactgcggcagagcaattcaaatttcacatgccagatttatgaagaaatggacttggaaaggaaattctaacagagaagagcttaattccggagaaatttaggaagatgtcttgttaacccttgatgtctagagattgggggctggtgaagggggtttggcttcaatgactggataatgatatctttcatgagagagattataagaagaagggcagataatatatgaataaagttcagccaaaaggatcaaatgagaataaaacgatttaaatatatgtacacacgcatgcacacacacacttagtcttgtaatttcaggccagaaattctcaacactattttgcatctgttttctttttctaagtcatgataatatagatgttctggtctatcataaaagaatgtttatgtacatttcagtcattcggtatgtggctttgtaaattaaagtataggcaaaacatttgtgttatacatgatatataatttcattttgtaaatgttgattgcacatgtggtcacattattgttgagactgcttttatgtgacctgtagtctcccacagaacctaaagtaataagctggcttttctgtgatagccacgtttgcgtatttctttccctatttcccttgcctgctaatgttgaacagcatgaacttgctttctgatgctgttttagactgtccctgttgtatctcaataatatctttgttttccttcagcctttattactataattgttcattctacatgaaagctaggaaactgaaattagaagagcacttatctgctacttgccagttttgcgtgagtgtgttatatgtatgtgtcaatttccctttaaaataactatttattttaaaataactattggcaataaggaaactgttcaaagtagaggcagatcttgatagaaagatgttaatcacagggttgtttataatagcaatatacatacacatttggctagtactaggtgaataggaaaataaatcatgctgtatgtatacaataagaggtcaagttgccaataaattattactgttaatgttctgggaaatgctgaaactatgctaagtgggggagagggaaagcaggtattgcagttttgtagtgaagattgggctttggagtcatatctgagatgtaagtagcagcttttaaattctagctatgaccctgtgcagatcacttaacttttgagtgtcaggatgtttggaaggacaagacaggaaagtgttttaatacagggttcagtatttagtaagccttcaataagtgatattacatacatgtaataaaaactaagcattgaaaggactaggaaaaatgcatcaaatgttagttctgcaggttatagaattatacttttatgtaattttaaaatttcagttatgaacatgtttgtccattaacaaacttataatagctgaaaaacagggttgtgagaacagcttcagttaaaattgtcctgtctagtttgaatatttcaagaacagaaagcctttttttttttttttttttttttgagacggagtctcactctgttgcccaggctggaatgcagtggtacgctctcagctcactgcaacctccacctcccaggttcaagcagttctctgccccaccctcccgagtagctgggattacaggcgcccgccaccacgcccggctatttttttgtatttttagtagagatggggcttcaccatcttgaccaggctggtctttaactcctgatggtgatccacccacctcggcctcccaaagtgctgggattacaggcatgagctaccgtgcctggcccccttttttttaattacagagaaataagttacaccttagtatcagatattaattttcttcagtgttcaggcaattagtatttagaaagctcttgtcatgagatggctctgggatgtgatgatgattgttgggattgaaaaaatggtagtatcatggagagatcataataaattcttagtattaaaagtggttttgctttcagttagggagaaaaattagattgtactatttttcctctatgatttccttcagttatcttccaaatgttgttttttccccacagcccccttaacattgttctctatgcacttctcaatacattttcatttgtttctcaagcctctttgtggatgactcctaaatataacttcttccactagctctagatccgtatttccaataaaatcccctacctgaatattcaagttaaacatgtccagaatacttactgattttattgttaatagccactattctgttgtctggaattaaaacctgtataactaatttgcatccctttatcttcttagtcaataaaacctacaatcctctttctaaaaaaaagaaggagcagagagcgccaacacacaaacaatgtcgagcggagcaagggcccataaacaacctacgagaaacccaaaccctggggaaagcgcgcccccaagcggcacgcgacacctgggaaacaagggggacaaaagagac

SEQ ID NO: 258841 - DNA, 2666 bp, Homo sapiens
ttaataatttaataaaaagaattaataatttaactatcgttccagaaagctgagtctgatctggattacattcaatacaggctggaatatgaaatcaagactaatcatcctgattcagcaagtgagctgtcaccactgactaaagaagagaaaactgcggcagagcaattcaaatttcacatgccagatttatgaagaaatggacttggaaaggaaattctaacagagaagagcttaattccggagaaatttaggaagatgtcttgttaacccttgatgtctagagattgggggctggtgaagggggtttggcttcaatgactggataatgatatctttcatgagagagattataagaagaagggcagataatatatgaataaagttcagccaaaaggatcaaatgagaataaaacgatttaaatatatgtacacacgcatgcacacacacacttagtcttgtaatttcaggccagaaattctcaacactattttgcatctgttttctttttctaagtcatgataatatagatgttctggtctatcataaaagaatgtttatgtacatttcagtcattcggtatgtggctttgtaaattaaagtataggcaaaacatttgtgttatacatgatatataatttcattttgtaaatgttgattgcacatgtggtcacattattgttgagactgcttttatgtgacctgtagtctcccacagaacctaaagtaataagctggcttttctgtgatagccacgtttgcgtatttctttccctatttcccttgcctgctaatgttgaacagcatgaacttgctttctgatgctgttttagactgtccctgttgtatctcaataatatctttgttttccttcagcctttattactataattgttcattctacatgaaagctaggaaactgaaattagaagagcacttatctgctacttgccagttttgcgtgagtgtgttatatgtatgtgtcaatttccctttaaaataactatttattttaaaataactattggcaataaggaaactgttcaaagtagaggcagatcttgatagaaagatgttaatcacagggttgtttataatagcaatatacatacacatttggctagtactaggtgaataggaaaataaatcatgctgtatgtatacaataagaggtcaagttgccaataaattattactgttaatgttctgggaaatgctgaaactatgctaagtgggggagagggaaagcaggtattgcagttttgtagtgaagattgggctttggagtcatatctgagatgtaagtagcagcttttaaattctagctatgaccctgtgcagatcacttaacttttgagtgtcaggatgtttggaaggacaagacaggaaagtgttttaatacagggttcagtatttagtaagccttcaataagtgatattacatacatgtaataaaaactaagcattgaaaggactaggaaaaatgcatcaaatgttagttctgcaggttatagaattatacttttatgtaattttaaaatttcagttatgaacatgtttgtccattaacaaacttataatagctgaaaaacagggttgtgagaacagcttcagttaaaattgtcctgtctagtttgaatatttcaagaacagaaagcctttttttttttttttttttttttgagacggagtctcactctgttgcccaggctggaatgcagtggtacgctctcagctcactgcaacctccacctcccaggttcaagcagttctctgccccaccctcccgagtagctgggattacaggcgcccgccaccacgcccggctatttttttgtatttttagtagagatggggcttcaccatcttgaccaggctggtctttaactcctgatggtgatccacccacctcggcctcccaaagtgctgggattacaggcatgagctaccgtgcctggcccccttttttttaattacagagaaataagttacaccttagtatcagatattaattttcttcagtgttcaggcaattagtatttagaaagctcttgtcatgagatggctctgggatgtgatgatgattgttgggattgaaaaaatggtagtatcatggagagatcataataaattcttagtattaaaagtggttttgctttcagttagggagaaaaattagattgtactatttttcctctatgatttccttcagttatcttccaaatgttgttttttccccacagcccccttaacattgttctctatgcacttctcaatacattttcatttgtttctcaagcctctttgtggatgactcctaaatataacttcttccactagctctagatccgtatttccaataaaatcccctacctgaatattcaagttaaacatgtccagaatacttactgattttattgttaatagccactattctgttgtctggaattaaaacctgtataactaatttgcatccctttatcttcttagtcaataaaacctacaatcctctttctaaaaaaaagaaggagcagagagcgccaacacacaaacaatgtcgagcggagcaagggcccataaacaacctacgagaaacccaaaccctggggaaagcgcgcccccaagcggcacgcgacacctgggaaacaagggggacaaaagagac

SEQ ID NO: 258842 - DNA, 2674 bp, Homo sapiens
atttaatataataatttttattaataatatgtaatttttctcatttcttccagaaagctgagtctgatctggattacattcaatacaggctggaatatgaaatcaagactaatcatcctgattcagcaagtgagctgtcaccactgactaaagaagagaaaactgcggcagagcaattcaaatttcacatgccagatttatgaagaaatggacttggaaaggaaattctaacagagaagagcttaattccggagaaatttaggaagatgtcttgttaacccttgatgtctagagattgggggctggtgaagggggtttggcttcaatgactggataatgatatctttcatgagagagattataagaagaagggcagataatatatgaataaagttcagccaaaaggatcaaatgagaataaaacgatttaaatatatgtacacacgcatgcacacacacacttagtcttgtaatttcaggccagaaattctcaacactattttgcatctgttttctttttctaagtcatgataatatagatgttctggtctatcataaaagaatgtttatgtacatttcagtcattcggtatgtggctttgtaaattaaagtataggcaaaacatttgtgttatacatgatatataatttcattttgtaaatgttgattgcacatgtggtcacattattgttgagactgcttttatgtgacctgtagtctcccacagaacctaaagtaataagctggcttttctgtgatagccacgtttgcgtatttctttccctatttcccttgcctgctaatgttgaacagcatgaacttgctttctgatgctgttttagactgtccctgttgtatctcaataatatctttgttttccttcagcctttattactataattgttcattctacatgaaagctaggaaactgaaattagaagagcacttatctgctacttgccagttttgcgtgagtgtgttatatgtatgtgtcaatttccctttaaaataactatttattttaaaataactattggcaataaggaaactgttcaaagtagaggcagatcttgatagaaagatgttaatcacagggttgtttataatagcaatatacatacacatttggctagtactaggtgaataggaaaataaatcatgctgtatgtatacaataagaggtcaagttgccaataaattattactgttaatgttctgggaaatgctgaaactatgctaagtgggggagagggaaagcaggtattgcagttttgtagtgaagattgggctttggagtcatatctgagatgtaagtagcagcttttaaattctagctatgaccctgtgcagatcacttaacttttgagtgtcaggatgtttggaaggacaagacaggaaagtgttttaatacagggttcagtatttagtaagccttcaataagtgatattacatacatgtaataaaaactaagcattgaaaggactaggaaaaatgcatcaaatgttagttctgcaggttatagaattatacttttatgtaattttaaaatttcagttatgaacatgtttgtccattaacaaacttataatagctgaaaaacagggttgtgagaacagcttcagttaaaattgtcctgtctagtttgaatatttcaagaacagaaagcctttttttttttttttttttttttgagacggagtctcactctgttgcccaggctggaatgcagtggtacgctctcagctcactgcaacctccacctcccaggttcaagcagttctctgccccaccctcccgagtagctgggattacaggcgcccgccaccacgcccggctatttttttgtatttttagtagagatggggcttcaccatcttgaccaggctggtctttaactcctgatggtgatccacccacctcggcctcccaaagtgctgggattacaggcatgagctaccgtgcctggcccccttttttttaattacagagaaataagttacaccttagtatcagatattaattttcttcagtgttcaggcaattagtatttagaaagctcttgtcatgagatggctctgggatgtgatgatgattgttgggattgaaaaaatggtagtatcatggagagatcataataaattcttagtattaaaagtggttttgctttcagttagggagaaaaattagattgtactatttttcctctatgatttccttcagttatcttccaaatgttgttttttccccacagcccccttaacattgttctctatgcacttctcaatacattttcatttgtttctcaagcctctttgtggatgactcctaaatataacttcttccactagctctagatccgtatttccaataaaatcccctacctgaatattcaagttaaacatgtccagaatacttactgattttattgttaatagccactattctgttgtctggaattaaaacctgtataactaatttgcatccctttatcttcttagtcaataaaacctacaatcctctttctaaaaaaaagaaggagcagagagcgccaacacacaaacaatgtcgagcggagcaagggcccataaacaacctacgagaaacccaaaccctggggaaagcgcgcccccaagcggcacgcgacacctgggaaacaagggggacaaaagagac

SEQ ID NO: 258843 - DNA, 2927 bp, Homo sapiens
tgtcggtggaagctctggtgtgattggttggctcttcttccaattgcaccaatctcaagctcttctctgcagagccctaactacaaaattgaaagtagagaggagggggcagccaatggaaaaaaaaatttgcacagcagccaatcctcctgcggcgttttgtgcctttgcccaacaggaaaatgtgtctcatgcagaggggcgttacccagtctccaatgggcgggagccggtggaacggaggagccaatgagtgcgagatgttgagtgacagctgtccaatggaggccctccgtgctagtacggcttgcggcttaagcgccgccgcggtctgcggaatgtcaactattcaacatggaggcggaggtcgataagctggaactgatgctgtcaccactgactaaagaagagaaaactgcggcagagcaattcaaatttcacatgccagatttatgaagaaatggacttggaaaggaaattctaacagagaagagcttaattccggagaaatttaggaagatgtcttgttaacccttgatgtctagagattgggggctggtgaagggggtttggcttcaatgactggataatgatatctttcatgagagagattataagaagaagggcagataatatatgaataaagttcagccaaaaggatcaaatgagaataaaacgatttaaatatatgtacacacgcatgcacacacacacttagtcttgtaatttcaggccagaaattctcaacactattttgcatctgttttctttttctaagtcatgataatatagatgttctggtctatcataaaagaatgtttatgtacatttcagtcattcggtatgtggctttgtaaattaaagtataggcaaaacatttgtgttatacatgatatataatttcattttgtaaatgttgattgcacatgtggtcacattattgttgagactgcttttatgtgacctgtagtctcccacagaacctaaagtaataagctggcttttctgtgatagccacgtttgcgtatttctttccctatttcccttgcctgctaatgttgaacagcatgaacttgctttctgatgctgttttagactgtccctgttgtatctcaataatatctttgttttccttcagcctttattactataattgttcattctacatgaaagctaggaaactgaaattagaagagcacttatctgctacttgccagttttgcgtgagtgtgttatatgtatgtgtcaatttccctttaaaataactatttattttaaaataactattggcaataaggaaactgttcaaagtagaggcagatcttgatagaaagatgttaatcacagggttgtttataatagcaatatacatacacatttggctagtactaggtgaataggaaaataaatcatgctgtatgtatacaataagaggtcaagttgccaataaattattactgttaatgttctgggaaatgctgaaactatgctaagtgggggagagggaaagcaggtattgcagttttgtagtgaagattgggctttggagtcatatctgagatgtaagtagcagcttttaaattctagctatgaccctgtgcagatcacttaacttttgagtgtcaggatgtttggaaggacaagacaggaaagtgttttaatacagggttcagtatttagtaagccttcaataagtgatattacatacatgtaataaaaactaagcattgaaaggactaggaaaaatgcatcaaatgttagttctgcaggttatagaattatacttttatgtaattttaaaatttcagttatgaacatgtttgtccattaacaaacttataatagctgaaaaacagggttgtgagaacagcttcagttaaaattgtcctgtctagtttgaatatttcaagaacagaaagcctttttttttttttttttttttttgagacggagtctcactctgttgcccaggctggaatgcagtggtacgctctcagctcactgcaacctccacctcccaggttcaagcagttctctgccccaccctcccgagtagctgggattacaggcgcccgccaccacgcccggctatttttttgtatttttagtagagatggggcttcaccatcttgaccaggctggtctttaactcctgatggtgatccacccacctcggcctcccaaagtgctgggattacaggcatgagctaccgtgcctggcccccttttttttaattacagagaaataagttacaccttagtatcagatattaattttcttcagtgttcaggcaattagtatttagaaagctcttgtcatgagatggctctgggatgtgatgatgattgttgggattgaaaaaatggtagtatcatggagagatcataataaattcttagtattaaaagtggttttgctttcagttagggagaaaaattagattgtactatttttcctctatgatttccttcagttatcttccaaatgttgttttttccccacagcccccttaacattgttctctatgcacttctcaatacattttcatttgtttctcaagcctctttgtggatgactcctaaatataacttcttccactagctctagatccgtatttccaataaaatcccctacctgaatattcaagttaaacatgtccagaatacttactgattttattgttaatagccactattctgttgtctggaattaaaacctgtataactaatttgcatccctttatcttcttagtcaataaaacctacaatcctctttctaaaaaaaagaaggagcagagagcgccaacacacaaacaatgtcgagcggagcaagggcccataaacaacctacgagaaacccaaaccctggggaaagcgcgcccccaagcggcacgcgacacctgggaaacaagggggacaaaagagac

SEQ ID NO: 258844 - DNA, 3167 bp, Homo sapiens
tgtcggtggaagctctggtgtgattggttggctcttcttccaattgcaccaatctcaagctcttctctgcagagccctaactacaaaattgaaagtagagaggagggggcagccaatggaaaaaaaaatttgcacagcagccaatcctcctgcggcgttttgtgcctttgcccaacaggaaaatgtgtctcatgcagaggggcgttacccagtctccaatgggcgggagccggtggaacggaggagccaatgagtgcgagatgttgagtgacagctgtccaatggaggccctccgtgctagtacggcttgcggcttaagcgccgccgcggtctgcggaatgtcaactattcaacatggaggcggaggtcgataagctggaactgatggtgagtgcaaagtgaaggagatctactgggtagtttatttttcccccatggcctcggaggtggggcacaatttggagtcgccggaaactccgggcggcggaggctggaccagagtcgagttccctcctcctgcaccaaagggagccgccaccgtctggtgtctaaaccgcctcggttccagaaagctgagtctgatctggattacattcaatacaggctggaatatgaaatcaagactaatcatcctgattcagcaagtgagaaaaatccagttacactcttaaaggaattgtcagtgataaagtctcgatatcaaactttgtatgcccgctttaaaccagttgctgttgagcagaaagagagtaagagccgcatttgtgctactgtgaaaaagactatgaatatgatacaaaaactacagaagcaaacagacctggagctgtcaccactgactaaagaagagattataagaagaagggcagataatatatgaataaagttcagccaaaaggatcaaatgagaataaaacgatttaaatatatgtacacacgcatgcacacacacacttagtcttgtaatttcaggccagaaattctcaacactattttgcatctgttttctttttctaagtcatgataatatagatgttctggtctatcataaaagaatgtttatgtacatttcagtcattcggtatgtggctttgtaaattaaagtataggcaaaacatttgtgttatacatgatatataatttcattttgtaaatgttgattgcacatgtggtcacattattgttgagactgcttttatgtgacctgtagtctcccacagaacctaaagtaataagctggcttttctgtgatagccacgtttgcgtatttctttccctatttcccttgcctgctaatgttgaacagcatgaacttgctttctgatgctgttttagactgtccctgttgtatctcaataatatctttgttttccttcagcctttattactataattgttcattctacatgaaagctaggaaactgaaattagaagagcacttatctgctacttgccagttttgcgtgagtgtgttatatgtatgtgtcaatttccctttaaaataactatttattttaaaataactattggcaataaggaaactgttcaaagtagaggcagatcttgatagaaagatgttaatcacagggttgtttataatagcaatatacatacacatttggctagtactaggtgaataggaaaataaatcatgctgtatgtatacaataagaggtcaagttgccaataaattattactgttaatgttctgggaaatgctgaaactatgctaagtgggggagagggaaagcaggtattgcagttttgtagtgaagattgggctttggagtcatatctgagatgtaagtagcagcttttaaattctagctatgaccctgtgcagatcacttaacttttgagtgtcaggatgtttggaaggacaagacaggaaagtgttttaatacagggttcagtatttagtaagccttcaataagtgatattacatacatgtaataaaaactaagcattgaaaggactaggaaaaatgcatcaaatgttagttctgcaggttatagaattatacttttatgtaattttaaaatttcagttatgaacatgtttgtccattaacaaacttataatagctgaaaaacagggttgtgagaacagcttcagttaaaattgtcctgtctagtttgaatatttcaagaacagaaagcctttttttttttttttttttttttgagacggagtctcactctgttgcccaggctggaatgcagtggtacgctctcagctcactgcaacctccacctcccaggttcaagcagttctctgccccaccctcccgagtagctgggattacaggcgcccgccaccacgcccggctatttttttgtatttttagtagagatggggcttcaccatcttgaccaggctggtctttaactcctgatggtgatccacccacctcggcctcccaaagtgctgggattacaggcatgagctaccgtgcctggcccccttttttttaattacagagaaataagttacaccttagtatcagatattaattttcttcagtgttcaggcaattagtatttagaaagctcttgtcatgagatggctctgggatgtgatgatgattgttgggattgaaaaaatggtagtatcatggagagatcataataaattcttagtattaaaagtggttttgctttcagttagggagaaaaattagattgtactatttttcctctatgatttccttcagttatcttccaaatgttgttttttccccacagcccccttaacattgttctctatgcacttctcaatacattttcatttgtttctcaagcctctttgtggatgactcctaaatataacttcttccactagctctagatccgtatttccaataaaatcccctacctgaatattcaagttaaacatgtccagaatacttactgattttattgttaatagccactattctgttgtctggaattaaaacctgtataactaatttgcatccctttatcttcttagtcaataaaacctacaatcctctttctaaaaaaaagaaggagcagagagcgccaacacacaaacaatgtcgagcggagcaagggcccataaacaacctacgagaaacccaaaccctggggaaagcgcgcccccaagcggcacgcgacacctgggaaacaagggggacaaaagagac

SEQ ID NO: 258845 - DNA, 2356 bp, Homo sapiens
ccagttacaacagctcagttacaacagctcatgagagagattataagaagaagggcagataatatatgaataaagttcagccaaaaggatcaaatgagaataaaacgatttaaatatatgtacacacgcatgcacacacacacttagtcttgtaatttcaggccagaaattctcaacactattttgcatctgttttctttttctaagtcatgataatatagatgttctggtctatcataaaagaatgtttatgtacatttcagtcattcggtatgtggctttgtaaattaaagtataggcaaaacatttgtgttatacatgatatataatttcattttgtaaatgttgattgcacatgtggtcacattattgttgagactgcttttatgtgacctgtagtctcccacagaacctaaagtaataagctggcttttctgtgatagccacgtttgcgtatttctttccctatttcccttgcctgctaatgttgaacagcatgaacttgctttctgatgctgttttagactgtccctgttgtatctcaataatatctttgttttccttcagcctttattactataattgttcattctacatgaaagctaggaaactgaaattagaagagcacttatctgctacttgccagttttgcgtgagtgtgttatatgtatgtgtcaatttccctttaaaataactatttattttaaaataactattggcaataaggaaactgttcaaagtagaggcagatcttgatagaaagatgttaatcacagggttgtttataatagcaatatacatacacatttggctagtactaggtgaataggaaaataaatcatgctgtatgtatacaataagaggtcaagttgccaataaattattactgttaatgttctgggaaatgctgaaactatgctaagtgggggagagggaaagcaggtattgcagttttgtagtgaagattgggctttggagtcatatctgagatgtaagtagcagcttttaaattctagctatgaccctgtgcagatcacttaacttttgagtgtcaggatgtttggaaggacaagacaggaaagtgttttaatacagggttcagtatttagtaagccttcaataagtgatattacatacatgtaataaaaactaagcattgaaaggactaggaaaaatgcatcaaatgttagttctgcaggttatagaattatacttttatgtaattttaaaatttcagttatgaacatgtttgtccattaacaaacttataatagctgaaaaacagggttgtgagaacagcttcagttaaaattgtcctgtctagtttgaatatttcaagaacagaaagcctttttttttttttttttttttttgagacggagtctcactctgttgcccaggctggaatgcagtggtacgctctcagctcactgcaacctccacctcccaggttcaagcagttctctgccccaccctcccgagtagctgggattacaggcgcccgccaccacgcccggctatttttttgtatttttagtagagatggggcttcaccatcttgaccaggctggtctttaactcctgatggtgatccacccacctcggcctcccaaagtgctgggattacaggcatgagctaccgtgcctggcccccttttttttaattacagagaaataagttacaccttagtatcagatattaattttcttcagtgttcaggcaattagtatttagaaagctcttgtcatgagatggctctgggatgtgatgatgattgttgggattgaaaaaatggtagtatcatggagagatcataataaattcttagtattaaaagtggttttgctttcagttagggagaaaaattagattgtactatttttcctctatgatttccttcagttatcttccaaatgttgttttttccccacagcccccttaacattgttctctatgcacttctcaatacattttcatttgtttctcaagcctctttgtggatgactcctaaatataacttcttccactagctctagatccgtatttccaataaaatcccctacctgaatattcaagttaaacatgtccagaatacttactgattttattgttaatagccactattctgttgtctggaattaaaacctgtataactaatttgcatccctttatcttcttagtcaataaaacctacaatcctctttctaaaaaaaagaaggagcagagagcgccaacacacaaacaatgtcgagcggagcaagggcccataaacaacctacgagaaacccaaaccctggggaaagcgcgcccccaagcggcacgcgacacctgggaaacaagggggacaaaagagac

SEQ ID NO: 258846 - DNA, 1286 bp, Homo sapiens
tgtcggtggaagctctggtgtgattggttggctcttcttccaattgcaccaatctcaagctcttctctgcagagccctaactacaaaattgaaagtagagaggagggggcagccaatggaaaaaaaaatttgcacagcagccaatcctcctgcggcgttttgtgcctttgcccaacaggaaaatgtgtctcatgcagaggggcgttacccagtctccaatgggcgggagccggtggaacggaggagccaatgagtgcgagatgttgagtgacagctgtccaatggaggccctccgtgctagtacggcttgcggcttaagcgccgccgcggtctgcggaatgtcaactattcaacatggaggcggaggtcgataagctggaactgatgttccagaaagctgagtctgatctggattacattcaatacaggctggaatatgaaatcaagactaatcatcctgattcagcaagtgagaaaaatccagttacactcttaaaggaattgtcagtgataaagtctcgatatcaaactttgtatgcccgctttaaaccagttgctgttgagcagaaagagagtaagagccgcatttgtgctactgtgaaaaagactatgaatatgatacaaaaactacagaagcaaacagacctggagctgtcaccactgactaaagaagagaaaactgcggcagagcaattcaaatttcacatgccagatttatgaagaaatggacttggaaaggaaattctaacagagaagagcttaattccggagaaatttaggaagatgtcttgttaacccttgatgtctagagattgggggctggtgaagggggtttggcttcaatgactggataatgatatctttcatgagagagattataagaagaagggcagataatatatgaataaagttcagccaaaaggatcaaatgagaataaaacgatttaaatatatgtacacacgcatgcacacacacacttagtcttgtaatttcaggccagaaattctcaacactattttgcatctgttttctttttctaagtcatgataatatagatgttctggtctatcataaaagaatgtttatgtacatttcagtcattcggtatgtggctttgtaaattaaagtataggcaaaacattggccaaccttgtgtttcaaacaacaccaaaaaaaggggggcgccaaaaaatacccagggccccgtttccaccctttttaaagggcccaagaggataaaaaacaaggcgcaaaccgcggaaaacggatgtgaaaacatcgggaa

SEQ ID NO: 258847 - DNA, 1161 bp, Homo sapiens
tgtcggtggaagctctggtgtgattggttggctcttcttccaattgcaccaatctcaagctcttctctgcagagccctaactacaaaattgaaagtagagaggagggggcagccaatggaaaaaaaaatttgcacagcagccaatcctcctgcggcgttttgtgcctttgcccaacaggaaaatgtgtctcatgcagaggggcgttacccagtctccaatgggcgggagccggtggaacggaggagccaatgagtgcgagatgttgagtgacagctgtccaatggaggccctccgtgctagtacggcttgcggcttaagcgccgccgcggtctgcggaatgtcaactattcaacatggaggcggaggtcgataagctggaactgatgttccagaaagctgagtctgatctggattacattcaatacaggctggaatatgaaatcaagactaatcatcctgattcagcaagtgagaaaaatccagttacactcttaaaggaattgtcagtgataaagtctcgatatcaaactttgtatgcccgctttaaaccagttgctgttgagcagaaagagagtaagagccgcatttgtgctactgtgaaaaagactatgaatatgatacaaaaactacagaagcaaacagacctggaggtaatgctttcagttgacagctgtcaccactgactaaagaagagaaaactgcggcagagcaattcaaatttcacatgccagatttatgaagaaatggacttggaaaggaaattctaacagagaagagcttaattccggagaaatttaggaagatgtcttgttaacccttgatgtctagagattgggggctggtgaagggggtttggcttcaatgactggataatgatatctttcatgagagagattataagaagaagggcagataatatatgaataaagttcagccaaaaggatcaaatgagaataaaacgatttaaatatatgtacacacgcatgcacacacacacttagtcttgtaatttcaggccagaaattctcaacactattttgcatctgttttctttttctaagtcatgataatatagatgttctggtctatcataaaagaatgtttatgtacatttcagtcattcggtatgtggctttgtaaattaaagtataggcaaaaca

SEQ ID NO: 258848 - DNA, 1461 bp, Homo sapiens
tgtcggtggaagctctggtgtgattggttggctcttcttccaattgcaccaatctcaagctcttctctgcagagccctaactacaaaattgaaagtagagaggagggggcagccaatggaaaaaaaaatttgcacagcagccaatcctcctgcggcgttttgtgcctttgcccaacaggaaaatgtgtctcatgcagaggggcgttacccagtctccaatgggcgggagccggtggaacggaggagccaatgagtgcgagatgttgagtgacagctgtccaatggaggccctccgtgctagtacggcttgcggcttaagcgccgccgcggtctgcggaatgtcaactattcaacatggaggcggaggtcgataagctggaactgatggtgagtgcaaagtgaaggagatctactgggtagtttatttttcccccatggcctcggaggtggggcacaatttggagtcgccggaaactccgggcggcggaggctggaccagagtcgagttccctcctcctgcaccaaagggagccgccaccgtctggtgtctaaaccgcctcggttccagaaagctgagtctgatctggattacattcaatacaggctggaatatgaaatcaagactaatcatcctgattcagcaagtgagaaaaatccagttacactcttaaaggaattgtcagtgataaagtctcgatatcaaactttgtatgcccgctttaaaccagttgctgttgagcagaaagagagtaagagccgcatttgtgctactgtgaaaaagactatgaatatgatacaaaaactacagaagcaaacagacctggagctgtcaccactgactaaagaagagaaaactgcggcagagcaattcaaatttcacatgccagatttatgaagaaatggacttggaaaggaaattctaacagagaagagcttaattccggagaaatttaggaagatgtcttgttaacccttgatgtctagagattgggggctggtgaagggggtttggcttcaatgactggataatgatatctttcatgagagagattataagaagaagggcagataatatatgaataaagttcagccaaaaggatcaaatgagaataaaacgatttaaatatatgtacacacgcatgcacacacacacttagtcttgtaatttcaggccagaaattctcaacactattttgcatctgttttctttttctaagtcatgataatatagatgttctggtctatcataaaagaatgtttatgtacatttcagtcattcggtatgtggctttgtaaattaaagtataggcaaaacattggccaaccttgtgtttcaaacaacaccaaaaaaaggggggcgccaaaaaatacccagggccccgtttccaccctttttaaagggcccaagaggataaaaaacaaggcgcaaaccgcggaaaacggatgtgaaaacatcgggaa

SEQ ID NO: 258849 - DNA, 1159 bp, Homo sapiens
tgtcggtggaagctctggtgtgattggttggctcttcttccaattgcaccaatctcaagctcttctctgcagagccctaactacaaaattgaaagtagagaggagggggcagccaatggaaaaaaaaatttgcacagcagccaatcctcctgcggcgttttgtgcctttgcccaacaggaaaatgtgtctcatgcagaggggcgttacccagtctccaatgggcgggagccggtggaacggaggagccaatgagtgcgagatgttgagtgacagctgtccaatggaggccctccgtgctagtacggcttgcggcttaagcgccgccgcggtctgcggaatgtcaactattcaacatggaggcggaggtcgataagctggaactgatggtgagtgcaaagtgaaggagatctactgggtagtttatttttcccccatggcctcggaggtggggcacaatttggagtcgccggaaactccgggcggcggaggctggaccagagtcgagttccctcctcctgcaccaaagggagccgccaccgtctggtgtctaaaccgcctcggttccagaaagctgagtctgatctggattacattcaatacaggctggaatatgaaatcaagactaatcatcctgattcagcaagtgagctgtcaccactgactaaagaagagaaaactgcggcagagcaattcaaatttcacatgccagatttatgaagaaatggacttggaaaggaaattctaacagagaagagcttaattccggagaaatttaggaagatgtcttgttaacccttgatgtctagagattgggggctggtgaagggggtttggcttcaatgactggataatgatatctttcatgagagagattataagaagaagggcagataatatatgaataaagttcagccaaaaggatcaaatgagaataaaacgatttaaatatatgtacacacgcatgcacacacacacttagtcttgtaatttcaggccagaaattctcaacactattttgcatctgttttctttttctaagtcatgataatatagatgttctggtctatcataaaagaatgtttatgtacatttcagtcattcggtatgtggctttgtaaattaaagtataggcaaaacaggggtcctctagagtcacca

SEQ ID NO: 258850 - DNA, 1141 bp, Homo sapiens
tgtcggtggaagctctggtgtgattggttggctcttcttccaattgcaccaatctcaagctcttctctgcagagccctaactacaaaattgaaagtagagaggagggggcagccaatggaaaaaaaaatttgcacagcagccaatcctcctgcggcgttttgtgcctttgcccaacaggaaaatgtgtctcatgcagaggggcgttacccagtctccaatgggcgggagccggtggaacggaggagccaatgagtgcgagatgttgagtgacagctgtccaatggaggccctccgtgctagtacggcttgcggcttaagcgccgccgcggtctgcggaatgtcaactattcaacatggaggcggaggtcgataagctggaactgatgttccagaaagctgagtctgatctggattacattcaatacaggctggaatatgaaatcaagactaatcatcctgattcagcaagtgagaaaaatccagttacactcttaaaggaattgtcagtgataaagtctcgatatcaaactttgtatgcccgctttaaaccagttgctgttgagcagaaagagagtaagagccgcatttgtgctactgtgaaaaagactatgaatatgatacaaaaactacagaagcaaacagacctggagctgtcaccactgactaaagaagagaaaactgcggcagagcaattcaaatttcacatgccagatttatgaagaaatggacttggaaaggaaattctaacagagaagagcttaattccggagaaatttaggaagatgtcttgttaacccttgatgtctagagattgggggctggtgaagggggtttggcttcaatgactggataatgatatctttcatgagagagattataagaagaagggcagataatatatgaataaagttcagccaaaaggatcaaatgagaataaaacgatttaaatatatgtacacacgcatgcacacacacacttagtcttgtaatttcaggccagaaattctcaacactattttgcatctgttttctttttctaagtcatgataatatagatgttctggtctatcataaaagaatgtttatgtacatttcagtcattcggtatgtggctttgtaaattaaagtataggcaaaaca

SEQ ID NO: 258851 - DNA, 646 bp, Homo sapiens
  misc_feature (14)..(14): n is a, c, g, or t
  misc_feature (24)..(24): n is a, c, g, or t
ccaggtctgttccnccgcgggtanggatatcgtcgaccaggcgctcgggtcgataagctggaactgatgttccagaaagctgagtctgatctggattacattcaatacaggctggaatatgaaatcaagactaatcatcctgattcagcaagtgagctgtcaccactgactaaagaagagaaaactgcggcagagcaattcaaatttcacatgccagatttatgaagaaatggacttggaaaggaaattctaacagagaagagcttaattccggagaaatttaggaagatgtcttgttaacccttgatgtctagagattgggggctggtgaagggggtttggcttcaatgactggataatgatatctttcatgagagagattataagaagaagggcagataatatatgaataaagttcagccaaaaggatcaaatgagaataaaacgatttaaatatatgtacacacgcatgcacacacacacttagtcttgtaatttcaggccagaaattctcaacactattttgcatctgttttctttttctaagtcatgataatatagatgttctggtctatcataaaagaatgtttatgtacatttcagtcattcggtatgtggctttgtaaattaaagtataggcaaaaca

SEQ ID NO: 258852 - DNA, 420 bp, Homo sapiens
agtgcaacactgccatttatctccttcaatgagctaagcagccatcaggttaagaagagggcaggggagaggcgggcacagccttattgggatgatgctgtcccgctgctgactcccagctggtacggcagtgacctctgctggcaggattttcctctccagtgtgcacagagagtaggagttccctcggagtctgtgtggttcagtagtgttcttcagagagatgccccaagactgatgctcacggagagggccgactgggctttcctgctaaaactgtcactaaaggctggggttacacagtcaggagttgagacagattcttacccttgcttcagtgaactttctctcaaacacatatggcttctttacgttactcattttcagatctaaacatatttctttaaaaatatgttctca

SEQ ID NO: 258853 - DNA, 530 bp, Homo sapiens
ggtattctttctaaagtgcaacagtgtaataaagattatttctagatctcaaggaggatctgaatgatggctataatgaagggcctatttaggtaacttttaagtttgaggaataagagaatggggttagtccacttagggtttccgtatttcctcatgttggccactgaccaagtatgaatatagccatctttaggggtgggcgcggtggctcatgcctgtaatccctgcactttgggaggccaaggtgggcggatcatctgaggtcgggagttcgagaccagcctggctaacatggtgaaaccccatctctactaaaaataaaaataaaaaattagctgggcatagtggtgcatgcctgtaatccagctactcaggaaactgagacaggagaatcacttgaatccgggaggcggaggttgtggtgagctgaaatcgcgccactgcactcccgcctgggcaacagagtaagactccatctccaaaaattaaaattaatatcaaaaaaataaagccatctttaagtatat

SEQ ID NO: 258854 - DNA, 349 bp, Homo sapiens
acaggtgcccaagagctggccaataacaccatggtattgagaaactctcagtcttttggaacaggctctgttttcttctccgcttctcttccctatttccctcccctgtcctccccatcccccacctacagataggcctgaaaccaatacagttttcaagaggagagcctttttttttaagaaaaaaaaaaaaaaagtttaaaattaagaaatcaaagaccaggtgcggtggctcatgcctctaatcccagtactttgggaggccgaggcaggcggatcacgaggtctggtgttcaagaccagcctgaccaacatggtgaaaccccatctctactaaaattacaaaaat

SEQ ID NO: 258855 - DNA, 2768 bp, Homo sapiens
ctttgtatgggagctgttttcatgctatttcactctattaaatcttgcaactgcactcttctggtccatgtttcttacggctcgagctgagcttttgctcaccgtccaccactgctgtttgccaccaccgcagacctgccgctgactcccatccctctggatcctgcagggtgtccgctgtgctcctgatccagcgaggcgcccattgccgctcccaattgggctaaaggcttgccattgttcctgcacggctaagtgcctgggtttgttctaattgagctgaacactagtcactgggttccatggttctcttctgtgacccacggcttctaatagaactataacacttaccacatggcccaagattccattccttggaatccgtgaggccaagaactccaggtcagagaatacgaggcttgccaccatcttggaagcggcctgctaccatcttggaagtggttcaccaccatcttgggagctctgtgagcaaggaccccccggtaacattttggcaaccacgaacggacatccaaagtgatacatcctgggaaggaccctacccagtcattttatctaccccaactgcggttaaagtggctggagtggagtcttggatacatcacacttgagtcaaatcctggatactgccaaaggaacctgaaaatccaggagacaacgctagctattcctgtgaacctctagaggatttgcgcctgctcttcaaacaacaaccaggaggaaagtaactaaaatcataaatccccatggccctcccttatcatatttttctctttactgttcttttaccctctttcactctcactgcaccccctccatgccgctgtatgaccagtagctccccttaccaagagtttctatggagaatgcagcgtcccggaaatattgatgccccatcgtataggagtctttctaagggaacccccaccttcactgcccacacccatatgccccgcaactgctatcactctgccactctttgcatgcatgcaaatactcattattggacaggaaaaatgattaatcctagttgtcctggaggacttggagtcactgtctgttggacttacttcacccaaactggtatgtctgatgggggtggagttcaagatcaggcaagagaaaaacatgtaaaagaagtaatctcccaactcacccgggtacatggcacctctagcccctacaaaggactagatctctcaaaactacatgaaaccctccgtacccatactcgcctggtaagcctatttaataccaccctcactgggctccatgaggtctcggcccaaaaccctactaactgttggatatgcctccccctgaacttcaggccatatgtttcaatccctgtacctgaacaatggaacaacttcagcacagaaataaacaccacttccgttttagtaggacctcttgtttccaatctggaaataacccatacctcaaacctcacctgtgtaaaatttagcaatactacatacacaaccaactcccaatgcatcaggtgggtaactcctcccacacaaatagtctgcctaccctcaggaatattttttgtctgtggtacctcagcctatcgttgtttgaatggctcttcagaatctatgtgcttcctctcattcttagtgccccctatgaccatctacactgaacaagatttatacagttatgtcatatctaagccccgcaacaaaagagtacccattcttccttttgttataggagcgggagtgctaggtgcactaggtactggcattggcggtatcacaacctctactcagttctactacaaactatctcaagaactaaatggggacatggaacgggtcgccgactccctggtcaccttgcaagatcagcttaactccctagcagcagtagtccttcaaaatcgaagagctttagacttgctaaccgctgaaagagggggaacctgtttatttttaggggaagaatgctgttattatgttaatcaatccggaatcgtcactgagaaagttaaagaaattcgagatcgaatacaacgtagagcagaggagcttcgaaacactggaccctggggcctcctcagccaatggatgccctggattctccccttcttaggacctctagcagctataatattgctactcctctttggaccctgtatctttaacctccttgttaactttgtctcttccagaatcgaagctgtaaaactacaaatggagcccaagatgcagtccaagactaagatctaccgcagacccctggaccggcctgctagcccacgatctgatgttaatgacatcaaaggcacccctcctgaggaaatctcagctgcacaacctctactacgccccaattcagcaggaagcagttagagcggtcgtcggccaacctccccaacagcacttaggttttcctgttgagatgggggactgagagacaggactagctggatttcctaggctgactaagaatccctaagcctagctgggaaggtgaccacatccacctttaaacacggggcttgcaacttagctcacacctgaccaatcagagagctcactaaaatgctaattaggcaaagacaggaggtaaagaaatagccaatcatctattgcctgagagcacagcaggagggacaatgatcgggatataaacccaagtcttcgagccggcaacggcaaccccctttgggtcccctccctttgtatgggagctctgttttcatgctatttcactctattaaatcttgcaactgc

SEQ ID NO: 258856 - DNA, 422 bp, Homo sapiens
cagtccagacttcttttggtttagtgagatgatattttgttttcacactcaactttacttactgcatagggctccaaatgcatctatgtgccctttctgctttgcagacagtgttccaagtatctggctgcaaagattgggtaagtagagcattcataatggctttcacacatgcaggctggcctggggcacctgttggttccagatgtttatggccttgaccccggtgtgaatgtcatccctccctgcagtgaaggccgaatgagtggtcaggtggaaaatgttcctgccttccttatactggagttaacttccaaggtacagtccttccccatgcattcagaaagccccactccaagaagccaagctcaggtgtcctgtttcacctatgcctcggagtcccacccacattgaacctcaac

SEQ ID NO: 258857 - DNA, 415 bp, Homo sapiens
ccattaaaatatatatagaaggaaatccacctctggggtggcaatgattcacttaacatacatccagctgttgaaagtgatgatgccaggatatatttctcccatagaaacatgcttaaaatatagtaagtgacaaaagaccatgtattgtgattctactttttaaaatgtttacagcataaaaagtgtgaaaagcaacaaaccggaatgttttgagtggcaaaattaaagatttttctttacattttgtcatccaaattattacaaaaacaatgtgatttcctttataatcatggaaaagtgttattttcatttatttatatttacatttcttttctttttcttcttttttctcctgtatgtatcccacataggctacagagcttaaatccctgcctcttgagagaaatcagcc

SEQ ID NO: 258858 - DNA, 614 bp, Homo sapiens
aattatcttacacttacagaagtgttgcaaagacaacacacattatttccaaacacccttccctcagatccccctaatgccaacagtgtacatattgacatgcaataaattacacatgttgaaagtgtgtgataagcatacgatagtttgataagttttgacatacatattctctcatgaaacccatcactgcagtcagggtagtgaatacacctgtcacttacagacagttcctcatatctccttgtcattcctctctgtgcctgcacctctccctgcaatagacaactgctgatctgctttgcgttactgtggttagtttgtctagagtttcgtataaatggaatcatacagcatgtactctttttaaaattattacttaaaaaattgaggtaaattatatatttaatttaccatctttaccattttaaagtgtctagttcagtggtaataaatagatttataaggtcgggcacgatggctcatgcctgtaatcccagcactttgggaggccgaggggggcagaccacctgagatcaggagttcgagaccagcctggccaacacggtgaaaccctgtctctatttatcactgcccgcgtttaccgtcgtgtg

SEQ ID NO: 258859 - DNA, 663 bp, Homo sapiens
ggacctcagtaaatatgttgatggtccagacgaaaatgtgtagataatatccattcgtgattgaggccttgccttgacaaaccacttcttgtcttgaagacacactcttcaactcagcttctcacagaaaccaaaacctcagctcatggcagaaggctggaaccagagtgagaaggctggttgcaacaaagggtaaaatgcttccttaggggataatctaaggcagctaaaatacccagacccattgctatggtaatccacccacataataattacaggttatttgcatatctggattccttttcatagccaggggatggtgtgaagtcagtgctaaagaagcaacaagtggctgtcatgtgtcatctctgccccaagtggttctgaaattggtttgaagcttgaggagccttcattctttttgggataaaggataagaatcctaacagaactcacccccagtcatcactagtcagagagagccttctggcagagtaagtcagtcggccctggctcagcacacaaccccgaccatcgtcgaggcgaccgacacccaactcaccacgacgccacaatctggacgactgagccacccccacagcgagtccccaggctccctcccccggcgcccagccccgcgcctctcccccctcccgccctccg

SEQ ID NO: 258860 - DNA, 208 bp, Homo sapiens
aagtaatcatatgtacaggagcacgtggctctaggatccagacccagacaagggagtacatttctgatctacttactaagccctttcctctttactcaaaactcctttgacatcctttgaattttacctttataataattaaacatgatcgtaatatgctaaacctatttttaaaaccattttaatctattgttgacctttcccctaa

SEQ ID NO: 258861 - DNA, 391 bp, Homo sapiens
tctgcagatcaaaggacatttttcactaaaaatctctgacatcagagacagagactacatatctataatgaacctttccgaaacctgtccattagaaagccacttctcagtacagaggtggaccttggagactttccaggattttcacatccatctgcgaagaggaaaagaactcctgaaactgggctgacttcataaccagtttaatttcacacatctcacctttctggagctgccttgtttttcccttcttgcatcactgcagagaaaattcatggacttcctaaaggtgagactctgacccattagtaagaaagtcttgctttatgttaagttggctttctctggagatctcctaactgctttataaacattctttcacacctccaag

SEQ ID NO: 258862 - DNA, 395 bp, Homo sapiens
gatcactacacttgagcaccagtgtccctgggaacctgttagctatgccaattagcagccctccccagccccagtgcatcagaactctgggttggggcccagcactctgtgtttgaacaggccctgcactggtgctgatgcccaggtccgttgatgtattgtgagagtttcggaaggtgggggctctgccagtctcagctctccctagcaggccctggcccagtgctctcgagtgatgggccttccttagcttcatatgtgtgcgctcagtgagcgaatgaatgcatgcatggtgaataaacagaaagttcaaaacaagtggcagagaaattgagcatcagatacaaaaaaagctcggagcacttcattcaggcattcattcagccctgctgatc

SEQ ID NO: 258863 - DNA, 636 bp, Homo sapiens
tactgatatttagtaacttggatattgtgctaagtgctttacaggtattcttatttaatcctcacaaggcagtatggtagataatctattatattgaaaataatgggccaggcacagtggctcacgcctgtaatcccagcactttgggaggctgaggtgggtggatcacctgaggtcaggagttcaagaccagcctgaccaacatggtgaaaccctgtctttactaaaaatacaaaaataagcgtggcatagtagctcacacctgtagtcccagctactcagaaggctgaagcacgagaatcacttgaacccacgaggtggaggttacagtgagccaaaatcacaccactggactccagcctgggtaagagagcatgactaggtctcaaaagaaagaaagaaaataatgaacaaaaaatgttgagtgggcagtattaaattaaaaaaaaacctaatgtattaaagaaggagaaaagtataaaaattagtcaacaagcagagaaagaaagaaaatataaaggtaaaaatgtatgttatccaaatgagacctcttaagaagaaaaaataaaggaaattcaaaaaataagttaggaaatagtgagtaaaattatgaagttaaaaattcaccaaaaattt

SEQ ID NO: 258864 - DNA, 2395 bp, Homo sapiens
ctgaatatacagtggtggggacaaaagtaggctcaggagaaaatgaaagagaaagaatttgtttcacagtttggattcctgagactgtgaattgatccatcccatctcttcattttgagggagtcactacagttcctgactagccttcagattactttgcactggaacctatcccagttgaaccagctgtggaatttgggggtgaagggtgtgaggaagtggtataggacaagttgcctagtctcctttgctgcacatgggattattttctttaaaatgactatggacaagagatctattgtacttcatgatgactccagtaaataaccatgtattatatgcttgaaaattgataaaagagtagatttgaagtattcttaccacaaaacaggatgtgtgaggtaatgcatatgttagttagttccatttagctattccacaatgtatatgtatttcaaaacatgttatacatgataaacatgtacaatttttatttgtcaattaagaataatttaaaaagaagcagaaacaatatgggttatatttttgagctaagaaatatgtttacattgagatagttaataaaataatttttttcttaaaattattgtttccttcagaaggaataactgactttattttgtttacttcttacataatatttatcagtattaagtgttacaattttaaagaggaaagaaatgatacattttccccaagtaaggtttttaccaatttatattcaagaacacttatttatactttaaggtaattatttatgtatatctcttccactagacttagaagtccttaacagcagggtgtaaaatttaattttcatttctctagtgactatcatcttacctggattatagtaggaatttagtattttagaatgaataagacattagaaaatttggatttgtgttttatagtttattttctttttgagtctctctcccttgaattgttaaaagtaacctttaaattgttaatgtggtaagtaaaattaaataaaatctaaatgacagattgcttttaattctccttggttggaacaaatgttcaaagactatttagataggaagcagacaatagtttgttttcctttgctttgattgggtatatatttcaaaaatgacatgtgtaaattaaacacacacaccttctatttttgaggctttagaagttgttccccaagataagaaagaaacacttttgacctgtgagagaccatatctcctccagaactcattcaaataaattattttgtgatttattttaaaatttaggtataatttatacaatgtacaaatttgaagtgaatagtgaaccaacatctctatcatcccaaaaagttctcttgtgtccactttcagtcaggtgtgccatcccagaggcaaacacgtgtgcgagtgtgattctatcagtagattttgcctctttcagaacttcagatatgtagttatactgagtgtgcttatgctcctggtgtcttttgctccacttgctggtgttttatagattcatactcttactgcatgtatcatgctattgagtagtattctattgcatgaagttattcacctattgatagacatttggatggtctacagtttttggctgttatgaatataactactgtgaacattattgtatgtctttttgtgtatcgggggaaaccagcccctgatattcgatatgggtccttttctattttccctaagtgttggcctgtttgagaaatacagggaaagaatacaaaagggagaaattttaaagctgggtgtctgggggagacgtcacatgttggcaggttctgtgatgcccagcaagccgcaaaaccagcaagtttttattagtgattttcaaaaagggagggagtgtatgaatagggtgtgggtcacagagatcacatgcttcacaaggtaataagatatcacaaggcaaatggaggcagggtgagatcagaggaccggggcaaaattaaaattgctagtgaagtttcgggcacgcattgtcattgataacatcttaccaggagacagggtttgagagcagacaaccggtctgaccaaaattgattaggtgggaatttcctcatcctaataagcctgggagcactaggggagatgggggcttatctcttcccttatctacaatcgtaaaagacagacattcccaaagcagccatttcagaggcctccccttagaaatgcattctctttctcaggggtgttccttgctgagaaagagaattcagtgatatttctcctatttgcttttgaaagaagagaaatatggctctgttccacccagcccacaggcagccagcctttaaggttatctcccttgttccctgaacatcgctgttatcctgttcttttttcaaggc

SEQ ID NO: 258865 - DNA, 559 bp, Homo sapiens
  misc_feature (1)..(1): n is a, c, g, or t
  misc_feature (120)..(120): n is a, c, g, or t
nggggatatcctgtggttgagtcatatacttgtttgacaacagcgggaagaattcatccactatcctgtagagaaatccagaggtaatgtatgatcacaaggtatgaagatgccattttnttggttcctgaaaggagcaaatgctcttggaatggacagcatggtttcattttgtgtagtaatgctcttgctaagttctagctcttacctttggttcaactctgagagcatttagttccccatccccaacccagccaatgcaccacccatgaaaatctacattggaattttgatcagtcatattgatatgacagattaaattaagaaggattgccacatttgtaggattgtcttctagtcaagaagagatacctacccatgtaccagtattggtcttttactcagtccgaggtggaattttatagttatcttcagttaaggccttcacaaattttgtaaattactttttattgttgtgtaactgttctttttcctatcatattcatcagcttttcccccattgagttttgattcaataaaggaagacaaattatggaca

SEQ ID NO: 258866 - DNA, 537 bp, Homo sapiens
ctcttccagatgaagacagagagggttgataattttacctatgaagacactgaagcacagagaggttaagtaacttgcctgagatgacacagctagggagcagcagaaccaggattcaaaccagactgacttaagaaaacatattcttattcacaaccctatgcaacttctctaatttttaactggaagacaaaatagtgttgtatctaactctctcaccagatggttaatgggctatgcactggaactttggatacatgatatgtgggtaggaaaataaattaaaactacagtcatattgaatgatttaatgtaaaattaatgtcaatccctagatattccagtggtgccacttccaaagtaatagtttacatcaaggaaaaaggtaccttattcaggaaagttaacttctagttccctggtcacccactgtcattttctttttactgaccactaggtaacactttcttctgttgcagaacaactgtccacatgtttgctatcaaggaaggcgataattaaagatgtatgttcaga

SEQ ID NO: 258867 - DNA, 436 bp, Homo sapiens
aatttttatatatagtatctaaaactcaatttaaattcaagacacaataggagacacaataaccctaaggaaaaaagaaaatcaactgtagacagtaggtagactagacaatggagtttttagaaatatattttaaatgcttaatttgttaaaagagatgagacaaaattgagaattttagaagagaactggaaacaacaataaaaaagaccaaatgaaaactataaactctagcaatcaaaattaagaactcggtggatacaaccacagcagattagaaacagctaaagagagagctagtaatttaaaatagatcagaagaaaatatcccgaatgaaacatgaagataaaaatgagtggaaaatttagaagagaagagacgataaataggaaatacagtgaggaaggtctaatgtgtaacggaatagcagaagga

SEQ ID NO: 258868 - DNA, 424 bp, Homo sapiens
ctgccactgccaaaaactaacccgactctcaactgaaaaaatgaaacctcctctgttagaagcaaaaattctccttgattacaacttcttagacttaaatttctttgcacagttcaattctaaattacaattgttcctatctgctgtagacaagatctttcatttaaatcttaactagatgttggtgtctgttcttcgatgccacacttcaactgagtaactgcaaggcaatgaatacgtgtgtatgaagtaagtgaccaagtcttgaggttccacatattttcagaaacgtggtcagatttgaagttgaatctgagggtttgagttaaggaaataagcttaaggagacaagatcattcaccacaatgtcacacaggcagaaatcagatacaaatcagagaatgccagaggtgtgataaaatag

SEQ ID NO: 258869 - DNA, 448 bp, Homo sapiens
gcacacacaaacacacacacacacacacacacacacacagagagaaggagtttgggtgtgttcaaggaagattaaaagtagatgccaaggtaacacaaaaatgatagaaatttataacaggattttataaggagaccaattttatttccatacatagcttttattttggtctctgttttccaactttactccaggaaacacactacacaggctcccttcttaagtgctggtgggccactgcacatgcagacagcccactttaagggaagaatcaggggagaagagatgcagaccccagaattatgccaacatacaaaagcctaagtcaaaggtcaaaccacacacttgaaatctcatcacctgtttggccctgttttaagtgtgctttactttctttaatttctgctctaaagcttttaaataaactttcactcctgctctaaaattt

SEQ ID NO: 258870 - DNA, 389 bp, Homo sapiens
tcagtgtgttattgggtccttccaagggaagtgacagtacatgtctggtgaatgagcttgtgatgagtgaatgggattccctcccaataggcaactgagagcaaagttctgggtggagggtccttggtgcatcctccacttactcttcatgccaatgggtacctcaggcctgtctgtccaacctctggactttcttaactctgccccagtctccagcccctcccctgtgtggctggggtaaggcagagtctgatcccatctggcctggcctgtgcccagaagtgcccaagaggcaagtgtcctcttgcccacaggaccccaggagaatcgcttgaacctgggtggcagaggttgcagtgagctgagatcgcgccaccgtactcggtctc

SEQ ID NO: 258871 - DNA, 379 bp, Homo sapiens
ccctacagatggacttagtgttatgcaaggtccttacagcgaaacggccagctttgcagccctctcagggggcacgctgagtggcggcattctctccagtggcaagggaaaatatagcaggtaaacaaatagataatttctgacagaaatggttagaattataagaagtaacacattgagccatttctctgtgccaggcttgtgccacgtatcatcttattttgatttaattgtcaatggttttgttttgttttgtttttacttttttatttttggggatagagaatcgcttgaacccaggaggcagtgattgcagtgagctgagatagcaccactgcatgcaagcctgggcaatagagcgagactccgtctcaaaaaa

SEQ ID NO: 258872 - DNA, 545 bp, Homo sapiens
caagctaatgccccccagctctgctaagaccctcacccccaagactccagggtgaaaataactaacctggaactagaggtgctgatgccagggagagccagcttgccagggtgagtgcaggagagcaaggccagagctgcaaatctccacacagcttttcgcagtggccactgagcaaggctggttcttgaagggattgtgacagcccctcctgaccatgcctccaaaactcttagcaactgctttcctctgaaatgaagttccaaagagctgctccaaaaacagtatatccattgcaagatgaactaacaatgcatacttgtgtggatctatttatctgcacaagtatttatccacaccttgtgggagagtgtgtgtgtgagagagagagaaagagagtgtgtgtgtactagtaagactgtatccttctgcacatatgtgctagagaaatgggtatactcatgtaatgaattgaaatgaagcaatactgtgcctgagacaaaaaaaagcccggcctaataagctgaagtttcttgctgcaggcc

SEQ ID NO: 258873 - DNA, 875 bp, Homo sapiens
attctttttacatgatatgtttctacacgcacatgatagaggtcttttggtttttaaattctcaatacttaaacctaaatatatcaaagtaaaagtatgtgaaaaaaaactatgctagttataggttgaataatgtcccccaaaatttatacattgaagccctaatctcagtacttcagaatgtgactgtaattggagatagggtctttagagagatagttaaattaaaatgaggctgctaggttggccaaagtgctgggattacacgcgtgagccactgcgcccggcctagtttgtgctttttacttaccagttaggggttatattactgtgtaacaaaatggacggttatttctattcattaacaagattcaagtaatagcctctttagccacatattccttaataacacctttagaccttataggggtaattattttctatatacttttccaatgtatttgaaagtttgttggctcttcttccgtaattatactatatcctcagtaaagaaagtttggcatacagaaaagttgaaggaagaaaattttcaatcactgttgttccactaccaagaaataatacttggaggtatttcctttcaatcttcaacatgaggatgctaatgtccccctcataaggggccttaaagtcactgactctgtgcactatttcatgagaacattgatgtgggtatttaaccgaaagaaaacttgagttttctttttttcctttttattgtgaaaatttggaaacttattcaaaaagtagaatagttaactaattgatgtacccatcagcaagcttcagtgattaccaccatttaattttgtctgcacccccccacccactgccaccccagcccattcccagca

SEQ ID NO: 258874 - DNA, 771 bp, Homo sapiens
attctttttacatgatatgtttctacacgcacatgatagaggtcttttggtttttaaattctcaatacttaaacctaaatatatcaaagtaaaagtatgtgaaaaaaaactatgctagttataggttgaataatgtcccccaaaaaaagtgctgggattacacgcgtgagccactgcgcccggcctagtttgtgctttttacttaccagttaggggttatattactgtgtaacaaaatggacggttatttctattcattaacaagattcaagtaatagcctctttagccacatattccttaataacacctttagaccttataggggtaattattttctatatacttttccaatgtatttgaaagtttgttggctcttcttccgtaattatactatatcctcagtaaagaaagtttggcatacagaaaagttgaaggaagaaaattttcaatcactgttgttccactaccaagaaataatacttggaggtatttcctttcaatcttcaacatgaggatgctaatgtccccctcataaggggccttaaagtcactgactctgtgcactatttcatgagaacattgatgtgggtatttaaccgaaagaaaacttgagttttctttttttcctttttattgtgaaaatttggaaacttattcaaaaagtagaatagttaactaattgatgtacccatcagcaagcttcagtgattaccaccatttaattttgtctgcacccccccacccactgccaccccagcccattcccagca

SEQ ID NO: 258875 - DNA, 322 bp, Homo sapiens
aaggggaagcctggctccaccactctgtcatggcagtgctggccctaaggctgtgactctcctggcatgtgacaactccttaggcagggccatggggacggagccaaagaattgccagtggggctctgaaaggacaagtcaggaagcaggagctggcgaggtagcagaggagaggaccaggagtatgacctagaacagaaaagtgttttccatctgttctaaccagctgggaaccactttaaacaaaatgttaggtatcaaatctgagtgatgatgaaaggaatttcaaatctgagaaagagcaaaggtaagatatttcttc

SEQ ID NO: 258876 - DNA, 345 bp, Homo sapiens
gatgtttgtggcttgttcttggaagtgcttctcacgtagatgcccttatcccgtgtgtgcatctgcgtcctgcactgccagtggctgccctttgagaaccgggtcactcccttattgagttgtttgtctcatgtgtctgttggacgccccctttgtgacgggcactgtctgagccctgggggtaaaccgggcgtgacgacaccccaggtgtctgttctcaaggttgcccatcctggtgcgttcctctctcaacctgagcggaggcgatgtgtacttggttcctccttcccctctggttaccaacagagaagagttgatcccctccctgttttcagttgaaaagca

SEQ ID NO: 258877 - DNA, 526 bp, Homo sapiens
acagagtggatcaaaactacttaagatttgatggatcaaggaaggcttcagaaggaaatggtgtttgggacaattatagtgtgaggagaatttggaggagatggtaacagaagacaaagtttggtcaatccaagtggaatgaaagcataagttgaaacataaagttaaaagtcaatatggagtaggaaagtttaggcaatagtaaattatttagagtttaaagttaatagggaagtagaatggtgaaggagaagtgtagaaatgcaaggaggagccaggtcatggagggtctttgatgctaggtggagtagactgaatatattcaatggcaagtcactgaagaattctaaactgaatgagtttatgacttggcttgcattcaggaagacaaaactgtcaacagtatatatgaggaactggagtgagtaggtactagaggcagggaagccagaaacagattcaattgtcaagataagaagtaatgagggcctggactggaacaatggcagtaggactataaggaaaa

SEQ ID NO: 258878 - DNA, 444 bp, Homo sapiens
gtgggcatgatgccgaaggcttctcgcctgcttcttccttgaaacagtccctctttcccactccccattaccttgtaatttgtataaatgacttccaatcctttttggaaaatggtggcatataacccaaaattccctggacatgacatcggggcaccagaaggacactagaaagggcaccatggatggcactggtccgtcccgatgccccgtgacacactgagaagctgacttgtagaagtccgctcttcgtgttttattctgaactgccttcaaaatggcatttaggttttcctggagacgctgactttatcagtccttaaatggccagcagggttgatactcactgacatggaatcttgctcgctggtgagaaagtctgctgttctcttagacttgggaatcgtctcgtggaaatatacacttttttgttatttacaataa

SEQ ID NO: 258879 - DNA, 212 bp, Homo sapiens
atatcgagtctatcattttgtgaattgccgtcccacccctccgcatccctcccctttccctttcctccccaccccgtcccccccatttcattcgctttcttcctctcttccaagtaataactgcttatcagaattcatggctctcttaggatggagggaattaatttcttttctctctctctctctttttttttttcgagacaaggtcttgc

SEQ ID NO: 258880 - DNA, 594 bp, Homo sapiens
aggacacggaacacatctggttggttctcctctatacccgcactatctggcacaaatagtgattggatggatggatggatggatgaatgaatggatgaatgagcaaatgaatgaatgaatgagcaaatgaattaagtcctcaatgaatgaatgaatgaatgaatgaatgggcaaatgaattaaatcctcacttccagactgacagctcctccagggcagggtccttgtccaggtcatctcagtagcctcccccaccgtagagtggtcactcaatgaatgggggttgaatgattaagtggcccaaggtggcccagggctcaccactgcagaaatcagaccaaaagagctagaaccaccccagagagcccttcaggggacctccaagataacacaggaggaagggtaccaccttcctctctgccagtaggccactgtgcacagttgagagtccaggcctcctggggggaccggatcatttccagaacaactgctatgcaccaggtggtgtttggggtaaacggcatccctgcaagggatcctcacccccttttcttccttcattctctgctggtgtcaatcacagcttctagcaga

SEQ ID NO: 258881 - DNA, 410 bp, Homo sapiens
cctatgacagacaaggcaagctctactctcagaagcaaaaattatatatctaggagtcagagtatgaatcaagaagaatggacttctgcttcttatctacctaatgccagataatgatgacagcaatgcattttctacattcatatcctcaatcatatgtttttgaatgcttactggaaaaccggtttaaaagaaaggtgactagttattggtcttgctctgacagccgtggaaaccatttgctgatgaaagcacaagcaacaacaacaaaaaagatgaataaactggatttcaacaaaaacacatttgtgcttcagagaacatagtcaagaaagtgaaaaggcaacccaccaatgggagaacacagtttcaaaacatatatctaataaaatatttgagtccagattaaa

SEQ ID NO: 258882 - DNA, 464 bp, Homo sapiens
tgggaaacacagtgagaccctgtctctaaatttaaaaaagaaagaaactatgaaaagaaactgtaaaaagcaaagtaaatccaaagcaagcagaagaaaggaagcagaaatcagtaagatagaaaacagaagataagaaaagtaaaaccacaaggtagttctttgcaaagatcagcaaaattgggaaacctttagctggttccaaactgtgctaaaaaggcaaaggacctataatgtccaaaacaattttgcaagagaacaaagttggaggacttacactatctgatttccacaccaactataaaaccacgatagttttaagaccacgtgtttttctaacaaatggcactgggaaattgaatatgcactgctaaaaacaaaatgaacttagacccttcatactgtttgcaaggttaactcagaatagctcatatattgtatatagagttaaagccataaaaatt

SEQ ID NO: 258883 - DNA, 502 bp, Homo sapiens
tatgggtgatgttttgtcatctttattttttttcaaagtttccctgtagtggccttctcacacaaagccagaggccctccctaacactgcttacagaggtgggcctagaacagacatgaatggacactgcacctggaataccagcacctggtggggaggtttggttccatgtgcacctccacatacaaggcacgaacatctcagatctgggagtgcccaggacccagtggatgctcagtattgtaggaaagcaggtctttaccaaagttcttggtttattgctttcaaacttctttgcaaccttcagtaagaaacattttctatcataacctctttaacacatttatagtgttagataacactgtaactatatataaatataaatataacacatgtatataaataaatataaatataacattttatagtataacattaatatgtgtatgggatccagttttatatgtttaattttcataaaacattcttgttacgtgtgatg

SEQ ID NO: 258884 - DNA, 490 bp, Homo sapiens
tcactatagacaaggaccgtataatagacgctggccccaaaggaaactactctcgatttatgaatcacagctgccagcccaactgtgagaccctcaagtggacagtgagcaaaggtcatatctttgaaaaatctgtgaaatactcctgccaaaaagaaatacaggggcaagagaaatactacagagttgccattggcaacactgagaaatgtgggaaactataagaccagtaagccatactcatcaacagggaaaaatgaaggggactgatgacaagagactggaggaacatggactaatttttattgtagggcttatctgtgtttgtgtcagatcagtttgttagagaaacagctgaatatcatttgtgatatttgagacagaatttggaacactgattatatttattattgaggaattatttttatttttagctgtgatagtgggtttgttatgtttagtaattcctcccttttagaggtgcatacag

SEQ ID NO: 258885 - DNA, 721 bp, Homo sapiens
ctcacagcaggaaattgaatcccaaagatgtcaagtaactgatccaaagtcacaaggctgtatgtgatgaagttagaactcctgcagggcctgacctctgattctgtaccctgggaacttactttgttttgcctcttggaaaactaacatacagcagtctatatgtgcatggaagactgagccattatatttctgccagtcagtgtggcagtgtacttctgcctgatatttcttcattcattgagtatcagttgtgtgccaatgatgagccaagacctatgtcctcgttcccatgggttttataggcctgtaatgggatgaaatggggagggacagtgagcaaaggtcatatctttgaaaaatctgtgaaatactcctgccaaaaagaaatacaggggcaagagaaatactacagagttgccattggcaacactgagaaatgtgggaaactataagaccagtaagccatactcatcaacagggaaaaatgaaggggactgatgacaagagactggaggaacatggactaatttttattgtagggcttatctgtgtttgtgtcagatcagtttgttagagaaacagctgaatatcatttgtgatatttgagacagaatttggaacactgattatatttattattgaggaattatttttatttttagctgtgatagtgggtttgttatgtttagtaattcctcccttttagaggtgcatacag

SEQ ID NO: 258886 - DNA, 351 bp, Homo sapiens
gacatgatctcagctcgctgcaacctgtctcccgggttcaagtgattctcctgcctcagcctcctgagaagctgggattacaggtgcccgccaccacgctgagctaaattttgtgtttttaatagaggcaggttttcgccatgttggcccggctgttcttgaactcctgacctcgggatctgcctgcctcagcctcccaaagtgctgggattacagccgtgagccactgggcccggccgaagagattgtttttaaaaatacttaggaattacatgtaactagcttaaccatcaaacctgttaaattagtggaatcaagctcaagtttctcactaaaatttttgaaaagtgt

SEQ ID NO: 258887 - DNA, 610 bp, Homo sapiens
agggatatgggggaaaaatgtcctcaaatgcttatcatgaaaaataccatgtatttacattatttcaggaattaatcttttttacttttaatgatatgaggtgtattgacagagtttctttgtctgcctcatctttctgtggggatatgttgaaaggccctgcaagaaaccagaaacttgatttaataacttgccagagcaactgtttagcatctgtcctcaaggcaaagagttgaactgatagatttcataaagaaaatgaggaatcattatacacttcatcggaatttcatcacttgttagaaatttactcaaaggatcataaattctgtatttttcattattcaggaattctgaaaaaagagtgtgcattttgtgataacaaaaattctggtagggtatgagaaatccatccttaaagaagaaaagaattcacaacttcaaatggatgctgttttctcatgaaggatttgcccagtggctggagagtgcttctaatattattatataatataatattatgggtgtagatgccagttttgagatgatgtttatcagcactcctgttcttgaacagtgagaaggtatttattgggcatgttaagaacag

SEQ ID NO: 258888 - DNA, 415 bp, Homo sapiens
aatttttataaactttgtaaattaagaattaagtatttgcagaattctttcaaggtaccaaacactatcctcactgctcagaatacaaatataaacaggttgttccagcccataaaaagttcacagtctagggcctgggtgcagtttctcatgcctgtaataccagcactttgggaggctgaggtgggcagatgtcttaaacccaggagtttgagaccaacccgggcaacatggcaaaaccccatctctactgaaaaataaaaaattagccagacgttgtggcacatgcctgtagtcccagctacttgggaggctgaggtggaagaatcacttgagcccaggaggttgaggttgcagtgagctgtgatcatactactgcacttcaacccaggtgacagagcaagactctgtctca

SEQ ID NO: 258889 - DNA, 371 bp, Homo sapiens
agggaaataaagccgttgctgctgcagcaaaatggctcaaagtccaaccaaagtctggccttttcctgagcctaggctgtgggcgactcgctagcactgccctgggcctccaagctgcctgctcgctgagctcagcgctgacactcacaggagctgcgttcgccggatcctctgagaggctctgcaacgatcccgatccaattcagcagcgttttaaaaggaaactcgtgcagggccactgaaaagtcaggggaggctcagatgttatttcccacggattcctgtttttccagaaacgttgtcaccaaataagtatgagactgttaatttggagaaacaattagcccctacaaaaaaaaaaaagaaagaaa

SEQ ID NO: 258890 - DNA, 366 bp, Homo sapiens
gctgtcagtattgaggatttctaggggtggcaggcagaggaatccccttcagttccactcttgattttcacaatcactagattcacctctgcctggtatggagatgagaaatcaggagactcttcattcaggcaaaccgcagtagaactgtgctgctcatggccacagccaacctccctgcattgtttctcagagggagttcagttgaggagtctatagaagtagaaaggacagacccctctgtacattctcctgttactttcattgtgcttgccatgtttctactacctgcatggggttagagatgacaattaaaataataagttttccaggaagccaaagatcttccaacaatttgtgctggga

SEQ ID NO: 258891 - DNA, 440 bp, Homo sapiens
agaaattgcaaagtcaaaaatggggctcattgcagcaggaatgatgaaattgcttttagatagagaggtgaagggatttaaaacattaacttgttttaaaggtatcactgtttaaagctaacagtgatttattaatatttgcactctgaaagttttaacagttttaattttatgtatacaccacagtgttttggctactatacttgcctcttttgttcagttgggaattgagtaaactaatagagtaaaaaaatgagtacaaagtgggctttgactagaactctaacaaagtgtgatcactgaattaccaagataattaacccataccccacatatactccatttcccatgacacatattatattgcattgtttttgcctatttgccttcctacttcctaaactgttgaattagtttgcttttgttgcattaaaaaaaag

SEQ ID NO: 258892 - DNA, 435 bp, Homo sapiens
ggtcctggaagataactgctccctcaccaagggcagaggaactgatgtcactgtcaaggtcacaggggacaatctggaccacactgtcccctaatatgttcatcaatgtattagattatcttagtttataatttaggaccaaatacatctcttatggaaacattagcaccatgtcttttgatgtggattaagacatgattcagagaaaattctgttgcagaagtcattgacacaaacaatagtctttcatggtcttatgacagcaacatttatatgcatttatgaaacttccataatcattgctctatataattaatgttttcttagaaaataaaatcatgtcactataggcaaattttattttaactttgaacaattcaatagcatttattctgtgtttactaggcgcaagaacctgtgcaaaataatatgtaa

SEQ ID NO: 258893 - DNA, 372 bp, Homo sapiens
ttttgcctgagctattgtgaagtccttaggaaacacacgagtttggaatggagggaatctggagttcaactctgcacaagttaactttaaggagatgtcatgtcaatacaatgggatgtgaatctatagtaagattggaggttggggctgtggaagtatacatttcagagttatcagtatgtatctggcatttacagtcagaaggctacgtgatgtcacctagagataaatgtgtagagaaggatgagttctgggaaaggatctctagacctgccaatatttatagatcagaaaatgatgaggactttgggaagatccagccaatgacttgataggacaataggaagatttcagagtcctagaagccaagta

SEQ ID NO: 258894 - DNA, 365 bp, Homo sapiens
cagaatgcaacttgtattgttcctctggggaaatgctagcacctgcctggctcaaggtaggcactcactaatgaccctggcaatgcatgaatggttttctgaccagtgatgctcgtgacagcacactctgaatggtaaagtatctctacacccctgagaaaagctgtggctccagagggaaaaggaatgaggacaaagccatagcactgtagtcaaagagaggggcagagggggaaaaccaacacaagattggcaaatttgctttgtgggtacaaggaggcatcatcctaatgtttcaggtggtgctttccaggaggaaaggaatgccttcaattatgaaaagtaaagcataagatcttgttatt

SEQ ID NO: 258895 - DNA, 1488 bp, Homo sapiens
gccacgtcactggctcaggctcagctgctgggtcaccaggagaatggacccttcctccacctcagctcagagcacagtgatgattcgtgactttcccaatagaacttcaaatctctgaggacggggggtggggggatgtgcttgagtgtttgtactcatggtcttgttctcggagtgacaaagctggaacacaatacctctatgcatgaaaaggttgtcacttgtcacaactaacaggctttcacctcaaggaaattttcttcccttgtgtacttttcccctggcagtggacatggctgcactcttccaagaagcaagcagctgtcccgtctgctcagactatctggaaaaaccaatgtccctggagtgtggatgcaccgtctgcctcaagtgcatcaattcgctgcagaaggagccccatggggaggatctgctttgctgttgctgttccatggtctctcagaggaacaaaatcaggcccaatcggcagctagagaggctggtttcccacatcaaggaactggagcccaagctgaagaagattctacagatgaacccaaggatgcggaagttccaagtggatatgaccttggatgccgacacagccaacaacttcctcctcatttctgacgacctcaggagcgtccgaagtgggctcatcacacagaatcggcaagaccttgccgagagatttgacgtgtccgtttgcatcctgggctcccctcgctttacctgtggccgccactactgggaggtggacgtgggaacaagcacagaatgggacctgggagtctgcagagaatctgttcactgcaaagggaagatccagctgaccacagagcttggattctggactgtgagtttgagggatggaagccgcctctctgccagcacggtgccgctgactttcctcttagtagaccgcaagttacagcgagtggggatttttctggatatgggcatgcagaacgtttccttttttgatgctgaaagtggttcccatgtctatacattcaggagcgtctctgctgaggagccactgcgcccatttttggctccttcaattccacctaatggtgatcaaggtgtcttgagcatctgtcctttgatgaactcaggcactactgatgctccagtccgtcctggggaggccaaataagccgccactgcaaaaaaaaacagggtcagaaaattacttgggtgggtagacttaggaattttctacttggtaaaagcattatacagtcataggagaaagatatgggacatttctataatctatattctaatttgattcgattattgagtcgtaagtattaattattgccaccatccaactcattgagtcttatggttcacatcttgtttcctatagaaatgttctgtattctcggatcaatttccaaatgctttactttttcatttctgtaagttcaaatcaatgtttaaattatagaagttatgaggtaaataaacatttggatatca

SEQ ID NO: 258896 - DNA, 662 bp, Homo sapiens
caggttttccagaagcaggcaccaatacagagttagaaacacaacaaattgatagagggtattgcctatgaaagacaaaggagtgtggctgcaggagtttgtaggcgaagccttcagaccacaatgcaggtctgacttgttttggtggtgatatggtttggctgtgtccccacccaaatcttatgttgaattgtagttgccataatccccaggtgtagtgagagggaccattgaatcatgacggcagttacctacatactgttcttgtgatagtaagtgagttctcacaagatctgatggtttttttaaggggcttttccccttctcctcggcacttctccttgctgctgctatgtgaagaaggatgtatttgcttccccttctgacatgactgtaagcttcctgaggccccccaaggcaggccgaactgtgagttcaaacaatggtttgaactagtgctcaaaaaatgtgtgttaagtcaatgagtgaatgaattaaaaaaatgagtccagtagataaaataaatgttgaaagagcaacaatcaataagattctgagtttccttaggacaggtatccaaccattgtttttgtatttccactgccttgcacattgcttgatacaaactcaataaatggcgacaactatgtaaattaataaat

SEQ ID NO: 258897 - DNA, 443 bp, Homo sapiens
tattccaagttgataggtcagtatttccacacatgtacaactaattacaatgccaggctctgataatgcactattttaccctgggctatgaaagattgtcacagtgaacatcaagtccccctctctatcatagcaactaaaatcttctatactttaaatcaagtataccacttagaaaagttcttctagataatcatattttagtaggaggaacaagacaatctcctatcataattaaaaggcacagttcagggggacagtaatgtttgaaaaattggctttcttcaaacttcactgtacattctactcttcatttactcatcagttcaacaaaaataaacaaaagaaaaatccaagtccctctctcaaaccattccaactagtttgatttttttgagggagttttacaagaattaacattaacagaaatgaaaatgaatgct

SEQ ID NO: 258898 - DNA, 366 bp, Homo sapiens
tcctattatttaagttctgagatttttttggaccgccacggtggtgtgaatttagagtcctaatgggtgtgtgcccagctcccgcgattcagattctcaggggagagtcatttctcctccacctgccctgtgcctgcggttgagatgtgcttccttccttcctgtccttctcttcatgatggacttctttctcctctacctttgcggtgacggggaggcccttccatcccagctgtatgtgtgggcttcttgttagagatggggatcttgggtagttttttctttatcgatggtttgcaaaataatggtgaatctttttttatttttatttttatttatttatttttttgagacagagtctcgctc

SEQ ID NO: 258899 - DNA, 445 bp, Homo sapiens
caaggagttcctgcagctgccgtccatcgagatcacgccctccagcgacgaggacaccccgtggtccaactgctccacacccagcgcgtccccgcgccgaaaacgcttcctcctccgcaagtggctgagggtgagggagcggaaggagtgcagtgaaagcagctcaagcttgcggattttcactgcacaaagttgaaaatatgaagaggattaggagacccttttcttctccttaaaccctaggaaggaagaagtggaacaaatggtaaagacagcatggcttactaactttccagtgttcactggaatactccaagaccaatcatgttcatctttgtatcgtcacagcactgtacctgacctcttacagtgatctatagatctatagatgtttgttgatgagttaataatgagtaaataaatgattcctttttctctactgttt

SEQ ID NO: 258900 - DNA, 305 bp, Homo sapiens
tttacttgtcactgacttgaagctcaagcttgcggattttcactgcacaaagttgaaaatatgaagaggattaggagacccttttcttctccttaaaccctaggaaggaagaagtggaacaaatggtaaagacagcatggcttactaactttccagtgttcactggaatactccaagaccaatcatgttcatctttgtatcgtcacagcactgtacctgacctcttacagtgatctatagatctatagatgtttgttgatgagttaataatgagtaaataaatgattcctttttctctactgttt

SEQ ID NO: 258901 - DNA, 512 bp, Homo sapiens
cagtaacagtacaagcagagccctgttactgttaaaggcagagcttttaatgctgatgaaatggagattaccagggctgaggcaggacctcacagctcagaagtgacagcccattccaacaccttggacatcagattcctaaacgtctgaatgttttcacgccaacaaggacttgggccagatgatttgtgacttgaggactgaattctaatagttaaaaaagtaactgaaagatatttaaatgaattagaacggaatgaaaaataaacttgaacttataatattattttaaaatttgggggtgctatgtagcaaaataaaaatcagtgtaagcagtgagaaaaacctaattcagaaatgaatcgaaacttggtttgtttttttcaccaccagagaatagggaaatattagtcaaagagagggcatggaagaagggacatctaatgtgaacgaacttcatacttactacttaatgtagataaataaaggcattctttattaaatcaaaaaaa

SEQ ID NO: 258902 - DNA, 431 bp, Homo sapiens
tcagaaacacacccagcatcgggccacacagagggtgcatcctttctggtagctctagcagggatggggtgcataggcccaggcctcatcttggggaagcagctggggatagggagcccactctggaaggccactcccacctcctgcacactcagtcctgggttcctaggctggaggcacagactggggcaagcaggtacttgtctgggcagtgctgagcccaggagcccagcctgggaaatttccagttgggtagcccactcttggtccactgcagcaggagaacctgctttaaattctccacattgccggccaggcgcgatggctcacgcctgtaatcccagcactttgggaggccgagacgggcggatcacgaggtcaggagatcgagatcatcctggctaacacgatgaaaccctgtctctactaaa

SEQ ID NO: 258903 - DNA, 484 bp, Homo sapiens
tcttaccctttaactttcataaaagagaagcctgattttgttcaggtatctagccttctcccaaagaccctgtgtggcttgaaggatacctttgctggagccatggataggataaatcttgatcagtaaaacaattaggaaatcctgtacttttgcaattggttcggaatgattcgtacatgacaaaggacacacgaggcaatttggaggggctctcattggcgaaatctggcaaaatttgagtatcaaaaagataagatggtaccattgaatagaaagagaatcgaactccatagggatttcaaagaaaaagaggttggggagggtgcagagaaaaaaaacaacagcatctttatagaagagtgcccctaaaaaaatgcagaaagagagagtgagaaaagtaccactttgctaccaccaaatgtaataattgattaaggtattttcaccattgagtgggaagttaagaaatgaaacatgtatt

SEQ ID NO: 258904 - DNA, 838 bp, Homo sapiens
caggtccagaactaagtgggagtggaggcaggccctccacagaagctctgcagcaggggctgggagagcagaagggcaggccctgcaactcaggctgggagtatcgaaccctctgcctagggccggagttgctgccagtacccgctccctctgctcatccatccttgattatttggcttctaggaacagttgacttcccagaatgcagtgggctgctgggcacccctctcacggttggggaggattctgtaaataaaggtgccccttgggttggggcagtggtgacgagctgtgggaagagccctggataggaagccactgagtctgccctgggctctgataaaaccttcaccattaacttgctgtgtgaccttgggcatgtggctttccctctctgggcctcagtctgttcatctcccaaatggataatgaagcctcttgggaggccctaccataggatctgttgccatgctcaaatgagttactgaataaggtgcttctgcttcttctagagatggtgctaaagaaaggactagcatatgagacttctggtaccaatggggctggtgggcatgctgtccactgtgtggtgctaggactgccaatgccaggcccaagggacaaaaagaacagagctttttgttctcatggctggccctgctacctccgaggcaccctgcagggcaatgcatgtcatcccaacccccacactccccatcctccaacccactggtctcatgcccaaagaagagttgaaggcatgggagccaacattttattgaagaagccacagaggctgaaattcaataaacacaagttttatgagtaaaaaaaagct

SEQ ID NO: 258905 - DNA, 1918 bp, Homo sapiens
ctcccacctccagagtccaagggtctatgtggtgggcagtttgagctggctggatactagagggaggctgcacctgaagcatttggtgggtgagcagcatgggctttgaggagctgctggagcaggtgggcggctttgggcccttccaactgcggaatgtggcactgctggccctgccccgagtgctgctaccactgcacttcctcctgcccatcttcctggctgccgtgcctgcccaccgatgtgccctgccgggtgcccctgccaacttcagccatcaggatgtgtggctggaggcccatcttccccgggagcctgatggcacgctcagctcctgcctccgctttgcctatccccaggctctccccaacaccacgttgggggaagaaaggcagagccgtggggagctggaggatgaacctgccacagtgccctgctctcagggctgggagtacgaccactcagaattctcctctaccattgcaactgagtgggatctggtgtgtgagcagaaaggtctgaacagagctgcgtccactttcttcttcgccggtgtgctggtgggggctgtggcctttggatatctgtccgacaggtttgggcggcggcgtctgctgctggtagcctacgtgagtaccctggtgctgggcctggcatctgcagcctccgtcagctatgtaatgtttgccatcacccgcacccttactggctcagccctggctggttttaccatcatcgtgatgccactggagctggagtggctggatgtggagcaccgcaccgtggctggagtcctgagcagcaccttctggacagggggcgtgatgctgctggcactggttgggtacctgatacgggactggcgatggcttctgctagctgtcaccctgccttgtgccccaggcatcctcagcctctggtgggtgcctgagtctgcacgctggcttctgacccaaggccatgtgaaagaggcccacaggtacttgctccactgtgccaggctcaatgggcggccagtgtgtgaggacagcttcagccaggaggctgtgagcaaagtggccgccggggaacgggtggtccgaagaccttcatacctagacctgttccgcacaccacggctccgacacatctcactgtgctgcgtggtggtgtggttcggagtgaacttctcctattacggcctgagtctggatgtgtcggggctggggctgaacgtgtaccagacacagctgttgttcggggctgtggaactgccctccaagctgctggtctacttgtcggtgcgctacgcaggacgccgcctcacgcaagccgggacactgctgggcacggccctggcgttcggcactagactgctagtgtcctccgatatgaagtcctggagcactgtcctggcagtgatggggaaagctttttctgaagctgccttcaccactgcctacctgttcacttcagagttgtaccctacggtgctcagacagacagggatggggctgactgcactggtgggccggctggggggctctttggccccactggcggccttgctggatggagtgtggctgtcactgcccaagcttacttatggggggatcgccctgctggctgccggcaccgccctcctgctgccagagacgaggcaggcacagctgccagagaccatccaggacgtggagagaaagaggtgtgtgcacaggactgtgtctgtgtacgtgtgataacatgcatatggatgcaggtgctcagatacctgacaccttaggattcagacaggaaactatatctgcacatgtgtacttggtgcatgtatgtgtgcgtgcacaggtgagtgtttcagggtgcatgattgggggcatgtaaactgcaagcataaatgtgtacatgagtgtatgaacacaaatacataaggttgttcagg

SEQ ID NO: 258906 - DNA, 700 bp, Homo sapiens
gtgattcagagttgatctatccatcctctggttagactcagcatttcatacctgcctgtccagctccatcatcagccatcatggtcactgtcaccatcattcttcaatgacatcagagaagagagcttccctatgaggctctccccaacaccacgttgggggaagaaaggcagagccgtggggagctggaggatgaacctgccacagtgccctgctctcagggctgggagtacgaccactcagaattctcctctaccattgcaactgagtcccaggtcggtatttacataatccatctggaggtggaatgtcggtggaggcagtctccctgggaggcagcaggtcgaggccttccttgggaagaagctgaggctgcaggactggggagggacaaagtttcctattccccaagctggcgtgaatcgttgggaggtttattatctggcatggaggtaccagaatggcagagttcgcctcagaaggctccagggtctggagaggaggagctggtgcctgctggagaggggctgatgttcataggaggtccctttctgcctgtccttgcagtgggatctggtgtgtgagcagaaaggtctgaacagagctgcgtccactttcttcttcgccggtgtgctggtgggggctgtggcctttggatatctgtccgacaggtggggtgaggcactgggccaataagaaa

SEQ ID NO: 258907 - DNA, 2334 bp, Homo sapiens
ctcccacctccagagtccaagggtctatgtggtgggcagtttgagctggctggatactagagggaggctgcacctgaagcatttggtgggtgagcagcatgggctttgaggagctgctggagcaggtgggcggctttgggcccttccaactgcggaatgtggcactgctggccctgccccgagtgctgctaccactgcacttcctcctgcccatcttcctggctgccgtgcctgcccaccgatgtgccctgccgggtgcccctgccaacttcagccatcaggatgtgtggctggaggcccatcttccccgggagcctgatggcacgctcagctcctgcctccgctttgcctatccccaggctctccccaacaccacgttgggggaagaaaggcagagccgtggggagctggaggatgaacctgccacagtgccctgctctcagggctgggagtacgaccactcagaattctcctctaccattgcaactgagtgggatctggtgtgtgagcagaaaggtctgaacagagctgcgtccactttcttcttcgccggtgtgctggtgggggctgtggcctttggatatctgtccgacaggtttgggcggcggcgtctgctgctggtagcctacgtgagtaccctggtgctgggcctggcatctgcagcctccgtcagctatgtaatgtttgccatcacccgcacccttactggctcagccctggctggttttaccatcatcgtgatgccactggagctggagtggctggatgtggagcaccgcaccgtggctggagtcctgagcagcaccttctggacagggggcgtgatgctgctggcactggttgggtacctgatacgggactggcgatggcttctgctagctgtcaccctgccttgtgccccaggcatcctcagcctctggtgggtgcctgagtctgcacgctggcttctgacccaaggccatgtgaaagaggcccacaggtacttgctccactgtgccaggctcaatgggcggccagtgtgtgaggacagcttcagccaggaggtgagggtgaacgtgtgtgtgagcatgcatatatgtgtgtggtggggagtgggctgtgtcaagtgcctccctcccagagcccaccatatatggcaggaaaagcccctgggcccccacagagagttccgaactctttaggatgtcctacctggctccagtgggccacatccatcattcgagaccaactcgtctcagctgccatgagcatctccatccccaccactgcagatgggaggaatagagaggggtggggggagagtactgtgtcccattgagatcacatagccaactctgatgttacaacctcacctccttccctaccaggctgtgagcaaagtggccgccggggaacgggtggtccgaagaccttcatacctagacctgttccgcacaccacggctccgacacatctcactgtgctgcgtggtggtgtggttcggagtgaacttctcctattacggcctgagtctggatgtgtcggggctggggctgaacgtgtaccagacacagctgttgttcggggctgtggaactgccctccaagctgctggtctacttgtcggtgcgctacgcaggacgccgcctcacgcaagccgggacactgctgggcacggccctggcgttcggcactagactgctagtgtcctccgatatgaagtcctggagcactgtcctggcagtgatggggaaagctttttctgaagctgccttcaccactgcctacctgttcacttcagagttgtaccctacggtgctcagacagacagggatggggctgactgcactggtgggccggctggggggctctttggccccactggcggccttgctggatggagtgtggctgtcactgcccaagcttacttatggggggatcgccctgctggctgccggcaccgccctcctgctgccagagacgaggcaggcacagctgccagagaccatccaggacgtggagagaaagagagatggtgctaaagaaaggactagcatatgagacttctggtaccaatggggctggtgggcatgctgtccactgtgtggtgctaggactgccaatgccaggcccaagggacaaaaagaacagagctttttgttctcatggctggccctgctacctccgaggcaccctgcagggcaatgcatgtcatcccaacccccacactccccatcctccaacccactggtctcatgcccaaagaagagttgaaggcatgggagccaacattttattgaagaagccacagaggctgaaattcaataaacacaagttttatgagtaaaaaaaagct

SEQ ID NO: 258908 - DNA, 2632 bp, Homo sapiens
ctcccacctccagagtccaagggtctatgtggtgggcagtttgagctggctggatactagagggaggctgcacctgaagcatttggtgggtgagcagcatgggctttgaggagctgctggagcaggtgggcggctttgggcccttccaactgcggaatgtggcactgctggccctgccccgagtgctgctaccactgcacttcctcctgcccatcttcctggctgccgtgcctgcccaccgatgtgccctgccgggtgcccctgccaacttcagccatcaggatgtgtggctggaggcccatcttccccgggagcctgatggcacgctcagctcctgcctccgctttgcctatccccaggctctccccaacaccacgttgggggaagaaaggcagagccgtggggagctggaggatgaacctgccacagtgccctgctctcagggctgggagtacgaccactcagaattctcctctaccattgcaactgagtcccaggtcggtatttacataatccatctggaggtggaatgtcggtggaggcagtctccctgggaggcagcaggtcgaggccttccttgggaagaagctgaggctgcaggactggggagggacaaagtttcctattccccaagctggcgtgaatcgttgggaggtttattatctggcatggaggtaccagaatggcagagttcgcctcagaaggctccagggtctggagaggaggagctggtgcctgctggagaggggctgatgttcataggaggtccctttctgcctgtccttgcagtgggatctggtgtgtgagcagaaaggtctgaacagagctgcgtccactttcttcttcgccggtgtgctggtgggggctgtggcctttggatatctgtccgacaggtttgggcggcggcgtctgctgctggtagcctacgtgagtaccctggtgctgggcctggcatctgcagcctccgtcagctatgtaatgtttgccatcacccgcacccttactggctcagccctggctggttttaccatcatcgtgatgccactggagctggagtggctggatgtggagcaccgcaccgtggctggagtcctgagcagcaccttctggacagggggcgtgatgctgctggcactggttgggtacctgatacgggactggcgatggcttctgctagctgtcaccctgccttgtgccccaggcatcctcagcctctggtgggtgcctgagtctgcacgctggcttctgacccaaggccatgtgaaagaggcccacaggtacttgctccactgtgccaggctcaatgggcggccagtgtgtgaggacagcttcagccaggaggtgagggtgaacgtgtgtgtgagcatgcatatatgtgtgtggtggggagtgggctgtgtcaagtgcctccctcccagagcccaccatatatggcaggaaaagcccctgggcccccacagagagttccgaactctttaggatgtcctacctggctccagtgggccacatccatcattcgagaccaactcgtctcagctgccatgagcatctccatccccaccactgcagatgggaggaatagagaggggtggggggagagtactgtgtcccattgagatcacatagccaactctgatgttacaacctcacctccttccctaccaggctgtgagcaaagtggccgccggggaacgggtggtccgaagaccttcatacctagacctgttccgcacaccacggctccgacacatctcactgtgctgcgtggtggtgtggttcggagtgaacttctcctattacggcctgagtctggatgtgtcggggctggggctgaacgtgtaccagacacagctgttgttcggggctgtggaactgccctccaagctgctggtctacttgtcggtgcgctacgcaggacgccgcctcacgcaagccgggacactgctgggcacggccctggcgttcggcactagactgctagtgtcctccgatatgaagtcctggagcactgtcctggcagtgatggggaaagctttttctgaagctgccttcaccactgcctacctgttcacttcagagttgtaccctacggtgctcagacagacagggatggggctgactgcactggtgggccggctggggggctctttggccccactggcggccttgctggatggagtgtggctgtcactgcccaagcttacttatggggggatcgccctgctggctgccggcaccgccctcctgctgccagagacgaggcaggcacagctgccagagaccatccaggacgtggagagaaagagagatggtgctaaagaaaggactagcatatgagacttctggtaccaatggggctggtgggcatgctgtccactgtgtggtgctaggactgccaatgccaggcccaagggacaaaaagaacagagctttttgttctcatggctggccctgctacctccgaggcaccctgcagggcaatgcatgtcatcccaacccccacactccccatcctccaacccactggtctcatgcccaaagaagagttgaaggcatgggagccaacattttattgaagaagccacagaggctgaaattcaataaacacaagttttatgagtaaaaaaaagct

SEQ ID NO: 258909 - DNA, 1901 bp, Homo sapiens
atttttgagataaggtcttgctctgtcgctggagtacagtggcacaatcacagctcactgaagcctcaacctcccaggctcaagtggttctcctgcattagcctcctgagtagctgggactacaggcgtgtgccaccacacccagctaatatttattttttgattttttgtagagacagggtcttgccatgatgcccaggctgatcttgaactcctgggctcaaacccaccctcccgccttgacctccaaaagtgtttggattacaggcatgggccattgcacccagcccagaggtggcttttaaactgggcattaaaagatgaataagagctcatcaagtgtggagggcttggggaggagatgatgttccaggctaaggggactacatgagcaagagcctggaagttgagagcctgtagtatgtccaggaacatgtggcttagggtcatgactttctggctgatggaccttctgcctattcctaggtgggtgcctgagtctgcacgctggcttctgacccaaggccatgtgaaagaggcccacaggtacttgctccactgtgccaggctcaatgggcggccagtgtgtgaggacagcttcagccaggaggtgagggtgaacgtgtgtgtgagcatgcatatatgtgtgtggtggggagtgggctgtgtcaagtgcctccctcccagagcccaccatatatggcaggaaaagcccctgggcccccacagagagttccgaactctttaggatgtcctacctggctccagtgggccacatccatcattcgagaccaactcgtctcagctgccatgagcatctccatccccaccactgcagatgggaggaatagagaggggtggggggagagtactgtgtcccattgagatcacatagccaactctgatgttacaacctcacctccttccctaccaggctgtgagcaaagtggccgccggggaacgggtggtccgaagaccttcatacctagacctgttccgcacaccacggctccgacacatctcactgtgctgcgtggtggtgtggttcggagtgaacttctcctattacggcctgagtctggatgtgtcggggctggggctgaacgtgtaccagacacagctgttgttcggggctgtggaactgccctccaagctgctggtctacttgtcggtgcgctacgcaggacgccgcctcacgcaagccgggacactgctgggcacggccctggcgttcggcactagactgctagtgtcctccgatatgaagtcctggagcactgtcctggcagtgatggggaaagctttttctgaagctgccttcaccactgcctacctgttcacttcagagttgtaccctacggtgctcagacagacagggatggggctgactgcactggtgggccggctggggggctctttggccccactggcggccttgctggatggagtgtggctgtcactgcccaagcttacttatggggggatcgccctgctggctgccggcaccgccctcctgctgccagagacgaggcaggcacagctgccagagaccatccaggacgtggagagaaagagagatggtgctaaagaaaggactagcatatgagacttctggtaccaatggggctggtgggcatgctgtccactgtgtggtgctaggactgccaatgccaggcccaagggacaaaaagaacagagctttttgttctcatggctggccctgctacctccgaggcaccctgcagggcaatgcatgtcatcccaacccccacactccccatcctccaacccactggtctcatgcccaaagaagagttgaaggcatgggagccaacattttattgaagaagccacagaggctgaaattcaataaacacaagttttatgagtaaaaaaaagct

SEQ ID NO: 258910 - DNA, 2252 bp, Homo sapiens
tgggagctctgctgaccaaggggctaggggctcacctcctatgccatcacccagctacctcatcatggtagccttggtccctgaacactaatgggctctccccaacaccacgttgggggaagaaaggcagagccgtggggagctggaggatgaacctgccacagtgccctgctctcagggctgggagtacgaccactcagaattctcctctaccattgcaactgagtcccaggtcggtatttacataatccatctggaggtggaatgtcggtggaggcagtctccctgggaggcagcaggtcgaggccttccttgggaagaagctgaggctgcaggactggggagggacaaagtttcctattccccaagctggcgtgaatcgttgggaggtttattatctggcatggagtgggatctggtgtgtgagcagaaaggtctgaacagagctgcgtccactttcttcttcgccggtgtgctggtgggggctgtggcctttggatatctgtccgacaggtttgggcggcggcgtctgctgctggtagcctacgtgagtaccctggtgctgggcctggcatctgcagcctccgtcagctatgtaatgtttgccatcacccgcacccttactggctcagccctggctggttttaccatcatcgtgatgccactggagctggagtggctggatgtggagcaccgcaccgtggctggagtcctgagcagcaccttctggacagggggcgtgatgctgctggcactggttgggtacctgatacgggactggcgatggcttctgctagctgtcaccctgccttgtgccccaggcatcctcagcctctggtgggtgcctgagtctgcacgctggcttctgacccaaggccatgtgaaagaggcccacaggtacttgctccactgtgccaggctcaatgggcggccagtgtgtgaggacagcttcagccaggaggtgagggtgaacgtgtgtgtgagcatgcatatatgtgtgtggtggggagtgggctgtgtcaagtgcctccctcccagagcccaccatatatggcaggaaaagcccctgggcccccacagagagttccgaactctttaggatgtcctacctggctccagtgggccacatccatcattcgagaccaactcgtctcagctgccatgagcatctccatccccaccactgcagatgggaggaatagagaggggtggggggagagtactgtgtcccattgagatcacatagccaactctgatgttacaacctcacctccttccctaccaggctgtgagcaaagtggccgccggggaacgggtggtccgaagaccttcatacctagacctgttccgcacaccacggctccgacacatctcactgtgctgcgtggtggtgtggttcggagtgaacttctcctattacggcctgagtctggatgtgtcggggctggggctgaacgtgtaccagacacagctgttgttcggggctgtggaactgccctccaagctgctggtctacttgtcggtgcgctacgcaggacgccgcctcacgcaagccgggacactgctgggcacggccctggcgttcggcactagactgctagtgtcctccgatatgaagtcctggagcactgtcctggcagtgatggggaaagctttttctgaagctgccttcaccactgcctacctgttcacttcagagttgtaccctacggtgctcagacagacagggatggggctgactgcactggtgggccggctggggggctctttggccccactggcggccttgctggatggagtgtggctgtcactgcccaagcttacttatggggggatcgccctgctggctgccggcaccgccctcctgctgccagagacgaggcaggcacagctgccagagaccatccaggacgtggagagaaagagagatggtgctaaagaaaggactagcatatgagacttctggtaccaatggggctggtgggcatgctgtccactgtgtggtgctaggactgccaatgccaggcccaagggacaaaaagaacagagctttttgttctcatggctggccctgctacctccgaggcaccctgcagggcaatgcatgtcatcccaacccccacactccccatcctccaacccactggtctcatgcccaaagaagagttgaaggcatgggagccaacattttattgaagaagccacagaggctgaaattcaataaacacaagttttatgagtaaaaaaaagct

SEQ ID NO: 258911 - DNA, 1791 bp, Homo sapiens
ctcccacctccagagtccaagggtctatgtggtgggcagtttgagctggctggatactagagggaggctgcacctgaagcatttggtgggtgagcagcatgggctttgaggagctgctggagcaggtgggcggctttgggcccttccaactgcggaatgtggcactgctggccctgccccgagtgctgctaccactgcacttcctcctgcccatcttcctggctgccgtgcctgcccaccgatgtgccctgccgggtgcccctgccaacttcagccatcaggatgtgtggctggaggcccatcttccccgggagcctgatggcacgctcagctcctgcctccgctttgcctatccccaggctctccccaacaccacgttgggggaagaaaggcagagccgtggggagctggaggatgaacctgccacagtgccctgctctcagggctgggagtacgaccactcagaattctcctctaccattgcaactgagtgggatctggtgtgtgagcagaaaggtctgaacagagctgcgtccactttcttcttcgccggtgtgctggtgggggctgtggcctttggatatctgtccgacaggtttgggcggcggcgtctgctgctggtagcctacgtgagtaccctggtgctgggcctggcatctgcagcctccgtcagctatgtaatgtttgccatcacccgcacccttactggctcagccctggctggttttaccatcatcgtgatgccactggagctggagtggctggatgtggagcaccgcaccgtggctggagtcctgagcagcaccttctggacagggggcgtgatgctgctggcactggttgggtacctgatacgggactggcgatggcttctgctagctgtcaccctgccttgtgccccaggcatcctcagcctctggtgggtgcctgagtctgcacgctggcttctgacccaaggccatgtgaaagaggcccacaggtacttgctccactgtgccaggctcaatgggcggccagtgtgtgaggacagcttcagccaggaggtgagggtgaacgtgtgtgtgagcatgcatatatgtgtgtggtggggagtgggctgtgtcaagtgcctccctcccagagcccaccatatatggcaggaaaagcccctgggcccccacagagagttccgaactctttaggatgtcctacctggctccagtgggccacatccatcattcgagaccaactcgtctcagctgccatgagcatctccatccccaccactgcagatgggaggaatagagaggggtggggggagagtactgtgtcccattgagatcacatagccaactctgatgttacaacctcacctccttccctaccaggctgtgagcaaagtggccgccggggaacgggtggtccgaagaccttcatacctagacctgttccgcacaccacggctccgacacatctcactgtgctgcgtggtggtgtggttcggagtgaacttctcctattacggcctgagtctggatgtgtcggggctggggctgaacgtgtaccagacacagctgttgttcggggctgtggaactgccctccaagctgctggtctacttgtcggtgcgctacgcaggacgccgcctcacgcaagccgggacactgctgggcacggccctggcgttcggcactagactgctagtgtcctccggtgagcccagtcccataggttctgcccaccccagaagccgggccaggaaccctgcccactccccggagaccccacctcctggccaagaacccactcctc

SEQ ID NO: 258912 - DNA, 933 bp, Homo sapiens
gtccgccaagtggcactgagactcctttcaggttcggagtgaacttctcctattacggcctgagtctggatgtgtcggggctggggctgaacgtgtaccagacacagctgttgttcggggctgtggaactgccctccaagctgctggtctacttgtcggtgcgctacgcaggacgccgcctcacgcaagccgggacactgctgggcacggccctggcgttcggcactagactgctagtgtcctccgatatgaagtcctggagcactgtcctggcagtgatggggaaagctttttctgaagctgccttcaccactgcctacctgttcacttcagagttgtaccctacggtgctcaggtgaggaagcctgcaactgatctgggggtatggggcttgttagtcacgtgtcttaaccaacacttctacatacacgcaccacaacctggtctctcatcacgcctgtaatcccagcattttggaaggccaaggcgggcggatcactgaaggtcaggaattcgagaccagcctgaccaacatggtgaaaccctgtctctgctaaacatacaaaattagctgggtgtggtggcgaatgcctgtaatcctagctatttgggaggctgaggcaggagaatcgctcgaacctgggagatggaggttgcagtgagctgagatcatgccattgcactccagcctgggcgagaaactctgtctcaaataaatacataaataaaagaaaaaaattaaataataataataataagaagaagaagcagccccaagaagccccatcctgcccacccccatcccattcacccctggaaggcagagatgcccttgaggactgtcccaagagcaaccccttgaaaggcccggggttgggggggtctttcagctagctactgagaggtggggaggtggcagggcctgtgcatctg

SEQ ID NO: 258913 - DNA, 2055 bp, Homo sapiens
ctcccacctccagagtccaagggtctatgtggtgggcagtttgagctggctggatactagagggaggctgcacctgaagcatttggtgggtgagcagcatgggctttgaggagctgctggagcaggtgggcggctttgggcccttccaactgcggaatgtggcactgctggccctgccccgagtgctgctaccactgcacttcctcctgcccatcttcctggctgccgtgcctgcccaccgatgtgccctgccgggtgcccctgccaacttcagccatcaggatgtgtggctggaggcccatcttccccgggagcctgatggcacgctcagctcctgcctccgctttgcctatccccaggctctccccaacaccacgttgggggaagaaaggcagagccgtggggagctggaggatgaacctgccacagtgccctgctctcagggctgggagtacgaccactcagaattctcctctaccattgcaactgagtgggatctggtgtgtgagcagaaaggtctgaacagagctgcgtccactttcttcttcgccggtgtgctggtgggggctgtggcctttggatatctgtccgacaggtttgggcggcggcgtctgctgctggtagcctacgtgagtaccctggtgctgggcctggcatctgcagcctccgtcagctatgtaatgtttgccatcacccgcacccttactggctcagccctggctggttttaccatcatcgtgatgccactggagctggagtggctggatgtggagcaccgcaccgtggctggagtcctgagcagcaccttctggacagggggcgtgatgctgctggcactggttgggtacctgatacgggactggcgatggcttctgctagctgtcaccctgccttgtgccccaggcatcctcagcctctggtgggtgcctgagtctgcacgctggcttctgacccaaggccatgtgaaagaggcccacaggtacttgctccactgtgccaggctcaatgggcggccagtgtgtgaggacagcttcagccaggaggctgtgagcaaagtggccgccggggaacgggtggtccgaagaccttcatacctagacctgttccgcacaccacggctccgacacatctcactgtgctgcgtggtggtgtggttcggagtgaacttctcctattacggcctgagtctggatgtgtcggggctggggctgaacgtgtaccagacacagctgttgttcggggctgtggaactgccctccaagctgctggtctacttgtcggtgcgctacgcaggacgccgcctcacgcaagccgggacactgctgggcacggccctggcgttcggcactagactgctagtgtcctccgatatgaagtcctggagcactgtcctggcagtgatggggaaagctttttctgaagctgccttcaccactgcctacctgttcacttcagagttgtaccctacggtgctcaggtgaggaagcctgcaactgatctgggggtatggggcttgttagtcacgtgtcttaaccaacacttctacatacacgcaccacaacctggtctctcatcacgcctgtaatcccagcattttggaaggccaaggcgggcggatcactgaaggtcaggaattcgagaccagcctgaccaacatggtgaaaccctgtctctgctaaacatacaaaattagctgggtgtggtggcgaatgcctgtaatcctagctatttgggaggctgaggcaggagaatcgctcgaacctgggagatggaggttgcagtgagctgagatcatgccattgcactccagcctgggcgagaaactctgtctcaaataaatacataaataaaagaaaaaaattaaataataataataataagaagaagaagcagccccaagaagccccatcctgcccacccccatcccattcacccctggaaggcagagatgcccttgaggactgtcccaagagcaaccccttgaaaggcccggggttgggggggtctttcagctagctactgagaggtggggaggtggcagggcctgtgcatctg

SEQ ID NO: 258914 - DNA, 386 bp, Homo sapiens
tttttttttcttcaaagacacagggtcacattctgttgcccaggctaaaatgcagtggtacgatcatagctcaccataaccttgaactcctgcgctcaaacaatactcccatctcagcctcccaagcagctgggactacaggcatgtgtcactatgctcagctatttttcaaaaattttttgtagagacaaattcttgctatattgcccaggctggtcttgaactcttgggctcaagcaatcttcctgctttggcctccaaagtgctgggattacaggcatgagccattgtgcctggctgagattaataactttaaatgcttattttagaaaagaagaaaggtccagagttattcaaacttcctctttaagaagccagaaaaagag

SEQ ID NO: 258915 - DNA, 493 bp, Homo sapiens
ctactggtgtaaaaggatgagacttctgatggggcatcttgtgagggcaagaataaattttgcaagtggaaaaaatgttaataatccatgtccagagaatagagaggtagttttaaaatatggcccatattatttgaccctcttcctattgagaggtggggtctactcctctcctcttgaatctaggctctgtgactgattgatcaatagaatatggtggcaatgatgctatgctaagtttgaggctcaggccttaagaaaatggtagctttcacttcctatctcttgagaaacttgctctaggaacgcagccaccatggtatggcaaagcccaagttatcctttggcgagaaccaacaggcaacatgagttctgctagttatgtgaatggaattatcataagccccaattgaggtaccccaactgatgccatgtggcgcagagatgagctgtattcattttaatatagaatatattgatcttttcctttata

SEQ ID NO: 258916 - DNA, 667 bp, Homo sapiens
ggtggtgagggagggaggtggtgagggatgccacccttcgcctctgttgtgcacttgggacaagggacagcagaacaggagtcctcttctgcttttacttcctgcccagacctgcccgggccttgcctcttagcactcacggccttgggcaaggtgaatgtcactggggcttcatctctttcctctcccagtacaggggtggtgtactgaggtgtttcctccagcagtcttctgtggcaggcctgattctcttaggatgaatgtagtcatcctcgggtgggggggtcctacgtttctcctttagacggtcacgcggatgaagggaaatgtcaggttgctttgccttgggctggggtcctgcacagttgatggtcacagggttgtgagcccatgctggtcagaagcctatgattggtacatagggatttttttctatgaaaggaaaataggaaattaaatgattgcttaataaacacagcttgcttggtagaaacaaatctttttaaaaatggggttcctggggaaatatatgggagaaggcagcagcattgaggaggctcaaaattactgcttgagctctccgaatctccagggactgcgacctaataggtccttagtcagtagtcagcatttgctaagactgacagagaggatggtgccgtgcccc

SEQ ID NO: 258917 - DNA, 538 bp, Homo sapiens
cttcccagaatcagcaggcttcccaacacagctctaaatgcccagtttcaaccctcggcttcagtcaacagactaacaatgaatcggaagaaaaacagtcaacaaaaggatccatgatgaggaccatcataaaagaatggctgaggcctggctcctttctcagccactgtgttgggattcccagcctctggcctttgcgctcacctgggcaggagcctcatctgagcacagtggcagagcacagcgaggcatgggggctgccacaccgatgtgcacccatacccaggcttgagtgtgcaggctgcatgtcacctcccacacatggtgacttcagagcccctttgaggaggagggacagcggatgggaggaaataccacagggcttttgtgatgttgacagtgctctgtttcttcacctggctggtagtgacactggtctttgttttccaataagttgttaaggtatacgtttttgttgtatacttctttgtatatatattctctttcataattaaaaaaaaagataaaaacatttaaa

SEQ ID NO: 258918 - DNA, 770 bp, Homo sapiens
taggtaaccacaggaaccaggccatctgccttagataaataaattatattatgttacatggggcattcttttttaatattaaagaacattcttcattcaagttttgagaattatttcttacagggttattgattagcctgtggcacaatgaaaagattttctccaagcttaagtaccaaaaaggctttatacacaagaggtctttcaaaacttttttttttttttttttgagatggagtctccctctgtcacccaggctggagtgcagtggtgcagtctcgactcattgcaccctccatctttggggttcaagtgattctcctgcctcaggctctcaagtagctgggattacaggcatgcaccaccaggcccagctaatttttgtatttttagtagagacggggtttcaccatgttggccaggctggtcttgaactcctgacctcaggtgatccacccaccttggcctcttgaagtgctgggattatagacgtgagccactgtgcctggcctaaaagattatttagagaaaaattatccaattatgagggaataataaaatcatgatgtgtccacagaattatgcatatgttttaaatgtttcaaagtatttatattgattggagaaatgcttaaaagttaaaaaaaaaggcaggatactaatacagttatctgaaaagcatagaaaagttactagaagaaaatgcattcatatatatatgagggagtcttgcaccgtcacctgggctggagtgcagtggcgcagtctcg

SEQ ID NO: 258919 - DNA, 1054 bp, Homo sapiens
ccgcccctcaaccaacccccaggcggcaaggccctctccacgcgcgctctccagcctggcggggccctggaagccgggacacgcggaggccgggagggtcatcggcgtttaaggcagcctcccacaccaagtgcaccgcccggatcccctctgcacgagggctttctgcttattgctcttttccccagcagccagaatcgtcaccgtagcgcgggaaggggcctcgcgggccgtctgcagcaggtgcggccgggagccgcaggcccgcgcggattcctgcggagctgtatttactttacatccatgtgaactgctgtcatcactactgtgtccaagcccagaggatgaactggaaaagaagagagggggaaaataataaaaagaggaaattggttttcacaacacactcaaagcctgagtaacagaggagaactttaattatctccagtcacaaagagagacaggaaatttggacttttaattagccatttggagtgcaagtacttagtctgcccagaaacacacgcctcaatgtcttctgaattcagatggctctgtaagaagaggtgaaggctgctatctgaaagcaaaagtgcattctgtaggactctatattaaaaaaaaaaggaaaaataattggtgaacaggatggtcagtgatagggtagaagaaagaaaaacattagaaaagtaccactgaaggtaatttctctactgtggtaaactttgtatcaattatgggctctgcccattaaggggaggaaagcatatgttaacttttattcaattatttggaaatttaggtgggtaaaaacatgaagctaatagttaagaacatctgttaaaagaataacttcaaggacatttcttcaatttacccatctcttattaccatgtggattaattatggaaatattttgcttatatagtcatagaaagttattctactttaaaaaatttactgccaacagcatgtcaattcagtgatctttatgggataggctgtcatgaaacatcaaaactttcaactactattaaaaattatatgaagaaaa

SEQ ID NO: 258920 - DNA, 819 bp, Homo sapiens
ccgcccctcaaccaacccccaggcggcaaggccctctccacgcgcgctctccagcctggcggggccctggaagccgggacacgcggaggccgggagggtcatcggcgtttaaggcagcctcccacaccaagtgcaccgcccggatcccctctgcacgagggctttctgcttattgctcttttccccagcagccagaatcgtcaccgtagcgcgggaaggggcctcgcgggccgtctgcagcaggtgcggccgggagccgcaggcccgcgcggattcctgcggagctgtatttactttacatccatgtgaactgctgtcatcactactgtgtccaagcccagaggatgaactggaaaagaagagagggggaaaataataaaaagaggaaattggttttcacaacacactcaaagcctgagtaacagaggagaactttaattatctccagtcacaaagagagacaggaaatttggacttttaattagccatttggagtgcagttgggtatttttttagctagataatttaaacgcgaataattcaagtctgactaaatgaaagtcacataatcagaatgcaaataattgaatttctactgcattcattaattcagtgtggaggtgtgtgtgaagactactatgatgagctgtcacagctcaataaaatctcagtcaattaattttttcattatcttagtattatatcaacaaaaaagtgaagtgtgtatatatatctatacacgtgcatatgtgcatactatgtattatataaatacatatacattaaatcaaaatgcaaggaaatacctttctgaatcat

SEQ ID NO: 258921 - DNA, 739 bp, Homo sapiens
cctgcagcccagtcgccgccgccagcggagcggcccgggcgggacgcggcgggagcgcgcgtgtgcgggacgcagcgcgggggatgcgcgcgggccgcggaggcgccgcaaccaacaggcggccgagggtgcagccgcgggagcgccaccgccagtggggtggggggcaaagctataaagaaggcccagaggattcctgcggagctgtatttactttacatccatgtgaactgctgtcatcactactgtgtccaagcccagaggatgaactggaaaagaagagagggggaaaataataaaaagaggaaattggttttcacaacacactcaaagcctgagtaacagaggagaactttaattatctccagtcacaaagagagacaggaaatttggacttttaattagccatttggagtgcagttgggtatttttttagctagataatttaaacgcgaataattcaagtctgactaaatgaaagtcacataatcagaatgcaaataattgaatttctactgcattcattaattcagtgtggaggtgtgtgtgaagactactatgatgagctgtcacagctcaataaaatctcagtcaattaattttttcattatcttagtattatatcaacaaaaaagtgaagtgtgtatatatatctatacacgtgcatatgtgcatactatgtattatataaatacatatacattaaatcaaaatgcaaggaaatacctttctgaatcat

SEQ ID NO: 258922 - DNA, 909 bp, Homo sapiens
ccgcccctcaaccaacccccaggcggcaaggccctctccacgcgcgctctccagcctggcggggccctggaagccgggacacgcggaggccgggagggtcatcggcgtttaaggcagcctcccacaccaagtgcaccgcccggatcccctctgcacgagggctttctgcttattgctcttttccccagcagccagaatcgtcaccgtagcgcgggaaggggcctcgcgggccgtctgcagcaggtgcggccgggagccgcaggcccgcgcggattcctgcggagctgtatttactttacatccatgtgaactgctgtcatcactactgtgtccaagcccagaggatgaactggaaaagaagagagggggaaaataataaaaagaggaaattggttttcacaacacactcaaagcctgagtaacagaggagaactttaattatctccagtcacaaagagagacaggaaatttggacttttaattagccatttggagtgcaagtacttagtctgcccagaaacacacgcctcaatgtcttctgaattcagatggctctgtaagaagaggtgaaggctgctatctgaaagcaaaagtgcattctgtaggactctatattaaaaaaaaaaggaaaaataattggtgaacaggatggtcagtgatagggtagaagaaagaaaaacattagaaaagtaccactgaagattaagagaagagttatagagcaacaatccattaatacgaacttggatcgtgaagtctgtgaagtctgagcagagtgtttcctgtggcctctgtcagcggtttcctgcctgccataagtacaaggaactgttcatgggattgtactcgtggctttgtttctgttggaaatgtgttttattttctttataaaataatgggtaatcttta

SEQ ID NO: 258923 - DNA, 368 bp, Homo sapiens
gtacaggacatttccataacccccatcattctctcatgatcctttgcaacattcttctccctgaccccatctgcccctggcaaacactggtctactttctgttgtcatagattagttttgtcttttttagaatttcatataaatggaatcacacagtttatacttttttatatttgctgctatcattcagcatcatggttttaagattcatttatgttgttctacattatcggtagtccatttttatttttaaattccattgtatgaatatatcacaaattgtttattcatgcgcctattgttcgcatttgggtcgtttccagtttttggctgtgacaaataaagctgctatgaacttttgagtctga

SEQ ID NO: 258924 - DNA, 479 bp, Homo sapiens
caaacattggtctgaaagttcaggacacactgggctaggctacggtgagaggatggacaaccgttaggtgagagtaaacgcggaaggagtcacactggttatttttcccaatcaggttggtccaacttatgcaaaacaggagcaggtaagaaacctggatgtgagggatgggtgaggagaggaagaagcaaaagaataaaaagggagaccctgaagaaagcctgtgccatctgacatgaaaccaaaaaccacagctactacttagaaaggtacagcataggcctgttctgagtgaggactgaagggcctctttgacccttaccaggacttagaacccaaaccagtattcttatgagtatctggtaggtttgatttttaccttggactttttccaataacacgaaaaggttaggaaacagagagctatccctccctcccctggcggggagcaggaaacaaaggaaggaggatgacaggca

SEQ ID NO: 258925 - DNA, 442 bp, Homo sapiens
gattaggtgtttaccctgtttgttctcatagcacctcgtgcttgctctgtcatactatgttataatcctgtgcttactagtttttcttcctctctgaattgtaagctcttcgagagcaagggctaaattttaccagctttttgtctagcacctggcctcatagtaaatgctaaatatttcctgagtgaatgttgaatcaatgatttcagctgtgtttttttgtgtaccctcttctttttatagatctatctataataccaaattgaatggtctttttctcagcattcatatctaaatcacgttagataattgagagattatggtattgtggtggtttaaatatacataataaaatactacttttaaattgttttcctccaatcttaaaccatgtactatttcctgcttctcaaatgaatcaattcattttgaaacctggttg

SEQ ID NO: 258926 - DNA, 435 bp, Homo sapiens
ttatacctaatggttgtttgaggtaagtgaggaggagaggtgaagaaaaggtttactatttatcacatttttcatagcaaagaataagtagatattgccttaattgatacattttaaaaattgtcatttaagtataatatttaagttcagaaaggcaatgaccagaactaaggaaaaatgtatctaaagacataaaggaggagggaagaggagatatgatagatagtgcaagattcctaaacacttaattgtctggatagtgtctaaaggtgatgaatcatttaatagagtatttgggaaaaatataattcctttatagaggtacaaaaattaacaggtattaagtaactttctgttagtgttgaccagtcttaaagtttcagacaaacgaatgacatcatttagagctagatatggaacacagaacacagagtg

SEQ ID NO: 258927 - DNA, 478 bp, Homo sapiens
ggaatctctctaaaattgacctcattggttttgttctcagcaaactgatctgggccattcaacatagtttttattgtgcctggtgttgatgcctgttctctttttacaatacattcatgaccattggatgatatcaatttgacatacatggcatcagggacttcatagccaccataggttttctcctctccatccattttgttcttatgaaatcctcctttgcttcccaaggaacttgagaagtttttcattagccccacagccaccatagccgggtccccatgtactgccatagccccattccagggctgccccctgacccggctgcctgcccccatgggttccagggcagtcccttcctttttaatgctgaatgatattctattgtatgaatacatcatattttgtttatccattcatcagttgatggacattgagttattttcacttttggctattatgaatattgccagactgc

SEQ ID NO: 258928 - DNA, 332 bp, Homo sapiens
catgtggctgtagaactgtggtcccccatttctttgctggctctctctctctctacctcttagtaccatcctggtagtaaatgccattaatgtatttgacaagaagtctgtcattagcatgcttcccaggagatttgattagattgtgtctttctggaagtgacactagcaggagaaaatcaattgcaagcctgctgttaatgcttccttcccaggtttatgtctcttagagccctttcctgaaacgtggaaataaattttatcatctccaaatatatttaaatcagcctgttatctgtagaagctcccctctttttattcttggtttgtta

SEQ ID NO: 258929 - DNA, 300 bp, Homo sapiens
gctaatggctctgaaggttgttaacgttaatggattagaactggaggcgtgttaaactcagtgatttcaggtagcaggggaattaaataaaagattttctaggctctggctggaatttcagagttcaaatcacattaatactatttgatcaaatctactgaaagaacaatccaagcacaaatcctgtcgttgccctcggcccccaggattcactggctggttgactcatcttatctgtgtttaaataggtttagatttgggtaacgctgattaaaattcagattgatgttttcaaattta

SEQ ID NO: 258930 - DNA, 783 bp, Homo sapiens
tgctcctgctccaccaccacaaccaccatggttctcatattcacttaaatttgaatcctactgctcttggagtagacatttaagaaaccactaagttagactgagtatgtatgcatactgtacaattcaaaagtattaactgaatactattgtgctgtaaagaacataaaaggaaggatatatacgatcaatgccttcaaaacacaatttactaggggagataggataaaacatctaattataatactcaccaaatttagagacatgtagtaatagaagcagcaaggattacttctacttaaggggatcaggaaagattagtgaagaaggtgacatttacatcaagctctgaggcatgcagaaggaaaggtgtgcattctaggcagaggaagccccaggagcaacagcaaagaccttggcaatgactggcatgtgtgtggcaaatgtcggagaactaagaggaagagatgaagccaaaaagtaaactgcggctatgacagtccttgaattccaactgcaggaattctggctttattctgttattaaaaggagggaatggttattgaaggtttctgaacagtggatgacatggttacccttgagaaatattacgtcagcaatgtgaaaggaaagactaaggtgaaagacagttgggggctgtggcaacagtccatgtaatagataacaaaaagctcatctgtggagcagcagtggaggcacagaagagggaatctgaagtatactagaaagttttagatttgctgcatggtccaatttatttcc

SEQ ID NO: 258931 - DNA, 496 bp, Homo sapiens
ttcagtctagcccagcatcacttctactggattctgttggtgacagcaaatcacagggttggcccaaattcagtgtggaaggattccacacaaggttcagaaaaaccaggacacgtggctctttgggaccagtggttttaggcaatgcagagcgctacagaaaataaccatgaagaaatctgtaactttatatggattaaaatcatttctggacaggtgcagtggctcacgcctgtaatcccagcactttgggaggctgaggcgggtggattgcttgagcccaggagttcaagaccagcctgggcaacatggcaaaaccccatctctactaaaaatacaaaaaattagccgagtatggtggtgcatgcctgtagccccagccactcaggaggccgaggtgggagaatcacctgagctcagtaagtcaaggttgcatgatccaagatggcaccactatactccagcctgggccacgggagtaaagacctccgtctca

SEQ ID NO: 258932 - DNA, 593 bp, Homo sapiens
gaggcattgggccctgggatctcttgccagggagacaacccccctgcaactttgtgctaggtaatcttctgtcccctcttgtgtctcttctttccagtctggaccttcaaattggagggggtgaggagaaccctaaagcccaggcatcgatggggaattctggagacaaaagctaattaaagttcatttcaaacctgtggggagaaaaattctagacataaacctaatgtaaagaaacacataaaattttattggaagacaaaagaaaagtggaatgagcacacatatcatatttttggatggtaagaataaaaattgtgaaagtgtcaatttttttctaaatcatctattaattcaatgcaacctcatgaaaaattacaaagggattgttttagtccattttatgttgctataacaacaccacagactgggtaatttataataagcagaaatttgtttggctcatagttctggaggctgggaagtccaagagcatggtgccagcatttggtgagagccttggtgctgcatcatcccatggcaggagttgataggacaagagagagggctagagtaagacagggaaggtgatc

SEQ ID NO: 258933 - DNA, 661 bp, Homo sapiens
ctctgcctccacacagcctgcaagcagcagctggtgcccagcgtgcaaatgtatcactaccagcaccagaggttaacagatactacagctggagctgcagaaagagcctcctgaggagctggactctgcagatgagaatgaaagcagtgactttatggtgtacagtctggaccttcaaattggagggggtgaggagaaccctaaagcccaggcatcgatggggaattctggagacaaaagctaattaaagttcatttcaaacctgtggggagaaaaattctagacataaacctaatgtaaagaaacacataaaattttattggaagacaaaagaaaagtggaatgagcacacatatcatatttttggatggtaagaataaaaattgtgaaagtgtcaatttttttctaaatcatctattaattcaatgcaacctcatgaaaaattacaaagggattgttttagtccattttatgttgctataacaacaccacagactgggtaatttataataagcagaaatttgtttggctcatagttctggaggctgggaagtccaagagcatggtgccagcatttggtgagagccttggtgctgcatcatcccatggcaggagttgataggacaagagagagggctagagtaagacagggaaggtgatc

SEQ ID NO: 258934 - DNA, 492 bp, Homo sapiens
aattccaccctgacttccaccaacaaagacaggtaccatcttagttcactactcatctattttgttagtgagggaaacaagactaggatgtatgtttgtacttttaaacatttatattaccctccttggtctacaaacaatttgaggtggcatgtgcacacacatacacaaatacaaacagtccagggaaaaggaggatagaaaaagaataaagatagaaataggagtgtttatatacatgtatgactatgcatcttggcttaggtaaagggttcaataaaagggatagatacatgccgtatgtttgagagagtttaggtctatgcttctcaaactagggtaaggtcagtgtgccagagggtaggtgaaactataggacaaacattatttgccttcccagagcattactttttcctgaatatttggaattttttttcaaaaattatatgtaaataatcatttaaaaatggaatgcaaaatttcatacttgtt

SEQ ID NO: 258935 - DNA, 2869 bp, Homo sapiens
  misc_feature (523)..(523): n is a, c, g, or t
  misc_feature (579)..(580): n is a, c, g, or t
  misc_feature (589)..(589): n is a, c, g, or t
  misc_feature (592)..(592): n is a, c, g, or t
  misc_feature (1338)..(1338): n is a, c, g, or t
  misc_feature (1341)..(1341): n is a, c, g, or t
gatgttagcctgtaaaatgaactacaggaatagctacagattggaaacaacctgtggtggttttaaaatatagctacaaattctttagcactcctctgtagagaggtgggatccttgtaccctctctgaatcttgggtgagctgatgactgcttcaaccaatggagtacggtggaagtaacactctgacttctaaggtccagacataaaagtacaggcaacttctgctagaactctagctcttggagcctgaggcaccatgcctacctagggctccatgtctgcttagaggctgccatgctgtcaggatgccaagaccatcaggagaggacacatgaaggcaccacagtcccagctaagcttagctttgagtcatcccagttcaagcataaaagaagtgagtgaagaagaaccagatgaggccaggcacggtggctcacacctgtaatcccagcactttgggaggccaaggcgggtggataccctgagttcaggagttcgagaccagcctggccacatggcanaaccccgtctctactaaaaatacaaaaatagccgggcatggtggcgtgcacctgtnntcccagctnctngggaggatgaggcaggagaattgcttgaacccgggaggcagaggttgcagtgagccgacatcatgccattgcactgtagaaggcgaaggggaaggggaagaacaagatgattccagtggccagccatttgaatcagcttcagccttcaaatcttcaaatcttcctagctgaagactcaaacattgcagagtagaaacaagctggcctcactgtgtcctgcctgaattcctgacacacagaacccacaagcatattcaagtggttattgtgttataccactaggtttggggggttttgttctgtgctaacagataactgggacaccacttaaatatccatcaatggaagacgagttatgtacattatatgtctttgtggaatactatgcatccattagaaagaagaaattagtctataattatttatattaatcacacttcaagtgaagaaggatgcagtgttctgaaaagtcttgatagtatgcctccatttgaaattctcaaaaagatggcacatatagagaacttctgggaaaatagacaagaaagaggtaacagtagatgccttgggggagggtaactgatggcaagggtgggaatgaaattcactttttttttttttttttgagatggagtctcgctctgtcaccaggctggagggcagtggtgcgatctcagctcactgcaacctccgcctcccgggttcaagcgattctcctgcctcagcctccccagtagctgggactncangcacatgccaccatgcccagctaatttttttttgtatttttacactttgggaggctgaggcaggtggatcacaaggtcaggagtttgagaccagcctgaccaacatggtgaaaccctgtctctactaaaaatacaaaaatcagccgggtgtggtggcatgcacctgtagtcccagctactccggaggctgaggcaggagaatcacttgaagctgggaggcggaggttgcagtgagccaagatcgtgccactgcaccgtagcctgggtgataagagtgagactctgtctcaaaaaaaaaaaaaaaaaaaaaaaaaaaaaaaaagggcagtggatgtagagctggcaaaaacaatgacattgagatgaagcgtgctcaggtcagagctctaacgaagccctctgctgcagactgaatgtttgtatctccctcatattcatatgttgaagtcctaaggtgatgttatttggaagtgggcctttgggagggattacagcctgataagaggagacttgagagcttgcttcttctctgtgccatttggggctacaataggatggtcgtctgtacaccagaagtcaggcccttggttgccagcagaatggaatttgccagcaccttgatcttagactcttcaccctgcagacctgaggaataaatgtgtgttgtcaagccacctgctccatgctaaattgttatagtagcccaagcagattaagatgcctctgtttggctgtctatggctgcataacagaccactccaaatccaatgatttttatcatctttcacaatttctgtgggtcaggaatttgggaagggctcatctgggtggttctgccttggtgtctcttttgtggttacagtggaagccggagcactggggagctggagcagctgggagctggccaagcatctctcttcatatagcctcaaggcctctccatgttgtctctctgcatgagccagttgggcttcctcacagcatggcagctgagagtgttgacacctcttacactgtagctcaggactcccatgagtcaggccacattgcctttatgacccagcctcacaagtcaccatagaatcatttctactgtagtctgagtcactaagtttggctcagattcaaggggaagaaacagactctgttactcagtgggaggagtcttaaagaatttatagacatggttgggcacgatggctgaagtctgtaatcctagcactttgggaggccaagatgggaggatcgcttgagcccaggagctcgagaccagcttggtcaacacagggagcccctatctctccaaaaaacttaaaagttaaaaaaaattagctgagcatggtggcacgcacctgatcgcaccactgtatccagctcgggcaacaaagtgagactctatctcaaaaaaaaaaaaaaaaattatggacatgttttaaaaccaccatactacatttgaagaggtcagaggaggagaaagaaccacagaagcatctagagagatagcgggtggtggtgggtgggggcaaga

SEQ ID NO: 258936 - DNA, 2866 bp, Homo sapiens
  misc_feature (523)..(523): n is a, c, g, or t
  misc_feature (579)..(580): n is a, c, g, or t
  misc_feature (589)..(589): n is a, c, g, or t
  misc_feature (592)..(592): n is a, c, g, or t
  misc_feature (1338)..(1338): n is a, c, g, or t
  misc_feature (1341)..(1341): n is a, c, g, or t
gatgttagcctgtaaaatgaactacaggaatagctacagattggaaacaacctgtggtggttttaaaatatagctacaaattctttagcactcctctgtagagaggtgggatccttgtaccctctctgaatcttgggtgagctgatgactgcttcaaccaatggagtacggtggaagtaacactctgacttctaaggtccagacataaaagtacaggcaacttctgctagaactctagctcttggagcctgaggcaccatgcctacctagggctccatgtctgcttagaggctgccatgctgtcaggatgccaagaccatcaggagaggacacatgaaggcaccacagtcccagctaagcttagctttgagtcatcccagttcaagcataaaagaagtgagtgaagaagaaccagatgaggccaggcacggtggctcacacctgtaatcccagcactttgggaggccaaggcgggtggataccctgagttcaggagttcgagaccagcctggccacatggcanaaccccgtctctactaaaaatacaaaaatagccgggcatggtggcgtgcacctgtnntcccagctnctngggaggatgaggcaggagaattgcttgaacccgggaggcagaggttgcagtgagccgacatcatgccattgcactgtagaaggcgaaggggaaggggaagaacaagatgattccagtggccagccatttgaatcagcttcagccttcaaatcttcaaatcttcctagctgaagactcaaacattgcagagtagaaacaagctggcctcactgtgtcctgcctgaattcctgacacacagaacccacaagcatattcaagtggttattgtgttataccactaggtttggggggttttgttctgtgctaacagataactgggacaccacttaaatatccatcaatggaagacgagttatgtacattatatgtctttgtggaatactatgcatccattagaaagaagaaattagtctataattatttatattaatcacacttcaagtgaagaaggatgcagtgttctgaaaagtcttgatagtatgcctccatttgaaattctcaaaaagatggcacatatagagaacttctgggaaaatagacaagaaagaggtaacagtagatgccttgggggagggtaactgatggcaagggtgggaatgaaattcactttttttttttttttttgagatggagtctcgctctgtcaccaggctggagggcagtggtgcgatctcagctcactgcaacctccgcctcccgggttcaagcgattctcctgcctcagcctccccagtagctgggactncangcacatgccaccatgcccagctaatttttttttgtatttttacactttgggaggctgaggcaggtggatcacaaggtcaggagtttgagaccagcctgaccaacatggtgaaaccctgtctctactaaaaatacaaaaatcagccgggtgtggtggcatgcacctgtagtcccagctactccggaggctgaggcaggagaatcacttgaagctgggaggcggaggttgcagtgagccaagatcgtgccactgcaccgtagcctgggtgataagagtgagactctgtctcaaaaaaaaaaaaaaaaaaaaaaaaaaaaaaaaagggcagtggatgtagagctggcaaaaacaatgacattgagatgaagcgtgctcaggtcagagctctaacgaagccctctgctgcagactgaatgtttgtatctccctcatattcatatgttgaagtcctaaggtgatgttatttggaagtgggcctttgggagggattacagcctgataagaggagacttgagagcttgcttcttctctgtgccatttggggctacaataggatggtcgtctgtacaccagaagtcaggcccttggttgccagcagaatggaatttgccagcaccttgatcttagactcttcaccctgcagacctgaggaataaatgtgtgttgtcaagccacctgctccatgctaaattgttatagtagcccaagcagattaagatgcctctgtttggctgtctatggctgcataacagaccactccaaatccaatgatttttatcatctttcacaatttctgtgggtcaggaatttgggaagggctcatctgggtggttctgccttggtgtctcttttgtggttacagtggaagccggagcactggggagctggagcagctgggagctggccaagcatctctcttcatatagcctcaaggcctctccatgttgtctctctgcatgagccagttgggcttcctcacagcatggcagctgagagtgttgacacctcttacactgtagctcaggactcccatgagtcaggccacattgcctttatgacccagcctcacaagtcaccatagaatcatttctactgtagtctgagtcactaagtttggctcagattcaaggggaagaaacagactctgttactcagtgggaggagtcttaaagaatttatagacatggttggtctctttggctggggggggggggggggaggggggggggtggcagatttttttatccttggcccaggagctcgagaccagcttggtcaacacagggagcccctatctctccaaaaaacttaaaagttaaaaaaaattagctgagcatggtggcacgcacctgatcgcaccactgtatccagctcgggcaacaaagtgagactctatctcaaaaaaaaaaaaaaaaattatggacatgttttaaaaccaccatactacatttgaagaggtcagaggaggagaaagaaccacagaagcatctagagagatagcgggtggtggtgggtgggggcaaga

SEQ ID NO: 258937 - DNA, 354 bp, Homo sapiens
gagattacaggcgtgagccatcacgcccagcccagggttatcttttaaaaggcaaatctgatattattacttcttggtttaataattataatgctcctttccttttaggatcaggtctacacttctcaagctctactactaaaccatcagccattcctccaatcatgtcctacaacctcatgcctctctgtgcttgcacagactccctgctactatgaattttcaaaattcattagagagatcatttattttctcctcagtctgaattgtatgctaagccagtgggcactccctcaacagcccacacttacatctgtaatagcacctagcatccaacattaagattctcactat

SEQ ID NO: 258938 - DNA, 152 bp, Homo sapiens
gagattacaggcgtgagccatcacgcccagcccagggttatcttttaaaaggcaaatctgatattattacttcttggtttaataattataatgctcctttccattatacaaagatcacctgggcatagtcatagagcctactcatgcgcgtg

SEQ ID NO: 258939 - DNA, 413 bp, Homo sapiens
ttttagttttaatgcctctgtaagtagacattctttatataaggcttctagaagtcagtttttctcatcagatataaagtcgagatggggcaatatttttagtgttattgatatttgatattgatattccccactgcaatatttgtttcattcttgttcactaaaaaagtgttgactttgtttataaaagttatgccttttctcaagtaacatctgtgaacagttattctaaaggctatacatcgtataaatgcatgtggttacgtattctctaatgaactagcgattgtttaactagctttactgaggaatgattaagaaaaaagaagatacaagttaatgtaaatatgaaatttatcttgaaaaagattacttttggcactaaccaggctgttaaggatttcttttgtagt

SEQ ID NO: 258940 - DNA, 300 bp, Homo sapiens
aaaaatgatttcaatattaggtacctaaagtagtcaaatatatagagacagaaagtagaatggtggttcccaggagctggaggagggaatgggaagttaccgtttaatagatataaaatttcagtttgggaagatgaaaaatgttctgaagatggatggtggtgatattataccaaatgaatgtaattaatgctgctgaactgtacacttaagatggttaaaatggtggattttatgtgtattttactacaataaaaattatttcgaagattttttaaaaataaaagacgcttttgatat

SEQ ID NO: 258941 - DNA, 288 bp, Homo sapiens
gacagcccagtcttcaatgtccaaggccatcacttctgcatcaaaatcaggagcccctagaagccacacacagctccagcaatcccattttactgatagggaagtggaggcaccaagagacacagggcccggcccaggatagagtccagatctcccagagcccagtccagcactgcctggcaccaactcagctggtctgtttggacaccttgggaccataggaggagagctgaccaccaagagagttaaagaccatagggtcttggagatcagagggggagagcagta

SEQ ID NO: 258942 - DNA, 284 bp, Homo sapiens
gtgggtctggctgtcctgccccgggcaggggcccttgagggcagcagagccttctcttcagctagagcatcgcaggcctgcaccctcgctctgtcgcttcttcctgcgtgaccttgggtggtccagacactgtcctgggctttattcgggggaggcctgcctgctcagctcccaccagccctttgtgaccccgtgtcctcaggcagggatcaagttcatgcccactgacctcagcctctctctcgggctgtctcctccagctcagggcaggccagatgcaggac

SEQ ID NO: 258943 - DNA, 369 bp, Homo sapiens
cttccacgctctcctggctgttgaatgttttccactgaaggagtctagtctgtccacctagggggctctccctccctcggtccagggcattcgcggctcacaggtcagctcgggcagaaccgccctgaccacctatgagctcctcgggacaccaccccaatgccagggtgaatcgtccttacaccctcagtcctgtccgagcggcctgatcctacctgtttcccagaaactgctacgcgaagcttccccgccgggctcatccagggcggaggggtctgtccctgacgcagactgggggcgggtccgcaaaagcgggctgaatgaatgaacgcagcagggctggggccccctggggctacaggcccctgc

SEQ ID NO: 258944 - DNA, 541 bp, Homo sapiens
acattcatgccatgtttttgctgtttttgtcattttgagaatatactgcataaacaagcattttatacacacgatttaagaagtactctagtccatgcattgtgtttaaaatcttttattcatagaagtaataattgtcacatgaaaattctgggaccaaaataatatcacaaaatgctgattcttgaactttcacccatacaacatgtagttagaataaaaatcttttttaaatataagggaaacaaaagataaagattagcttatgtaaattgtatatacattaaagcacattcacgtttctttcctcatgggtttatcagtgttggtagtctttaagaaatgatagaattgcttaaaattttttcttttgctgctatacaggtgttttttgtatttggtatgattttgccatggtttaaccgtaattatcagcctaatctagtaaaatttgcctaatttctttctgtgaaaagataaattatgcctgagtacggagaacagattattttgtttcattaaatcttggtgtacattcatc

SEQ ID NO: 258945 - DNA, 743 bp, Homo sapiens
gtccaacgttgcctcgcggaggccgccgtgcggagcaaatgtctaacggaaatcagaggtggaaaagaggttggaggagcctgttccgttccacccgcgtttactgatgcgcccaccagcagccacgcttggggctgggggctttgaggacacgcacgtgagtcagggtcttctggcctctaaggcacgcgcaggaagaaccctagatagacggaattacgacccatatcggaagaatagcataaagggcgacaaggctcaaatgagctagaggacatcgggtggggaacctggaagggacttcaaagaggcggtgtggggagtcttcaggctcactctgaggtccccattgtggcttgcttctgcagctgagctggatttgtgtaaagtcaaacctcagaacagcgagcatgagtagagagtctcaaatgatatgcgactcttcaactcacactttggccgaagagacttttggaaagaaccatgaggttcaagttattcttcatgcatttgtgcttcctttccaggccttgggctgagctgattctcagctttatttgctggcgtggtgcaaatagtcaaggtgttacttccagccctttggggtgtaggttcacctcctttttccaccttacctgtccctagatcttctgtttccaaggccaagtctttaaagggttttcagtccctctagcaaagtaatgggtagggaggctcatcgtgagggaccacattttccctac

SEQ ID NO: 258946 - DNA, 526 bp, Homo sapiens
gtccaacgttgcctcgcggaggccgccgtgcggagcaaatgtctaacggaaatcagaggtggaaaagaggttggaggagcctgttccgttccacccgcgtttactgatgcgcccaccagcagccacgcttggggctgggggctttgaggacacgcacgctgccttaaatataatggacatccgtatggattaagactctatacaagctttctctttagtacaccaggggaaagtgaaaaaagaaccacatttgaattcggctttgtcactacaagtgggtgaccatgagcaagttactaacctcagtgaacctgttcctaacctaaaaaggaggagaatggagagcaggtaataataccttatgagatggttgtgagagttatatagcattctttatgtcatagtcctagcaaagtgctggcataaaataggtgctccctaaatgttaattacctaccttcctttccctttctgtcagattttctctactattcttatgaaataataaagagtttttgtaattaaa

SEQ ID NO: 258947 - DNA, 203 bp, Homo sapiens
ctcacggttttctccatccacccaaggaaaatgccctcagagattcaaacctaaagctccttttttttttttaaggcagagtctcgctcctgtcacccaggctggagtgcagtggtgcgatctcagctcaccgcaacctccgcctcctgggctgaggcaggagaatggcgtgaacctgggaggtggagctttcggtgagccaa

SEQ ID NO: 258948 - DNA, 419 bp, Homo sapiens
aataaattctccccttttgaaacaagttatagtcctttggagatattcatatataagcaagtagatatagatacacacttttttgcttttgtagacaaatgataacacattgttgacccatctcttgtcttgccttttctactttccagtccgtcatgaagatcattctgtactggtgcataaagtgcttccttattcttttttatagctgcataattttccactgtggaaataccttgacttatctagtcattcctctactaaggggcatttaggctgttcccagtctaatggtacaggccaggtggggtggcacacacctgtaattccagctacttgggaggctgaggcaggagaattgcttgaacccaggaggtggaggttgcagtgagcggagatcgcaccactgcactccagcc

SEQ ID NO: 258949 - DNA, 526 bp, Homo sapiens
cagaagggatgaaatgacagaggctggcagagtgtgatgataaatgacagtgactcgtggcctgggaatgggtgggatctttggaaaattggaaagtctatcccacctaagcaaccctccctggcagtgctactcagttccacctccaagaaggaggtttccaattttttttccatgacaagccagaagttctgatttttagtttgttttctgatttaaaaaaaatattggcaatagtgcgtgagccactgtgccaggccaatgtcaggcatttagtagctgcctcacagatgtgagaaaaatcctgtgtaggtcatccagaaaattagaggaagaaataggcttagaacttttctctcatgactcccagtgcagagcttgttccacattacatgggcctactttcatgggagtttccagaggtgtctggacacaggggtccttcttaactctgggaaattgtaggttattttatgagagcctttttccctccagcctgggtgacagagtgagactccatctcagg

SEQ ID NO: 258950 - DNA, 497 bp, Homo sapiens
aggggagagggagggaaatcaaactgagaaataccacaatgcagaccaaattccatctgtcatgtgttccttcattaaaaaaattaaaatatctgaatcaagcataatagcatattgttagctctggggtggacacagaatttgttgtattggtctctgtactttagtgcatttattttaaaaattcatgataaaaggatgccttttctatatcttgcccattcaaataaccctcctacccatcagtccctaggaaagtccataagtagatcagtcaggtgaggcctgatcaagtggttctgatgataatgccaaggactccatttccttttgttattcccctctgcctcccttgttgtctgattcatcttgaggatccctaccacgttctctgaacagctccagttgtttccctcataattgcaaatgactgtggcacctgcaagcctcacattctcgtgtcatgctttccaggggacaagcgggtgtctctccaa

SEQ ID NO: 258951 - DNA, 368 bp, Homo sapiens
agaatttatctaagttttggtcataatccttgctgatagctatttagatcacacatgatctgttttcagaggctgtatatcccctagggaggaataaattagtacctagaatctgtaatcagagataaagaggcggggggagactggatggaagaagtcagcagtgaaactccagagcttattcaccttccatgttctcatttctgaaattccgtggaagtgtatctagtgctccagtgcttgatgcttctaggtcatttttcaaaactggtctgctaaagtaggtcagttttccaagaaccacagtcacctgaaaagagcagttagcttgccatcagatcaccaatcccattgccagactatagatt

SEQ ID NO: 258952 - DNA, 1053 bp, Homo sapiens
tgggtctcctcgaacagtagaccatgatacgattgagctcgtaccctgaacttcccgggcttcagcaccataccggacatccagcatctgagatgagttaaaacgcacagctggaggtgactttcgagatgagggtacacttacaacatacaagttgtttatggcgctgggacctgaggtatctagtccgcatatacagtgacacgtatgcatttactgccacaaagatgggtaaaagtcaggagaacgcacttaagagcccaagcgacatacttaatgtctgcttgtctaggagagcaggttgactcaggacttcaaatatgctgggatctggagccatagtaaagaacacatatgcttgcctaaaacccagggataccttccacagcaggagcagcacatcaagatgggacgatcatatttaaaaacgacggttaaggtgcaacctaaagtaaatctcacatcttggcaatcgtgtgcaaaactgcgcgcctgacatccctattgcacagggaagcccatctagtacttgcactgaggtttaaaaccttggggtgcatgtctgaggacccggaaagcacttttgaacaactagatgcgaatgctgcaggaaggggcgaaggcagtggagtgaaggggtacgtttaagttgtgggaggtgatctaagtctcggtatccatgtttatgaccccaggaagcctgtttaaggtttcagtagggctgccacagctctgtgccatccacaccgctgaggcagtgtatttaagaagcggacccgagcgcgaacccaggggaaatctcacatcggggcaagcgtgtgcacggtgcaaagtcgcgatgtgcggttttacagccccaggtaaaccttacggtttctgaaaagcatgtgcatcttttgggtccggagaagcgtgtgcagcccaaagtacctgcgaagctgaatgtttacgtttaaggtctgggctcacggcagtccatcaaagcatcccacatgtgggcgcgggcgcgtattctaggtgcgcactccacgggcacggagcggccgccagggg

SEQ ID NO: 258953 - DNA, 589 bp, Homo sapiens
gaatacaaattgttctaccaaaaatacacatgcacttttatgttcatcacagcactattcacaatagcaaagatacggaatcaacgtagatgcccatcagtggtggactggaaaaagaaaatgtggtatgtatataccatggaaaacaataaagtcattaaaaaacctgaaattatgtcttttgcagcaacatggatgcagctggaagtcattatcctagcgaattaacacaggaacagaaaaccaaatatctcatgttctcacttataagtggaagctaaacagtgaatacacatggatacaaagatggggaacaacagactccggagcctacttgaggtgggagggtgatggtcgaaaaactacctatcaggtaccatgctcactacctgggtgatcaaagcatttggacaccaaaccccagtgacatgcaatttacccatgtaacaaacctgcacatgtactcctgactctaaaataaaagatttaaaaaaatcaatagttctcgaaatttttggtctcaggacttaattacattgaggatcccaaggagttttttgtttatgtcagttatagctactaataattg

SEQ ID NO: 258954 - DNA, 670 bp, Homo sapiens
ttccctccagacagaaaacatgttaaggtgatcatacatcccctaagagtccctgtttgcctggggaagtcccactgtgtgtttattatacactcacgtttatttaacagtatcctcttgtgttctccaaggtgtcctggtttggagataaatgatgtggtcactcaaaatgaccaccgattgtgctgggagagtagaagttaattctcccagtagatctcactggcatgcaagcacacacagaagactctgtaccattacctgttctcaaccaatttccatctgtcagagattaaataataaagactgtaagcaaatgacatggcttacattaaggaccatgacctgctcttagcagggcaacatattgtctctgagtattcctatcctctctcgtctcccttactgaccttgccagccagagagccttttgttttgatgatgcctgagagcaggcaatgaagacttctggtttttctggtcctacatttacctcatttcatttagcttgattttaccttttgttcctcagctaaagcagcaaggatgactactggggcattatattgagcgctgatgcaatcaatactagtttcaagtaacacagaaaagcccccagacctacattagagctgtgagcagaagttttgattggcgtcaggtgctacat

SEQ ID NO: 258955 - DNA, 313 bp, Homo sapiens
aactttaaggttggtccaaagcaagatacatgatcaaatatttcatctgctattttatcctcagcatcagaattttaaaatcctttgttgcaagctagttagcctggtactctcctatctaggctgctagaagcatatacacagaaaattcatctttccctactctgtagcacctgtgttactctctattctctgaaagttttagatatgttgtaaatagtcatctcttagatttccttgtatttagaaaagttgttttttggtactacaacaaaaattgttgtttggttgtaattgttggtgagcacactgg

SEQ ID NO: 258956 - DNA, 989 bp, Homo sapiens
cagaccagaccacattgtgtcaccccacattccacctgtgcactcttccaggggtggcatccacaggctcatgccaatgcaggcatgttaggcaaaggcaaccaggtcaaaatcttagtgcctcagcctgagaattaattaacatttaatttcttaaatgacttgttttctggtttaaaaagaaatacattgtgcactaataaaatttagaaaatattaagcacaaagatgagggcaaaaatccattctaatccttccaaccagggaaaccacagtcaatattttggtatgtctaagtctgtattttttccctaataagtatgtatttttcttttgcttttttattacaaaagtgggattattgtatatgttacattttaccactttgtttttcaccttaaaacatttcagacatttgaaaatgatgttaaatattccatttaataccactttactggctgcttattattccctaatattccctggattcctgggaggcagtgtgcatattggttagcaccaggggattcaaacctccaaagaccctgaagtccaggctatctttcagctatgtgatctggggcgagttacttaacctttctaagcctcagtttcatcatctatatagtgggaatgatgcttataatgctaatgacccttctggtagttatgagtgttaaattatatgatgcatgtgcaaagtttgacaggtacccaataaatgtaatgttcatgattcccatttttgttcaaccagtgcttcattatcttacatcaaatttacccacttgatctggtatcattccagcactttaatggacatctttgtagctgtgtctttgtttatatccatgattgtttttaaggatttattcctgcaagtggaattttttggtttctaagggtatataatctgtaagttttccagatcagtatcagataacaaaaatatcaaataaaaaagaaatggattcctttctttctgcaaa

SEQ ID NO: 258957 - DNA, 509 bp, Homo sapiens
ggaaggcatttttctgcacttcccctcctcgggagctagtttttatttgtagatgaaattattctttctgtatgttggttttacttactatggaaatcgcataaggaaatactggattttattctgaccaggcagtttctgcctcatttttatcactggtgagcactgttagaaaaggtagcaaaccctttcatgaggctgaaaggctgtatctggcggctcagcccagggggaggggcgtgtcagccaacagccaggcagccttgagagacctgtcccctgctggcagagcagcatcacttccccacttcccactctcggtgtttgtgggggtctctgttcaggttatagctcttgatattaaaacgtctctagagttttgttcttttcctctctaatccacccaaattactaattccatcagcactgcatccagcagaagcccctcgggcagctccacctcaagctggataactggatgcatggcacgattaaaatttgttggctta

SEQ ID NO: 258958 - DNA, 195 bp, Homo sapiens
caagcagcaggtagccctgggaggccagttccccatgactgccccccaacaccgcttgggggaccctcatgtggtcatttccatcacaagaggaatgacccctgtgggactgggccagctgagcccgcatctctcatctctgcttatggatttgtttgtgtctagggatttaataaactcctttctcttccgttg

SEQ ID NO: 258959 - DNA, 353 bp, Homo sapiens
ggagagaggcagaatgccctgggagaaaagacttctccagcaggcctctctgctgataatcctgaagtgggtggccatcttgctggggtaaggttggggtggggggcaccggagccgctgcaggtagaggtgttgggggctgctcatgtgtttctctctcccacccctctggctgcctcagaaacaaggtcccagattcacccctacccctgccccagtgagttaatgtctccttgaaatggacactgcctgtcctggatccaggccagggggaatatagggcactggtggaggttaacccttgttcaaccacagaggagccaggccagtcctctccttccctcaggcgtgcc

SEQ ID NO: 258960 - DNA, 477 bp, Homo sapiens
caaggctatagaaattgcaatgatgatagaggccacagggaccctcctgtgagcagatggaggatctccaaagattacaagaatttaaccaacttgagtgatcagcctgttttacagcctcctgacctcaacctgttcttccccagccctgggtggaatgaggtcaccctgtttgtttaaatcagctcctaaatgaccccaggttacttacagatgaacccaagttaactctcctcattaccatgctaaagtcttcaccccgggagaagctatagcttcatgactataacctatgcaacctatgcgctagcatcatgactcactgggacccctactctacatgcaatcatgcaccctctcctttctccatcaccccataaaaccctcctgtctctttctctgggggacacactacttgggagaatatgcccagtgtcttcctttcttgtgccaagtaaaactcccattgatcaaaac

SEQ ID NO: 258961 - DNA, 731 bp, Homo sapiens
aattcgcggccgcgtcgaccgacagaaggggtctcaaaaaaaaaaaaaaaaaaggtaactaaaatgtaaaagcaataactatttattttaaaaaggtcagtattcaaggtatataatatttaatgccatttaaaaaataaaaattaatgccaaaaatccatgatgagcaaaatatcattaacattttaaattaagagaggaacagtactgatgattctgtctttgcctcaggctgcagtgtggcttagcagggcactgctctgaacttcttttttcaatttgctgctttctccgggaagccttcccttacctcagcctggttgagggccccctgggctgttttcactggttgatggtatctgatcccttccagcctgaggttcctggagggccagtccaggtctgaggtctggttcatgcttccagtgccttgaacatggctgttccgaggtgtcagtgccgagtcaccgtgtctttgatgttagccagatgcccttagtgcaggaataggaacttgagagaggcccagtagggagccaggcttttctcagggagataagtagtttcctgtttcccagacctggtcattccagtggggttgctgggaccgtcatctatcaatctgtgttaaacgcttagtacagtgcctggcctgtatatagcaggtgctcagtttttgcttttgtttttgagctggagcctgggcaacaaagcgagaccttccctgtctc

SEQ ID NO: 258962 - DNA, 372 bp, Homo sapiens
aaactgaggccctgggagattaagtaacttcccatctgctgtagtcagggtcgggcccttagtcaccgtggtctctggaacccacaggcctggaaacagcgcttttgagcaggggctcagcgaggctgggggtcagactagtggccgaggtgcgcctgtgtggagatctgagggtgacgtaagtagaggcactggcgtgagggcccctcatgcagtgtcaggcttgcacctttgcttggaaattccattagctttggaatttatagcttcgtggtgcagtgtggagttatgttggagataccacaaagataaagcatttccatggtgaacaaaaaagtttgcaaataaaagcagtccaggcagtttttgttt

SEQ ID NO: 258963 - DNA, 807 bp, Homo sapiens
agcatcccaggtgacttagctggagggaacctgctatggactgaattgtattcccctaaatttatatgtagaagctctaatccccagtgtgatggcgttaggaggtagggcctttgcagggtgattggatcatttgcatggaaccctcttgcataggattagtgcttctgtaagcagagacataagagagatgacttctttcctccacgtgagactatagcaaacaggcagctctctgtgacccaggaagccagccctccctagaacctgaccatgctggcaccctgatcttggacttctagcctcccctccagaacttcgaggaataaatgtttgttgtttgagccacccagtgtatggtatttgttatggcagcccaaactgagtgaaacagaaccttaggggttacctggtcaaaaccccccttgttcagatgatgagaggagagaggcccaggccatcaggcaggtgaggtctgtggccagcctcagactttagtttcctgatggcattaagaatctctgctctgagcctggaatgaatacaggctctacctgtttttagctgtgtgcaaattaccacgcactgtggtttcccatctatagaatggggctgtaagggacctggcctcacaggctctggggattagaggagatggagcaggcaaagcactgaatccactgaggtctcagtgctctcagtgattatcatcattgttgttgatacgcctgcttgccttatattctttttactgcacaaacgccttgttacatatggaaaataaatccacctgcttcagactctgat

SEQ ID NO: 258964 - DNA, 693 bp, Homo sapiens
catatttaagaatgattcttttttcctatagggctagtcaagtgaagcagtggaagtggagaaggaacaaagaaacctgtaactggttgtgatcaaatatttgtaaacaggaatgaatttttatgcactatacactgttatcaaagttacatatgctgcaaagctggtggtgaacagcagtgccctggtcccttcctacacttatctgtagggataacaatttttaatgcacgcaacccacctctacataaatatcgttactctttgactgtccaattttccatcccaggtcctgcagttctgcccgcaaggggaaacggagtttgtgtttccttacctgccagtccactccaaggagccaagaaggcgtcaacccccctcaaccccggctcgtcctccaaactgagcccctcaaagactgcggtatttttcagtccttcgtaaccgctctcagccccaaaatatgaaaatgagagcgatggtcctgagcgcctggagtgacatcttagttcgctcccaagacccatcaggaacctcatcccaagtgctctgaagagcaggagaaaacatttttaactaaggcgtcttctccttggggcagggtcctgacgggagaagggggagccccatcttcagagactcgcccctcagagctgctcaggttcctcttccccgtggccctgagggagctcg

SEQ ID NO: 258965 - DNA, 372 bp, Homo sapiens
agagggatatttttcttggaatgcaaaaatagttcaacatgcaaaaatcaaagtaatatatcacattaacagactgaaggaaaaaaaccccacatgatcatctcagttgatgtagaaaaagcatttgacaaaattcagtaacttttcatggaaaaaactctcaacaaactagaaatagaaggaaatttcctaacataataaagaccatatatgcaaagcccacagctaacatcatactaaatggtggaagattgaaatcttttcttctaatatcagaaacaaaacaaggtttcttagtttcaccatttctattcaatataattcttgaggtcctggccataagaattaagcaaaaaagaaataaagggcata

SEQ ID NO: 258966 - DNA, 450 bp, Homo sapiens
cagagtcagactgctattctagactggactccagtgcccatcccactgttgtatgctgttgtcaggaggaatttgcagggaggtggctttatctgctgctggagaactatgaggaccagactccaactcatgcagaggaaaggagcacttagcccatggcccaaactgaaccctctgtgtacccttctgaaaacctccacctccttctacttccctgggcagccctgggctttgccccacggcaccctgactgcacttagctaggctttctcccaacctggattgagacttccccaggactggccttgcaccctgtgggctatccggacacatgtgagggtgtcaaattttaacactatgtatgtatgttcatgtaactaaggaaaaaaatataattaatacatcaaacccatgatttcacagatcatagtgcttttgatgaggctaagt

SEQ ID NO: 258967 - DNA, 415 bp, Homo sapiens
atttcatatttaagccctactagccaggaacaaatatccccactttgcagagaaaattgaggtatagagaacaagtaatttgctcaagatctcagagcaaaaggtgacagagctgagatttgggtccaaggagtgtgctcttttgtcttaactctctcatcacactgtctctctgttaggaagaggaatctatgacatatggttgtatagatgtgcaattgctctcattcttgctatatattctttaccaaaatgccagcgactaagctgatgttaaaaatatagccacataatcacacacacacacacacacacacacgcaaataacaaactctcttttgagtttacataacaaaaataaaaataatttaaatgatcagtttaaatatgtaaacacaacctaaaaatgaaagtt

SEQ ID NO: 258968 - DNA, 580 bp, Homo sapiens
tcatatttcaggggcttaatacccgcatgtggctaacgtactggtcagcacaggtctaagctagaggtctaggtctggagaccagaaacattggcatcacctgggagctttttagacctgcacattctcggctcttctccctctcccccgcaacctgctgaatcagactacattttaacaatagcctcaggtgactggtatacatattaaagtttgagaaccactttcttctagtgaaccaacaggcaggcaggcaggcgtcaagcttggctgccagcttcttgctagatatgtcattttaggtctttcaagattgccctctgtgtgtgttatttaaggttggtatgcttttggttttctccttgggaaaagaaggatgagaatattgtttaaccacttctctacacaagtgtatgcaggagagcagttgctaagtgtttaaacaccacgctatagaaatgtagaaacaaccacagcattggtgttttttttttcttcattccagtctcatttccaggaacagcttttcttaaaggcctgaagactgaacattcatttcattaaaaatatatggcttatt

SEQ ID NO: 258969 - DNA, 360 bp, Homo sapiens
taaactcatagaattaatgagtaagcgcaacaaggtttcaagatgcaagatataaaaatcagttgttggccgggcgcggtggctcatgcctgtaatcccagcactttgggaggccgaggcgggcggatcacgaggtcaggagatcgagaccatcccggctaaaacggtgaatacaaaaatactaacggtctctactaaaaatacaaaaaattagctgggcgtagtggcgggcgcctgtagtcccagctacttgggaggctgaggcaggagaatggcgtgaacccgggaagcggagcttgcagtgagccgagatcccgccactgcactccagcctgggcgacagagcgagactccgtctca

SEQ ID NO: 258970 - DNA, 455 bp, Homo sapiens
tcctaatgaagcagcccatggtttctgagtgtcaaatttttaagaacgcacatgccgacaattgacaattgggctcaatatttcacagcgtctttttgttttctggtacactgtaagcagattactatgtaagtgattttcaaccctactagagaaagtgaagcacagagaaaccctttaaaagggtcagtttcacaaatgatgctagatctcagttcatagatccttatcttttactctctagcatatagtcagatgttctaaataaacttttttaaagaatagttttcgatttacagaaaagtcacaaaaatagtagacagttcccatatacccagtttctctattgtgtgagatgttgacatttgttttagtgtaagatgatacatttgttacaactaaggaatcaacaatggtacattactattaaataaactccacagtttatttggatt

SEQ ID NO: 258971 - DNA, 490 bp, Homo sapiens
gcatcctcccatgtccttggctgaccatttaattataaggtccaatcaaactaattacacattggggtccttgaagacagtaagtaattcaagtctgctttgctgctgaattccagaaaggtagattatttttattacagtcagtagatggggctgtggctcatgcagttgaaaaggcaaaccttgagaccaagggagtcaagagaaagagaagcgtcttcagatgacaaactctgtaagggctccatagtgggttagtggaagctccctgcttttcagagtcaggtatatgaattatttctagcaaaatttataaccatagaaagtaggttttctcatcagattatattactgagccacagctggtaatagttgagtcgtgtgaagattaaacaaggcaaaccagccagtgcactgttgggcatatagtaaatgctcaataagtggttattattttgatataatgattgttaattatttggtttagtga

SEQ ID NO: 258972 - DNA, 447 bp, Homo sapiens
gagttaggggaggggatcaactgcaaaagcacacaaagaaattttcaaaggtgttgaactgtcatatcttgattagaatggtggtggttatatgtttatatataattatcaaaattaatcagatcgtatacttaaagtggataaattttattgactgtaaataataccttgagttaaagtaggtgctttagagccagactaaacctggattcagtcccagctctgctgcttagtagctgtataactttgggccagtcatcttctctggaccttggtttgcccatctggaaatgtgtataatgatagctgccttggggattagaagacgtacaagtacttagcatatgcctggaacatgataaattatcagtaggttattattttactttatgatcgtcattctcctttataaaatatcccagtaatgctagtattttgcttatcagt

SEQ ID NO: 258973 - DNA, 369 bp, Homo sapiens
ttattggtagcattttaaagtctgttaagagattagttatttgtttgtttatactccaaaatatactcaatttcaaacatacctatcatttatttgcaagtatcatcatcaatcaagtaagcaataacaatgcacaaggcttagaagcagatttgtcatatttcaaaaagtggagctcaaagcaattcattttaagttaactttaaatttataaactcaaggcagtacaagtctggtttttttttagctacccaatatctgataaatatgaatacctaataatagacgataataacagtgataaaattaaaatgagagcaaaccactgaataatctattatttcttatttcttcctataaaggatgcac

SEQ ID NO: 258974 - DNA, 437 bp, Homo sapiens
tcccagaacctgtgtggagagcactttatcactggtatggagcaaacctggccttacctagaccagttatcaagaacagcaagacagacatcccagagctggaattatttccccgctatcttctcttcctgagacagcagcctgcctacattcttttctatgagcagcaggggatagactatgcacaatttctgccaaagactgatggcaaaaagatggcagacacaagcagtatggatgaagactttgagtctgattacaaaaagtactgtgtgttacagtaaagctaccactctggctgctagacagcttggcggtgagggagatgactccttgtagctgacatttggcaaaagcgtcactgaaaggcaagctaaatgtagttattttatcctgtggccctgaagcacaaaataaaaattctaattaaaatagtt

SEQ ID NO: 258975 - DNA, 372 bp, Homo sapiens
cggcacgagggtccctctggtctttggaaatctataaatggagggtatgatttaaattggcgctctgtacctttgaagattccatacataaacaaaatcaggcatacccagtagtgccatttgtcagaattagaaacctattaaacttagctaaaattgtagtggtgggagaagaattatttaaaaataactcacaaagaggtgaagcaagatagtgaaagagaaagctccactgatagtctcttctgcaaggacaccaagttaacaactatctacacaggaaaaaaaaaaacaaaacaacataggaataaaaaattaggtgagcactctcagtacttggttttaatttcatatttctgaaagaggcactga

SEQ ID NO: 258976 - DNA, 442 bp, Homo sapiens
gcaggcatagcctacaccctcaactgctcccttcagctgcttcaagatgaggaattagaaagacgcagggacgggatgggtggacggggagtagagatttggcatggccatggcgtcagaaacttggcttgggagtgaatttgtaaatggggaaagcatcttcttagcaaccatgcgtccaatcttctgcatcaaggagagagactgatgtgctcagggagactgcagaggagtgcagcaggtaaatgcaggggctctacagcccaaggttcttggtccaaatccccattctgctgctgcctatctccatgaacctgggacaagcagctccatcgttccgagactcagtttcctcaactgtaatgaaaggataagaatccctgcagggaaagggtgctgtgagaataaaatgaaactgtgcaagaaagtacagaagacatta

SEQ ID NO: 258977 - DNA, 330 bp, Homo sapiens
acaaaaattgttggccacatttttaagttcgcaggcgagggggaacgtctcatactctagccctcttgagcctagaccctctgtgagatgtgtcaccatttcttggacaccacgtgagacattccccctcagattagagatgctcagcctgcatcaacttatctaaagcctacatctggctactctggggcaagtcctgtttacagtgcccattcctggagcttgcctctgtttgtcttttgttcgattacatgatatattacttttcccaacaggccagtgctagcatattggaagagtgatttaataaagctggcaaccttgacgcta

SEQ ID NO: 258978 - DNA, 681 bp, Homo sapiens
gaagtgagtgcttttggtgaggaaggtgaaggtgattatctggatgactggacagtgctctgtaatggaccctactgggtgagagatggtgaggtgcggttcaaacactcttccactgaggtactgctgtctgtcacaggagaacaatatggtcgacctatcagtgggcaaaaagaggtgcatggcatggcccagccaagtcagaacaactactggaaagccatggaaggcatcttcatgaagcccagtgagttgttgaaggcagaagcccaccatgcagagctgtgaatctagaggctctgagccactgttaacgcacaatgttcacagacatctgttgctgcctcaccttgggatccctgccacaagttccttgggcagtggccatgtcaccattgagatgaagatatacaacagaaaatagtggctgtgtttggaagcttcagccctgcacatttgaactagtcactctcccagacttgcgtgggtcagttctttctgagtagaggacttgctggtaaaggggcagatgctttttattagtactgataaaacaaactgagggaaacatccctcttagctgggaaacttttactcttcaggagcttggcatcatggactgttaatgtatgtgattttccccctattttctctctccaaaatgataaaaacaataatttt

SEQ ID NO: 258979 - DNA, 322 bp, Homo sapiens
cggtaataaagtgtaacagacaacacttaaggtgtcagtcacctttgcaggcgtattggaagttacaggttagatctagtggttttgatttattttgatgtcaaaaagttactcacatatttatgtaaaaagagagtggcaaatcaacggggtgttgattttgaaggtgctatgtaataaatcagggtagcgattctggtcatctcgccaattttgacagtgagacttgcttatttatggcgttttaaggtctgaggagttgatttatagttacaataacggtcttccatccattagtagttccggcatgcatagatgtgtc

SEQ ID NO: 258980 - DNA, 480 bp, Homo sapiens
gccacacacttatttcctgctcctacccccgtccttcccaccccttggattctgggtgtacagaagagtgggcacatgctaaggtcagccctgggttagcctcatggacaaggtgggcctggagcaggaacccgcctgatagaagacactcaaagtctgtccgtacacgctcggtgtgggcatcgcttgcacgcaggtgcagcttttgctgtgggaaaccactttaaatgaattgatagcctcaccacagtggagccatggcccgactgtggagagactccattgtagagaaatatttgagtgaaaggtttcatgtcagaatagcatctgcatgcaaataagaggcatgggcgggtgcagtggctcacacctgtaattccagctacttgagaggcagaggcaagatgatctcttgaacccgggattttgagaccagcctggacaacatggtaagaccccatctcttaaggaaaaaaaaaa

SEQ ID NO: 258981 - DNA, 445 bp, Homo sapiens
gagtgctccccgctggactctgccagtttgggggccgagtgctccccgctggacgccgtgcgtttgggggcggagtgctcccggctggacgccgtgagtttgggggctgagtgctccctgctggactccctgcgtttgggggccgggtcgtttggtgtttgctgtgccggccgcccttttctctccccagccccgggggcggcctttgcgtcctcgaagccccctcaggccctgtgtggggtgtccgagatgcaggtgcagaggctgtagcaccatgcgggtctttcacgtggcccagaagctgaaatgaagtgaaggcttcacagagcttaacccctgtcccctcacctgccctgaagggacaccgggtcatgttctggactgagtcataaagtgcaggccaggaggcggcaggagaggcgcaaggaggagccccaggaagggc

SEQ ID NO: 258982 - DNA, 715 bp, Homo sapiens
tatatcccttaaagatggtcgggcgcgccctaggcagatggccaggccaggcttaaaaaatagattgccaggtggccctgcccaccacgcgccccacagagtgtacatgtgtccacacctataagagaagcacgggccggaaagaggccatgtgttacacacggcttgacaccgccggtgccaagaaagagccaagcagccactccctggggctggctgcagatgaggcccttgtggtttccccactcactgactacggggaggagggtgtgcaaggactttgtctgggaagaatctttgcatctgtagctcaacaggcttctctctccaggcccctgggtttcaaaagactgtgacttccaccttggtttgctcggtctgatgaaggaactttgagctgtgagctgcactgtgaactttgctgtgagctgccctgtgatgggagaggaggcctccgcctcacagccctggaggacctcaatgctgccaacgtgtgaccagatgcagatccttctccagtcaagcctggacatgacatgacagcagccctggggaccttgatgctgtggcctgtgcaagaccctgagccagccgcacccagatccctcacccacagaaactgccagattttaagtcttctgcttgtaagccactctttttgccatagtttgtgtgcagcaatagataactgctctagagttgttaaatgagtaag

SEQ ID NO: 258983 - DNA, 260 bp, Homo sapiens
aagtgaaattctttgtattgaacaataacaaatgcactaggcatctaaatagcaaaggaaagttcttagttttaagtacaaatattcaaaaaattattaatagacttcaattaaagaaaataaacaatcgaattaatttcaaataaagcacaaaggagaacataacaaatataaaagcaagaggaatacaatagaaaataacacatcactagagatggcttaaaaattagtttttccaaaaataaaaataaaaatgttga

SEQ ID NO: 258984 - DNA, 406 bp, Homo sapiens
gtatgagacatccctccctccatgttgcggaatagtctgtagccaaccatgtacctgaggatagtggggggaaatgtcagtggttcgttcataaagcaattgaatgagagggagaactaggacagttaagagagatgtcagtggcctagagtaaagccctcctcattctggtatttagagaaatatgaggacaagctccccgcctatttaccctaatgaaaaactttaaattaacaaattctgcaacattaccagagttttttatctttaaatgtgattggacatcaatagattaccaaaagaaaacattcaacacacaagagaaagacctagaaaaagagacaaaacaatgtttccagagtaaagagaaagagttcagaaaaaataaattcaaatgaaaatataa

SEQ ID NO: 258985 - DNA, 722 bp, Homo sapiens
gtcatttgtttatcacgggtaaaacagatttcgtattgactggtttgactcaggactatggtattctaattaagattgctaaaaagaactatagaattaaaccctaagttaaaataagcagatatgcaatggcacacacacaactatattctgctccaattcacaagtaattccatactacaatgattcaagttcattctcaagaagactatacagaagagcaaaaatagagtttagatgataaaaatcacattttattgctgtaattttctttcttactttagaatcattcatttatcagccattagcctatatatcaaatatcactactttttctaaaggcagttgagtttcatcaaatgcatttctccaaaaacaataactaaaacccatagtaacagacatttagcataacattctttttttttttttttttaactatactttaagttctagggtacatgttgtcaggcctctgagcccaagctaagccatcatatcccgtgacctgcaggtatacatccagatggcctgaagtaactgaagaatcacaaaagaagtgaaaatggcctattcctgccttaactgatgacattaccttgtgaaattccttctcctggctcatcctggctcaaaagctcccccactgagcaccttgtgacccccacccctaccagctagagaacaaccccctttgactgaattttcctttacctacccaa

SEQ ID NO: 258986 - DNA, 451 bp, Homo sapiens
tctgtgggccaagcgatccctgtgtggccgagtctggaagtctcatggctgggttctggacctgcaggatgattctggggagaagggtcgtcccagcttaaggtcatggagtcaagaccttttgttttcctttggcctttctagtccatttgagaaagtcaccttttcaaacccctgccagctctgcctagtactggaaaggccccagcaagagtgtttgacgttaggggaagtttggggaaaaatctctaagcatataaacattgagaattgaaagtctgatcagtcatccaaaagttatggacttttgctgtggttcaggccccagctggggctagggaccctgaaatgagctgccctctgtccagcctgggagcttgtgtgggaagatgctacaaatcaggaccctgtcagggatggggagggcctcttgaaggtgctttgggcacgc

SEQ ID NO: 258987 - DNA, 213 bp, Homo sapiens
agccgtaagcagtcctcccgcctgaatctgccaaagagctgggattacagatgtgagctaccacacctggccccatataattcttgagttagtaacattcaacacaaatgaccaatccctccgttaaacctttcttctgacttccgtgacatcacagaatttttcctttacttttagatgtaagaattccttaatcattggcctccttcgctt

SEQ ID NO: 258988 - DNA, 379 bp, Homo sapiens
gcaggacaggggaacactcgtggctggacaatgaagagctgtcctgcatcctgcacatcttctgaacgtccccagatgtcctccccttgcaaccaagtgtggaccactggccagcaacatctgcatcacctgggaacgtgttagatgtgcagaatttcagccccagcctggaccacaggaatcagggtctgcacattaacagcatccccaagcaattcgtctgcacatcaaaaattgagaatagagacagcgtttcaccatgttggccaggctggtctggaactcctgacctcaagtgatccacctgcctcagcctcccaaagtgctgggattacaggcatcatcatttaaataataaaacatattatctgtttataaa

SEQ ID NO: 258989 - DNA, 436 bp, Homo sapiens
gccattgacaccaattgccaggaaagactgctcactaacctgagggaacctgtagggcttagcttctctggtagcttcctgaatgggctgagtgacgcgacctggaaatggaaggatgctttgttcccatgcagaaaaccctgagcaatggaattctgaagatggttatatgtgcttatccactggtggagccatgagtagtgctgcgtcctcaatagttagaatacatggatggggcttggagccagcataaagacaaaatcagaatagctattaatcccatcctgtagacataacccccataattattttgatgtaattacttccaattttttcctgtgcatatataaaatatatagctacaaaagtgagattctactataggaagattttcatattgctttgtaaaagcattacattatattgaatatattga

SEQ ID NO: 258990 - DNA, 740 bp, Homo sapiens
ttgctttctcacctcacaatattgtaaagttgaacaatcttaaattgaactatcgtcctaagttagggaccatctgtaatcacagggtagggagaagatcaggatatgttaatacagtggttgtcactcattgctgctctctgacaaagacttcagccctttgtgaatattatcaatgtaagattgttaacttttttttaaggtgagttgttcctttttccaagatttgtcttttatgacatactgtctttaatgaaattgtgatattaaaatttttaatcttctacttatccaaataaaataggcaatcctgtgtcagtccttaaaacatcttttgaatttttttagcttgatgtaatccaggtttgagaactgctggtctaatgatgtaatgtcatggaaatcaggggatttaagatgggttttgctaaggaacatgtaaacagtgtaagccattgaagttggggattcacaggttattgactttttcttttttttgacaatttcactctttcacacaggctggagtgcaatggcacaatctcggctcactgcagcctcccgctcccgtgttcaagagattctcgtgatttagcctcttgagtagctggaattacaagcctgggccaccgtgcctggctttcattgacttttgagagtatattgattagggttctttgttctggcctggagtgcagtggcgtgatcttggctcagtgcaacctctgtctcccggattc

SEQ ID NO: 258991 - DNA, 307 bp, Homo sapiens
cagcttggggaaatgaccttgagaggaagttggaagagggaaagagggagctggctctgcccaccagtatgtaaaaattaaataacaaaaagaaaaccagcagcccacaaccgccctccctgccacccaagcaattctcctatccctctatgcattcacatgacacatactccacccctcccatgggccgggcattgagttaggacccagggtataaagaatcaaaaatgggttataactctttaggagcttaaattctatgaaggtagacaaaatatctaccatagaaataggcattgaggaacca

SEQ ID NO: 258992 - DNA, 213 bp, Homo sapiens
gtgtttcctcactgaatatgttcattatgtgtgtacatactgtaaggatagctcacagtggcgggacatgtgttttataggatttttttctaagtggcccaagagtatacaggcatacctaattttgttgtgctttgctttattgtttttgctttattgtgcttcacagataatgcatgttttagacattgaaggtctgtggcacacttatat

SEQ ID NO: 258993 - DNA, 738 bp, Homo sapiens
cttgttttacagggtgaaaactgaggtttagagagggtaaataacttgcccaaaatctggaaaagtttgccaacccctggtcttactcctcattaaggtttcccttcctctccaccattcccaaatctgagtattccagaagagctactgtttttttaatgatatggtaaattaatttctaaagggattaaaatgaatacctacctgttgtaatgaaaataaatgtataacataaagcaatctgcaaaataactgttttgcaggcctaagacttatgcagaggtggcgcccgcccgtaatcccagcacttcgggaggccgagacgggcggatcgcttgagaccagccaggacaacatggcgaaaccacatctctacaacaaatacaaaaattagctgggcgcggtggcacacgactgtggttccagttactcggcaggcggaggtggaaggatcccttgagcctctggaggtggaggttgcagtgagctgtgattgcgccactgcactccagcctgggcgacagagtgagaccctgtcagaaaacaaaacaaaacaaaagaattctgtaagaacttctaacaggtacattcctgtaagcattacccaccactggactaggcactgggtagcctgtaaaatacagtaagagctgtctctgcacccagaaaatttaccatcattttgtgctggaaagacatgccctagaaaacaataaacagcacgactgtacatgattc

SEQ ID NO: 258994 - DNA, 1547 bp, Homo sapiens
cttctttaaatttctttctaggatgttcacttcttctccacaatgaatgagtgtcactatgacaagcacatggactttttttataataggagcaacactgatactgtcgatgactggacaggaacaaagcttgtgattgttttgtgtgttgggacgtttttctgcctgtttatttttttttctaattctctggtcatcgcggcagtgatcaaaaacagaaaatttcatttccccttctactacctgttggctaatttagctgctgccgatttcttcgctggaattgcctatgtattcctgatgtttaacacaggcccagtttcaaaaactttgactgtcaaccgctggtttctccgtcaggggcttctggacagtagcttgactgcttccctcaccaacttgctggttatcgccgtggagaggcacatgtcaatcatgaggatgcgggtccatagcaacctgaccaaaaagagggtgacactgctcattttgcttgtctgggccatcgccatttttatgggggcggtccccacactgggctggaattgcctctgcaacatctctgcctgctcttccctggcccccatttacagcaggagttaccttgttttctggacagtgtccaacctcatggccttcctcatcatggttgtggtgtacctgcggatctacgtgtacgtcaagaggaaaaccaacgtcttgtctccgcatacaagtgggtccatcagccgccggaggacacccatgaagctaatgaagacggtgatgactgtcttaggggcgtttgtggtatgctggaccccgggcctggtggttctgctcctcgacggcctgaactgcaggcagtgtggcgtgcagcatgtgaaaaggtggttcctgctgctggcgctgctcaactccgtcgtgaaccccatcatctactcctacaaggacgaggacatgtatggcaccatgaagaagatgatctgctgcttctctcaggagaacccagagaggcgtccctctcgcatcccctccacagtcctcagcaggagtgacacaggcagccagtacatagaggatagtattagccaaggtgcagtctgcaataaaagcacttcctaaactctggatgcctctcggcccacccaggcctcctctgggaaaagagctgttaagaatgattacctgtctctaacaaagcccatgtacagtgttatttgaggtctccattaatcactgctagatttctttaaaaaattttttttcatagtttaaaagcatgggcagtaaagagaggacctgctgcatttagagaaagcacagaaacgggagaggttcggcgggtccctgcttgtcctatgaactgctcagagctcctgtcagtccagctgggccttctgggttctggcaccatttcgtagccattctctttgtattttaaaaggacgttatgaaagggcttagaccaaaataaatcataatgttacttgagccaccttatatagctgcttggagagtctatgtagttctttctgcatgcattaaaaatgtttagaaatgcttca

SEQ ID NO: 258995 - DNA, 1402 bp, Homo sapiens
cttctttaaatttctttctaggatgttcacttcttctccacaatgaatgagtgtcactatgacaagcacatggactttttttataataggagcaacactgatactgtcgatgactggacaggaacaaagcttgtgattgttttgtgtgttgggacgtttttctgcctgtttatttttttttctaattctctggtcatcgcggcagtgatcaaaaacagaaaatttcatttccccttctactacctgttggctaatttagctgctgccgatttcttcgctggaattgcctatgtattcctgatgtttaacacaggcccagtttcaaaaactttgactgtcaaccgctggtttctccgtcaggggcttctggacagtagcttgactgcttccctcaccaacttgctggttatcgccgtggagaggcacatgtcaatcatgaggatgcgggtccatagcaacctgaccaaaaagaggtgtccaacctcatggccttcctcatcatggttgtggtgtacctgcggatctacgtgtacgtcaagaggaaaaccaacgtcttgtctccgcatacaagtgggtccatcagccgccggaggacacccatgaagctaatgaagacggtgatgactgtcttaggggcgtttgtggtatgctggaccccgggcctggtggttctgctcctcgacggcctgaactgcaggcagtgtggcgtgcagcatgtgaaaaggtggttcctgctgctggcgctgctcaactccgtcgtgaaccccatcatctactcctacaaggacgaggacatgtatggcaccatgaagaagatgatctgctgcttctctcaggagaacccagagaggcgtccctctcgcatcccctccacagtcctcagcaggagtgacacaggcagccagtacatagaggatagtattagccaaggtgcagtctgcaataaaagcacttcctaaactctggatgcctctcggcccacccaggcctcctctgggaaaagagctgttaagaatgattacctgtctctaacaaagcccatgtacagtgttatttgaggtctccattaatcactgctagatttctttaaaaaattttttttcatagtttaaaagcatgggcagtaaagagaggacctgctgcatttagagaaagcacagaaacgggagaggttcggcgggtccctgcttgtcctatgaactgctcagagctcctgtcagtccagctgggccttctgggttctggcaccatttcgtagccattctctttgtattttaaaaggacgttatgaaagggcttagaccaaaataaatcataatgttacttgagccaccttatatagctgcttggagagtctatgtagttctttctgcatgcattaaaaatgtttagaaatgcttca

SEQ ID NO: 258996 - DNA, 109 bp, Homo sapiens
gcgttcctcttgttgttggtaacacaggaggtctcacattgggatctttgaattgtgtttgtgatgtgagatgattatacaaaagttagagtgaaattccctttttttt

SEQ ID NO: 258997 - DNA, 549 bp, Homo sapiens
aaatcagaagacaactaaatagaaaaatgggcaaaatatataaacaggcagtgattttacagaagaatcatcaatatgaaaaggagctcaatctcaataatccttaattaagaataattaacataaccttaataataattaagctcaaccctcactaataaaagtggaaaggcaaatttacacacccatcaaacaggcaaaattttaaacatctgatcacatcaaatgtttcgcaaatgtcaagaggcagacttacatactgcttgtggagtgtaaactggtgcaaccactttggaaaataatttggcattaacttgtaaaacactagagaaactcttgcacatttgcacgaagagctatgcacaagaaatttcatagcagtacatattgcaatagcaaaggcctggaaagaactcaaacatttacggacatttaaatactttcactaattgcattttactcaatcaatggaaaactgtcagtgaaaatataccacaactacataattcagtgaagacaaatctcagaaacatgttgaacaacaaatgc

SEQ ID NO: 258998 - DNA, 626 bp, Homo sapiens
cagagcaagactctgtctcaaaaaaaaaagaaaaaaatatgctaagtgaaataagccagtcccaaaggacaaacactgcatgattccacctagatgaggtactcagaatagtcaaatccaaagacgggaagtagaatgggagttgcgggggctggagagagggaggaatggagagataccatttaataggaataaagtttaagttttgcaagattgagaagttctggacgtagtttacacaacagtgtgaacagtactgagctgtacacttaaaaatggttaacatggtaaattctgtgttatatgtcttttaccacaatttttaaaaatcaaaaatcctgaaaggtacttcctgtggatgtgcaatgggctttccgcagcattgcttatggcatgagcacagggaaagccttctgcagtatacatcaaggtccttgacaagttcacactctgaatgccgtcattctgcttcggggactcctcccaagggagtaagcccaactcaaggaaaggctttactaaccagcgttgttcatgttagcaaaaagttggaagccaagactcttgaaaagctttgtgtggttaaataaaccctgagcacccactggccagaaacacatgcagct

SEQ ID NO: 258999 - DNA, 444 bp, Homo sapiens
cacatatgacattttacatctaatttggagagttttaagatgcccccatatccacgcatgtgccctttagtgcagaattcccgccccaaatattcatcattgtaaccctttattctaggttccatccactgactggtatagatgtcattcatgtataactaccagatttccccctgaatcacatgcagatgaagaagagtgtgtgagcacaggattcatgaatgcctagtgcaggaagttataggtattgaaagggaaaagcaatacatcactcatttgatctgctctctttcagatcataggatgtagtggtagatggtcacatattaaactttaaagaggtgttggctttcttcccccttgcatttaaaaggtgatgtgctgcaatgtgagacaaatcatgattcactacaacagtgttgcagtcagttatataaattgcca

SEQ ID NO: 259000 - DNA, 389 bp, Homo sapiens
tacacccaaccttgatttgaacacctcctggaaaagagaagaaactgcctatgctaccagtcttaggaatgaatacaggaaaagacttttctctctgaatattaaggccgggtgcagtggttcacacctgtaaccccagcactttgggaggctgaggtaggcagattacctgagttcaggtgttcgagaccagcctggccaccatggtgaaaccccatctctactgaaaacacaaaaattagtcaggcatggtggcaggcacctgtaatgccagctacttgtgggagctaaggcaggaaaatcgcttgaacccgggaggtggaggctgcagtgagcagagatcgtaccactgcgctctagcctggacgacagagcgagactccacttca

SEQ ID NO: 259001 - DNA, 633 bp, Homo sapiens
aaaacttttcattaaaatgaaaatcctgaagaaatgtagttttttttcactgtcaaagaacaaatacaattatgaatgagtgagtcattgttctcctgagtcatttcatgaacttataacagtcgtatcccagccgggcactctggctcatgcctgtatccccagcactttgggtgaccgaggcgggtggatcacttgaggtcaggagttcgagaccagcctggccaacatgggaaacctcatctctactaaaaatacaaaaattagccggaaattgcttgaacccaggaggcggaagctgtagtgagccaagatcgtgccactgcactccagcctgggcaacagagcaagactcggtctcaaaaaaccaggacaaaacaaaaacagtcctgtcccctttgttagccacatcaccttcaccactcgccccaggctggcatactctcggcttctgggtgggatgagtatggctggtgccaaacaaggctgtatttgttactttggaccaaatctgcggcaggagactaccacctcctcccattccagaaaagaacagctggaggcgggggtgtgctggttgtggtcccagtgttatcactcatctggaaggtgtggcttctctctggctccttt

SEQ ID NO: 259002 - DNA, 7100 bp, Homo sapiens
gacatactgagaataaatccaaagacattagtttctttgcacgaaatgaggttacatatccagtgacatttatttgagctatttaaacaacttaaacatctttttcttttcttaataagggacgtttcaagttgtggtctcagccaaaatgagtgataccccttctactggtttttccatcattcatcctacgtcttctgaaggtcaagttccaccccctcgccatttgagcctcactcatcctgttgtggccaagcgaatcagtttctacaagagcggagacccccaattcggcggggtcagggtggtggtcaaccctcgctcctttaagtcctttgatgctctgctggataacttgtccaggaaggtgcccctcccttttggagtgaggaacatcagcacccctcggggcaggcacagcatcacgcgcctggaggagctggaggacggcgagtcctacctatgttcccacggcaggaaggtgcagcctgtagacctggacaaagcccgtcggcgcccgcggccctggctcagcagccgggccattagcgcgcactcaccgccccaccccgtagccgtcgctgctcccggcatgccccgccccccacggagcctagtggtcttcaggaatggcgacccgaagacgaggcgtgcggttcttctgagcaggagggtcacccagagcttcgaggcatttctacagcacctgacagaggtcatgcagcgccctgtggtcaagctgtacgctacggacggaaggagggttcccagcctccaggcagtgatcctgagctctggagctgtggtggcggcaggaagggagccatttaaaccaggaaattatgacatccaaaaatacttgcttcctgctagattaccagggatctctcagcgtgtgtaccccaagggaaatgcaaagtcagaaagcagaaagataagcacacatatgtcttcaagctcaaggtcccagatttattctgtttcttctgagaaaacacataataatgattgctacttagactattcttttgttcctgaaaagtacttggccttagaaaagaatgattctcagaatttaccaatatatccttctgaagatgatattgagaaatcaattatttttaatcaagacggcactatgacagttgagatgaaagttcgattcagaataaaagaggaagaaaccataaaatggacaactactgtcagtaaaactggtccttctaataatgatgaaaagagtgagatgagttttccaggaagaacagaaagtcgatcatctggtttaaagcttgcagcatgttcattctctgcagatgtgtcacctatggagcgaagcagtaatcaagagggcagtttggcagaggagataaacattcaaatgacagatcaagtggctgaaacttgcagttctgctagttgggagaatgctactgtggacacagatatcatccagggaactcaagaccaagcaaagcatcgtttttataggccccctacacctggactaagaagagtgagacaaaagaaatctgtgattggcagtgtgaccttagtatctgaaactgaggttcaagagaaaatgattggacagttttcatatagtgaagaaagggaaagtggggaaaacaagtctgagtatcacatgtttacacattcttgcagtaaaatgtcatcagtatctaacaaaccagtacttgttcagatcaataacaatgatcaaatggaggagtcatcattagaaagaaaaaaggaaaacagtctgcttaagtcaagtgcaataagtgctggtgttatagaaattacaagtcagaagatgttagagatgtcacataataatggtttgccatcaactatatcaaataactcaattgtggaggaagatgtagttgattgtgtggtattggacaacaaaactggtatcaagaacttcaaaacttatggtaacaccaatgataggttcagtcctatttcagcagatgcaacccatttttcaagtaataactctggaactgacaaaaatatttctgaggctccagcttcagaagcatcctctactgtcactgcaagaattgacagactaattaatgaatttgctcagtgtggtttaacaaaacttccaaaaaatgaaaagaagattttgtcatctgttgccagcaaaaagaagaaaaaatctcgacagcaagcaataaattccaggtatcaagatggacagcttgcaaccaaaggaattcttaataagaatgagagaataaacacaaaaggtagaattacaaaggaaatgatagtgcaagattcagatagtccccttaaaggagggatactttgtgaggaagacctccagaaaagtgatactgtaattgaatcaaatactttttgttccaaaagtaatctcaattccacgatttccaagaatttccatagaaataaattaaatactactcaaaattccaaggttcaaggacttttaaccaaaagaaaatctagatcactaaataaaataagcttaggagcacctaaaaaaagagaaatcggtcaaagagataaagtgtttcctcacaatgaatctaaatattgcaaaagtacttttgaaaacaaaagtttatttcatgtatttaacatccttgagcaaaaacccaaagatttttatgcaccgcaatctcaagcagaagtggcatctgggtatttgagaggaatggcaaagaagagtttagtttcaaaagttactgattcacacataactttaaaaagccagaaaaaacgtaaaggggataaagtgaaagcaagtgctattttaagtaaacaacatgctacaaccagggcaaattctttagcttctttgaaaaaacctgattttcctgaggctattgctcatcattcaattcaaaattatatacagagttggttgcagaacataaatccatatccaactttaaagcctataaaatcagctccagtatgtagaaatgaaacgagtgtggtaaattgtagcaataatagtttttcagggaatgatccccatacaaattctggaaaaataagtaattttgttatggaaagtaataagcacataactaaaattgccggtttgacaggagataatctatgtaaagagggagataagtcttttattgccaatgacactggtgaagaagatctccatgagacacaggttggatctctgaatgatgcttatttggttcccctgcatgaacactgtactttgtcacagtcagctattaatgatcataatactaaaagtcatatagctgctgaaaaatcaggaccagagaaaaaacttgtttaccaggaaataaacctagctagaaaaaggcaaagtgtagaggctgccattcaagtagatcctatagaagaggaaactccaaaagacctcttaccagtcctgatgcttcaccaattgcaagcttcagttcctggtattcacaagactcagaatggagttgttcaaatgccaggttcacttgcaggtgttccctttcattctgcaatatgtaattcatccactaatctccttctagcttggctcttggtgctaaacctaaagggaagtatgaatagcttctgtcaagttgatgctcacaaggctaccaacaaatcttcagaaacacttgcattgttggagattctaaagcacatagctatcacagaggaagctgatgacttgaaagctgctgttgccaatttagtggagtcaactacaagccactttggactcagtgagaaagaacaagacatggttccaatagatctttctgcaaattgttccacggtcaacattcagagtgttcctaagtgcagtgaaaatgaaagaacacaaggaatctcctctttggatggaggttgctctgccagtgaggcatgtgcccctgaagtctgtgttttggaagtgacttgctctccatgtgagatgtgcactgtaaataaggcttattctccaaaagagacatgtaaccccagtgacactttttttcctagtgatggttatggtgtggatcagacttctatgaataaggcttgtttcctaggagaggtctgttcacttactgatactgtgttttctgataaggcttgtgctcaaaaggagaaccatacctatgagggagcttgcccaattgatgagacctacgttcctgtcaatgtctgcaataccattgactttttaaactccaaagaaaacacatatactgataacttggattcaactgaagagttagaaagaggtgatgacattcagaaagatctaaatattttgacagaccctgaatataaaaatggatttaatacattggtgtcacatcaaaatgtcagtaatttaagctcctgtggcctttgcctaagtgaaaaagaagcagaacttgataagaaacatagttctctagatgattttgaaaattgttcactaaggaagtttcaggatgaaaatgcatatacttcctttgatatggaagaaccacggacttctgaagaaccaggctcaataaccaacagcatgacatcaagtgaaagaaacatttcagaattggaatcttttgaagaattagaaaaccatgacactgatatctttaatacagtggtaaatggaggagagcaagccactgaagaattaatccaagaagaggtagaggctagtaaaactttagaattgatagacatctctagtaagaatattatggaagaaaaaagaatgaacggtataatttatgaaataatcagtaagaggctggcaacaccaccatctttagatttttgctatgattctaagcaaaatagtgaaaaggagaccaatgaaggagaaactaagatggtaaaaatgatggtgaaaactatggaaactggaagttattcagagtcctctcctgatttaaaaaaatgcatcaaaagtccagtgacttctgattggtcagactatcggcctgacagtgacagtgagcagccatataaaacatccagtgatgatcccaatgacagtggcgaacttacccaagagaaagaatataacataggatttgttaaaagggcaatagaaaaactgtacggtaaagcagatattatcaaaccatctttttttcctgggtctacccgcaaatctcaggtttgtccttataattctgtggaatttcagtgttccaggaaagcaagtctttatgattctgaagggcagtcatttggctcttctgaacaggtatctagtagttcatctatgttgcaggaattccaggaggaaagacaagataagtgtgatgttagtgctgtgagggacaattattgtaggggtgacattgtagaacctggtacaaaacaaaatgatgatagcagaatcctcacagacatagaggaaggagtactgattgacaaaggcaaatggcttctgaaagaaaatcatttgctaaggatgtcatctgaaaatcctggcatgtgtggcaatgcagacaccacatcagtggacaccctacttgataataacagcagtgaggtaccatattcacattttggtaatttggccccaggcccaacgatggatgaactctcctcttcagaactcgaggaactgactcaaccccttgaactaaaatgcaattactttaacatgcctcatggtagtgactcagaaccttttcatgaggacttgctggatgttcgcaatgaaacctgtgccaaggaaagaatagcaaatcatcatacagaggagaagggtagtcatcagtcagaaagagtatgcacatctgtcactcattcctttatttctgctggtaacaaagtctaccctgtctctgatgatgctattaaaaaccaaccattgcctggcagtaatatgattcatggtacacttcaggaagctgactctttggataaactgtatgctctttgtggtcaacattgcccaatactaactgttattatccaacccatgaatgaggaagaccgaggatttgcatatcgcaaagaatctgatattgaaaatttcttgggtttttatttatggatgaaaatacacccatatttacttcagacagacaaaaatgtgttcagggaagagaacaataaagcaagtatgagacaaaatcttattgataatgccattggtgatatatttgatcagttttatttcagtaacacatttgacttgatgggtaaaagaagaaaacaaaaaagaattaacttcttggggttagaggaagaaggtaatttaaagaaatttcaaccagatttgaaggaaaggttttgtatgaatttcttgcacacatcattgttagttgtgggtaatgtggattcaaatacacaagacctcagcggtcagacaaatgaaatctttaaagcagtcgatgagaataacaacttattaaataacagattccagggctcaagaacaaatctcaaccaagtagtaagagaaaatatcaactgtcattacttctttgaaatgcttggtcaagcttgcctcttagatatttgccaagttgagacctccttaaatattagcaacagaaatattttagaactttgtatgtttgagggtgaaaatcttttcatttgggaagaggaagacatattaaatttaactgatcttgaaagcagtagagaacaagaagatttataatttcaatatcagcacactcattctttgtcaattcattttttcccatgagatgaagcacatgtgacgaatacggactagataacctctaagaattttccacttcttcaaaatgaacttactctagaaagcttacccttggataaccagtttgactttcataatgtctctgttttttgtttttccaacaattacagactcaggttctcttattttggaagtttctatctggttttgttctgaacttacattttttttttttttggtatctatgattttttttgctcagggcatcaaaatgtgctaaggacaagaattatatcctttttaaaaaatgttgttagcttggtgtaaaatgtatattgactgtattggtgaataaattgaatagacataacctcaaagtacttcacttattctttttaactactgatttgataaaaagtatgattataagatatccacgacaatctcatagtttctt

SEQ ID NO: 259003 - DNA, 7011 bp, Homo sapiens
gacatactgagaataaatccaaagacattagtttctttgcacgaaatgaggttacatatccagtgacatttatttgagctatttaaacaacttaaacatctttttcttttcttaataagggacgtttcaagttgtggtctcagccaaaatgagtgataccccttctactggtttttccatcattcatcctacgtcttctgaaggtcaagttccaccccctcgccatttgagcctcactcatcctgttgtggccaagcgaatcagtttctacaagagcggagacccccaattcggcggggtcagggtggtggtcaaccctcgctcctttaagtcctttgatgctctgctggataacttgtccaggaaggtgcccctcccttttggagtgaggaacatcagcacccctcggggcaggcacagcatcacgcgcctggaggagctggaggacggcgagtcctacctatgttcccacggcaggaaggtgcagcctgtagacctggacaaagcccgtcggcgcccgcggccctggctcagcagccgggccattagcgcgcactcaccgccccaccccgtagccgtcgctgctcccggcatgccccgccccccacggagcctagtggtcttcaggaatggcgacccgaagacgaggcgtgcggttcttctgagcaggagggtcacccagagcttcgaggcatttctacagcacctgacagaggtcatgcagcgccctgtggtcaagctgtacgctacggacggaaggagggttcccagcctccaggcagtgatcctgagctctggagctgtggtggcggcaggaagggagccatttaaaccaggaaattatgacatccaaaaatacttgcttcctgctagattaccagggatctctcagcgtgtgtaccccaagggaaatgcaaagtcagaaagcagaaagataagcacacatatgtcttcaagctcaaggtcccagatttattctgtttcttctgagaaaacacataataatgattgctacttagactattcttttgttcctgaaaagtacttggccttagaaaagaatgattctcagaatttaccaatatatccttctgaagatgatattgagaaatcaattatttttaatcaagacggcactatgacagttgagatgaaagttcgattcagaataaaagaggaagaaaccataaaatggacaactactgtcagtaaaactggtccttctaataatgatgaaaagagtgagatgagttttccaggaagaacagaaagtcgatcatctggtttaaagcttgcagcatgttcattctctgcagatgtgtcacctatggagcgaagcagtaatcaagagggcagtttggcagaggagataaacattcaaatgacagatcaagtggctgaaacttgcagttctgctagttgggagaatgctactgtggacacagatatcatccagggaactcaagaccaagcaaagcatcgtttttataggccccctacacctggactaagaagagtgagacaaaagaaatctgtgattggcagtgtgaccttagtatctgaaactgaggttcaagagaaaatgattggacagttttcatatagtgaagaaagggaaagtggggaaaacaagtctgagtatcacatgtttacacattcttgcagtaaaatgtcatcagtatctaacaaaccagtacttgttcagatcaataacaatgatcaaatggaggagtcatcattagaaagaaaaaaggaaaacagtctgcttaagtcaagtgcaataagtgctggtgttatagaaattacaagtcagaagatgttagagatgtcacataataatggtttgccatcaactatatcaaataactcaattgtggaggaagatgtagttgattgtgtggtattggacaacaaaactggtatcaagaacttcaaaacttatggtaacaccaatgataggttcagtcctatttcagcagatgcaacccatttttcaagtaataactctggaactgacaaaaatatttctgaggctccagcttcagaagcatcctctactgtcactgcaagaattgacagactaattaatgaatttgctcagtgtggtttaacaaaacttccaaaaaatgaaaagaagattttgtcatctgttgccagcaaaaagaagaaaaaatctcgacagcaagcaataaattccaggtatcaagatggacagcttgcaaccaaaggaattcttaataagaatgagagaataaacacaaaaggtagaattacaaaggaaatgatagtgcaagattcagatagtccccttaaaggagggatactttgtgaggaagacctccagaaaagtgatactgtaattgaatcaaatactttttgttccaaaagtaatctcaattccacgatttccaagaatttccatagaaataaattaaatactactcaaaattccaaggttcaaggacttttaaccaaaagaaaatctagatcactaaataaaataagcttaggagcacctaaaaaaagagaaatcggtcaaagagataaagtgtttcctcacaatgaatctaaatattgcaaaagtacttttgaaaacaaaagtttatttcatgtatttaacatccttgagcaaaaacccaaagatttttatgcaccgcaatctcaagcagaagtggcatctgggtatttgagaggaatggcaaagaagagtttagtttcaaaagttactgattcacacataactttaaaaagccagaaaaaacgtaaaggggataaagtgaaagcaagtgctattttaagtaaacaacatgctacaaccagggcaaattctttagcttctttgaaaaaacctgattttcctgaggctattgctcatcattcaattcaaaattatatacagagttggttgcagaacataaatccatatccaactttaaagcctataaaatcagctccagtatgtagaaatgaaacgagtgtggtaaattgtagcaataatagtttttcagggaatgatccccatacaaattctggaaaaataagtaattttgttatggaaagtaataagcacataactaaaattgccggtttgacaggagataatctatgtaaagagggagataagtcttttattgccaatgacactggtgaagaagatctccatgagacacaggttggatctctgaatgatgcttatttggttcccctgcatgaacactgtactttgtcacagtcagctattaatgatcataatactaaaagtcatatagctgctgaaaaatcaggaccagagaaaaaacttgtttaccaggaaataaacctagctagaaaaaggcaaagtgtagaggctgccattcaagtagatcctatagaagaggaaactccaaaagacctcttaccagtcctgatgcttcaccaattgcaagcttcagttcctggtattcacaagactcagaatggagttgttcaaatgccaggttcacttgcaggtgttccctttcattctgcaatatgtaattcatccactaatctccttctagcttggctcttggtgctaaacctaaagggaagtatgaatagcttctgtcaagttgatgctcacaaggctaccaacaaatcttcagaaacacttgcattgttggagattctaaagcacatagctatcacagaggaagctgatgacttgaaagctgctgttgccaatttagtggagtcaactacaagccactttggactcagtgagaaagaacaagacatggttccaatagatctttctgcaaattgttccacggtcaacattcagagtgttcctaagtgcagtgaaaatgaaagaacacaaggaatctcctctttggatggaggttgctctgccagtgaggcatgtgcccctgaagtctgtgttttggaagtgacttgctctccatgtgagatgtgcactgtaaataaggcttattctccaaaagagacatgtaaccccagtgacactttttttcctagtgatggttatggtgtggatcagacttctatgaataaggcttgtttcctaggagaggtctgttcacttactgatactgtgttttctgataaggcttgtgctcaaaaggagaaccatacctatgagggagcttgcccaattgatgagacctacgttcctgtcaatgtctgcaataccattgactttttaaactccaaagaaaacacatatactgataacttggattcaactgaagagttagaaagaggtgatgacattcagaaagatctaaatattttgacagaccctgaatataaaaatggatttaatacattggtgtcacatcaaaatgtcagtaatttaagctcctgtggcctttgcctaagtgaaaaagaagcagaacttgataagaaacatagttctctagatgattttgaaaattgttcactaaggaagtttcaggatgaaaatgcatatacttcctttgatatggaagaaccacggacttctgaagaaccaggctcaataaccaacagcatgacatcaagtgaaagaaacatttcagaattggaatcttttgaagaattagaaaaccatgacactgatatctttaatacagtggtaaatggaggagagcaagccactgaagaattaatccaagaagaggtagaggctagtaaaactttagaattgatagacatctctagtaagaatattatggaagaaaaaagaatgaacggtataatttatgaaataatcagtaagaggctggcaacaccaccatctttagatttttgctatgattctaagcaaaatagtgaaaaggagaccaatgaaggagaaactaagatggtaaaaatgatggtgaaaactatggaaactggaagttattcagagtcctctcctgatttaaaaaaatgcatcaaaagtccagtgacttctgattggtcagactatcggcctgacagtgacagtgagcagccatataaaacatccagtgatgatcccaatgacagtggcgaacttacccaagagaaagaatataacataggatttgttaaaagggcaatagaaaaactgtacggtaaagcagatattatcaaaccatctttttttcctgggtctacccgcaaatctcaggtttgtccttataattctgtggaatttcagtgttccaggaaagcaagtctttatgattctgaagggcagtcatttggctcttctgaacaggtatctagtagttcatctatgttgcaggaattccaggaggaaagacaagataagtgtgatgttagtgctgtgagggacaattattgtaggggtgacattgtagaacctggtacaaaacaaaatgatgatagcagaatcctcacagacatagaggaaggagtactgattgacaaaggcaaatggcttctgaaagaaaatcatttgctaaggatgtcatctgaaaatcctggcatgtgtggcaatgcagacaccacatcagtggacaccctacttgataataacagcagtgaggtaccatattcacattttggtaatttggccccaggcccaacgatggatgaactctcctcttcagaactcgaggaactgactcaaccccttgaactaaaatgcaattactttaacatgcctcatggtagtgactcagaaccttttcatgaggacttgctggatgttcgcaatgaaacctgtgccaaggaaagaatagcaaatcatcatacagaggagaagggtagtcatcagtcagaaagagtatgcacatctgtcactcattcctttatttctgctggtaacaaagtctaccctgtctctgatgatgctattaaaaaccaaccattgcctggcagtaatatgattcatggtacacttcaggaagctgactctttggataaactgtatgctctttgtggtcaacattgcccaatactaactgttattatccaacccatgaatgaggaagaccgaggatttgcatatcgcaaagaatctgatattgaaaatttcttgggtttttatttatggatgaaaatacacccatatttacttcagacagacaaaaatgtgttcagggaagagaacaataaagcaagtatgagacaaaatcttattgataatgccattggtgatatatttgatcagttttatttcagtaacacatttgacttgatgggtaaaagaagaaaacaaaaaagaattaacttcttggggttagaggaagaaggtaatttaaagaaatttcaaccagatttgaaggaaaggttttgtatgaatttcttgcacacatcattgttagttgtgggtaatgtggattcaaatacacaagacctcagcggtcagacaaatgaaatctttaaagcagtcgatgagaataacaacttattaaataacagattccagggctcaagaacaaatctcaaccaagtagtaagagaaaatatcaactgtcattacttctttgaaatgcttggtcaagcttgcctcttagatatttgccaagttgagacctccttaaatattagcaacagaaatattttagaactttgtatgtttgagggtgaaaatcttttcatttgggaagaggaagacatattaaatttaactgatcttgaaagcagtagagaacaagaagatttataatttcaatatcagcacactcattctttgtcaattcattttttcccatgagatgaagcacatgtgacgaatacggactagataacctctaagaattttccacttcttcaaaatgaacttactctagaaagcttacccttggataaccagtttgactttcataatgtctctgttttttgtttttccaacaattacagactcaggttctcttattttggaagtttctatctggttttgttctgaacttacattttttttttttttggtatctatgattttttttgctcagggcatcaaaatgtgctaaggacaagaattatatcctttttaaaaaatgttgttagcttggtgtaaaatgtatattgactgtattggtgaataaattgaatagacat

SEQ ID NO: 259004 - DNA, 1204 bp, Homo sapiens
tcaggggcttctggaatctctacccactccagccaactctgaggccatgtggtcctggaacaaggcccctctgaggcagatggggcaggcggcccaggcacatagcatggttggctctgcggcccagggcgcacaaaggccttattgagtcaccaccagcccccggcagaggctgaggtggcagtggcgccgagcgcctgccacctaatgactgtcctggtccagccagatgttccacagacctccggagcatggtggcccagcccaggcggtaggcctggcccgcagagcctgcgagtctagactccagatgtgaaccgccaccatcagagtcccatggaaaaatggcaccaggccgggcaaggattgggcctgcatgctggggagggggtgtgggtggttgggcagggccccgagtgggctagatgccagcctcacctggtttggggtggattattaggaaactgctctagaacccaagttctaccctgctttattagattctgtttctgtgcctcagtctcccatgactgcgacaagagagagggttccaaggggaaaaccagccctgctgagaccccagtgtgcactgactgtatttcacgtgactagcattatgctagtgcaactgacccttgaacaacacagggattaggggcaccaacccatcatggtcgaaaatctgtataacttttcagtcccgcaaaacaactaatagtctgctgttgaccagaagccttacctgataacataaacagtcaaaacatcttgtatgttatacgtactacactgtctaccatagagtaagctagagaaaatgtaattaagaaaatcctaagagccaggcatggtggctcatgcctgtaatcccagcattttgggaggccaagatgggcagatcaggaggtcaggagatcgagaccatcctggctaacatggtgaaacccccgtttctactaaaaatacaaaaaattagccgggcatgatggcaggcgcctgtagtctcagctactcgggaggctgaggcaggagaatggcctgaacccgggaggcagagcttgcagtaagccgagagaggcaggcggatcacaaagtcaggagttcgagaccagcctggccaatatggtgaaaccccgactctactaaaaatacaaaaattagcctggcatggtggcaggcgactgtagtcccagctactcaggag

SEQ ID NO: 259005 - DNA, 191 bp, Homo sapiens
attttatattgaggaaactgagatggagggatgccatttaacttctttaacttcacgttactagtaaatggtgaagtcagaatttgactccaaagttagggctcttaattactattattttcctccaggatgagaagcacacctatgtgtcttttaatcctcgtcctgcagtcctggctcttaaaggagta

SEQ ID NO: 259006 - DNA, 590 bp, Homo sapiens
tttattagcatttgtggaatttattcccaaactctcctaatcttccgtacacaaccatttgatttgcataacccaaccccctctcataaaaactggctgctagtttaattaaaaaatgtaaatttgctgtcatctcggggcctggtgaattaggacgacatcggcattttttattgctaaagacgtccagattgatccagcccttggctgaactatggtgggggaaagggggtccacatggcccctgagggtcctgaggtccttctgtcccctcctgagaaggcttggctctcccaccactgacttcctcatggctgaaggccttcaggacctagatgtgtccggggccgcggggatgttaacctacgatcagggaggcatggtgggtccatgatgccagcagcccttcgaggcctgcgcccctggccttggactatgtcagagaggccctcggctgaagctgcccacgctgccccagaggaagggaccctcacttcaccagccacgagccccggccagagacgaggcccatggccccagctgtatgccgtgtgcactatgaagttgagggagctgttcccagctcctga

SEQ ID NO: 259007 - DNA, 579 bp, Homo sapiens
cacccatattactgtaagttcacctctttcctggagaaatcttcttggggactttacagtagctaatttttcagatctccaaaaataaactgatatatgttgtacatttgtggccagaaaagttgagccactggtattttatcctggaaacatcattatgatgtactaattgtgactataaatcctaaattgaaaaaattacctaataatttctgaaaaacctcactttcagacacttgacaaatttagcctgattctaaatcatggtactaaaatgtgagaattcctgactggaagctagtcactctgttaacatataaattctgtgtttctaataaggaggtggaccttacacagaggcatctgtgtgtgcgtctgtatctattcacattcacaggatctaccccacaacatcagaatcttgtcggtgacatccctgtgtggaggaacaatgcgggcacctttgttggccatgctgtgaacaagcacagccatctactaaggacacagggctgtgaaggacaaagagacacccctccaggaagccttcctgctgacaactgggtcacgacacacaaa

SEQ ID NO: 259008 - DNA, 381 bp, Homo sapiens
aatgtcttcattagttatcttcaaactcagagggtcaataatcacagcaagaggagcaccatgccttctggaaggatgtcaaataagcatgctgaatggcctacagttttgtaattggcaagacccccctaacacagattgagtgttacagatctgcaaagttcagtgctaaaatatgattgattagtgtgcaaatatttactgagcatctattttatgacaggctctataacagatgctagggatatgacatttgtatgagtccattctcacactgctataaagaactgtccaagactgggtaatttataaagaaaagaggtttaattgactcacagttccacatggcagcagaggcctcaggaaacttatcatggcaga

SEQ ID NO: 259009 - DNA, 440 bp, Homo sapiens
acccaactcaaaatctccatgggaaaatacctgtcgatacccacagtattgttgaaaataatcagatgcagtatcacagctgtgtcagactctagtaccagttgggcaatcaaggcacagctaaaaattgaaaacaaagatctggacaacaaaacagccaaaggtgggggtcaagaagctctgacgtgtacctagctgtagaatgctatgcacatgtgccaggtgtagtgtgcatatccaggaaaaactgcagagagccccagtcttcacctctggttgaccatgagctctgtgtaagcaggaagtgaaggctaaggcagatttaagctctgaaagcattccacaacatacacacaaatcgtgcaaagcattaaggaaatcttgttactgctaagtgttgctgacccaggaacaactcctactcagctggacttaaaaat

SEQ ID NO: 259010 - DNA, 534 bp, Homo sapiens
acactttgaaagcagatatttttttcctaagtgtttacaggagcaggcacatgcctgtttttcaaagttttgaataatctctagttcttctcttgaaattatgatgaaaaaaggatgtatatgaatattggctcattgccagaatatgcacctcttagctgagctgaggtctcttctatagcattgggatcctgaccaatctgtttctgcagtgctgtggactcaggcatttctgtgtattgtagatattggtggagatgttatttgactgtgttgtggctggcaccaactattggtgaactgtaatgtaattcacccacttagtcaatatctgtagtttattgagtacgtcacttttgtgagagactcaaagttgactgagttgtggcttccaccacatgggactctattctgtctgtggttagggggcttttatggaccaagatacagcttttgtatctaagagaaatgtttacaaatacttgtgttttaatcagtattcaatatattaaagttttcatttaaaacgtaact

SEQ ID NO: 259011 - DNA, 645 bp, Homo sapiens
ttggggatgatagaaatgcttagatccagctctgggttacaagagaaagtcagactttcccagaaattctgggaagtatggagagattcatgggatgagctcagcacaggataccagagtgtcttggcatcagcagcatgagagcaaagtatgagccttgatggcaggaatcatggcagacaagcatttagaaagtttattctgctctttggccaagtattggttaaaaggaaagcagttgaaactgtaaccaaagaaggcatatgcttccagaaatatctcaagaaaaaatattgcaagtaacagtagtagctgttggattgggctctaaagtgaaggttgaagagattcaaccagttagcatgaaagttggtgataaagttcttctccaactttggtgccagaatatgtagtgaaagttggagataaagttcttctcccagaatatgcaggcaccaaagtggtgctaggtgacaggaattatttcttatttagagatggtgacattcttgggaagtacgtagactaaaatagatcactattgaaatagcatcaacatgagctcgtgcattccactgaagttctgaaatctttcatcatgtaaacaattttcgtgcctcccttttataataaatgaattatatc

SEQ ID NO: 259012 - DNA, 584 bp, Homo sapiens
gggcagatcacctcaggtcagtagttcaagaccagcctggccaacatggtgaagccctgtctctacaaaaagagcctgaggcaggagaattgtttgaacctgggaggcagaggttacagtgaactgagattgtgcctaattattctcatatatttcttttttcttcacccctgaagagttagtgatggtgacaactgcagctgtgggtttgacggctatagcaatggtagtgcaggcagtcattgtttgtttgtttttttttgtttatgaaatgattgaaggaacttacaatattgttcctgaaggggtgagaacttggggtagtgacagttgccttcgactctatgatgtgctttatatgtagagaaactgctggacttttctgttttgctctaaacttttgaataataggcagtgggcattgaaaggcaggttgatgtagggtgtggtggttcacacctataatcccagcactttgggaggctgaggcgggcggatcacaaggtcaggagttcgagaccagcctggccaatatggtcaaaccccgtctctactaaaattacaagtaattagccaggcgtggt

SEQ ID NO: 259013 - DNA, 123 bp, Homo sapiens
gatctccactggctcccttaccaggcgacgtctagctctatgggcgtcttcacccaacaggtagtactgcagtggatttgaccagaggtcctctttaataatctgagcaatcctgtcggactc

SEQ ID NO: 259014 - DNA, 1662 bp, Homo sapiens
atgaagctgggatcgagcagggcagggcctgggagaggaagcgcgggactcctgcctggcgtccacgagctgcccatgggcatccctgccccctgggggaccagtcctctctccttccacaggaagtgctctctctgggcccctgggaggcccttcctcactctggtcctgctggtttccatcaagcaagttacaggatccctccttgaggaaacgactcggaagtgggctcagtacaaacaggcatgtctgagagacttactcaaggaaccttctggcatattttgtaacgggacatttgatcagtacgtgtgttggcctcattcttctcctggaaatgtctctgtaccctgcccttcatacttaccttggtggagtgaagagagctcaggaagggcctacagacactgcttggctcaggggacttggcagacgatagagaacgccacggatatttggcaggatgactccgaatgctccgagaaccacagcttcaagcaaaacgtggaccgttatgccttgctgtcaaccttgcagctgatgtacaccgtgggatactccttctctcttatctccctcttcctggctctcaccctcctcttgtttcttcgaaaactccactgcacgcgcaactacatccacatgaacttgtttgcttctttcatcctgagaaccctggctgtactggtgaaggacgtcgtcttctacaactcttactccaagaggcctgacaatgagaatgggtggatgtcctacctgtcagagatgtccacctcctgccgctcagtccaggttctcttgcattactttgtgggtgccaattacttatggctgctggttgaaggcctctacctccacacgctgctggagcccacagtgcttcctgagaggcggctgtggcccagatacctgctgttgggttgggccttccctgtgctatttgttgtaccctggggtttcgcccgtgcacacctggagaacacagggtgctggacaacaaatgggaataagaaaatctggtggatcatccgaggacccatgatgctctgtgtaacagtcaatttcttcatcttcctgaaaattctcaagcttctcatttctaagctcaaagctcatcaaatgtgcttcagagattataaatacagattggcaaaatcaacactggtcctcattcctttattgggcgttcatgagatcctcttctctttcatcactgatgatcaagttgaaggatttgcaaaacttatacgacttttcattcagttgacactgagctcctttcatgggttcctggtggccttgcagtatggttttgccaatggagaagtgaaggctgagctgcggaaatactgggtccgcttcttgctagcccgccactcaggctgcagagcctgtgtcctggggaaggacttccggttcctaggaaaatgtcccaagaagctctcggaaggagatggcgctgagaagcttcggaagctgcagccctcacttaacagtgggcggctcctacatctagccatgcgaggtcttggggagctgggcgcccagccccaacaggaccatgcacgctggccccggggcagcagcctgtccgagtgcagtgagggggatgtcaccatggccaacaccatggaggagattctggaagagagtgagatctag

SEQ ID NO: 259015 - DNA, 1271 bp, Homo sapiens
  misc_feature (16)..(16): n is a, c, g, or t
gcagttggtacccccnggagttaatggatatccgtcagaccaggccgcttcgagccacggatatttggcaggatgactccgaatgctccgagaaccacagcttcaagcaaaacgtggaccgttatgccttgctgtcaaccttgcagctgatgtacaccgtgggatactccttctctcttatctccctcttcctggctctcaccctcctcttgtttcttcgaaaactccactgcacgcgcaactacatccacatgaacttgtttgcttctttcatcctgagaaccctggctgtactggtgaaggacgtcgtcttctacaactcttactccaagaggcctgacaatgagaatgggtggatgtcctacctgtcagagatgtccacctcctgccgctcagtccaggttctcttgcattactttgtgggtgccaattacttatggctgctggttgaaggcctctacctccacacgctgctggagcccacagtgcttcctgagaggcggctgtggcccagatacctgctgttgggttgggccttccctgtgctatttgttgtaccctggggtttcgcccgtgcacacctggagaacacagggtgctggacaacaaatgggaataagaaaatctggtggatcatccgaggacccatgatgctctgtgtaacagtcaatttcttcatcttcctgaaaattctcaagcttctcatttctaagctcaaagctcatcaaatgtgcttcagagattataaatacagattggcaaaatcaacactggtcctcattcctttattgggcgttcatgagatcctcttctctttcatcactgatgatcaagttgaaggatttgcaaaacttatacgacttttcattcagttgacactgagctcctttcatgggttcctggtggccttgcagtatggttttgccaatggagaagtgaaggctgagctgcggaaatactgggtccgcttcttgctagcccgccactcaggctgcagagcctgtgtcctggggaaggacttccggttcctaggaaaatgtcccaagaagctctcggaaggagatggcgctgagaagcttcggaagctgcagccctcacttaacagtgggcggctcctacatctagccatgcgaggtcttggggagctgggcgcccagccccaacaggaccatgcacgctggccccggggcagcagcctgtccgagtgcagtgagggggatgtcaccatggccaacaccatggaggagattctggaagagagtgagatctag

SEQ ID NO: 259016 - DNA, 317 bp, Homo sapiens
taatcttgttaggactgcccatgacttctcatcaactggaagcagcagtacagtagaaggagcggtgtacatgggattgtggttttggttctaccaccatctatctgacttctctgcacttcatttgtctcattgttaaaaacctgtcatcattttgacatgctacgttctcttgcaacgtagctacatgtgtataattgcttaatgtggtctcttgctgatgtgtttctttttaaacttcttgttgacattatttagctctcttgtatcttccaaattttttcagaaaagattggtctaaggttaaaacataattt

SEQ ID NO: 259017 - DNA, 196 bp, Homo sapiens
gatctcccacctcggcctcccaaagtgctaggattacaggggtgagccactgcgcctagcctgcttgctttctttaggtcacaaactaagatagtaatctctaatatttagcacatattgataaatatttggtgaatgaatgagtagcacagagagttgtagaccaagtagctgtaggttagcaagttgccagatc

SEQ ID NO: 259018 - DNA, 437 bp, Homo sapiens
gacttcaaatgacttcaggctgattccagaaagctaatacaccctcaaaggacaatgcaccttcatttagctcactcaggagagaggccacagtcttgaggggaggcactctccaaggcacagctcaaaaattgtttcaagcaatggaatcttcacgtgaatgggcacatggcctcccacagcaaggatgctcgttaatggggaagaatcactgaaaatccgaattcagatgtgtttcagaaagcagcttcaaagtgtgtgactgatcttcctagtcctgggaagagcagaattggcccttagaaccgttaagagtcagattgtgaaacagagagttcttgttccccatatgtttcactctaaatggaacatgaatcagagctgggagaggagcttccaacttctgtcaataataaaagccttcttatgagtcaagt

SEQ ID NO: 259019 - DNA, 156 bp, Homo sapiens
ttgaaacagggtgtagctcttttgcccaggggggagaatcacttgaacctgggaggtggaggttgcagtgaaccgagattgcgccactagactccagcctgagagacgagcaaaactgtctcaaaaaaataaaatgaaatacataaataaatgtgc

SEQ ID NO: 259020 - DNA, 363 bp, Homo sapiens
cacacacacacacacacacacacacacacgcatacacacacacacacactctctctcttacattttctaattttctggctctgttttctgaaagggcctagaacttttgacaccacagtaactatgaacacatgtagcacccagatcttggtttctaaatactgctacccacaaaaaggaacgagggcttcctggataaatggtggattccaggtctgaggctgcaagtgttgctacagaaagcgaggaagtgctcaaagaatgatggagacaaaggaactggcttgaaaggaaatccactggctgcattgggacaatttgagcattaagaaaaacagcaatggattgtaacacattaaatta

SEQ ID NO: 259021 - DNA, 408 bp, Homo sapiens
atcaaagcaattagttagcatagatcttagaaaaactgaaataatagaaccactggatgctctctgtgatttgtgttgctccactgatgcctaaaccatagatgccttttcagatttgtcaatatctccggttgtatactaactgttgagtcagtagaggagcacacatagacacatgtcatctggcctttcagtgacagaatagaccaaatgtttttatcctgctttggctctccagcttcttgctggcctttgaagatgtcatgaggccagcccattatggccacatagcagtaagctaaaaaaagtatagataactaggacatgatctgtattcaaaagtgggcttacatctcctgtcaaactgagatttgactgtcttctagcttttaacatccccaggtgaca

SEQ ID NO: 259022 - DNA, 329 bp, Homo sapiens
aaccaagcttagctgcattttgtcaatggcatattgaaaaaaaataattacactgttttttactgtctacaaccttcaggtagtggatagaatgctgggcttgtagctaacagcagcagcaacaataacaaaagtggcacccttctcagtttcactatcccatcaccatgtggtcttgttcaggccactgaactctgaaccttgttctctcaatagaaaatgaggaggctgagcttgaacttggagagctaagcactttcttgttgcatctctgaatggaagcttgcatagcagggcttttcaggtaaagatgaaacaggggtgggagt

SEQ ID NO: 259023 - DNA, 429 bp, Homo sapiens
atttggttttactgaatgattcatcagctatgccgtgaaacttagaaatatcaactcttgggctcataagaacactttattatcttcattgtcactagttattacttgagatattgcaatctaactttttcttcaaaagactgtgtttttctaaacatattcaacccagcctagaccaaattcatgcattatttttataaagtacaatatgttctgctaatatctccagaaaattttttcttgaagttgatttatatgtaaatacttttacaacatgaatttcaccctaattgacttcttataaggcaagaaaatgcataaatttttcttaacttttactagcatctattccccggaatactccaatcacttatgaataatatttcagttctgtattaaaaatttctctgtgaagcttgctcttggatt

SEQ ID NO: 259024 - DNA, 455 bp, Homo sapiens
ccgtgtggcctctctcctgccgatcagagcagcgtgaggtggttgggaaacaacacctctttcttaacactccatcaggttgattatttggtctgtaatgactgaaagcagtaattagaaatttcttctgttcttccgcactgtcgtgggcaccactctgtgcagatatgtcagattcctaaagccaggcttttggcaagagcccttcctgaaacattttctttggtcagtattttgacacagactgcctggtggatgtccaatatgaggtacaaaaacaaactcataactagccatggatagtttttttttcttccagccttccactttaaaaaactcccttttctcccacctgtgatccacttacttgagggttggtgacatggaccaccctgaatctattttatttacctgtatcattggagtgcttgtaccaattataatgaaagaaaaaa

SEQ ID NO: 259025 - DNA, 312 bp, Homo sapiens
ctcatcttcatggatttactttcgatgggattttttttttatatgtgtgtgggggtcctttttgttgatgttgatgttattgctgtttgttagcttttcttctcacagtcaggcctctctctgcaggtctgctgcagtttgctggaggtccactccagactctatgtacctggatatcaccagcggaagctgcagaatagcaaagattgcttcctggtccttcctctggaagcttcatcccagaggggcactggcctgatgtcagctggagctctcctgtatgaggtatctgtcaactcctgttgggagatc

SEQ ID NO: 259026 - DNA, 396 bp, Homo sapiens
accaacatggagaaaccccatctctactaaaaatacaaaattagccaggcgtggtggcaagcacctgtaatcccagctactcaggaggctgaggcggaagaattgcttgaacctgggaggcagaggtacagtgagctgagactgcaccattgtactccagcctgggcaacagagcaagactctgtctcaaaaaaaacagaaaaagaaaatatgaaagaggagatgagtagattagatggtctaacatacaactacttggagttccagaaggtggtagaatgaaggactggtccactgaacaaattaatagctgagaaatttccagaactgataaagaacacaaatctgtaagtagaagtctaagtcgacgcggccgcgaatttagtagtagtaggc

SEQ ID NO: 259027 - DNA, 1004 bp, Homo sapiens
aattcgcggccgcgtcgacgagagtagggaagcttcaggatagagtgggaaggatagaggatagtgtgatcacacagagaccttccactgaatgacctccctgactgtcaatatctgatggtctttcctctggatcagcttactctttacttgggagttataagataggctgctagaagacttgcaactaagcaaaggaagggagccagttcccttttttaattatgcagactttcatttaatcctcacgttctttgtacagtccatccctcaatcttccttaccagtgtttagtatgtggatcctgattttttttctaaaaatgaaaggaggagaactagtgtacagctgccgggtggtctaagtgtcccttacaagcctaaacaaatcctcaggttcagcacgttttatagtccacatttagagtaactggtactcccaatcagggggttctgcttaggaatccattgcctcctagcaactctcctaaagcacctataccttctccataccactagtagttacaaattatgcatctgcatcttccaaaaatgtatggatatttattagaccctctctactattcttggctttgcaaatttatgctttctgccatattaacagaaagtctcaagtgaactatttaaggcaatataagccacttcaaagatattctccatttatgctggctaataggccatacacccagtttgtactcttcggccaagaagggatagctcagtgaaaaaaaatttgagacatactgactaaataaccagaatctctgatattaaaaaatgaatgaaatacgattatcacaataaaatgtccttttttctttgtcaatcaggaaaattttattttatttgactttctctctccccctcattataggcttcaaaactcattatatccatatcttgatatgttttcccaaaacttcctttacagctctctctctaaataacatatttctccttctagaatttaaacagggtaccaac

SEQ ID NO: 259028 - DNA, 453 bp, Homo sapiens
ccgggggcagcagaggcgattgaggggtatcccgttaggcatgggaggcccaagcagaagggtttggccccgtcctctcactgaaccccacagatgtgcctgtctgcaggcatctctagtcccgttttccagagaaacactgctgctggggggcggggaggggtgaggtcagtgggcctagatcatacaaggagccatacccaggctgagctggatggggaggggaggtagcctggcacccccagggaccaagtgtcattcagtttgttgcctgatctctcagcactcttctgtgatgtcccccttaggacagtaggtggtcctgggacccacatcaggagggggtgagggcaccggggcctccatgatgtccagcactgggctccgactgccactgaggacacggtgccccccgggacctttgacacccgggggtctgaggggccctggcta

SEQ ID NO: 259029 - DNA, 337 bp, Homo sapiens
aataaagagactaaggaagcaaagcgtggcgtgcttgtttatcactagccaaaggtgtgtgcctgtcccagtatgtcccaggcaggggccattgagtcacttagcattaagcagcaggacgggcctaataccgtcaagagccatgattaaagatgctttgtaaaacatttctgaaacagtgataattggcttgattactatttaggcctgtgtatattataaatgctcattaactttacttcaaatatcattgaagtggttatttaataacttttgagagtttttgctgacctgatcttaataaaatgctgtgttaataatggactttgctcagttc

SEQ ID NO: 259030 - DNA, 296 bp, Homo sapiens
gaaagacaactaatgtaagaaccaatctggaaaactatcctgaccagatactgttttttcagaatcccaaaaaaaaggacataaagaatgtcataaatgctgtaatctagttaataaatatgtttcacacaggggtttgggttagcaattcagaaattactttttgtttataccagaaataagcaaaattttctccttggagatgtattaaacctaaagctgggacaaggaaaaccatgatgatcctggaaaatcctatggtgccagaaaataagaaagtgaccaaaaaaaaaaaa

SEQ ID NO: 259031 - DNA, 498 bp, Homo sapiens
gggatcaaattcattttttatgagaaacctacttctgagacagtagcattaaatcattcataagggcacagccctcatgggctaatcacctcttaaaggtatcacctcttaatacaattacaatgggaattaaacttcaacgtaactttgggaggggataaatattaaaaacatagcaatcacaataaaactgggaaattaaaaaaaaattgtgcggctgggagcggtggctcacgcctataatcccagcactttgggaggctgaggcaggtggatcacctgaggtcaggagttggagaccaacctggccaaaattgtgaaatcctgtctctactaaaaatacaaaaattagccatgcatggtggcatgtgcctgtaattccagctacttgggaggcagagacaggaaaattgcttgaatctgggaggcggacgttgcagtagagccgagatcacgccactgcactccagcctgggtgacagaacaagactgtgtctc

SEQ ID NO: 259032 - DNA, 501 bp, Homo sapiens
accaccacttaaaacaatatagaacagacatcctaccgtgtttcttacatgaggatctatctcattctttttaatggctgcatagtattcaatagtatggatttaccataattcatgtaatcattaccaaattgaggatatttgagttatctccagcttttcacaattaaagtaatgctgtagttaacatgcttttacatttatccctgcacatttgttcaagtatttttgataattttccagaagaaaattgttgtgtcaaagtatatgtacaaaatacatgctaatttgctttctaatttaccctgagagtaccccttttccatatcttttctaatactagatattatttgtctaacttttagcaatttcttaattttaatttcctaatcattagtgatgttgaacgtcttttcatgtgcttactagccatttacagttctgtagattgcctgttatagacatttctaaggctcttgacaagtacaaccatattttttc

SEQ ID NO: 259033 - DNA, 140 bp, Homo sapiens
  misc_feature (127)..(131): n is a, c, g, or t
  misc_feature (133)..(133): n is a, c, g, or t
  misc_feature (139)..(139): n is a, c, g, or t
cctggccccagggctggctccacttccacgctccttaccaagctacccttaccaagctacgggtgcaggaagcctttagatgcctcgctctccctgcccctccacacttggtatgctgtgtccaccnnnnnanccctanc

SEQ ID NO: 259034 - DNA, 164 bp, Homo sapiens
ccttgggggctgatcaataatacccataggctggcagcaaccttcttctgttgctgctcacctgggctgtcctatttggcttcagctcttttgttcccggtgcaaccaattccctgcattaaatttcttctgtttgaaatacctggagtggattctattttcct

SEQ ID NO: 259035 - DNA, 1433 bp, Homo sapiens
  misc_feature (245)..(245): n is a, c, g, or t
  misc_feature (364)..(364): n is a, c, g, or t
  misc_feature (1062)..(1062): n is a, c, g, or t
  misc_feature (1182)..(1182): n is a, c, g, or t
ggccgctgtagtcactgccctggaggacgtgttccaggccctgggctttgagagctgcgagaggagggaggtcccggtccagggcttcctcgaggaactggcttggttccaggagcagctggatgcccacgggcgccctgtggggtgtgccttagtggccttgatgcccccagagggcagctgaggcagccacagcagctggtccgggagctgagcggctgccgggccctgcggggctgccccanagtcttcctgctgctctcaagtggtcctgggtcctccctggagcccggagccttccttgctggcctgagagagctgtgtggccgctctcctcactggtccctggtgcagctgctgacgnagctcttccgcagggtggctgaagagtccgcagggggcacctgctgccccgtccttcggagctccttgaggggggcactgtgcctgggaggcgtggagccctggaggcctgagccggcccccggtcccagcacacagtatgacctgtccaaggccagggctgccctcctcctggctgtgatccaaggccggcctggggcccagcatgacgtggaggcgctggggggcctgtgctgggccctgggctttgagaccaccgtgagaacggaccctacagcccaggctttccaggaggagctggcccagttccgggagcaactggacacctgcaggggccctgtgagctgtgcccttgtggccctgatggcccatgggggaccacggggtcagctgctgggggctgacgggcaagaggtgcagcccgaggcactcatgcaggagctgagccgctgccaggtgctgcagggccgccccaagatcttcctgttgcaggcctgccgtgggggaaacagggatgctggtgtggggcccacagctctcccctggtactggagctggctgcgggcacctccatctgtcccctcccatgcagatgtcctgcagatctacgctgaggcccaaggcagctcctgcaggggcacccctccagggagctctgaccaagcagacatcctgacggtctactcagccgcagagggntatgtggcctatcgcgatgacaagggctcagactttatccagacactggtggaggtcctcagagccaaccccgggagagaccttctggagctgctgactgaggtcaacaggcgggtgtgngagcaggaggtgctgggccccgactgcgatgaactccgcaaggcctgcctggagatccgcagctcgctccggcgccggctctgcctccaggcctgagggtgcggcggccacgggggcgctgctgagacggtggccagatcccagcgccattcttgcctccatccaccccccatccccccggtttcctcatctgagagcgaggcgtggcagcgtgggggtggccgtgcaataaatatctgccgtgaacagtg

SEQ ID NO: 259036 - DNA, 1131 bp, Homo sapiens
  misc_feature (245)..(245): n is a, c, g, or t
  misc_feature (364)..(364): n is a, c, g, or t
ggccgctgtagtcactgccctggaggacgtgttccaggccctgggctttgagagctgcgagaggagggaggtcccggtccagggcttcctcgaggaactggcttggttccaggagcagctggatgcccacgggcgccctgtggggtgtgccttagtggccttgatgcccccagagggcagctgaggcagccacagcagctggtccgggagctgagcggctgccgggccctgcggggctgccccanagtcttcctgctgctctcaagtggtcctgggtcctccctggagcccggagccttccttgctggcctgagagagctgtgtggccgctctcctcactggtccctggtgcagctgctgacgnagctcttccgcagggtggctgaagagtccgcagggggcacctgctgccccgtccttcggagctccttgaggggggcactgtgcctgggaggcgtggagccctggaggcctgaggtgaggggggcagggcagggatccaatcacatggccacagtttccagtgggacagaagcttagggggggccccggccggggaggccaggagctggagtcctctcaggccactttagatgtgtcttaaccctctctgcagccggcccccggtcccagcacacagtatgacctgtccaaggccagggctgccctcctcctggctgtgatccaaggccggcctggggcccagcatgacgtggaggcgctggggggcctgtgctgggccctgggctttgagaccaccgtgagaacggaccctacagcccaggtgaggggaagccgagaacttccactggtgctctgaaggaagaccacccctccctagaaacctggggcctctctccatcactggcaggaagtgcaccacaagtctaacctctgtgctccctgttgcctgcatctggcccgtcacttccctgcctctggaagcctggtctccagggtccccgaggccttcctcactggctggttctctggcccccccgccccctccccagctcaaagctttagctccaagtcttggtttccctcttggctcccagcagcccactccactctcctcacacctctcaacttcttggtgcggcttccccacgagggcaggaggagaactgg

SEQ ID NO: 259037 - DNA, 352 bp, Homo sapiens
gcaagaaaactgtccttcatctgcctccaacatttattagctctgagaccatgggcaaggccattcattaactttcctagactctaacctcatctagactcatctataaaacaagacaaacattccccttaatgctttatgaggatgaactgagatactgtgtagtttctggactcatttaatcctaggagatgaagggatagaggttcccatttaatgcatccagacttctggaatagtctgtgggaactcagagggcctttcaatatctcttctttattctttcaagactggtcactggcacctggaaccgctgttggtactgacaataaaatggggaacaaaacatcca

SEQ ID NO: 259038 - DNA, 191 bp, Homo sapiens
tttttttggtagaggagatgaggtctcactattttgcccaggctgatcttgaactggcctcaagtgatcctccggttttggcctcctaaagtgcctgggattaaaggtgtgagccactgtgcctgaccttatttgagctttttacaatgagaattattcatgcattactagactgattttacatttaatag

SEQ ID NO: 259039 - DNA, 648 bp, Homo sapiens
ctaatttttgtatttttagcagagacagggtttttccacgttggccaggctgatctcaaactactgacctcaggtgatccgcccacctcagcctcccaaagtgctaggattacaggcgtgagccaccatgcccagcccaagagcagagttggtttttttcctgcatacacctagatgcttttgatgatcaaacaaatgtatgtgacatgggttggctattttatactcctttttcagtttaactttatttaataggttctggtagattagcatagccagtgaaccaagaaagcgttgttttccttccttctgttcctgggcctgaatatttgccctaaagtacaaagaatgctcctgtggtaggattgtcatttttcctcggggcttgaacagagctgtacattccagatgtcccacagtatcagctgcccccttcatctagaagtttggctgtcacttgtatatagtgatgggattaaacaaagtaactcgttgaagcatcccagatgaataagtggggagaataagttattaagtatctagtgggaactggtttgttaatctaacttacaagaatagtggttctcagttccatgattacctaatgactagcaatccttagccctgcagaatagctgcagaccaaaa

SEQ ID NO: 259040 - DNA, 279 bp, Homo sapiens
cttgggaagacagcagcagagagcattatgagctgagttagagagtcacaggctccctctgaaaccttctagcagatttcgcaaatgctaggaggccagaatagcactcctggtgttccagccatgttaagaacccagagagaactctgtgaaactgctccgtgggccagtggctcagaacacattgtagaaatgatctgtgggtagcagtgcacttcctttaggcagagtcggaagagccaagttagtgaatgccccaggccccacagcgagacctca

SEQ ID NO: 259041 - DNA, 454 bp, Homo sapiens
cgcagacggacgggcctgaatcgttcgccttgcggtcggtcctatcaccctgaaatgggatccagcatcccatcaccctgaaatgggatccagcactaccaactgcggtagccgtggttaaaggagacgaccccgtgcagcaggaagaagttatttagaataaggaagaatgcgccgggcttgtttatttacgggcataaatttttcgtagggttcgacggtatggcggctccagtctcagatctcacagaatttcctacacaaagaaatttgcaaggaaaatggacattgcaccctaaaaattaacaaggaaagaaggtaccaggagcaacaactcattaacaggaacagaaacaatattgcaaatatttcagatgcaaagtgtatccgacttataatacaactgtccctactgtgtctaaagaaatgaaaggcaataaagaaaatatctttg

SEQ ID NO: 259042 - DNA, 430 bp, Homo sapiens
gttatcatcactcagacacccttcaggatgactgacgttattcttacagaacagggatcctcgattgtttggggggatgcatcacttaactctttccggaatctgttgatagcacaggaaattttacaaaattgatgtgtgatttcaggggatttatggatcccagccaagacccctgttaagagtttctcttacagaggaaactggaagggtcttaaagctcggtgatgggtgacgtatctccaaataattgttttctgaccctcaactcccagcacttggtggaaaatgaattctgactggagagtcaatgctagttgatgatataatcggtcactattttttcccaccgcctcacccaatcccctgactgggcccccaacttcctggtgggttagaacacaaactatttctgagggaaaataaaaag

SEQ ID NO: 259043 - DNA, 295 bp, Homo sapiens
ctccgcagtgggctgcagcacccgtgacaccgtgctcagccgggagcgcggcctctccttccaccaatttccaactgataccatacagcgctcaaaatggatcagggctgttaatcgtgtggaccccagaagcaaaaagatttggattccaggaccaggtgctatactgtgttccaaacattttcaagaaagtgactttgagtcatatggcataagaagaaagctgaaaaaaggagctgtgccttctgtttctctatacaagattcctcaaggtgtacatcttaaaggtaaagca

SEQ ID NO: 259044 - DNA, 337 bp, Homo sapiens
ctcctggctcctgagagaaggctggatatagaagataatgctgccatccattaggagaaagggaacgctctatggaacccagcagttctccaggacacctcttggtacttccactgaccacagtaaaagttcataaaaaactaacccaaccaactaaataaccaacaaaggcaggaccactaagggtttggacccttcaggaatgaaggttttgatcaccctactggtaaaaagccagaacaatggaagggtgggctcaaggcaaatggaacctgggatgaataatggaagaaggaatttatgaatattaactacagccttgtgaccagttacagaa

SEQ ID NO: 259045 - DNA, 771 bp, Homo sapiens
  misc_feature (125)..(125): n is a, c, g, or t
  misc_feature (770)..(770): n is a, c, g, or t
aaagcgttctcggcggcagcgcaacaactagaaccgtgagaacgcgtccagcaaccgcgaccacgacgacgtcacctcgggcacgcccaaggagaagaaagcccagacctctaagaagaagcagngctccatggccaaggcgtagcggcaggcgtcccccgcagacctccccatcgaccccagcgagccctcctactgggagatgatccgctgcgacaacgaatgccccatcgagtggttccgcttctcgtgtgtgagtctcaaccataaaccaaagcgcaagtggtactgttccagatgccggggaaagaacgatgggcaaagcccttgagaagtccagaaaaaaaacagggcttataacaggtagtttggggacatgcgtctaatagtgaggagaacaaaataagccagtgtgttgattacattgccacctttgctgaggtgcaggaagtgtaaaatgtatatttttaaagaatgttgttagaggccgggcgcggtggctcacgcctgtaatcccagcactttgggaggccgaggcggtcggatcacgaggtcaggagatcgagaccatcctggctaacacggtgaaaccccgtctctactaaaaattcaaaaaaaaaattagctgggcgtggtggcgggcgcctgtagtcccagctattcgggaggctgaggcaggagaatggcatgaacctgggaggtggagcttgcagtgagccaaggtcgcgccactgcactccagcctgggcgacagagcgagactccatctna

SEQ ID NO: 259046 - DNA, 510 bp, Homo sapiens
accaactggtggtaaacaccgccaggacagggacactgtcttcttcatttgtagcaccagagcctgacacatagaaagcacatgaatctttgtgacccaaatagaacaggacgatgtttatagcagccagatgcatagtacagaatgagcctttaggaattttagaggaaaggactcagagactgttagatgtcctaaaggggtttcatggaaaaggagggcatcctagatggaactcagttggagaggaggaatcaggagacactctcagacaatgtgtggcatgagcaaacaaagcagagtcacccaaggtgtgtggagggtctgaagcagaccgctattgaagcgggatgatggcaagtgattgggtcagtttgtgtgaagaattggcgtttgatctttaagggatggcgaaatcactggaatgtcaaaccctagccgttattaaagtatactatactgtgcttcagcatattcccccacaaataaaaggaagtatcagtacctaca

SEQ ID NO: 259047 - DNA, 216 bp, Homo sapiens
acagagcatatttaaggggactagaagacagactcacacaattgcctccctcttttgtgtgagggagggtcaaccactttccatcctcctccaattagtccaaaaaatactcattaacctcctgtccattgcaaggaaaacagatgatcaacatgagaagctcagctgttgattaattttcccaaacagggccaaactacaaagcagcatattgca

SEQ ID NO: 259048 - DNA, 418 bp, Homo sapiens
cagaaacagaaagtaaccattttttaaaattaaaatcttaaaattgatatggtggatacttttactgaggtggtccctgcctcaaaagttgccactgctgggcaactcactgtcctctcttaagtcatgtgactttctttagcagtggaaatacttagtgcacctcatgagtcttggagagtttcgttgagttcctttgctttgcaatgagaagatcggatccaggttgaggttgagggcgggtatatgtgctttgtttccggcctcatatttggcctctaggtaaatagaactccacatttcaaggctaccaaatctttcatggatggttaaatcccaatccctcccccactccagggtcaggggtggaggaaggaggagaggtagaacaacagggtaaactgaaaacaatcaatca

SEQ ID NO: 259049 - DNA, 466 bp, Homo sapiens
ctaatattttctccccgtggggtgaggcagttgaattattcatcatttctgtttatggacctttggtattcagcaaagcagaggcaaaaacttagaaagagcgctatgtccagagatcagtattctgaaagggcacttgtcaagtggaatttcttatttgctgcctgaatcttcagaggagacaactgaattaattaataaaacaaaataccagaattttgggaggccaaggcaggcagatcacgaggtcaggagatcgagaccatcctggctaacacagtgaggccccatctctactaaaaatacaaaaaattagccaggtgtggtggcgggcacctgtagtcccagttactcgggaggctgaggcaggagaatggcatgaacctgggaggcggagcttgcagtgagccgagatcacaccactgcaccccagcctgggcgacagagcgagactccatctcaaaaa

SEQ ID NO: 259050 - DNA, 416 bp, Homo sapiens
ctccgtgtgcaggaatgccaaactctccctgccgggaccctccgtgtgcaggaatgccaaactcgccctgccgggaccctccgtgtgcagagccctggactggactcagcctccccgacaccgcccagagctggtcatctcccctggggctgcttgggcgtctcagaaataaacgccccagtgtgcagactccacctgaccccattctagaaccctctttcagcctgtgctctcccatggacccctcggcctccagcccaggcccgggcaggggccgcatctatgcagcacagcctgcacagacatcgtttgggtctcggaggctggcgttacccttggttgctggacatggggggcgtgcagttatgggggcgctgtcagccttcccgcgcgcatcgccgactccacgtggaccc

SEQ ID NO: 259051 - DNA, 259 bp, Homo sapiens
gagctcaggaagagaggctgcgggtggagaggggaggaccctcttcccaaagccaagcagaggaaaccaagtttaatagagaaaatatctaaagatgaaagggaggaatcatttggagtgcaaatacatgagagaagagtggaagttgagacacttgaattaacccaggaaacaagagagaacaccacaaggaaaaagagatagaaatacaggaataaaaataaaaacgagatctgtttctggggaatgtaaaaaagaa

SEQ ID NO: 259052 - DNA, 728 bp, Homo sapiens
gctccatcagtctttagtctaagaagtgatatataggatcatggtttgacatcatcttgtgctgattctggttggcttaatggaatcaaattggatgaaggtaattaaatatgaattgtttctgatgctaatagatagttgtacttctgtctgttgggtatgggttgggatgggcggtagcatagctgattgcggtgggggaatttcagatagctgatgatgtggctatctgaaaattgccactacatttttaaaactgaaaagtgatggtaccgccaaatgaaatctgcagcatcctcagactcaatcaggaaatacttaagcattatgctccagggtggttttcttcccttacattgcaactggactccttgaggcacctttttagaattagtgagccgctaggatttttatactatgctttgacataaaagaaagttgcttgtcaatatgtgtttttttagtttaccagcatatcagatctcacaaacaaattttaggctcggattggatgtttctagtaaaaacaagaaaatccaggcatcactaaaagaatcagaaatacgttgtggcttgaaaggtgcaaactaaataatatagctagcagtaacggtcaccaactcctgcttttctttggttcagtagatagagtaaaatggaaaataggaaaccaaggtcagtccccaaatctcattttaaccaatagcagcaaaaaaaaaaaaaaaaaa

SEQ ID NO: 259053 - DNA, 332 bp, Homo sapiens
ctgttgcagcacaactgtatcttcctagtcgtgttcagcttcaactaaaattcacatgtaaggatctggggttggggaaagattagggagattagagctgccatagattctgacgagtctttcccgggccttctttcatcttttcttcttgatttcttttcttctaaaaatctcctgctcttttcccaaaagaaaatcagtctgctgccagaaagaatataatacctgtcatttaaacctcagtgtaaaatggcttaataatagtgaacatttgcattaaccgttttacagtttacatagtacttttaagtacattttctaacttaattctc

SEQ ID NO: 259054 - DNA, 847 bp, Homo sapiens
tgcaatatatttgtaataagttaattctacttaattatctcagcttgtcaatgttgtaaacttaaaaaaaaaaaaatagaaatgcaccagttggtggaaagaagggagggatcaaactcatcgactataaccgtgcaggcctttacctcaacttatttcaagtatctcttattcctacagtgaagtgctggtgctggctcctaccaatcgtcaaagagcaagttgttaaattttcaggaactttttgagctggctgttaatagtttgaaattggccacagtggaagtactaacactacagaaattggaaatcacaacagaattggcaaacgctgtaaaatagagcttcccccaacccccaacaaagcccattgttaaacatttaccaacacaccagtctttgtatcctttagaactgtgttatttgagaggatatcctagatacataaaatactgtaatgagattgactataatctcactgattgaagaatattgatcattttccttttccacgttctttttttttttttcttttgcctgcctggaaactgacaccctttccacattcttaaatgtcttcctttagggttgtttgaaccccctatccaattcattgctggatatatttgatgtttctacagaacttcatttgtgaagatatgttacttttaggcattagcctagtgatttttttttaaacttttttcttcttcatcagattacccagattaagaagtatttcagtaaggtggcaaagttttagaaattactgaatctggttgatacgtatataggtttattatactattttctctagttttgtgtgtgcttaaatttttttataatt

SEQ ID NO: 259055 - DNA, 401 bp, Homo sapiens
caggaaacgggattctggcttctatggccggtcttggagaagaggaattctagtttctatggctcacctggggaagaatcagggtcaacagacaggagggcagagaaactttgcttctgcggccttcatttggggtatcattttttgggctccagcgttaccttcacagcaataacaaataactaggttttgccaggaacttggcaactctgagaggattaaagcaagactgctgccaacttctgttgcttccttatcacctcaagtcgtctcagattaaagtctctgatagttgatctcaaggaattacacgtagcaattgggaagcacatttttatttgcttaagcttctaaagtctaatgtaatgtcatttgcacaaataaaaattaacggttggtca

SEQ ID NO: 259056 - DNA, 541 bp, Homo sapiens
gaggtcaccacacaggaggaggagctggtaagggcctgcattgcccattaattttgaggatttatggtaccctggaaaccaaaaggacctttcggccagacaccaacacatctctcaggagcacaacacagggcagaagcagccgggatgtggggaccgcgggctgtaaactattaatgcaagatgccaggggcagcacccaacctccagaggtttttcccgctgatctcagtgaaaggtaggcactgacagtatccacagtgtgagagggcaggggctccttaacagttacagatctctgtatgcaaatgaaagtacacaaagccagacacttaggaagaaggcgcttcaacaggcacaggtgttactgcttaagccaagacagatgagtataatgtagagaaaccctgtattacaggagggattaagccagaagggtgtttgtgggagggaatgaaccttcccttcatcaaaaatcactgcaaactgtgtgcataacacccatctgtgtgtttaaaataaaaaatttcatttactaata

SEQ ID NO: 259057 - DNA, 474 bp, Homo sapiens
caaatattttgcttcttctcctgagcacatggcagaattaaactttttgtatgcacttgaattttggcatagccatgtgactctctttgtcccatgaagatgtgagcaggagtgttgtgtatcactaccagaagaaagccttaagaaccagtgtatctgtattacattttatttttctctgacatgcaacttgaaatgtttcagatgatggttacattgtccttggtcctggaataagaaggacatgaaggaagctcacaggtagcttaggatggacatgctatgtgggcaagaaataagcctttgctactttaagtccctaagttgtagagattgttcattatcacagcattacctcacttattatgtctgacttatttgcaaatcagaagctcttatgccttttcttaaaatatatgccaataccaaaatggcccttttaaaattgagtttgtaatttaaaactaattttgt

SEQ ID NO: 259058 - DNA, 460 bp, Homo sapiens
catttcctccccttgctctttgaccacacatcactacacattggtatgccagatctctgccagttttagaatgtatattgattgtgtcttcctctgtctttgttttaaatgaaatagatcaggcacacaaaagtgtaaagagaaaaaacaaaaaaatgtaaagagaaggaatgaacactcatatatggtgttttttgttggtttgttttgttttgtttttcgagacggagtctgactctgtcacccaggctggagtgcagtggcacaatctcagcttactgcaacctccacctcccaggttcaagcaattctgcttcagcctcccgagtagctgggactacaggcatggtggttcacatctgtaatcccagctacttgggaggctgacccaggaggattgcttgagcctggggagccagggaggttgaggctacagtgagccatgattgcaccactgcac

SEQ ID NO: 259059 - DNA, 291 bp, Homo sapiens
gaggttttgcaatttataaaattgggacaatagtattatccccatagacttgtagggagagttaattaacataatacatgaaaagcaccaagagaggctctggcacatagtaggtgctcaaactgcaaaaatatgtccatgtatctgatgagtagaaatgcacattctgtgctaattgaaataatcatttagtaggcagagttgaatggatgcaaaggaggagggaagggatgttttacatgtaactaccctgcacaaagtaggactcgccggatctcctctctgggttgt

SEQ ID NO: 259060 - DNA, 315 bp, Homo sapiens
accaagcattagaggcaagtggaacccagaacaagggtttccaactatgtctaacagaagttctagagggagaaacagagaaggtggagagaaggaatatttgaagagttatcagctgatgatcctccagaattgaagaaatatattagctcttatatcaacactgtagcttgagttccaagaaagataagtatcaacaaatactcacatgtgaaggagggaatcaacatataagaagctgagaaatcaagcaatcaatggagaagaatagtatttaaaatataaaagaataaaatataatatacccaaataaga

SEQ ID NO: 259061 - DNA, 517 bp, Homo sapiens
actctttttttccaccttgatactggtctcacaagggtcagctccctggtgtggtgtctggggtccctcacacagggaatgctgagagattggctttcaacggcaaacatatgttagagtgtttgatgccttcacgttgacagaacagagagttatagggactttgaattacgaaagggactctggactagcctgggcaacatagtgagaccctgtctctacaaaataaactttttaaaattagcatggtggcatgtgccagtgatcccagctactcaaggggctgaggtgggaggatccttgagcctgggagtttgaggctgtggtgagctgtgattgcaccagtgctctccagcctgggaacagagcgagaccctgtctcaaaaaacggaaaacaaataaagagaaggggtttctgctagagaaagagctgcccacagagaagttagtgaaatgacaaagggaattaaaataaaataataaagcatatataagagaaataaaagaataattacta

SEQ ID NO: 259062 - DNA, 1019 bp, Homo sapiens
aaaacttttattaaagactttaataattcataaggggatattaacaaaattcgaaaatactgctgagaactcctcattctaaatacaaaatgccattctgacatttttactaaacaaaagagagatctggcaacaacatcagattttcctgtacaattactttcttcatataatatatatatggttaattttataatactaaatagtaacaaatgctcaatgagaaaggctataaagccacttcagattatgttcaactatctattgactgtttcttgctgttttacaagtattaagtacagattaccttcccttcaaaaggtcaaatagcgtttagtgtttagggttaaggtttcttataatccacttatagtatcttttaaaaatattttgttgctaaacggtctaattttaatatttaatttttaatagtaagatatttcaacatggcttttttgttgttgctgttaatctgccaaagtgtgacagatagaacaatggctttagaataagtaagagccaggtttgaaacctgtcttcatcatttactagctatataatcttggagaagttacttattatctctgagctttacttttttcatctataaaacagggacaataaaaacaacttcatgctgctgttaatgtggtgaaattaaatagaatgtgtggcactcctaacaaagttacctagcatgaactagacagatttaagttcttcccgcatgattccagcgcttccttaaccccaaatactggatggcaattctgaagtcccagagaagagggtagaagatcaactaaaattgattttattttcttgttttgaacaagcagtggttttattaaacatacatttttggtgcctgctttttgactaatgaaaagagaaacttcatatattattgccaaaacaactaaaaaacatttatcaacttcttttgtaaactgcttgggaagtgttaaagcctttctagaaagcagtttggcaataagtatcatggacatcatcttgta

SEQ ID NO: 259063 - DNA, 632 bp, Homo sapiens
gggagaagcaagaactcaagatgacaccacatttctgacttgagtaacacagtactctttcccagaaggaagagcagattttgccaggggagatgagttgaatttgagtgtgatgagttagagatgccgtaaagtccaatgggaactgtcatctgctgctggaagtcagagcatgtggtctgctggagctgtcttggacggctggcaagagtggaccatgcacacctcacctcctcccagctgctttcagtgacctcatgttggtagcttgaaatcggctatggtgggtgtatttataccacagacattggcaggtgctctatgaggcagggctctcctctccaccctcccccactcagctaatggttaaacatttgccggcaaggagtcttgttggtgagggaggcagaatgaggctgcccctgggcagagacacaactgaccatctctcaagggtcaaataagagaagggagacttcttggtaggctttttccaacaagaatcttctgtctgtgtatttgcaagtaggagaaagacagggaggagtagacataggggtctgctttcagaagtggggacctccttcggctcccttttcactctgaccttgaattaagggagaagatttcag

SEQ ID NO: 259064 - DNA, 482 bp, Homo sapiens
ttttgttccgaacatttttcttcaaatagcgttgtgccagaaccttgtcattgtcccctaatatccattctccacttcttttggctatagaatccctgaattttaattagacagaagccccctccccattttctaaagacaatttccagcctcccttgcagcctgatgtgtccttgtgattacgctctgaccagtgggccacccagtcttctgttggcacagtggatgggggctgtgtcttatgaaagctatgtccaagagttccaagtggaggccagtagtgatggaaatggtggtcctaaatagagctgcaacctctgggtaaccctcttaccctaaatacatgttgcttacccaagagtcagactcctgagatttcatcattggtaactgatttccttggattacccattgttccctttattcagccttcttttaaaatgcaaatattcctgggtggataataaacatattgctactaa

SEQ ID NO: 259065 - DNA, 268 bp, Homo sapiens
tgaaagttataattattaaatataagctctagggcaactaataacaaaatatcttttaaaatatagtaaaagaggcaataaggaaattgaagtgatatactagaaaatgtctatttttaaaaaataaggcagcaatggaggaatcgaggaacaaaaaagacatgaaacacaaaccaataccaacatggtgaacataaatccaacctttccagtaaaagcattaaatgcaaatggatgaaacacttcattcaaaggacagagactgaca

SEQ ID NO: 259066 - DNA, 468 bp, Homo sapiens
gttttgctgttttgcattgaaattgtgcaattatttaggcattggcttattttgattgttaagaaatgatagtagggaaagttcatggtgatgaaatcactggaaggcaagaactactagctctgttgattaataaaagatttatagctctaaataactggtttttggtatagaccccctgcttttcttcacaaattatctgtaataatagccttgctagcttcataatattcacataccaattgtatacctttgccttattagtcttcttgccagaaataatgtacgttagtctaacctgtccaggttcctgagattcatagtgagtggataaaaagaagactactgttggctgggcacagtggctgacgcctgtaatcccgcactttgggaggctgaggtgggcagatcacgaggtcaggagatcgagaccatcctggctaacacagtgaaaccccatctctacta

SEQ ID NO: 259067 - DNA, 557 bp, Homo sapiens
ctgatactgtctgccttaaaattcaataaaataaaaattttaaatgaaaggatgagttaaaagtaatataagcaatctaataatctatgaatattttaaagcagagctaactcaaaagagaaagaaatgggagcacatctagggcaggtctctctgaatgtggatgacataaaccatgtaaaggtgggatttcaattcagtggacaaaggatgactctggtaataaacagtgctacccagtgggagaaaaagaaccacacctcacatcagattaaataaagagaggtggatcaaatggcctgcatatgtgtgtgcatcaagtagatgaagacatttaatagcacatttgtataatactggggagaaggaatcttaaaaaaagggtaaaggaaaacactaacagtttacataaaaatataaaattttctatgataaagataaagccatatcacatgaaaaatatgataaaggctcataatataggggatacaaccgcatccctaataaaatactgacttataagctgatgagaaaaaaacaatcagctcagtgaaaaa

SEQ ID NO: 259068 - DNA, 520 bp, Homo sapiens
gcctatatatgagtatccaaaatagatttcctatatatgatttggattaagagtagaattgcatttttaggaacattgacctgtaagatatgttacagtgattaattcattagtttcagtcactttttgaaatagtaagtgattgttaagatgctccaaggtaaaaatctgcatctttgcaggctaccatcaatattgtttttgatcgagttgggaaaacggatcctgtcacaagaggcattgagatcactgtgaattatctgggaatccaatttgatgtaagtgttatatcaagatcctggtttgtcatgtttctgttttatctactataacttaccattgttaagattctaatttgtatactttaggtacttgcttctgcttttgttcttcccactctgtatattttgacgtattcacatggaaaatttttatattttgatgtattcacatggaaaatttgtaaaaggccaagattctctctcttaacataaagccagaagtaatgattgatacttaa

SEQ ID NO: 259069 - DNA, 433 bp, Homo sapiens
acaaaggaaataaaatcagtacatcacagagatatctgcatttctctgtttattgcagcactgttgaaaataaccgatatggaattaacctgggttcatcagcagatgagtggataaataatatgtggcttgtctaaaaaattgaatactgttcagtcataaaatgccactacatgggtaaaactggaggacattatttaagtgaaataagccaggtacagaaagacaaatattgcctaatcccacttctacgtggaatcttcaaaagttgatctcacagaagtacagagtagggctaggcacagtggctcatgcctgtaatcccagcactttgggaagctgaagcaggaagatcacttgagcccaggagttcaagaactgcctgggcaatatagcaagaaaagaagaagaaaagagcaggagaatgagaaga

SEQ ID NO: 259070 - DNA, 371 bp, Homo sapiens
tatgaaacactggaagctcttccatcaaagtcttatggagagtgagatgaatggggaggcctccttgattcatgcctcctcggcataatcactgaatcagacacttcctgaatggataagaggttctgccaccacacaatctgaattcacacgtcatcctctctctctctctctctttgccccttccactctctcttttgctaagcatatcgcctttcctgaccaggaattagcaaacgggtccattgaccaaatccggcccaccgcctgtttctgtacgatccatgacctgagaatagtttgtacattttcaaatggctattgaatataacatcctagatgttgacatcctagatgttgcctcttagctt

SEQ ID NO: 259071 - DNA, 175 bp, Homo sapiens
ggacttcctgttggcccccacctccatgcacaactccagtgctcataggccttaaaattcgcccaaggaagccagtggaggatgtaggcctggctcagaaacagcacagctaaggggccattcccagcagtcctatgattggcgtttctcatgcaaactggatggtggagaaacc

SEQ ID NO: 259072 - DNA, 281 bp, Homo sapiens
cttaagctaactcaagttggtttgattacccacaactacaaattttttttaaatcctggacaaagatgctcacatgggtgtgcatgtgtgggggtgcacacacacacacacatttcttacaattaaaaaaggtttacagacaccttcatctgactagcacattagagcatatcttcccaaatgaataagttatgggaataccacaatattgatcatcttagctctcaatctaattttctgtttgtgtcacaatataaagaatgggaagccctaccacataa

SEQ ID NO: 259073 - DNA, 603 bp, Homo sapiens
ataaataatgttaaattaaactaaatttggtctgaggatgcctcgtaacttgagtcgctacataacaaactgcaacctaacttaggagtattttttttttgtactaacgaggtgagtctcagccaatcacagcagccaagctacagccaatcccatgtggccaactgatcagcctatgcccagtaagacaactgctcacctgtaactactcaagctgcttctggacctcatttccatttgctgtttataagtgctgcctgcccactttgctgagcagaactctctgaacttctttcgtttttgagggttacttgattagaaaattgttctttgttcaattaaattttgctaaatataattcttttaaagattttcttttaacaacaaagatggggatatttgaacaataccttggttggaggtgacattctaatttctaaattgaggctatttgtatttttagcaggacccaaggactgtcacttaaaagcaggctaaaaagccttgaaattttctaactttccatgcgagagcagtgatagataaccccactacgcaaaatgtcatggggcaatgggagacaaaaactaaagctgtgtttca

SEQ ID NO: 259074 - DNA, 290 bp, Homo sapiens
cttaagctcttttgcactcaagaaaaaaataagctcagtttaacacaattttcaatggccatctcaaagtcagataatgcacacaaatacatactacagacactcacaacctcctgagcgtcaccctctatcgcacagaacatgcgcagaaactcccaattttttccgtcccctagtcacatctaacaaaccagttccatgacgattcaatgaattggacagaaatgtccaccagggatgagaaagccacagaagtagaaaaatatccctctatgcgctagtcaagaagg

SEQ ID NO: 259075 - DNA, 908 bp, Homo sapiens
  misc_feature (1)..(3): n is a, c, g, or t
nnngtcctatcatcacaaaactcatgatgctccggctgctcagttccctcctccttgtggccgttgcctcaggctatggcccaccttcctctcactcttccagccgcgttgtccatggtgaggatgcggtcccctacagctggccctggcaggtttccctgcagtatgagaaaagtggaagcttctaccacacgtgtggcggtagcctcatcgcccccgattgggttgtgactgccggccactgcatctcgagggatctgacctaccaggtggtgttgggtgagtacaaccttgctgtgaaggagggccccgagcaggtgatccccatcaactctgaggagctgtttgtgcatccactctggaaccgctcgtgtgtggcctgtggcaatgacatcgccctcatcaagctctcacgcagcgcccagctgggagatgccgtccagctcgcctcactccctcccgctggtgacatccttcccaacaagacaccctgctacatcaccggctggggccgtctctataccaatgggccactcccagacaagctgcagcaggcccggctgcccgtggtggactataagcactgctccaggtggaactggtggggttccaccgtgaagaaaaccatggtgtgtgctggagggtacatccgctccggctgcaacggtgactctggaggacccctcaactgccccacagaggatggtggctggcaggtccacggtgtgaccagctttgtttctggctttggctgcaacttcatctggaagcccacggtgttcactcgagtctccgccttcatcgactggattgaggagaccatagcaagccactagaaccaaggcccagctggcagtgctgatcgatcccacatcctgaataaagaataaagatctctcagaaaattc

SEQ ID NO: 259076 - DNA, 865 bp, Homo sapiens
gacagctctcctctcccctctagcctcaggctatggcccaccttcctctcactcttccagccgcgttgtccatggtgaggatgcggtcccctacagctggccctggcaggtttccctgcagtatgagaaaagtggaagcttctaccacacgtgtggcggtagcctcatcgcccccgattgggttgtgactgccggccactgcatctcgagggatctgacctaccaggtggtgttgggtgagtacaaccttgctgtgaaggagggccccgagcaggtgatccccatcaactctgaggagctgtttgtgcatccactctggaaccgctcgtgtgtggcctgtggcaatgacatcgccctcatcaagctctcacgcagcgcccagctgggagatgccgtccagctcgcctcactccctcccgctggtgacatccttcccaacaagacaccctgctacatcaccggctggggccgtctctataccaatgggccactcccagacaagctgcagcaggcccggctgcccgtggtggactataagcactgctccaggtggaactggtggggttccaccgtgaagaaaaccatggtgtgtgctggagggtacatccgctccggctgcaacggtgactctggaggacccctcaactgccccacagaggatggtggctggcaggtccacggtgtgaccagctttgtttctggctttggctgcaacttcatctggaagcccacggtgttcactcgagtctccgccttcatcgactggattgaggagaccatagcaagccactagaaccaaggcccagctggcagtgctgatcgatcccacatcctgaataaagaataaagatctctcagaaaattc

SEQ ID NO: 259077 - DNA, 568 bp, Homo sapiens
  misc_feature (14)..(14): n is a, c, g, or t
  misc_feature (44)..(44): n is a, c, g, or t
  misc_feature (90)..(90): n is a, c, g, or t
  misc_feature (95)..(95): n is a, c, g, or t
  misc_feature (141)..(141): n is a, c, g, or t
ttcaaaggtttttnaaaggcaggcggcccaaggttgggggagangccgttccaaggtttgcctttaaattcccttccccggtgggtgaanattcntttcccaaacaagaacaaccctggtaacatcaccgggctgggggcngttttttataccaatgggccactcccagacaagctgcagcaggcccggctgcccgtggtggactataagcactgctccaggtggaactggtggggttccaccgtgaagaaaaccatggtgtgtgctggagggtacatccgctccggctgcaacggtgactctggaggacccctcaactgccccacagaggatggtggctggcaggtccacggtgtgaccagctttgtttctggctttggctgcaacttcatctggaagcccacggtgttcactcgagtctccgccttcatcgactggattgaggagaccatagcaagccactagaaccaaggcccagctggcagtgctgatcgatcccacatcctgaataaagaataaagatctctcagaaaattcaaaaaaaaaaaaaaaaaaaaaaaaaaaaaac

SEQ ID NO: 259078 - DNA, 903 bp, Homo sapiens
  misc_feature (1)..(3): n is a, c, g, or t
nnngtcctatcatcacaaaactcatgatgctccggctgctcagttccctcctccttgtggccgttgcctcaggctatggcccaccttcctctcactcttccagccgcgttgtccatggtgaggatgcggtcccctacagctggccctggcaggtttccctgcagtatgagaaaagtggaagcttctaccacacgtgtggcggtagcctcatcgcccccgattgggttgtgactgccggccactgcatctcgagggatctgacctaccaggtggtgttgggtgagtacaaccttgctgtgaaggagggccccgagcaggtgatccccatcaactctgaggagctgtttgtgcatccactctggaaccgctcgtgtgtggcctgtggcaatgacatcgccctcatcaagctctcacgcagcgcccagctgggagatgccgtccagctcgcctcactccctcccgctggtgacatccttcccaacaagacaagctgcagcaggcccggctgcccgtggtggactataagcactgctccaggtggaactggtggggttccaccgtgaagaaaaccatggtgtgtgctggagggtacatccgctccggctgcaacgtgactctggaggacctcaatgcccacagaggatggggctggcaggtcaggtgacagctgtgctgggtggtgcatccatctggagcctacaggtcattggagctccgctcacgcagtggggcccatagcagcataaacaggcagtggggggatcgacccatcgaagaaaagaccgaatcgaaaaaaaaaaaaagggggccgccaattaacgggggccggaagccgcaaccgacgcggccaaacgcggcagcacgtgacgacccccatgcccaaacgcgcggcagcgcgacgac

SEQ ID NO: 259079 - DNA, 337 bp, Homo sapiens
  misc_feature (1)..(3): n is a, c, g, or t
nnngtcctatcatcacaaaactcatgatgctccggctgctcagttccctcctccttgtggccgttgcctcaggctatggcccaccttcctcccacagaggatggtggctggcaggtccacggtgtgaccagctttgtttctggctttggctgcaacttcatctggaagcccacggtgttcactcgagtctccgccttcatcgactggattgaggagaccatagcaagccactagaaccaaggcccagctggcagtgctgatcgatcccacatcctgaataaagaataaagatctctcagaaaattcaaaaaaaaaaaaaaaaaaaaaaaaaaaaaac

SEQ ID NO: 259080 - DNA, 939 bp, Homo sapiens
  misc_feature (1)..(3): n is a, c, g, or t
nnngtcctatcatcacaaaactcatgatgctccggctgctcagttccctcctccttgtggccgttgcctcaggctatggcccaccttcctctcactcttccagccgcgttgtccatggtgaggatgcggtcccctacagctggccctggcaggtttccctgcagtatgagaaaagtggaagcttctaccacacgtgtggcggtagcctcatcgcccccgattgggttgtgactgccggccactgcatctcgagggatctgacctaccaggtggtgttgggtgagtacaaccttgctgtgaaggagggccccgagcaggtgatccccatcaactctgaggagctgtttgtgcatccactctggaaccgctcgtgtgtggcctgtggcaatgacatcgccctcatcaagctctcacgcagcgcccagctgggagatgccgtccagctcgcctcactccctcccgctggtgacatccttcccaacaagacaccctgctacatcaccggctggggccgtctctataccaatgggccactcccagacaagctgcagcaggcccggctgcccgtggtggactataagcactgctccaggtggaactggtggggttccaccgtgaagaaaaccatggtgtgtgctggagggtacatccgctccggctgcaacggtgactctggaggacccctcaactgccccacagaggatggtggctggcaggtccacggtgtgaccagctttgtttctggctttggctgcaacttcatctggaagcccacggtgttcactcgagtctccgccttcatcgactggattgaggagaccatagcaagccactagaaccaaggcccagctggcagtgctgatcgatcccacatcctgaataaagaataaagatctctcagaaaattcaaaaaaaaaaaaaaaaaaaaaaaaaaaaaac

SEQ ID NO: 259081 - DNA, 883 bp, Homo sapiens
  misc_feature (1)..(3): n is a, c, g, or t
nnngtcctatcatcacaaaactcatgatgctccggctgctcagttccctcctccttgtggccgttgcctcaggctatggcccaccttcctctcactcttccagccgcgttgtccatggtgaggatgcggtcccctacagctggccctggcaggtttccctgcagtatgagaaaagtggaagcttctaccacacgtgtggcggtagcctcatcgcccccgattgggttgtgactgccggccactgcatctcgagggatctgacctaccaggtggtgttgggtgagtacaaccttgctgtgaaggagggccccgagcaggtgatccccatcaactctgaggagctgtttgtgcatccactctggaaccgctcgtgtgtggcctgtggcaatgacatcgccctcatcaagctctcacgcagcgcccagctgggagatgccgtccagctcgcctcactccctcccgctggtgacatccttcccaacaagacaccctgctacatcaccggctggggccgtctctataccaatgggccactcccagacaagctgcagcaggcccggctgcccgtggtggactataagcactgctccaggtggaactggtggggttccaccgtgaagaaaaccatggtgtgtgctggagggtacatccgctccggctgcaacggtgactctggaggacccctcaactgccccacagaggatggtggctggcaggtccacggtgtgaccagctttgtttctggctttggctgcaacttcatctggaagcccacggtgttcactcgagtctccgccttcatcgactggattgaggagacatagaagcatagaacaaggccagtggagtgtgatcgatccaatctgataagataagattctcg

SEQ ID NO: 259082 - DNA, 987 bp, Homo sapiens
  misc_feature (1)..(3): n is a, c, g, or t
nnngtcctatcatcacaaaactcatgatgctccggctgctcagttccctcctccttgtggccgttgcctcaggctatggcccaccttcctctcactcttccagccgcgttgtccatggtgaggatgcggtcccctacagctggccctggcaggtttccctgcagtatgagaaaagtggaagcttctaccacacgtgtggcggtagcctcatcgcccccgattgggttgtgactgccggccactgcatctcgagggatctgacctaccaggtggtgttgggtgagtacaaccttgctgtgaaggagggccccgagcaggtgatccccatcaactctgaggagctgtttgtgcatccactctggaaccgctcgtgtgtggcctgtggcaatgacatcgccctcatcaagctctcacgcagcgcccagctgggagatgccgtccagctcgcctcactccctcccgctggtgacatccttcccaacaagacaccctgctacatcaccggctggggccgtctctataccaatgggccactcccagacaagctgcagcaggcccggctgcccgtggtggactataagcactgctccaggtggaactggtggggttccaccgtgaagaaaaccatggtgtgtgctggagggtacatccgctccggctgcaacggtgactctggaggacccctcaactgccccacagaggatggtggctggcaggtccacggtgtgaccagctttgtttctggctttggctgcaacttcatctggaagcccacggtgttcactcgagtctccgccttcatcgactggattgaggagggaggatagagagacatgccagacaagaggctgcctggtgggggacagaccatagcaagccactagaaccaaggcccagctggcagtgctgatcgatcccacatcctgaataaagaataaagatctctcagaaaattcaaaaaaaaaaaaaaaaaaaaaaaaaaaaaac

SEQ ID NO: 259083 - DNA, 659 bp, Homo sapiens
  misc_feature (1)..(3): n is a, c, g, or t
nnngtcctatcatcacaaaactcatgatgctccggctgctcagttccctcctccttgtggccgttgcctcaggctatggcccaccttcctctcactcttccagccgcgttgtccatggtgaggatgcggtcccctacagctggccctggcaggtttccctgcagtatgagaaaagtggaagcttctaccacacgtgtggcggtagcctcatcgcccccgattgggttgtgactgccggccactgcatctcgagggatctgacctaccaggtggtgttgggtgagtacaaccttgctgtgaaggagggccccgagcaggtgatccccatcaactctgaggagctgtttgtgcatccactctggaaccgctcgtgtgtggcctgtggggtgactctggaggacccctcaactgccccacagaggatggtggctggcaggtccacggtgtgaccagctttgtttctggctttggctgcaacttcatctggaagcccacggtgttcactcgagtctccgccttcatcgactggattgaggagaccatagcaagccactagaaccaaggcccagctggcagtgctgatcgatcccacatcctgaataaagaataaagatctctcagaaaattcaaaaaaaaaaaaaaaaaaaaaaaaaaaaaac

SEQ ID NO: 259084 - DNA, 296 bp, Homo sapiens
ggaaaataatcaaaacaagaaaatagttttgtgacaggtgaaaaattatctgctattcacatttcagtatccatttgttgttttatttgaacaccgatgtggcagacagaattctaaggtagccccaatattcccatggcctggtatagacactctgtataatctctcctctactcaagtgtgggtgggactgagaatatgatggggtgtcactcccgtgattatgttactttttatagcaaaggtgacaagattttgcagatagaattaaagttcataaccagttgattttgagt

SEQ ID NO: 259085 - DNA, 548 bp, Homo sapiens
cacttatctcctttggttcccagtgacagattcagaggcatacgcagatatacaattttcaggctctagttaatcttcttccaatagttacgaacaatgggctaacaggcgtgggtgtttctccaaaaattattcatgcacaaggcagcccaaagcttcagggaaaactagaaatgtgttatggattagaataggactgttttaaaatgctagtaccaggtggaacgctatttctgcaacaggactctgtccatttcctttggaacaatatattccaagtaaaatggctcttccaaggaatgacacctttacttgacacccttcggcatacaaatgattttaccaatagccatgattattattaaggccttttaaaatacaggctgtttgaaaaaagacagattaaatattcacagcctttgtatcatggttatttgcttaaaacagcttttagaagtacaagtaataactttttgataagaaaccccaggagaaactttttggtaagaaacctcaaaaaatttgaacaaaggcattacaaaaaaaaa

SEQ ID NO: 259086 - DNA, 368 bp, Homo sapiens
ggcaaccgcggctcttgctggaagccaggacccatcgatgaacttgtccctcctgggcctccagcccctgagaatgcaggtcccatgggactggggaggggggcactgattagccccaaccgctgggcacatttgcctggagcaccagagtcacccacagctgccttgattctcccccaggcttaggaaggaaacccaaaatgaaatgcggggtgtcggaaggtgaagtttacccacccctctccccttcccttccccaccccagagccactcggttgcaaccctgttcatgctcacctcaccctactcctccctctcctgttctatttttagactatttattgttttaaataaaataaagcaagtgg

SEQ ID NO: 259087 - DNA, 681 bp, Homo sapiens
gggcgggctagcgtcccgctgctgcgctggttccggagcccttcccttgcctctcccagggtccttctcccagcgtcggaggaaggcccgcagtctgcgagtggagtgcgggtggtgggaatccctgggaggattacgaaatccttaaagtgggatttaccaaacgcattcctttccgctcacttccgttcccgcttaacaaacgtgttggaaacgtgttgctactgaaaggaagtggcgctgggctgcattttctgtggctagtctgcgagaaacagccctggaatagggcctctatttcttccttggagcatccctccccgggacctgggagttgaaactctaggctaaagcaactgaagcaggcccaggactgggtctctgaaattcatggtgtctctacgctgagttaaactaagtttttcagaaaatgtctaactaggctaaagaccttgtgcttcagagtgttttgagaggagagtttggggaaaagggctctctctagaaggtaaatttgtatgggagatggggagtgtgtgtttacacggagtatcgggcgtctttcttatgggtggacattgtggataagaatgagatattaaggcagaattagctgggcttttaatcccaaacagtgttttaaaaataaaaactatatatttaaggtgtacaacatgatgt

SEQ ID NO: 259088 - DNA, 348 bp, Homo sapiens
taacaagtatcttggctttgctttgggcaaaccacttttgtctttgaatctcgggattcttatttatagaaactaggggttaaggttcctctcactttatgtgtttcaggatcatatttaaattgtataatctgttgtatttcaccgacctagattaagtagttaacatgtacatctttctacccaggatgaactttttgcttatttattttacagtttgtaaagatgtctcttttttgagatacagtagccaaattccacatcacatttagtttgtagaaccgtcacaaattctgtaagagcaagaaaatgctctgtatctaaaacctcattttaaagaatcagtcc

SEQ ID NO: 259089 - DNA, 563 bp, Homo sapiens
gaaagaccacatatcaaaattgaagacatgaaaagatagagtatattcttggttagaagacaactctgtaactgagcttgggattacaataaggagtaggtttgagaagtggaaaaatcggggttccattttggttgtgttgagtttgacgtttcggggagaggccttaggcactggagaagtgagtgtggagcactgtggagaggtcagcatgaaagttatgaattggagcattctcaacatatgtcacttagcaacagcgtgtagatgcagaaaggagaggaacctaggacagaaacctgaaccttccaacatttatggattagctgagagtgaaaagccaccacagaagactgagaccaaaccaaatggccagtgaaaaggatggaagagtatgagtgtgaaattctggaagcaaaggacaatcaatttgttcaaagagagaatattcattctgtattcccagtgcctggcccatggtaagaactcaataaatatttgttagatgaatgaaagtgtgaaagaagaaatggaattttcctagaaagatatattttataaaa

SEQ ID NO: 259090 - DNA, 451 bp, Homo sapiens
caagaaatctagtgaggtttgccacccagatttagcaaataaaaatgcaaagtgcccagtcaaatttgaatttcaggtaaatagagaacaaatttttagtgtatgtcccatgcaatatatgtggaattcaaatttatttgggcatcctgtatttatgtggtaaagataacagggtcaaaatatttcagaacctttacaggattctgaaattgaaacagcatttcaatttttcctgcttccgtctaagaccttttagttttcaccgtcgtcttctaggtcattatgctgaaggctctggtcataggtaagacccaaggagtccatttccaaaatgataatatctgtaattttagttctaatttacataattaaaatttacacttatataaatcctttccacaatagaatatgatgggtggttcctttttgaacataaaaaggtattttatgg

SEQ ID NO: 259091 - DNA, 544 bp, Homo sapiens
attacaaatgtatttgtgcgtgcatgtgcacagacatgtacatgaagagaaggattgtgtgtgtgtgtctgtataatcagttttcagttatcttctgaatgtagggaagccatgtcagatgcagatactgggttgtcagaaaacaagttatctttcgttttcaactgcatggtgtacttttttattttccaagtagatttacatttccaagttgatatttcctaaatactaattagctggaaattgggggagatcatcttgtcatgtactgggtagtaggagggagcctagactttaaacttgattgttgataacttatggaatatgtaggtaagttgctactgaaaaatataggcagcttgataaaacacagtggctcataatcaagtgctggctaatgtcagcatctagaacagcttcttacctatgacagatgttgaactgatgttgagtttaatgtccgtagttaaagtcaagcagttagcaaataaataaaagcaatcagcctttattctcaaagtttggtttagatacaggcttcttt

SEQ ID NO: 259092 - DNA, 945 bp, Homo sapiens
tcaaaaaaaaaaaaaaggtaataatgtgaggtgatggatatgctaattagcttgattatgataatcatttcacaatgtattcatatatcaaaacatcatgtgtacaacttaagtatatacaatttttatttgtcaattatatctcaacaaagctggaaataaaagaggaagcttctttaaagatgtgtctatgatttcccagtgacatggatcatttaggattgtaatcaaccattgaaactgttagttagccaactaaatctcttatatacaaatagaaaccttgaatctcataaaatcaatacttaatgaatacctactgcatgctgagttccagagacacatgaataaaggcgatgtaggctgtgaccttattatactgggctggattctgtggggtgggactgagtagaggggatgactcgctttatctgggggcatcggggaaggctttctaggggaccagtctggatcttggaaaaagcagagagctactttatgctttaatctgcattaaaattgtccagtggtaaagcttgatatgctgtgtggatggtaaatgtttcttacttaatcagaaaagcatcctaagagtgatggattctaaattgatttttactgcagtggatgcatacaaaatgaatgaagggaattagtctatagttcccccacgcccctaccctaagagatagtttgtgtgaaagattatacatgagtgaggaaacaacagggccaaacctgaaggatgaaaactgattgacggacttgagttgaaaataaaaacaagcaggacgaggctgcgattgcaatgtgaagtcagcatgcatctactgtaatttattcaaatccaaccactctccaagctgtaaattatatataacctagaaaatcacacctataattattctgaaaattggtgaataaaagtataagcctagtgaatcc

SEQ ID NO: 259093 - DNA, 290 bp, Homo sapiens
  misc_feature (2)..(2): n is a, c, g, or t
gngcccaggagtttgagaccagcttgggcaacataataagaccctcatgtcttaaaaaaataaaaaaaataaaaactaaaaactttgtgtattatatatgctcagtaaatgatagttctcttatctttcccactattattggttttaaagaatggtgtagacaggttttccttaaatggcctctgttgttctcctttctcccaaaatattcattattaattttgtctaattttcattaagaaatttgtaggtattggagtaaacctttgttcacttcttttttttttttt

SEQ ID NO: 259094 - DNA, 744 bp, Homo sapiens
acttgggctctcgaaatgtgactgtgggtggcatgaagggatggaacttggagcttgattcacttcgctgccgctctggccagcaccgctcaccgtcagttccatccgaggctggctgtccaggctgttcatgacgcaggccctgttgcacggtttccttatagagtccagagtcagctcactcctccattacgtcgcacatccacaaaggaggggaaggagaggcagcggcatcgctgcccgccgcacggacggatcaccagcagctccgatgaaggcggaggttttaaactacagttgtgtctaagatgaagtttggggattaggtgtctctgctttccattaccccagacagaagtgtgctggcagaatgtctgccctcggagccagctggctggccaaaggtgaaaggagaggaggagaaaaagaggcgtctatcaatccactttttccatcagcacggtcctctaaggtagactgctggcctctctgtcacgcccccggaaactgaagctctgggatgtgtcggagttacccaaggacacagaaagccttgtccccaagggcctgtcctagattgtgagactgttggtatatctgctctcagcgctaacaataaaaaatagaaaagaaaagcccacagtgtaagtcttaaatttgagggaaatgctgtattggcttaggactgagaaatagatgtttgacatctagatagaaatatcccaaataaaagttgtcaccttg

SEQ ID NO: 259095 - DNA, 283 bp, Homo sapiens
atatatctctctatatatttcacttttaatattcagggggaagaaatcgtcataagtgaaaggttattttccatgaaaatgtggcccacaactcgtgttgccatgcagaaccttctgcttactcaatattgagtgctggaaaatgacagaatggcctctgtggacctgaaaattggaatgatcttcctatttgtgggcagcaagccacccagctgccgaggcaagagaccgagggcacgagctgttccagcataataaaatatataaaacaacaagagttata

SEQ ID NO: 259096 - DNA, 675 bp, Homo sapiens
gggagagagagctggaaaaagagaatttctaactcaaaatctctgaacatgtgtaggcctttctttggctttagctttgacttccatccatcaattattattttttgaagtttgaagccctgcatgatgtaactaaccagaaacttctcccttatgacccttccagcatctgagacccactttccaaccattccttctgccctgcctcctttacaataactcctgtttttgaattcatccctatgtaagtgggagcaaagctggatctagcaaggaaacttgccaatagatcagaccaaggtaggagagaggtttggttcccagccatgtgcctttgggtggtcttattaatagtcaggtttggtactgattactgcctagggtttccctggcactgaaagttggcagaactctgccttatctggctagcagaatgtctcccaccctaagcaatttcctctctgaggtggaaaccaggggttgcactccctgacatgttaataaactaacatgataattaggtgacaggtcacaggttccatgacacataaagaagacaacaccactctcaggcaaataacatgctgtgggaattaaaatgttttccttctcatggttgacaatctaggacatattcattagcaatgatacaggggaaaagacaaatgcaaaatg

SEQ ID NO: 259097 - DNA, 410 bp, Homo sapiens
gttaaggggagacaacaatgactgcacggggtcttctttcttggcaaaaaacctgttatctggcatgaaagaagcaatttcaatatgctggttgatgattctacaatggggacatgtacttagttacagaggtgggctttatccaatagattcccagagtccttgatactggtttttcgatggacacacatttgttcaagaagttttggacctctcaggattgcactggaaatcttcaattatctcccttgaaatcagagtggcaatgtgaagatcagttaagtaggaaacgcttttgtacaaaaagcaaataacaatttaatcattcttaattttctgtgtatggtactgactttgacataatgaaaatcaaggtaagttttaccattgttctcatttttaattgtagc

SEQ ID NO: 259098 - DNA, 727 bp, Homo sapiens
cttcttgcctcacctaataatagtcacgagatcaagatgaaactaccagaactcagttgatctaaaaatagatagagtctcgtcaggccagctgttaagaaaatgagagtaaaggaatgctcagccagaactgaataattaaactctgcaatgatcatgaaatgtagaggactaagtcactggtctgagtggcaggcagttggacccgagcagggagacagggagtaaaactgaaagtgctatcaatatcaagaagagtcactcagaagcatagtattcaagttgacaggcaaaactttaaattttaaatagagtttctaggttggatacatgcaggaagtcagaaattcacataagctgttgtagaaggagagatagattcacatacaatggcagccatttttaggccttttactagaagctagaaaatgagaggggagattacaaacgagaaatcctaaaagaatgtagtaggggaacttgtagccaaacacctaaaacatctgatacaataattattacataattaaattatctaggaatttgtataatagggtgttggaagaaaggatataagacaagaatatataattttatttaatataataccctaaatcctggtcaaataaagcaagtgaaagtaaaataaaatgaatttactacaaagtatttagttcctaagcaaaatatttaaaaacacatttttccgtctacaattaccatctag

SEQ ID NO: 259099 - DNA, 379 bp, Homo sapiens
aagatgttgcccaggagggagtgcaatggtgcaatctcggctcactgcaacctccacctcctgggttcaagcgattctcctgcctcagcctcccgagtagctgggattccaggcatgtgccaccatgcttggctaattttgtattttcagtagagatgaggtttctccttgttggtcaggctgttctaactccggacctcaggtgatccgcccgccttggcttcccaaagtgctgggattacaggcgtgagccaccatgcctggcaaaatccaatttctttaaccaatatatggctacttagattatctatttcttcttgagtgagctttggtattttgtgtctttcaagagatgcgttcattttatctaattctcgtg

SEQ ID NO: 259100 - DNA, 694 bp, Homo sapiens
gaatatttaatgtaataagcattttacaagcattacctcccattattatttcaatcctctgaaataggaactctcattagttctgttttgtaaacaggaaggcctagcctcacagagttaagtaatttttccacagcggtattgctcgtcagaggtgaacagaacctgaactccagttttggaacatttagagaaaaataaaaaggagagtcaatatatttcttttttgtgggtttctttttaaaaagtgcaacttacttttgatctggaataatcatattgcattaaagtattttctcttcaagtctcaattaactacacccagtcaattataatcattgaaatatttagatgctgagttttaataatacaattcatggggtcatttatgacaatttatcatattcacttagcaatgacacaatttcacgggtgaaatcatgataccaggattggacaaaataaataaataaaaagatctggccatattttcactgctttgtgtttcctcctttgaaattggtccccagcaataaagtattaagggccgatagacactggcaagaatgctcaaactcactaacattaaaataaatgtaattaaactttgatttaaaaaatgatgattcatattagtaaaaaattgaaaaagtcttaatgttgatatgttgggaataatatgtttggagggaaa

SEQ ID NO: 259101 - DNA, 448 bp, Homo sapiens
atgaatcattgcaggacagtatttcctggcatcgagctctgtgcaccagagaccacgctgcaagcagataggagctgattgaccttaagtgactctcaatctaataaagacaaggccagaaattttggtctagcaacactaaagccagtgatttggaatttcagctcacagatcctggatcttctgctttgaagaaagtttgggctttggcagaatcgggtgctattagcccaaagaatgaagctcatgacttaagagtttccatcacgactcttgtcaggggaagcattctttcccaggcacacctctctttgtctctgggtttcaggagcaaaagttctgcaagagtctctaaggtgagtcagtgcctgtgagccctggttgctcttccaatttaagacctcagggttgaaataaagccagactatggagcaaaccctaatccctt

SEQ ID NO: 259102 - DNA, 658 bp, Homo sapiens
cccagacaaatctcattttgtatctcccagaattcccacatgttgtgggagggtcccagtggaagagaattgaatcatgggggtgggtctttcctgtgctgttcttgtgatagtggagaagtctcacgagatccgatggttttaaaaactaagtttccttgtacaagctctctcttctcttgtctggcactatgtaagatgtgcctttcaccttctgccatgattgtgaggttttcccagccatgtggaactgtaagtccaataaacctatttcttttgtaaattgcccagtcttgggtatgtctctttttcaccagtgtgaaaatgactaatacagtttccatctgacggtactaatacagtttccatctgctgttgtcatagtgtagcaaagacaaagtcagaagacctggatttgatccaggatccaccactgaatagcttggttaccttggtaagtccacttaactaagccttaatttcctcatccacaacatgagaaaaataagtcttcatgatttttttttgtgtgacatcaaacacaatgtatgtagtatatactatggaagatatagtaggtactcaattaatcactaaatattattactattattactttcaccattattaactacttttccactattcaaggtatttt

SEQ ID NO: 259103 - DNA, 492 bp, Homo sapiens
catcagaatcatctggaagaattgttaaaagagaattgctggtccccaaccccagagcctgtgattgaataaagctggggttgaggtcttagcatctgcatttctaacaactcccagcacctgaggctgcagatctggggctcacactagaagactcacttctctaaaccacttgttcccccgtcttatttccctgacttagcctccttgtctccactcccatcttacttcattctactccagccacactggcctccttgctgtgttgagcctccctgggcacatgccttaggctactgctttgtctgcactcggattcgtaacacttactccctcacccctcagtgagacctaccccaatctccctacccttttcagaatttattctccacaacacgtaatcaaccttctgacatgctgaataatttacttattacatttattgttttgctctctctctgctaataaaggaatgacacccttaagacatca

SEQ ID NO: 259104 - DNA, 419 bp, Homo sapiens
gatacattgggcagtagggaggtctgaagtggccgtgtgcaaaccaatcatggaaagacggactagtggacaggacacacacgtgaaggataaagaggccacaacggggtgaagttttttgataaggagcgggttgggccaggtgcggtggctcacgtatgtaaccccagcactttgggaggccaaggcaggtggatcacctgaggtcaggagttcgagaccagcctgatcaacatggagaaaccccatttctaataaaaatacaaaattagctgggtgtggtggtgcatgcatgtaatcccagctactcgggaggctgaggcaggagaatcacttgaactcgggaggcggaggttgcagtgagccgagctcgcaccattgcactctagcctgggcaacaagaccgaaactctgtctca

SEQ ID NO: 259105 - DNA, 702 bp, Homo sapiens
gtgattctaataggccaatcaatcatccacaagagtaagaacttcacactggcagaggcaaagtctggatgacctgttccatgaggtcacctccccttgccttctcccatgcattgtcatggagctccaataacagcttcatgctccatccacctcagtccacacagaggtctctaacagtcaaatgttagttttctttgaagaaccttaaaaaatggctatttgcacaagcttcttaaagtctgacaaaatcaaataattgaaatagtagagaataaagtgagtggattcaaaaaatccacatgccccaaaaaagaaattccatgagtgaataatctgagaaaatgaaaaccagaactaaacaagtaaacatgttcttcttccttgtatccaaaatttaagtagattgtcactttcttccagaaggcacttcacatagtagcctttggtaactgctgactttacagagagatttattggaggtaggaaagctgtaatcactgccttgccaaagcagtaaacataagggatttactttccataacaatttacttgtatatttttaaaaatacttcaagaagaatgtgcattcgaagaatatttcatggaaatgagtataagatgctaattataagtttgggaacttaaaagataccacatatttaacacaaaattactgtcaaaaattgtcctacatggtgg

SEQ ID NO: 259106 - DNA, 321 bp, Homo sapiens
cacaagctggagaagtagtctaccacattgctgcagttgctgtcgtgtataatcggcagcagcactcccagaggctgtacctggggcacgatgacgacattctcagcctgaccatccatccagtgaaggactatgtggctactgggcaggttggaagagatgctgctattcatgtgtgggacacacaaactctaaaatgtttgtcgctgttgaaaggacaacatcagagaggagtgtgtgcacttgatttttcagccgatggaaaatgtctggtgtcggttggtttagacgattttcacagtattgtattttgggactgga

SEQ ID NO: 259107 - DNA, 783 bp, Homo sapiens
tgaatgacatctggcaaaatcccaggaggcacctccaacctcctgtgactttacaaaaggcctagtctaggttcctgattgccttacaactttcctgtgaatctgatgaggaggaagcgtgaaatacacttggctagaatggagaccgtgagtcccaagtcaggcctccagtcactgcccttccatcttatgccacacaccttccgaggggcgaaggaaaacatgagtagaattagtatattttggtctcacagatatttgtgagcatcacgaagccattcccctaattgctcttggttgagagattacaacagcccttgctgcaaaactcccccacaacctaacctttcagagtccaatcttgcaaagctaactcagggagagctttgcttaaattactgggctagtattatgtgagtgtgaagttgccaaggaaaatgagtcagacactaatccctttgctaggagatgagagaaaaaaaaaaaaaggctggcagacctttactattttaattacctgcttccagaacaataaaagagaattcagatcttccacttaacagtcgtgcccttcttatattcccgtaaagtacctgcactatttccttaagatgtaagccttgggcttttttcctttcaactgtgttcaagctatagttccgaccattcgattttggacaaaaataagaattaaaatttcctttgctggttttagttacaaatattggaaccaatgaacatttaaaccttgtttctttcttgaaagatttttcagagttttaa

SEQ ID NO: 259108 - DNA, 579 bp, Homo sapiens
tgattagcggtaagatctcactatgttgcccaggctggtcttgaactcctggaaagtgatccttccctcttggcctcccagagtattgggattacaggggtgagccactgtcccaccacagttttttttttcttatggccagctcttatacagaaataacagatacaccccattcttcttaagactcaccacagcgccccttgctgcctctagacccataaatacctagggtgaaatcagcttgctccaggtgaacaggtgccagctaggacctaggcgggagcagcttttacactataagaatgacaaggcttcgcaaatatacagagtcagaaacttggggaatgtgtgcagaaggggattttaaggatgttacaccaatgagggtggatgtaacactagctcaggccaaatttactggcatgagtgcgctttctagagcttctggatttcatgggttaccttgtgcagctggacgtagttctaatagcttgcttgggtgcctaaccggaacttggatccaacagtggcctaaagttaatgaggcagagagaccagaactgccctagcataagatgg

SEQ ID NO: 259109 - DNA, 686 bp, Homo sapiens
ctgtgaacattcatgtgcaagtattttgtgaacttaagttttcaattctcttggctatattcctgggagtggaattgctaggtcatatggtaactttcccattttgagggactgccaagctgcttgccaaagcagctgcgccattttacattaccaccagcaacatgtggaggttccaatttctgtacgtctttgctaacacttgttattgtctatcctttttaattatagccatcatagtgcatatgaagtggtatctcattgtagttttgatttgcatttctctgatgactaataatagtgagcatcttttcatgtgcttattagccgtttgtatcaaatcctttgctcatttttaaattgaatttttaaaattattggtttgtggcagggcatggtggctcatgcctgtaatcccagcactttgggaggccaaggcgggtcggtcacctgaggccaggagttcgagaccagcctggccagcatggtgaaaccctgtctctactaaaaatacaaaaaatagtcagacatggtcacaggcatctgtagtcccagctacttgggaggttcaagccggagaatcgcttgaacccaggaggtggaggttgcagtgagcctagatcatgccactgcactccagcctgggcaacagagtgagactcaatctcaaaaaaaaaaaaattatt

SEQ ID NO: 259110 - DNA, 615 bp, Homo sapiens
tcaaccttttgccccttatttagcccccaccctctaattccccccacctaaagggagaggctggatacccctacgagtgccccggtcccgaaattccccgactacctactaataaaattagcgcccggtcgacggtaattgccatccttttaaattaaacccatcatagtgcatatgaagtggtatctcattgtagttttgatttgcatttctctgatgactaataatagtgagcatcttttcatgtgcttattagccgtttgtatcaaatcctttgctcatttttaaattgaatttttaaaattattggtttgtggcagggcatggtggctcatgcctgtaatcccagcactttgggaggccaaggcgggtcggtcacctgaggccaggagttcgagaccagcctggccagcatggtgaaaccctgtctctactaaaaatacaaaaaatagtcagacatggtcacaggcatctgtagtcccagctacttgggaggttcaagccggagaatcgcttgaacccaggaggtggaggttgcagtgagcctagatcatgccactgcactccagcctgggcaacagagtgagactcaatctcaaaaaaaaaaaaattatt

SEQ ID NO: 259111 - DNA, 810 bp, Homo sapiens
ccctggctacacttaccaccgaggagggagtggtgtgtgatgcaggagtaacaaaggcgttgaaggcaccacgtgtgtaacaggcacgcgggagtctgggttagtcagaaaggggaaagcagtgctcaggttgactggaaacataggccggtgaccggagacagcctgaggctccagaacacacaagtgacctgtgaggaaggaaactgagagaccctggagagacaccggtggtgccctctcaggtcctcttgagtgttacgaggacggggaagaaatagagcctcccagccagggtcagccagcacagcctctgtatgtgaagcgtcaggacagcgacggccgggaggaggggatgctaggaagtgagtaccagaagcactagacagggttttgggaagctatatttagctggggacgaagaaggaacaaggaaggaacaggcagatggcatagcacgaacgccgggtggaaagtggaactgctcgctcctgtcgtgtgtgtctcttctccatcaaaaaagaggctcttaaaaatcgaaagcatgccacagatacgatcagaggctctttggaagctgcatttttgtaactggttctcgatgatcctctcccatggtaaagatttggcaccatatgaagtccttgggaggacaaatcttcaacagtagcccatagatgaaacccagatagctgtggaaactaatgtgctctttgaatgttaagtcaggaaagcttgagtggcctggcacgtgagccgagatcgcgccactgcactccagcctgggcgacagagcgagactctgtctca

SEQ ID NO: 259112 - DNA, 692 bp, Homo sapiens
ccctggctacacttaccaccgaggagggagtggtgtgtgatgcaggagtaacaaaggcgttgaaggcaccacgtgtgtaacaggcacgcgggagtctgggttagtcagaaaggggaaagcagtgctcaggttgactggaaacataggccggtgaccggagacagcctgaggctccagaacacacaagtgacctgtgaggaaggaaactgagagaccctggagagacaccggtggtgccctctcaggtcctcttgagtgttacgaggacggggaagaaatagagcctcccagccagggtcagccagcacagcctctgtatgtgaagcgtcaggacagcgacggccgggaggaggggatgctaggaagtgagtaccagaagcactagacagggttttgggaagctatatttagctggggacgaagaaggaacaaggaaggaacaggcagatggcatagcacgaacgccgggtggaaagtggaactgctcgctcctgtcgtgtgtgtctcttctccatcaaaaaagaggctcttaaaaatcgaaagcatgccaccaataaaccaagtgtgatcagggtaaggtacaggaaagaaagaaatatggggaaatgaagtgaatgatcgggtggatcagatgagatacagtcatggggtcaggtgtgtatctggaataatgtggagtccgataaatccag

SEQ ID NO: 259113 - DNA, 435 bp, Homo sapiens
gggctgcaggtaaaataatcactccacgttagtgtctagtagtattagcaagggttggcaaactattcaggagataattgactctacagtttattctgtcccaacaaatgtaggtacacaacaaatgtgtgacagtttattctgtcgtaacaatgtaggtatgcattgaaggtgtaggcttggttgtggcgggagtgagggatctctgtgcatttcctggttccttgaaaataacttgaagtcattaagacaatataagaggtacaacagagagaaaagtgtatttcctttttgatgcagggctatgcatcttagagctctttgtaccctgtgcttttgttccactttccccttctgtccaaaatgctctcagctcatttcccctcttagccaagattgcttggctagagcaaataaaagggaaatcaggaaaaa

SEQ ID NO: 259114 - DNA, 464 bp, Homo sapiens
gtcttattactaaataagcaccttttatatataaaataaatgaatcaggtattgttaacaactggacttagaagttgatttcaaaggtaaataaagtatcaaaggctgattttcttttagaacatcagaataatctacataaatgagtttcatctgcttcaaggcatgagctaccttgagaataccagatatatactttaaaaatgctacctgtagttaaagcatttctagagctttaaaaaacaatacccatgtatttctttaccattaaaggggactgattttggagtcagcagtcccttgggtctacgtctcagaataagacaggtgatgcagttgaaacagcatgcgattgtacggtgccactgcagtgcagcccagtacaatcaacacacagaatggctccctaatcatcctgactgggagggtaaatttgtgtaattaaataaattctataatcctac

SEQ ID NO: 259115 - DNA, 746 bp, Homo sapiens
gaactagtggatcccccggctgaggttttcgcacgaggccaagttcacttagaatgttttcacttgtcatttaacaaacattagacaaagatctactgtgtcaagaacagagatagataataactaaaaagaatgagtctacttagcattaaagataaaaagacaagtaagttatagtcccaatctgtcaggatctcagagtccaataagaaaggcaaacatgtatatacataattataatcaagggctatttgggcagtgagggagtgtgtacaaggtagagggcactgcaagaaaggggataattaactctggtagtggagggaatacgtttctgcaggagtaacaatgtgtgaatagattttaaaagatgagtagaaatttgttaggttttcaatgcagaaaagcactcctggaagcaaacagggagctgtgaaacagcatggcatgttaaggaaaattgcaagtagtgaggtatagatggaaaataaatatgagaggtacaggttacaacaatacggatgggaatgaggggttaatgcttactgatatggtttggctatgtccccacccagatctcatcttgagttggtatctcccacaattcccattgttgtgggagggacctggtgggagatagttgaatcaaggaggtgggtttccccatactgttcttgtggtagtgaatgggtctcacggtctgatagttttatggggagaaaccccttttgcttggctctcactct

SEQ ID NO: 259116 - DNA, 705 bp, Homo sapiens
gaactagtggatcccccggctgaggttttcgcacgaggccaagttcacttagaatgttttcacttgtcatttaacaaacattagacaaagatctactgtgtcaagaacagagatagataataactaaaaagaatgagtctacttagcattaaagataaaaagacaagtaagttatagtcccaatctgtcaggatctcagagtccaataagaaaggcaaacatgtatatacataattataatcaagggctatttgggcagtgagggagtgtgtacaaggtagagggcactgcaagaaaggggataattaactctggtagtggagggaatacgtttctgcaggagtaacaatgtgtgaatagattttaaaagatgagtagaaatttgttaggttttcaatgcagaaaagcactcctggaagcaaacagggagctgtgaaacagcatggcatgttaaggaaaattgcaagtagtgaggtatagatggaaaataaatatgagaggtacaggttacaacaatacggatgggaatgaggggttaatgcttactgatatggtttggctatgtccccacccagatctcatcttgagttggtatctcccacaattcccattgttgtgggagggacctggtgggaccctcaatccacggggtggtcttccctcaaccggcctctccggacggcgtcccgcctcactcgcgcgcgt

SEQ ID NO: 259117 - DNA, 435 bp, Homo sapiens
tgagaggaaaggcagtggggaaagcaagagtgctaatattcttgtccaaaatcgtcatagatttcagagtcactgtgtatgatggttgaaaccagttacagatgataaattagagaaatatttatgcattgttacagggatacaaaatagcaaaaattaagtttcaaagacggacagggggagaagaaggcagaaatagctctggcagaccatcctggactgcacttacctttccatggcaaataaactggacatctttacagatagaagtggcatagttactcctctcccccgactgtcctttgatgggtaaatattaaacaaaatatagcacaaccgtaggctaggatactgctcagtgataaaaagtaatttactactgatacagaccactacctggatgagtccctaaagaattatgccatgtgaaaaaaa

SEQ ID NO: 259118 - DNA, 294 bp, Homo sapiens
ttttagtactccatagcctatccctttcatttagctgggtagtgtggtcaattttccccataacatgcgttctcacataattgcatgtatttctggggtacagtgtgatggttccatacatatacacattgtgcaaccatctaatcagggtaattagcacatccatcaccaaaacacttgtcatttctttgtggtgagaatattcaaaatcctctcttctagctattttgaagttaacattatcgttgagtatagtcatccaaacgtgcaagagaataccaaaacttattcctt

SEQ ID NO: 259119 - DNA, 440 bp, Homo sapiens
tgttttatatacccactttctttactcattgatattacctgcctagtggctataggcattttagtatgtacccacacatgtaacacttgctgatttcttggggtggtagtaggttgtgtcatggatggtaatgactttttcatatgctggaactcttgagccctctggatttgatacccatatcaggtgatgagcttcacttggctcccttggcaccggctaggatctagcctaatcccacgtaattcagtcatctgagacataattagggcaaggtggattaaacactgttcaaaacctgccggataggagatatacatattaaatttatctttcagatgcaacatattagaaattgtactctggatgctgcctgtcagatggcacagtctgcaaaaaagtattgtataagctgcttgaaaaaatgtaatatggtatgc

SEQ ID NO: 259120 - DNA, 472 bp, Homo sapiens
gtgtcagaaaagaagatgcatctacaaaatagtaaaatcatactgtgaacccttacacaaggcttggactaaggaaataaaacacggggagtcatagaagacccagataatcatttaagctcttctgcttagagagctgttccttaagatttctgaaacttcaaacttgatcgtatggaattatcttgcaatcacggggatgaaaacatgttctgttttctcatttcaatgctttggtcatatgtggttttattcagtaactttgctcacattactcttatcttctttggcacattatgagaaattttcagaaaaaaggacacctggaatatgaaaggcagcaaataagaattattctcatatctaaactgatgaaaataatgcatttgcacgtcatgtccttgattaattccaatattaatatcatatatagtccttggaagccaaccaataaacactgttccaaataata

SEQ ID NO: 259121 - DNA, 453 bp, Homo sapiens
aatattttaaaaggctttttataaaaggcaaataaaaagcttaagtgactgattgataagaaaaattgaatctgctgaccttttagttttgtcatcatcctgccctaatagcagaaagaaagctagcctaaagcgtttataaaaggaaaggcttctttttcagatctctccctgctgagtccaggcataaaggatgctttctctgccctattccttaatggagtccactgtgaacccagtaattttagccaagaaacagtagctaagttaaacggaacacctatttaactaaaatacacctttctggaatatgattggctaacctgaaacccttttgtaaaagaaatgtacacctattaaggaatctccatttttaaggatgtctgcctatgtacattggaaattttaccactgttttaaatttacataataaatcgtacttttgtctaaggt

SEQ ID NO: 259122 - DNA, 331 bp, Homo sapiens
aattggagaccatgcaactaccacaacttttagtcatcgtacggattagcctgatgagtatatccacaggaaaaaatgtgtagttctggtaaaatattttttttcagaatcagataaaaggaaaacaataaaatgtggatatccttgttttaaaaaatcaacaatatcattatattgagatctatctatctggatcaaagaaggtattttttggctgtggcagattgcatttttccagtagtggctgcaataatatttcccatcctgcaagttttttgagaaccttgacaaattctcatcaactgactgagtttatattctctcctcttga

SEQ ID NO: 259123 - DNA, 335 bp, Homo sapiens
attaatgtagtataaagaaataggtagattaagccagagtttttgttattggtttttatatttattatatatttatttattttttgagacagggtcttgctctgttgtccaggctggggcacagcagcacagtcacagctcatagtgacctcgatctcctggtctcaaggcaatcctcccacctcagcctcctcagtagctgagactacaggcccatgccaccatgcccagcccgtaccctgtatttcttgaagtgaagaatataaagtctgtatgggtgcagttcctgagtgttctgctcttccctaaagtttatatatttttttagcttaagt

SEQ ID NO: 259124 - DNA, 634 bp, Homo sapiens
acataacagtagaaaaccaaaatttgttgtcatctcttcaaagaatcgagaattgcgtacaaaaaaaaccttacataaattaagaatgaatacatttacaggcgtaatgcaaaccgcttccaactcaaagcaagtaacagcccacggtgttctggccaaagacatcagctaagaaaggaaactgggtcctacggcttggactttccaaccctgacagacccgcaagacaaaacaactggttcttgccagcctctagagaaatcccagaacactcagccctgacacgttaataccctgcacagatcagaggctgctggccacacagactcaccaagccacagacttgtcttccacaagcacgttcttgtgagcagggctgatggaggagaggttcactttttacctgatatatttgtataatgttagatttttgtgtaataagtatgtgttacttcagtaatcaagaaaaagctatcaaatactcctctacccctactcccaaaaaagaaattaaaaagaaaagaaagagttttggtattgtcattatcataaacaccctgttaacagaaacaacacagcagaggtaaggagttggaagagttgtccaggagtcaccaagcctccctggcccaga

SEQ ID NO: 259125 - DNA, 571 bp, Homo sapiens
tgaagtaggagagacatttaattcaaaaattgcaatgaaattgtggtaagttctctgaatgtaggatgtacaaattactttgggcacctggtaaagaaacagaccaacatggcttggctgggtcagagcaacttcactaagatgttatttgaactttctttcataaagataaatagaaattcctgagatgaacagtgcagaatgaagtattcccagcagagtacagagcttccagttctgtgtgtcattaaaaatgagaagaaaattgttgacagtagcagtcttgggattatagggggagacaggagttgtggaattacaggagaggttcactttttacctgatatatttgtataatgttagatttttgtgtaataagtatgtgttacttcagtaatcaagaaaaagctatcaaatactcctctacccctactcccaaaaaagaaattaaaaagaaaagaaagagttttggtattgtcattatcataaacaccctgttaacagaaacaacacagcagaggtaaggagttggaagagttgtccaggagtcaccaagcctccctggcccaga

SEQ ID NO: 259126 - DNA, 528 bp, Homo sapiens
ggaagctcctttttttgtcattcatgtagacttaacattcacatggcctttcaccttacggtggcctccaatagctccaggatgagctttacagctccaaatatagtgaaaggagaatttcttttctccaacaattctaatgaaaattctggcctaattctcactggcccaagttcagtcatgtgcccattcctgagccaatcactgtggtgaggaaaacagatgcataaccaaccttatcctcaggaatcctggaactgggtgaggggaaagagggacagtcagcttcatctaaactatggactgagagttgaggcaagatgattcctgaaagaaaattctaagtcttgctgctataagtggaagagaatggtgggcaagcaaaagcaaccagtgcccacaccaaaggtaaatctaaaacaacatcccatttcagtacagcaagcggttctccttcacacagaggaagctcatctccaagtttttatttggccaggacatgaaccaaataaacaccttccaaagaaa

SEQ ID NO: 259127 - DNA, 425 bp, Homo sapiens
ccccagccatgcagaactgtgagtcaattaaacctctttccttgactggtctcgggtatttctttatagcagtgtgagaacagactgacacaggcaccattgtcatcatggcacaaaagaggacgcatacgcacggagatgttaattaaccagcccaaagtgccacagctcgggagtggcagagccaggctcaagcccagcagtgcggccaagtctgtggccctgcgtgttgcctgttcctccttctgagccaggaaatagtgaggggctgagcctgctccctctgctcgggtaagttgctgcccctcagcctcactctcctcacaggcagtcaggtaagcagcctattcgcagctggggatgtgaggtcaggtgcagccaacatggagacctggtccaggtgaggcgcttctgagctggagcca

SEQ ID NO: 259128 - DNA, 704 bp, Homo sapiens
attacaacagcatgtttgatgagtaatagtcacattttatagattaggaaaattaggtcataaagggttcagtccattggttcattcaccatatattttattctggatcatgtactctactagatattgagcagtcaaatagcaataataacaatagctaacattttattgagaacttactgtgtgccaaacactgttccaagcatttgacattcattgtcttgtttattccactgaacaaccttgtgaaggtggttatcatcatccctattttatgcatgaggaaattaaggcacagaaccatttagaaatgtgcttaagggcaggtggctgggaagtggtgaagacagagtggcttcaggggccaggactctgacatgataccatgctgccaagcttctctctggaagttcagggtagcttgcctcaggtcacacaacagcagtccaggctggttcacctgacccaaagcaagctctttcctcagcatcataatgcaattgcacatagtgaagttggagttctattttgaagaggattgggagccaacaaaaggttttgggaggaaaatgatgtgttcccatcaaaattatgcccatatttcaaagaagggatgggtccttcattggatttattctgactacgagacaaacacatccccataaacacttcccagaggccacacattagtgtggtttatactg

SEQ ID NO: 259129 - DNA, 319 bp, Homo sapiens
attttgagttttgatggcactcctatacgtagggttcactagggcctcatgctttccctacagaccttacgaagttctctccttttccacttctctgtccaggaagtttgcttgtttggtttttgtggggttttttccccctagtggaaagaagaagaggaaaccctggttcccatattatttgtgttctctcaaatctactgtgttgcccacgatgcacaagactgttgccctctttattttgtatatcattctaagagcctcttctttgaaaacatgaaagttaaggggaaaaacatcatttccctctggctctggc

SEQ ID NO: 259130 - DNA, 283 bp, Homo sapiens
tttttctgcacacaccaagcaagaaatcagttccgcagcagacaccagctggaagtcctccgattcaattcggctaccatctacctggagatagcgtcagatcccacagggctcagttccataaagctgccttctcttcagacaccagcgctaagaagattgaaatcccgagaaacaattttctgaagaaatgaaatcatatgccctcctgaactctttgggggaaaatagcctctctgtttgctcagaatatgaaacagtaaaacagtacaagtaaaacagt

SEQ ID NO: 259131 - DNA, 412 bp, Homo sapiens
agaattttcttggaccacatataaaatacattaacacgaagtataatttatgagctaaaaacaaacaaacaaacaaaaaaaaccacaaaaaatcacaaacaaatctcataatattttaagaaagtttatgaatttgtgtggggccacatgcaaagccgtcaaggccacattcaaagccatcatgggctacagggtaatacacccttggtctactacatacagcctggttcaagtatggatactcactcaagctatgtactttttttttttttttacaggattttgtttgttttatctgtctttgtttctttgtttatttttccattattatacatatgtaactaacctgcacaatgtgcacatgtaccctaaaacttaaagtataataaaaacaaataaataaataaaatta

SEQ ID NO: 259132 - DNA, 472 bp, Homo sapiens
gtttgatggtgttctgtaagtctcttaaactatcctcactctttttcattccttctttttgtttctcagattgtatgctttttttttttcttttcctttgagacagagtctctctctgttgcccaggctggagtgcaatggcgtgatctcagctcactgcaacctctgccacccgggttcaagtgatactcctgcctcagcctccccaggagctgggattacaggctaaattttgtatttttagtagagacggggtttcatcattcaagactggccaggttggtcttgaactcctgacctcgtgatctacccacctcggcctcccaaagtgctgggcctgtatgctttttgttgacctgtctttgagtttactgataatttcttcggcctgatctagtctaattttaaccaccccaattgatattttcagctcacttaaagtattatttatctctatgacttctactttgtg

SEQ ID NO: 259133 - DNA, 291 bp, Homo sapiens
cgggactgttgttaaggcagtgtatcatagtttaattggaagtgtttttttcttttttagagatttataaaagtatggtgctgcttacaacttccatgaaaagaatcattggcatataggtagtagttgaagacatgggaatggaggaaacatctaggggaacaaagaatgaagtgaggtctctgtgaataggatctggtatagattctggtgtgtgtgtattttccatttagcagtagaggcagaatgcatacctgctctgactgctaaatgcatgcatttcttgatctc

SEQ ID NO: 259134 - DNA, 445 bp, Homo sapiens
tcgttgtccctggtttctggcacaaagctctaaacccttggaattttgagcaatagagtgttaagagcctcttttgttttagtgaggcaactcttgtacttagcttcagggtgggagctggctgccagaaagaccaagcttgattagaagatcagcatttcctgcaccccctcccccaacctccagggaagggagagtggctggagattgagctgatcaccagtggccacagtcaaacctatggactgaagcctccatagaagcccctaaatgatggggttcagggagcttccaagttggcaaacacatcctcatcccagagggtggtgcaccccatcttgactgagacagtggcttctgcactcgggacttaccttgtcctgggtacttcttcatctggttgttcatttgtactctataataaacggtaagagtaagcacagct

SEQ ID NO: 259135 - DNA, 3386 bp, Homo sapiens
  misc_feature (1204)..(1204): n is a, c, g, or t
aatggtcctctacagatatgaaactggttctggagtgagatgagctcggctggggacgctacttgagaaggcctttccccacagggtgacttaaatgtcccaggctggaaggtggagcgagaagtggatgcccccagggctctgggtcacactccaggatgacttctcggaaccagctggtgcagaaggtgctgcaggagctgcaggaagcagtggagtgcgaaggcctggagggtctcataggtgcttccttggaggccaagcaggtcctgtcttccttcactctccccacctgccgggagggaggccctggcctccaggtgctggaagtggactcggtggccctgagcctgtatccagaagatgctccacggaacatgctgccgctggtgtgcaagggggagggcagcctgctgttcgaggcggccagcatgctgctgtggggtgacgcaggcctcagcctggagctgcgggcccgcaccgtggtagagatgctgctgcacagacactactacctccagggcatgatcgactccaaagtgatgctgcaggccgtgcgctactccctatgctctgaggagtcccctgagatgaccagcttgccccccgccacgctggaggccatcttcgatgccgacgtcaaggcctcctgtttccccagcagcttctccaacgtgtggcacttgtatgctctcgcctctgtcctccagcggaacatctactccatctaccccatgcgcaacctcaagatccggccctacttcaaccgtgtcatccggccccgccgctgcgaccacgtgccctccacgctgcacatcatgtgggctggccagcccctcaccagccacttcttccgccaccagtactttgcccctgtggtggggctggaagaggtggaggctgaaggtgcccctggcgtggccccagctcttccagccctggccccactctcatcgccggccaagaccctggagctgctcaaccgtgaacctggcctcagctactctcacctctgtgagcgctacagcgtcaccaaaagcaccttctaccgctggcggcggcagtcccaggagcaccggcagaaggttgctgcccgcttctccgccaagcacttcctgcaggacagcttccaccgggggggcgtcgtgccacttcagcagttcctccagcggttcccggagatctcccgctcaacctactatgnctggaagcatgagctgctgggctctggcacctgcccggccttgccccccagggaggtgctgggcatggaggagctagagaagctgccggaggagcaggtggctgaggaggagctggagtgctccgcactggcggtgtcaagccctggaatggtcttaatgcagcgggccaagttgtacctggagcattgcatctccctgaacacactggtaccctatcgctgcttcaaacgcaggttccctggcatctcacggtccacttattataattggcggcgaaaggccctccggaggaaccccagcttcaagccggcaccagccctctctgctgctgggactccccagctagcatctgttggggaaggggctgtaattccttggaagagtgaggcggaagagggggcagggaatgccacaggtgaggaccctcccgcccccggggagctcctgccactaaggatgcccctgtcccgttggcagaggcgtctgcgcagggctgcccgcaggcaggtgctgagtgggcatctccctttctgccgcttccgcctccgctaccccagcctgtcaccttctgccttttgggtctggaagagtcttgctcggggttggcccagaggcctgtccaaacttcaggtgccggtccccaccttgggcaaaggggggcaggaggctgaggagaagcaggagaaggaggctggcagggatgtgacagctgtgatggccccacctgtgggggcttcttcagaagatgtagagggagggccttccagagagggggccctgcaggagggggccacagcccagggccagccccacagtgggcccttgctgagccaacctgtggtggcagcagcgggtggcagggatggccggatgctggtgatggacatgatcgctaccacgaagttcaaggcccaggccaagctgttcttgcagaagcgcttccagtccaagagctttccctcctacaaggagttcagtgccctctttcccctcactgcccgctccacatactacatgtggaagcgagccctctatgacggcctgaccctggtagatggctgacagggaggtacaaaaggggctgggaagaagggggaccagtttggagagggtcagggacctgagctgaccccaggcttggccaggatgtcctttgctctgggtcccacagtgtctaccctaagtccaagggtatatttgtgttattttctggctccaggacagagaatgccagaaatcagccatctggtctcccgtaggaaactgtgggaccagagatatcctctttcgttgtttgctggtcatatttttactgttatgatttagtttttggttttgatttgagtgggttggttggcccccttgctggagttggaagccgtatgtatgtcagggggtttagaggggggttggttagctagagctgctttcagcttttcctggagacaaaaggagtgttatagcatgatcatcggtcccactgggcagaacgttatcttcagtttcttttgggggttggcatcctctttactcagttgtttcccaaaggaacattaggctcgaatatgggggccaggtgtggtggcttatgcctgtaatcctagcgctttgggaggccaaggcaggaggatcacttgaggctaggagttagagaccaccctgggcaatgtagtgagacctcatctcttagaaaaaaaaaaagaaagaaaatcaaatgtagagctgatcagcagcttgtgcctggcatccccaagggagaaggtgccaggtcagcaggagcagcagcagggatgtatagaaagaaccacagctggcctctaaaggatggcactgaggcaccggagatcttgaggcactggagatcactgaggggctggcctgtcccctgcaaggagtgtgggaccaggtggggcaaggctgggagatgcaggctctgtttgcagattatggcccagagtctctgcttgtgggtgcttgatccacctgctgggaccctgcagtcctcggccagcctggctgtcagttggggattccacctttctgctgagcgtcttctcggagctggaggcccatcttcagtgagagatcacaaagcggccaggcaggtgggagactgaatttgccttgttcgagagtaacgtttgaaaaccaaagaaataaagtgatgcagtgcccacaaaa

SEQ ID NO: 259136 - DNA, 887 bp, Homo sapiens
  misc_feature (865)..(865): n is a, c, g, or t
  misc_feature (870)..(870): n is a, c, g, or t
aatggtcctctacagatatgaaactggttctggagtgagatgagctcggctggggacgctacttgagaaggcctttccccacagggtgacttaaatgtcccaggctggaaggtggagcgagaagtggatgcccccagggctctgggtcacactccaggatgacttctcggaaccagctggtgcagaaggtgctgcaggagctgcaggaagcagtggagtgcgaaggcctggagggtctcataggtgcttccttggaggccaagcaggtcctgtcttccttcactctccccacctgccgggagggaggccctggcctccaggtgctggaagtggactcggtggccctgagcctgtatccagaagatgctccacggaacatgctgccgctggtgtgcaagggggagggcagcctgctgttcgaggcggccagcatgctgctgtggggtgacgcaggcctcagcctggagctgcgggcccgcaccgtggtagagatgctgctgcacagacactactacctccagggcatgatcgactccaaagtgatgctgcaggccgtgcgctactccctatgctctgaggagtcccctgagatgaccagcttgccccccgccacgctggaggccatcttcgatgccgacgtcaaggcctcctgtttccccagcagcttctccaacgtgtggcacttgtatgctctcgcctctgtcctccagcggaacatctactccatctaccccatgcgcaacctcaagatccggccctacttcaaccgtgtcatccggccccgccgctgcgaccacgtgccctccacgctgcacatcatgtgggctggccagccttacagcattttcgcacatcttgcctgggnggctnaaatgactaaggccctg

SEQ ID NO: 259137 - DNA, 653 bp, Homo sapiens
ctcatagaaaattgtcctttaatatttgaatcaatatacatgtatccaaaccatatccttcttcttcatcaactctctagttctggatacctaattagattcatcaattcctccatagccttcctgagagagaggagaattaagcaatgggtcagccagggaactgcctggggtgccaatttaaaagggatgtttaaaaatccctggaataaaacataaatatggtgctgcataccttgggtttctgccagtacttcctaaagtaattggtgaaatgaaaattggccacttctttcacctaaggaggctgggacctttgagtaaaaaattaaaagcaaaagcaagccagtcctcactggtgccaaccactctattttcgtgacaagcgcgtgcaagttaaagggtgtgccaccaacggtgagattagcaagatgggagttgctgaaagtaggcaactctccacaatcacctgatattgagaaacaaaatactgcatgttgcaatgctctttatcaagaatgaagggttcatttccttatctaaattttaaatcctctactataccttccccaaagttacctggtttggagaattgcaaaaggacactgaggacaaaataaaaactacagaaaagtggaaaatggtttgttgta

SEQ ID NO: 259138 - DNA, 351 bp, Homo sapiens
tctgaagctgtgcagtgcttaacctgggccatcatatgcaatgggctgattgtcagcgtgtgattgggaacgttttgctacaaacgtatgattttcatttaggctctacctataaccaaatattatttgaagtggcacagccaaaataataaggatcacagcccagtataaagatgaaaaccaagtagaaagaaaaagggaaggaggaggacaaaaatatatgaagatattgtagataagaaatgttttgaaagcagaacttttgctgaagtgtttccagtgaagatatctgggatttgcttcaaaataattcagtgagaggaggctctcaataaataatcgtgtaacctt

SEQ ID NO: 259139 - DNA, 590 bp, Homo sapiens
gggagcctctttccagaatatttttgaaggcataaaacaaaattcatagggttacaaaggattctcactatctcacttaaaatatacgatatagtaatgtattttttttattaaggcactaagtaacaatctagtgatgggtctaataactactcaaattttgatgtcgtggtgagtataagtacttcagatttctgcagcaactctactgtgattttctgtgatttcttttggtccaaagtgacagatatcaatagtgccactatggtttattgcatttgtcatcttaaaaacatcagacaattggctgggtgtggtggctcatgcctgtaatcccagcactttgggaggccaaagcaggcagatcacttgaggtcaggagtttgtgaccagcctgaccaacatggtgaaaccccgtctctactaaaaatacaaaaaattagtcaggcatggtggcaggtgcctgtaatcccagctactcaagaggctgaggcaggagaactgcttgaacccaggaggcagaggttgcagtgagccgagattatgccactgcactccagcctgggccacaggagtgaaactcaatctcc

SEQ ID NO: 259140 - DNA, 534 bp, Homo sapiens
atgtgtttgagccacttggaaaatatgcctttaagccattcaagaactcaaggagctcagagatcatcctggaagctgtggctcttttgctcaatagttatgttgctatttctttgctccttcagttggctaatctttatttttctccaattagagactgctaaggagccctgtatggctaagtttggaccattaccctcaaaatggcaaatggcatcttctgaacctccttgcgtgaataaggtgtctgactggaagctggagatacttcagaatggcttatatttaatttatggccaagtggctcccaatgcaaactacaatgatgtagctccttttgaggtgcggctgtataaaaacaaagacatgatacaaactctaacaaacaaatctaaaatccaaaatgtaggagggacttatgaattgcatgttggggacaccatagacttgatattcaactctgagcatcaggttctaaaaaataatacatactggggtatcattttactagcaaatccccaattcatctcctag

SEQ ID NO: 259141 - DNA, 453 bp, Homo sapiens
accaaagttggtctgggcaaagccagtcttaccctgccctgccctgccctgcccggacctgcccaaagtgttttctcctttctcaggagggaatagacttatatcccaggcacaggatagtggctgtatttgcattcccttcccaggaaaagacaggagcatctctcctgcctgccctatggacccgttagcatctcctccatcaagttcccatttggaccctaggagttcaatatcaacagctgaaaggaaggtatcctgaatctcatatgcagtcacagttctggaaagtctggaggtcaggagctacaaagtggatgagggacctgactcttgtcttatccaaatgactttacccatgtcattctctctaaatggatatccctttctcctgggtctcttggtgaactcctagccttctttcaaatctccactcaggcatttcgtctctgg

SEQ ID NO: 259142 - DNA, 206 bp, Homo sapiens
acatttcaaataaaaattccctttgccccagcagttccagtgcttggaatttgtctgatgggtgtcctgcaacatggtaaaagccatacctgtataagaatattgcagcattgtctgtcctagcaacaggttggaaacaatgaaaatgtctaccaggagggactgggtaaataagttgcaactatctccacgacgcgtcattggta

SEQ ID NO: 259143 - DNA, 401 bp, Homo sapiens
  misc_feature (249)..(249): n is a, c, g, or t
aaaataagatagggagtgttagcaaatgagggtttgaaggacagaataacaaagacattggagggagattgccaagttgacaaacatgtatgaaaaagaggtgcttggaaaccacagtcgaggagggaatgaagaatcagcaaagggacagagattcctagtggcaggggtgaagttataaatgcaggtaacgtctaccccacctggaactagtaagatttttttggagtggaagaagctacaatgtcngaagacaaaaaatctcaccagatttataacattcccatgctttgaggaactggggaatgtctaattaggaaaacagaaataccttcaagattttccactgaggaaattaaatgcagagaattgactactcaggtgatggaggtgcagacagc

SEQ ID NO: 259144 - DNA, 376 bp, Homo sapiens
agaaacacattcagcacagtcagacatttgtgtccctctggtcacagtggacacttttaactagtacttgtggctaaacttaagtcatgggactcaggactagaaggggctgtggaaacatccgcgtgtattcaacagacgaaaccagacaatttgagaatcattatccagactgagtcagaaaacactgaagaaaacctcgcactaccaaagggacctccaccctatcacaattacacagtgaggtctgcccccaaagacagatccatgcagaaaagcagcagatgctacagtgggaggattagggccaccagctgtaagccaagtgggtcacaagataagtcttaaaaggcaagtaggaatttatttttcatca

SEQ ID NO: 259145 - DNA, 653 bp, Homo sapiens
ccttgaaaatgaatgtagttttcccttttgtgttaaaacctgtgtgagacagtgacccctttaattccttgcaaattctttcataatggaaatgtctgtcctgtgcttgcctcatcgcagtccctttgtgctgctgtaacagacatctgattattactggcaactctagaaaactaatactcatcctggagggatgcacatagctaagacacttccttcactgaaatcctgagacaggtacaaagtgtcaacagagcttcttcagtgggcacacagaaatgtttgtacgctctgtatcagaataagaaaatgattacgatataaacagaaagatgcaaaagacaacagtagagtgttcctaaaaaccttcatatgatttatcctgggattgtgaaagctgaagataccagaatagtcacttttgttggacccagacaaaatagggccgggaaggaggcacatgcatgcatgtcggaggactgcaataattcaaacaagacattctccaaaggatacctgctcagtaacagcatctccgtcaatgaactgataacaactctggctttgaacctatggaacccatggactctgtttctaagcagcttatgaaaatctttttttgctaataaaagttccccttacacagaaacaca

SEQ ID NO: 259146 - DNA, 745 bp, Homo sapiens
ccttgaaaatgaatgtagttttcccttttgtgttaaaacctgtgtgagacagtgacccctttaattccttgcaaattctttcataatggaaatgtctgtcctgtgcttgcctcatcgcagtccctttgtgctgctgtaacagacatctgattattactggcaactctagaaaactaatactcatcctggagggatgcacatagctaagacacttccttcactgaaatcctgagacaggtacaaagtgtcaacagagcttcttcagtgggcacacagaaatgtttgtacgctctgtatcagaataagaaaatgattacgatataaacagaaagatgcaaaagacaacagtagagtgttcctaaaaaccttcatatgatttatcctgggattgtgaaagctgaagataccagaatagtcacttttgttggacccagacaaaatagggccgggaaggaggcacatgcatgcatgtcggaggtaagaactgcttccaaggacttactaaaaactgcttcacacgcttcatgcttctcctgctctgataaggtttttcattaaacattctttaggactgcaataattcaaacaagacattctccaaaggatacctgctcagtaacagcatctccgtcaatgaactgataacaactctggctttgaacctatggaacccatggactctgtttctaagcagcttatgaaaatctttttttgctaataaaagttccccttacacagaaacaca

SEQ ID NO: 259147 - DNA, 551 bp, Homo sapiens
tacatggacaaactgaatcacagggagggacatgttttcctgtggatgaagatacagataatttttgcatccaagaggagagagaagcatcactctcgatagccttaatattctgttctcaaaataatcaacattatttcaggaatgagagtataagaaataaaattaaggacagtgggaaaatataaatttgtcttggggaatgtgatggggccttctgtattataacagctagaatcttgactgacagttttctgatatagacctttagttctcatgtttgaactccctatattcatttgttcattcttcaatatttattgacaccttaccttgtaagaatcattgtattatgagttgtggatagaaatacaagacataaatcctgccctcaggtagctcacgttttaaagtggaggacaggcacttaaatacagcagtgtggttggagtggataggctcacaggagccgtagcaaaattagcaaatcttgctgagaatgtggggccatgaatgtcagtgaaggagaatagtttttgttttttgttttg

SEQ ID NO: 259148 - DNA, 382 bp, Homo sapiens
ccacatcccaggaggccgaggcggcttgccccgcatctcagaagccgggcaggccctgagccttctgacctcacatcctctgccacaccacagtggagaaaccagaactggaggagcagccagaatgcagagaagaaaaaagaggttctctgcatgtttggaagtcggaattggttgaagttgaagatgatgtgtatctgaggcacagctcttccctgacttataggctttgacactgctgttgaggtttgactcgaagcccagagttttggtgtggatgagcagggacaaattgctgagcatgaagaagagtaaaattaagcaagtggaacatatgccctttgcctctgctctgcacagtgaaatgaaaagtcaacctttg

SEQ ID NO: 259149 - DNA, 251 bp, Homo sapiens
cgccggcaacgtttccagacgcccccttgaggtggcatctggttgaccacccctagttgagaaacattgcttccttcccccagccttccaagcaggcattttggtcccaaacaagtatatccaatctctcttttctttttaaataactttctaagtgctacccaagtttctttttcaaacaatgatggcagtactgtttctcccctttttttattcttcattccaggattaaaatactatttacaacctta

SEQ ID NO: 259150 - DNA, 224 bp, Homo sapiens
caaatcagtctgaaaaaacatcctgttgatagaggttaaatattagaattaatcatgcaatcaagagagcgcacagctagctagccattatctgctcctttgtatccatcacacctcttaatccagcttggaatgatgagtggagtttggtcctccacacttggtttgcaaataaagagatgaagtttcatgccaggtgtgcatgcttgttggagccattcgta

SEQ ID NO: 259151 - DNA, 625 bp, Homo sapiens
atgactaaacgcaggttgtatatttttcccagaaataccgtggaaggcacgtgttttatgtgcctattggccatccgtgtgtttcctttagtgggtgtctgctcaaatctttggccattgttatattagactgtttgcctttttgtttttgatttgttgtggaatacaacaattgaaatacaaggaaatatatatatagtatctatgtcagatatcttataatgatctgatacatttgtaagattcctatagagattatatataatatctgtcaacatatatatgacacatatatttgtgtgtgtataaaatattttatcccagtctgtggttgcctttttcttttcttaataatgtatttgtgttgacatttaatgctttctgtgtcctaagaaatcgtcacctattcgcaaatcatgaagaattattctgttttcttttggagactgtgttgctttatactttatattcaattctatacggatagcaacttaattttgtgtggatatgaagtgtgatgtagggattaatactcatttttttgccatacatttattgagttgtttcagtgttaatttgttgaaaaggtacatatagtatgtgtatatgtgtgtgtgtgtgtgta

SEQ ID NO: 259152 - DNA, 1064 bp, Homo sapiens
atggccgaggtgttgcggacgctggccggaaaaccaaaatgccacgcacttcgacctatgatccttttcctaataatgcttgtcttggtcttgtttggttacgggttcctaagccccagaagtctaatgccaggaagcctggaacgggggttctgcatggctgttagggaacctgaccatctgcagcatgtctcgttgccaaggatggtctacccccagtcaaaggtgctgacaccgtgtaggaaggatgtcctcgtggtaccccttggctggctcccattgtctgggagggcacgttcaacatcgacatcctcaacgagcagttcaggctccagaacaccaccattgggttaactgtgtttgccatcaagaaatacgtggctttcctgaagctgttcctggagacggcggagaagcacttcatggtgggccaccgtgtccactactatgtcttcaccgaccagccggccgcggtgccccgcgtgacgctggggaccggtcggcagctgtcagtgctggaggtgcgcgcctacaagcgctggcaggacgtgtccatgcgccgcatggagatgatcagtgacttctgcgagcggcgcttcctcagcgaggtggattacctggtgtgcgtggacgtggacatggagatccgcgaccacgtgggcgtggagatcctgactccactgttcggcaccctgcaccccggcttctacggaagcagccgggaggccttcacctacgagcgccggccccagtcccaggcctacatccctaaggacgagggcgatttctactacctgggggggttcttcggggggtcggtgcaagagatgcagcggctcaccagggcctgccaccaggccatgatggtcgaccaggccaacggcatcgaggccgtgtggcacgacgagagccacctgaacaagtacctgctgcgccacaaacccaccaaggtgctctcccccgagtacttgtgggaccagcagctgctgggctggcccgccgtcctgaggaagctgaggttcactgcggtgcccaagaaccaccaggcggtccggaacccgtga

SEQ ID NO: 259153 - DNA, 613 bp, Homo sapiens
gccctggagaatgccaacaccaataccgaggtgctcaagaacatgggctctgcagccaaggccaagaagcgggcccacgacaacatggacatcgataaagttgatgagttaatgcaggacattgctgaccagcaagaacttggggaggagatttcaacagcaatttcgaaacctgtagggtttggagaaaagtctgacgaggatgagctcatggcggaattagaagaactagaacaggaggaaccagacaagaatttgctggaagtcagtggccccgaaacagtccctctaccaaatgttccctctatagccctaccatcaaaacctgccaagaagaggaagacgacgacatgaaggatttggagaactgggctgggtccagcgcgggcaggatggatgtggtgcaggcaggttccatcgctctcgactctcactccaaagcagtagggccgcattgctgctcgctctctgcatagcatggtctgcacctagtgggatgggtgggggcgggtagaggggggttgcggggcacgggggctgtgggggagaagtgcctgctgtttataatgttgaatttctgtaaaataaactgtgtttgcaaatccaaaaaaaa

SEQ ID NO: 259154 - DNA, 434 bp, Homo sapiens
ctggactgatgtcataaccaaggccttccctgcatattggcttagagggttacagggtgaattgaggggacacccacacagtctagttctcccctcctgctgctagccaggagacttgcaggggcccaccttgtcatgaaggcaggtttccagaaaatctagttaccttgcaaatctgcctcctgcccttaacacctgaggcaaactacttttctatattaaaagaagtgaaatcttaaaatttgaaggacttgagggtgcaattagtctggctttcctaccttaaattagaaagtaggcaagcagccatgatcggtggtcgctcacgcctgtaatccagcacttggggaggctgaggcaagaggattgcttgagcctaggagtttcagaccagcctgggcaatatagggagaccctatctctattttttcaaa

SEQ ID NO: 259155 - DNA, 640 bp, Homo sapiens
atatggacaaaaatgtccacaaattcctttcattcctatataaatattccatttcaatgtgacttggcatctatttttccaccaccaaatcttgttctgggcatgtttcttgctttagaccaataaataatagcagtagtccagaaaagtgcttgtgcattggaacttgtcttttctccttggcctttaacgccacagattgacatgtgaagaagcctaggctaatagactagaaggtgtgagaccacatggtgagcggccccaaggatccaagcagtctcagccatctcatcttaaaaaatcatgagctaaataaaaaaatcatgagctaaataaaaaaatcatgagctaaataaaaggggggctatttccaactaaagtttcggagtggtctattaatcatcaaaaatgctaacttgatacaacaccttatctgatgtactaatcaatactttgtcactacgggtgccctatcagtcaaaatgtcactgaattggatgttctataaaaaaccttcaaagcggctgggcgcggtggctcacacctgtaatcccagcactttgggaggccgaggcgggcagatcacgaggtccggagatcgagaccatcctggctaacacggtgaaaccccgtctctact

SEQ ID NO: 259156 - DNA, 542 bp, Homo sapiens
gaactcctgtatgaataagccaccatcaatctattctttctgttttaccttctcatcctgctgacctttttctcatccttctattcgcacggtccatccccaggctctgtcatcctgagaaactgtaccacctctgaaatcccaattccaaatatgtctctttctgatgatcacctcttatctttccaaatctcttgctaaagtatgaacattgcttaaattcttcaacttcatcaagacgtctaattaattggccccatatttcctctccagccatgggcctctccaggcccaccttccttcctggtctgacagcttctgtcatctaccaccagaagcattgcctggaaaacacagatttccgtggtcttctttatctgatggcaaaattccacgcctggaaaacatcacctccaccttccctgggcgtgtagccctgcagctggacacaatggcacgatgactttctcttaaataatggaccacaaacttcaaatgggcatttacaacttcctcaagattgtattgtgtttctccagtga

SEQ ID NO: 259157 - DNA, 475 bp, Homo sapiens
ttagtatgtatctttactcattaggaacctgagtttcttgaccttttgttgatattttatatttatagttagaggagttggggagaaataacatatattcaagaaaataaaggaattaggatataaataaatagagtaggagataaaatgatagtaaataatctaagagctgggtcttggaggttggaaaatcccaatagattattaagcagccatatcaattattaagcagccatatcaaaaaattggaaaaattgaacaaaaactttccatttttggaaaaattgaacaaagaattcatcacccaaaagaaagatccagaaatatttcacacgtctttaaaacctcaaagaacagataattccagtacagagagttgtagtactgttctagaacatagggtaagtatgaaaaccttccagacttttatttaaattaaatactgataacagatcctgactaatgataatactta

SEQ ID NO: 259158 - DNA, 391 bp, Homo sapiens
acaattttttttttgtttacaagatttatggattgtgttatttatattgcttaaattcatgtttggtgcagaaagtcatctaaattctcaaaataaatcttccaatatacgttctcttttgacactggaactttagttcaatattgctaggtgacaatcagtaaggtaatgagcttccaaatgacgaaactaagcagaagaggccaaacatcttctcaaagataatgccaaataatgtgttaaaaaaacaggattaacacatcttttcctgtttttcttcttcccatagtaatttagattttacactgtgccaaagtagagcagataaatgtagctgtcttaacattataaacagtacctggtgttcatatactgcttcaaagttccaagc

SEQ ID NO: 259159 - DNA, 281 bp, Homo sapiens
aaaaccaaatattgtatgttctcactcgtaagtgggagctaagctatgaggatgcaaaggcataagaatgatacaatggactttggggactcaagggttgaaggatgagactacacattgggtacagtgtgcactgcttgggtgatgagtgcaccaaaatctcagaactcaccactgaaggaacttccccatgtaacccaaaaccacctgttccacagaaactatcgaaataacatttttaaaactttactatttctgaataaaatttacatacatttctc

SEQ ID NO: 259160 - DNA, 375 bp, Homo sapiens
gggtaatacttggtcacattgtccattattaaccaagtaaattacttcaatcattttgcaaaatgctgattttctaactctctcattccctctgcatgtatcaaccttaattcttctgttagaattaattgccaaggcatcatattttatgttacaaatttttctttggaaaaaaaaataaagcaaaaggaaacataaccctaaaaacagggcctatttcaaagttaatgagtcgttgaaagagatttttggccaggcacgctggctcacacctgttatcccagcacgttaggaggctgaggtgggcagattgcttgaacccaggagtttgagaccagcctgggcaacatggcagagccctgtctttacaaaaaa

SEQ ID NO: 259161 - DNA, 414 bp, Homo sapiens
ccttgaatgtgttagttccgtgaacttgggcttgggtttcatcatgtccctttccacgactgaacttaagtgcagttcttaatcagagaggggcgtttttaggcagagggaacagtaagctttaacagcgtctggtggtgcttgcctgtagtcccagctactcgggcggctgaggcaggaggatcacttgagcctgggaggttgaggctacagtgagccatggtagtgtcactgcactccagcctgggtgacagaatgagaccctgtcttataggcatgagccactgagcccagaaatttaaaaacgttttttagagatggggtcttgctatgttgcccaggaagttgccgtggtgagctacgactgcgccacatcactccagcctaggggacgaagtgagaccctgtgtcaac

SEQ ID NO: 259162 - DNA, 385 bp, Homo sapiens
taaaaaatgcatgaagtgaaaataacttgcaaactgtaccacttattcagcaatttcaagtaaaattagcttcattgtctaaaaagtttgaagtattcctgaaatattgactcactcctactctattgtatgaaggtcccatcctcagggttcatgaattaaatgtgtcagaacaataaacatcacactagtaaaaaaatacctatatttacaggccgtcatgcttctgtgtatttaatttttaaaatcttctcaagtctttcttcaaaatggcaacataaacaaaatcttttgacttttttcctaaactcaagtaaatgtatgccaattaggcatatgtgtcctaactagaaaatatgctgagaaaggtgaagaaatagatgta

SEQ ID NO: 259163 - DNA, 639 bp, Homo sapiens
attttaatgacatatgatgacgttggcatgatagagctggaagaattagttgagttgttgaaaatggtcctcaaagctatagaaattgaacagtggacacagaaaaagaacaatgcaggctgggcacagtggctcatgcctgtaataccagcactttgggaggctgaggcaggtgcatcacttgaggtcaggagttcaagaccagcctggccaacatggtgaaaccctgtctctacaaaaaatacaaaaattacccaggtgtgggggtgcccacctatagtcccagctacttgggaggctgaggcaggagaatcgcttgaaccctggaggtggaggttgtagtgagccgagattgcgcaactgtactctggcatgggtgacagagtgaggctccatcttaataaaaaatccataatagagaggaaaagtagtaaacttaacagctaaaagcaaatgcttgttctttaaaaggatgactaagcaaaatttggcaaacatgatagagatttgattagcaataagacagaggcaagtttttttttaattgcaaaagaatactataccaacattacaccaatgcattaaaaatttagcgacatatttcttttgagatcttagattataattcatgtcagtaag

SEQ ID NO: 259164 - DNA, 428 bp, Homo sapiens
cctctccagcccagtcagtcgtttctggctccattcataactctgccggatgcctcattagagaagtgtcctgagacttcttgtgagatatgccttcctgagacctacccaatgtgcccatgctgactcctaccagacagctgagagaccaactcagagaagaatagcaaagaaagcagaaaatgggaggctttatcccagtgcccaatccctgctagctgagccagttgagagtcacaaaccagggaaatccagagattttagtttcatctatggccactgggggtgagcagtaagaaactgaggactgtaagatggaaggcaacatgacagtggtacaaaggagctgtttgttgtgtttttgttgatggtagaccacttatagctatttctctttaattaaaaaaaactgttttatgcagcaaaga

SEQ ID NO: 259165 - DNA, 190 bp, Homo sapiens
gatcaaacactatattggaaaatcagaggttgaacctactgtcacttaagcaaattatgagaagtcatgtggcatggaagaaatgtgagaagactagatacaggcaaataagtgtgttggaggagaagatttccataatgttagattgaaaaccaggacacagactattgatagcatacggcaagggatc

SEQ ID NO: 259166 - DNA, 517 bp, Homo sapiens
cgcggccgcggggggtggggggtgggaggccgggagggggccgggacgccgggctccggggcgggggcggggggcgcgggcaccggcgaccccggtggcggcggcggcggccgggggaagcctcggggccggtcatgcggctgcggggcccgcggcccggagcgtccgcccagccctgagcgagagacagtgcgcacggccacccccttccccatggtcagcctcttcctcgtgttcacggccttcgtcatcagcaacatcggccacatccgcccgcagaggaccattctggcttttgtctctggcatcttcttcatactatcgggcctctccttggtggtgggcttggttctttacatctccagcatcaacgacgaggtcatgaacaggcccagcagctctgagcagtattttcattatcgctacgggtggtcttttgccttcgccgcttcctccttcctactcaaagaggtgacgtccgtgggacctagactctagagttctgaatggagagagg

SEQ ID NO: 259167 - DNA, 829 bp, Homo sapiens
cgcggccgcggggggtggggggtgggaggccgggagggggccgggacgccgggctccggggcgggggcggggggcgcgggcaccggcgaccccggtggcggcggcggcggccgggggaagcctcggggccggtcatgcggctgcggggcccgcggcccggagcgtccgcccagccctgagcgaggccccgcagggcgccccctgcctctgaggatgagtcactgcagcagccgcgccctgaccctgctgagcagcgtgtttggtgcgtgtggcctgctcctggtaggcatcgcggtcagcactgactactggctgtacatggaagaaggcacagtgctaccgcagaaccagaccaccgaggtcaagatggccctgcacgccggcctctggcgagtctgcttctttgcaggtcgggagaaaggtcgctgtgtggcctcagaatattttcttgaaccggagatcaatttggtgacggaaaacacggagaatattctgaagacagtgcgcacggccacccccttccccatggtcagcctcttcctcgtgttcacggccttcgtcatcagcaacatcggccacatccgcccgcagaggaccattctggcttttgtctctggcatcttcttcatactatcgggcctctccttggtggtgggcttggttctttacatctccagcatcaacgacgaggtcatgaacaggcccagcagctctgagcagtattttcattatcgctacgggtggtcttttgccttcgccgcttcctccttcctactcaaagaggtgacgtccgtgggacctagactctagagttctgaatggagagagg

SEQ ID NO: 259168 - DNA, 247 bp, Homo sapiens
cccgagtagctgggactacaggcgcctgccaccatgcccagctaactttttatatttttagtagagacggggtttcaccgtgttagccaggatggtctcgatctcttgacctcatgatccgcccgcctcggcctcccaaagtgctgggattacaggcatgagccactgcgcccagcctaatttttactttcaattctatccttccctgtcttaaaagtgaaactcctctacagaaataaaagtttta

SEQ ID NO: 259169 - DNA, 340 bp, Homo sapiens
taaatgttaaaagtaatagtttcttttaaagactaacttcctcttccttccttatttggaaatgttattacttttctaagaccttttgcaagcaacttcctcttttccttttgttctccattgcctttacctatttaggaaagttttaagttgttagccaattgagtttagcttagattgtgaggtccgtctccaagcaacgaagagaggacacagcagtaaggacccagtgtgtaagggataaatattcctgcctttctttattcatcgtgctcttgtggcaaaattgctgatgggcagcatcctttctgcagaaagtaaaattgccttgctgagaaaa

SEQ ID NO: 259170 - DNA, 1028 bp, Homo sapiens
accctctcggtgtatagaggtcagtgcagccccctgccgccgccctgttttctcgagactgtacactaacccctgccgccaccaccctggatcctcagcacagggactgtcgtgctctccttgttccctttccaggtgtctctgtagccttcaggactgtcgctgctgcagccatcctgggctaagagcttttgctggcctcgggttctactgagcaagagtcccccaggcccagcgggctcagtgcagcaggcggggtgggacggtgccgccaagagagggcagcctggggctgggggcatggacagaaactgaaggaaaggcagcctgtgggagctgcgcttttaaaataagcggcatggggggccgggggggcgctgtgacgggggagcaggtctcttctgtagggactgggttttgattaagtcagtagcaggattaagtcattgggtcatcagaaaatctcatggataaagttcaaggggtttgtgaactttaaaaaaaaaaaaaaaaaaaacaaagaaatagccgtcggcacggttcaaatctgggcttggtgctctgggctgcttttccacaggccctccaggccctggatctgcagagtgtgagccccactgattgaagcatgttcgtgcacagacgccatgagggggatggaggctgcaggaacgggggaaggcaggcgggggtcctgtgaagtgtgagctcccagcagttgcatgctggggtcctcagtttcatgttgccagtgcgtcagagagccatctctcactccgtccctgccaccgtccagtcctgcctgctgtaaagggtgacactgaggaggagaggcgtgatggttcgtgccttgctatactagttgtcctgcagctgtccctgatcagactggccttattcaacctttgttctaaactacggcagttgtcctagccaggccatcggttagatggagctgctgcaggaggagccatccagcattgaggtacccctggaacacaggctgcctgctcggaaatgcgcatctt

SEQ ID NO: 259171 - DNA, 308 bp, Homo sapiens
caacaaagatggtaagaacatacactggggaaagggcagtctcttcagtaaattggctgggaaaacttatccatatctagaagagtgaaactacgcccctatctttcactgcatacaaaaatcaaatcaaagtggattaatgacgtaaatctaagacctgaaactttaaaactaccagaagaaaactttagtgagacaatccaggacatgagtgtacaaccttttggcttccctgggccacattggaagaataattgtcttcggccacacataaaatgcactaatactgacaagccaatgagcttaaa

SEQ ID NO: 259172 - DNA, 788 bp, Homo sapiens
ctgtagactcagtgagtctgttcaagctcttttcaccgacctagatgtgtttctgaggtgatggttgggtttcgtgctactatgtgaattagaagatcttgaaggagggtcagtatgaaaggaagtagagagtttaaagtaacatgaaaggaaaagttaacagaaactaaacaagaagagcaaattaggagttctaggtgaaaaaacagaattcctgaaagggatgtaggtgttatgtggtgttaagttaatttttctaaataaatttgcttagcatccagacagtagctgctgtctgtagatgagatacgtaggatgtgatgtaatagtgtaatcatttaataaacagccatttgttgagcattgtgtgtttggtgctgtgccagtccctttatgcacattaataatagcagacactgggattgtgcttactctggtgctgcagcaggcctacctcatcatgatcagtgcgccaggagcaggagggacacctgcagggctggaagggcaggggaggtgggcctccatggtttgtgtttattgcataaccatttttattgtctacagtgagcaaagttatcctataaacaagtgtcagggaccattgcactaaagaaaacaaatgagagcattttggaagctctaatttcctgatcagtaatgggtagactaattcccagttatatttacctgttgtaaggtgaaaggttcttcagaggacctctgtcttggtgttatatgggcttttgaatgtactgaaattaaattccctaaaaaaatgtgaaaaa

SEQ ID NO: 259173 - DNA, 572 bp, Homo sapiens
ctgtagactcagtgagtctgttcaagctcttttcaccgacctagatgtgtttctgaggtgatggttgggtttcgtgctactatgtgaattagaagatcttgaaggagggtcagtatgaaaggaagtagagagtttaaagtaacatgaaaggaaaagttaacagaaactaaacaagaagagcaaattaggagttctaggtgaaaaaacagaattcctgaaagggatgtaggtgttatgtggtgttaagttaatttttctaaataaatttgcttagcatccagacagtagctgctgtctgtagatgagatacgtaggatgtgatgtaatagtgtaatcatttaataaacagccatttgttgagcattgtgtgtttggtgctgtgccagtccctttatgcacattaataatagcagacactgggattgtgcttactctgggctcatatgctatatgcgttttatccatttaatcctaataacagcccagtgaggtagggtctgtctcccttactatgcaggagctctgattcccccactgagtccccacgctaggccactgcccttcctggatgc

SEQ ID NO: 259174 - DNA, 345 bp, Homo sapiens
gtgataactggagggcagagagggacacagatgacacaatcttcgaagtttaatttggttataaggttttttgttcttgttttgttttgctttctttttggatacaaggtcttgctctggtgcccaggctggagggcagtggcacaatcataactcataatttggttgtaactgttctttaaaaaatatttttggctgagtttggtagctcacacctgtaatgtaaacaatttgggaggccaaggtgggatgatcgctggatcctatgagttcaagaccagtttgggcaacataagtaggctcagtttctacaaaaaaatttttttaattggctgggtgtagcat

SEQ ID NO: 259175 - DNA, 353 bp, Homo sapiens
atcagaaggaggcttgagtgtttattgtagaaaaccaattaactatgatttaaacaagcagagggtggggtttctgggaaagccccttaaaaccagaagtcagcaagactccctcctgtccttccctgcactccccttcttgcttcctaaaatgggaacatgctagctgatgccatcttggaccatgagaagactgagaatggaaacccgcaatgccctaagaacagcagagaagagggaatgtgcgtctctgtctagctcctcaagacttctttcatgtaatggagaaatacgcccctagcttgtttaaatcattgttaattggttttctacaataaacactcaagcctcca

SEQ ID NO: 259176 - DNA, 749 bp, Homo sapiens
gctaagatcatctgtgtgccctttgattaatgcttcttaatacttgtcatctctacctccattctaaaatccaacttttagctttcatttaagaaagggagtgcctatggccaatgaaggagtgtatcctttcattactattctgcttaatttctgtgtcacttgatttttttcctagattgtactctctcaatttgaatgtatagcaacatcaaacaaaaaagcagaagtaattaggtttgtcagtccacaagaattttggaccaaatatccatgaagtggtgggtagattataatacctaatacagagtatcaaaatgagttcttacaatcccacacgtagtctccatgtggtatgagatgccactggcctgagctgacgtagtattttttatatgaatgaaggctgttcaaggacttgagaataatttgttttcttaattaatataacccctgcctccattttctttatactacactcagatcagtgatgtctcctttcatgtgttgtgtgaaaagcaaattttagtcttgtcttgatgaattataaattccaggagttcagagcaaaaatgagtatatatgtatgcttctgcacatgcatacatatgcttataaaaagtgacaactggccaggtgtggtgctcacacgtgtaatcctagcactttgggaggttgaggcaggtggatcacttgaggtcaggagtttgaaaccagcctggccaacatgatgaaaccccatttctatt

SEQ ID NO: 259177 - DNA, 682 bp, Homo sapiens
cgaggttcagtgttatctcctcttggttgtgtgaacttaccacagtatataccagtctatgtgaccttgggctagttgcttaactgctatgggctagcttcctcctctaaaatggggacaatagctcacatgattctggagaagatttatttattattaattaatttattattattattattttttgagacagtctcgctctgttggccaggccaggctgaagtgcattggcacaatctcagctcactgcaacctccacctcctgggctcaagctattaccctgcctcagcctcccgagtagctgggattacaggcacctgccaccacgcccagctaatttttgtatttttagtagagaccgggtttcaccatgttggccaggctggtcttgaactcccagcctcaggtaatccgcctaccttagccttccaaagtgctaggattaaatgatctgtgtatagtaagcacagagtaaatgtcatctactgttattgtattgccaggtaagtctggttcaatttgcgtagaacaataaggcttttccttggggacatttctagaaaatgctaattgctaagcatatcaaatctgtttgctccttggcttgtaaatcattgtcctctgtctctatcgcttcacaccgtcttccctttatgggcatcttggtctccaaatttcccc

SEQ ID NO: 259178 - DNA, 187 bp, Homo sapiens
tgcttctctcccagggcttcggcctgacagcgcttcccccacccggctgctgtccacagagtccttggaaatgctgcatccacatctgtgcatattcaagccagcagagggtggaacctaaaactaagccctggaaagatcaggacccacagcctgtgagaatatctgtattctggctggagacaat

SEQ ID NO: 259179 - DNA, 341 bp, Homo sapiens
tattgaatatttgatgccccatgtgataccccatgtgttagaaggtcttttccttctgggctgagtgtggtggcttacacctgtaatcccagcactttgggaggccaaggcgggcggatcacttaaggtcaggagttcaagaccagcctggccaacatggtgaaacctcgtctctactaaaagtacaaaattagtctggcatggtggcaggtgcctgtagtcccagctagtcaggagactgagacaggaggatcgcttgaacctaggaggtggaggctgcagtgagccaaggtcatgccactgtactccagcctgggtgacagagtgagagggtgtctcaa

SEQ ID NO: 259180 - DNA, 851 bp, Homo sapiens
atcacatcccctcttgcctaccaatggacattattccagcaattatctgttctctcaccagcgtcagttcctccctgtctactgaatgcttctcatcagcgtaaaaacctgctgcagtatctcccatctgaaagacaaggccaaaacaaactctcccttgattctgtaggtcctgcaacagagttgcatttctctcctctttataagcagcactttgggaaagagcagcccttttctcttttctccatttcctcactttgaattctcattgaacctattctaatcaggttttcttcctcaccacttgcctgaagtatcccttgcgaccttcacgttactacattcactggttagttttcagtcctcatcttagccattttcagcaacatttgatacagaggaacacttttctctcccatatttattttataatgagatatagcacatatatagaaaagtacaaaaaatacagtttaaaaaataattatttctttcaaacccataaaaccagtgccatgggtaagaaacagaattctatcagtgccccagaagccatccgttttatccttctcattaccttcctgtaccaagaaataccatttctgactttctgaaaatcatttcctagattttctttcccactttcccacttgtgtatgctttcctaaataatttgagtttgcctggaactttccagaaatgggtcctaagtttaatctttcgtgactggcttctttctgttcagcattctttgggattgatttatgttgctgcacatagatatagttcattttaataggtatatagtatccactatgaatatgctagtttactcattctacttttgaagg

SEQ ID NO: 259181 - DNA, 487 bp, Homo sapiens
tcacaggcttgagggtagttgggggtcctacgatagaggcacccagggcaacaagaagctagatttggggacaaaagcaatttaacacagataagaacctccatttaaaccataagcctcatctgtataataaaattcatcatgttaaagaatgccagtgtggttttgtataacaagcacagcaagtcatggtgggttgtggttctggtgctgcttctgttcttggctttgtgacctttgagtctgcttccttatatgtaaaatgaaagtgttgaactaagcactcggtaagctttcttctctgtcgaacacactgtgtttctgggtaagtgtgttttcatgaatatctgtggatatgaatatctgtggatatgcctctccgtgctcattagacatttctttttcaaaatatatggcactactatatgtaaagggtgtttttcaatagaaagttctatttttttgagcttcaataacacttggatgg

SEQ ID NO: 259182 - DNA, 394 bp, Homo sapiens
tggctcctgaataggatgccttctcagaccctggcatttcaaaggcagtgaaaggtcatcctaggtactagtttctcaaagaaatacctgtagtaaggtaactattctagtcacctttatatagtaacggcttgtatctcaggcaattcgccagtttttcaattaaaactgacacatattagggatttttacttctgccccccgctccccgcaattcggattctttctttagactccctgagcctctgtccccatcccaggatttgactgaagggctgcagagcccagggctgcgcgctaagcagccttctgctgaacctcagcggactgggccatagttcacacaccctccactccttctacagcagctcccgctgggggcaccgccaggata

SEQ ID NO: 259183 - DNA, 423 bp, Homo sapiens
actgtatgctgcctcccggagagcctcccaggggacttgctctccaaatgaaggcggctggctgccgagagtcagtcactgggctggccatggagcttggatgttcctgcctcggtggtgtctgtgactggctggctggggagctctgttccctggaggccctgggcagacattgctgccctcctgggtcagccatgcctggtggtgggaggtggggtgggagaggactcggggtgtgcctgaagctgcagggcactgtgctcaggcccatgctaacaacagaccatgtctcatcgtctccagaaatcaccctgggccccactctgggcagactctaagccacacatatgcgaggaatggaccctgagcacattctggttggggagagagaacagtaaagaaatgattgaccttcagcaaaag

SEQ ID NO: 259184 - DNA, 331 bp, Homo sapiens
gtcctaatattttagccagatccttgacattattgaaattaagtctttaatagtaaccattgtactgtatatatatgtacttacacattttccatgtatctttgcgtatctttgtttattctgtaacatcatgtcataaacctcagatatacaaaataaaacttatttaaaaaacaaaaagatgaaaggagtaacagctgagtggagacttggaaagtacatgtgagtaatccaggcaaggaaggaggccagacattgtcattccactgtgcttttctcataatgcacacacaggccctggaacactgtagttactcaataaacttttgtt

SEQ ID NO: 259185 - DNA, 685 bp, Homo sapiens
gaggcatgaagagaggcactatgtccatgtgatatgatgcaaaaccactgaactcatttgaggtgtcaaacttagaggctgatccttactttttccttcccaatgtgtaaaaataaacatcccaatctccggcttctctgattgcattagtcacaagttgtcacatgattcctttgttcttaaaacatttttaatgactgaaaataacagttttcatctcatcttcaaaaggttatttctaacaatcccaaatctgaagatatggttttaagtttctgagtggcaggaagtaaactaaactttttttaaatgaaagatatcaaaagaaatagttaggtctttgtcagactctagccttgtggaaaaattctagatgaaaattctgggataaattttgcaattctaacattactttattcttttttgatccattaactaggaagttttccttaatcatctctactttgctagacataatggaataatacaaaataaatagggctcaatttctattcaggactgtaagatctaatggtacagataaaattaatacacatgaactcatacagaacaatcgagagtgagcaatgtggtgctgactttaagtataacaggtgtttgggacaaagtagagattagtgaagatcaacgtaataaaagaaagctttatggaggaagtagtgtt

SEQ ID NO: 259186 - DNA, 503 bp, Homo sapiens
ggctggaaggaccaaaatagctttattcattgctgtggtctgaatgttggtgtcctctcaaaattcaaatgttggaactgaagactcaatgtgagaggtgagacctttagaaggctctgccctcatgaatggaattagtgcccttataggagaggcttgagggagcctgtttgccccttctgccacgtgaacatgcagcaggaaggctccatttatgaagcagagccttcaccagacactaaatctgctggtgccatgatcttgagcttccctgccttcagaactgtgaacaatagatttctgttgcttataaattactcagtctaaagtattttgttccaggagcctgaatggactaagacacgtacatgtctggcaacgtagctgaggtggccagaatggctgcaggtggtcaagcctctccctgtttagtggtgtctcatcacttcccagtgatgagagaccacgtggagctttttaacatcatggctggctccaaagac

SEQ ID NO: 259187 - DNA, 539 bp, Homo sapiens
ataaatacaggtacaaaaaatattaacaaaatattagcaaatagaattcaacaatatgtaaaaagaaccatattatacatcatgaccaaaggctagtttatttcaagggattcaaggctggctcagtatatgaaaaaccatcagtgtaattcagtatgctaacaacctaaagaagaaacatcacacaatgctataaattcctgcaaaaagtgcactgacaaaattccacagacatttatgagaaaaactctcagaaaaattgagatagaaaactttctcaactttacatggaacatctataaaacatctacagctaacattatacttgatgaaagacatgagtgtttcctcttagatcaggaacaaggtcaagggatgtcttctcatgacccttcttcaacacagtgctagaatttctggccagtgcaaaaaggcaaaaaattgtaattaaaagcatatggattataaaggacaaaaataaaactgtccctatttttcatttgatatcattgtttatgtggaaaatctcatggaacatt

SEQ ID NO: 259188 - DNA, 504 bp, Homo sapiens
caaagagaaacactggctctgaaggaaacacttcaattgtgtccctctgatactggtaagctctgttggaaaagtcagaggagttggactcttaaaagccaactgttgtgaaaacacatcatcgtcgtctgtagatgttttctgaagcatgcatccagctattttaatctctccaaagtgagtggatcactaagccacaaccctctggatgatatggtctattgatggcaagtgaaggtttgggtaaatggtgagggtggggaatggtatttccctttcctgtcaggtttctctagttccttgacctgaaacaagtgttgggattttctctgaaaaggcccgtttagggctcagagggtcagtattctgagcagcccagctggactaggattaaaggatagatgaatagcacatgaagaattttgatggacacgtttaggcctcccttggtccactgaacaagacttctggaaataaaatgagccttttcaacaaaaaacaaaa

SEQ ID NO: 259189 - DNA, 192 bp, Homo sapiens
aatgtaaaggatgaaagggctttaagcagtggagtggcatgattccatttggctagatgagcccatctggcactcaggtgtggtgatgagagattggagagagtagttagaaggggtctgcagtgatcaaggcgaggcttgctgctgccttacattggagaagtggccatggggatggctagaagtgggtca

SEQ ID NO: 259190 - DNA, 424 bp, Homo sapiens
ggctccactctatcccagtccaatcggtctgattgtgccaggctaaattccctcaaaggcaagtttaattattactcctttctggctggaaaaaacaaatgattctatatttactacttcctcctgtgttactcctgtaacatatgttattactgagtacatgagcataccatgtactcaataatatagttagcactatctaactatccaaatatatttcccaatcacaggcagacctcaaggatactgcagattctgttccagaccaccgcaataaagtgaatatcacggtaaagtgatcacacaaatgttttagtttcccaggccatatgaaaattatgtttatactatactgtagtctattaagtgtgcaatagcactatgtctaaaaaagcaatgtgcataccttaacaaaaaaaaattg

SEQ ID NO: 259191 - DNA, 3893 bp, Homo sapiens
  misc_feature (3270)..(3271): n is a, c, g, or t
  misc_feature (3334)..(3335): n is a, c, g, or t
  misc_feature (3473)..(3473): n is a, c, g, or t
tctcccaacgccagctgactcgatttcgtctcggtcttccccagagctggacacgaggcaccatgatcagagagacacattccctgcggacggcgctcccatcggatactggagggacgcgacactagaggcaggcagtacttcagggtgaccataagtctcccaaacagccacaacggctcgctctcccagctaaggcgacagcgctgccattttggatcctgttcagccacgggaagccggcgtttgcacacattttcggacgtcatattaaagcgcaccggacgccgagacttctgggagatgaagtccttgcgaaggccccgcattgattgggagcgcagtcgccaggaccctgtgcgcaggcgcgttggtttcccgacctgaagaggcgccgtcttcccgggtcccgagcactctgtgccggaggaatcagtgacattcgaagacgttgccgtggttttcacagatgaagagtggagtcgtctggtccccatacagagggacctctacaaggaggtgatgctggagaactataacagcattgtgtcattgggccttccagttcctcaacctgatgtgattttccaattgaagagaggggacaagccgtggatggtagatcttcatgggtctgaggagagagaatggccagagagtgtctctctagactgggaaactaagcctgagattcacgatgcttcagacaaaaaatcagaaggatcattgagggaatgccttggaaggcaaagtcctctgtgtcctaaatttgaagttcatacacccaatggcaggatgggaacagaaaagcaaagcccttcaggggagactcgtaagaaatccctctcccgggacaaaggcttgcggcgacggtcagccctgtccagggaaattctcactaaagagagacaccaggaatgcagtgactgtgggaagaccttttttgaccactcatccctcacccgccatcagaggactcacactggggagaagccctacgactgccgcgagtgtgggaaagccttcagccacaggagcagcctcagcagacatctgatgtcacacactggggagagcccctacgagtgcagtgtgtgctcaaaagccttctttgaccgttcgtccctaactgtccatcagcgaattcacactggagagaaaccctttcagtgcaacgagtgtggaaaagccttttttgaccgttcatcccttactcgacaccagagaattcacactggagaaagtccttatgaatgtcatcagtgtgggaaagcctttagccagaaaagtattcttactcgccatcagctaatccacactggcaggaagccttatgagtgtaacgagtgcgggaaagctttctatggtgtctcgtctctgaatagacatcagaaagctcatgctggggaccctcgctatcagtgtaacgagtgtggcaaagctttctttgaccgctcatcccttacacagcatcagaagatccacactggagacaagccatatgaatgcagcgaatgcgggaaagcctttagccagcggtgccggctcacgcggcatcagcgtgtccacacgggagagaagccctttgaatgcactgtgtgtgggaaagttttcagttcaaaatcttctgttattcaacatcaacggcgttacgccaaacagggaatagactgagttgggcaaaagcttgggtaggacaagaacttccatacaaatttgagatagatctcgcctgtcttaaagctgccatttgctcattctacccactctggctgccgttgtcctgtcctgcttctgcgccagagtgtttaataagcactcccttcctgctgtgttacagaactgtaggggaggccatggaaatgactctaaagatacaaaattttgaagaggtttgtcagacaataggatagatgttaggaggagacacacctcttgtctgagaacctaggccccaggtatcactgcactttaagaaactggaggctgcaacaggagggaaaggcagaatgatatcacagcagtactatttttttttttcagaacatttgttttgatggctgttagtccccctctcttggagcattttggggcactaatcttgttctcttgtgtcccagcttttagacctcttacttccactgctagtagctagcacttactgagcacctgcaatgaggtaaagactcagctaagggttttacaggaagtagattaattgatcctgtcaccaaccatatgaagtaggcactgttaccatctgcatctccagatgagcaccctgaggtttagagagattaaatcacttgcccaaggtgaaccagctggtaaaaggtgatgccaggtcttgaagacaggtccaccttcaaaatctattctctttaccattatgctcgatggtttgtttgttttataatttatgtatatgtattatcctctcaactagattgtaagcacttggaggtgtgacttacaggtctttgtatctcacacagtgccttgctaataggtgctcaataaatatttatatgagtgaatgacttttctacttaccaaattctctccattcagaacacctcttggatttgcatactttctctgaattcacagcccagcctatacttttatcatccccagctcccactcctggcagcagtagctttctaattccagttcttcctgctttattgaagagggatgtgctaagctgtggtacagtaacaagcccgcagagagctatgtctcccttaaaacctgacgggaaccattctgtcttattctatcctcattatttggaacatctggcttccaaagtcaccacaagggcggaagagaaagctagaggaatttgtaggatattttcttagacccaggcttacatcacttctgtccacatctaataagccagaacccagcacctagaagctaggaaagtaaacaagcacctcgaaagttggttaataccaagaacctctctcacagttatattttgcatactactgttaagccagtctttgcaaatgaccccttcctgcccatcactgccttcctcaagacctaaaatagctccctatttagtgaaaaattatctgaatatttaaggtctgccttaacgtgatccccattgctgaattttacctcctgactccaaaaactcttctcttccctgggcccagtcctatttttttttttttttttttttttgtgagacagagtctcactctgtcacccaggttggaatgcaatggcacaatctccgctcactgcaanntccgcctcccgggttcacgccattctcctgcctcagcctcccgaatagctgggactacaggtnnccgccaacacgcccggctaattttttgtatttttagtagagacggggtttcaccgtgttagccaggatggtctcaatctcctgacctcgtgatccgcccgcctcggcctcccaaagtgctgggattacagacgtaagncaccgtgcccggcctatatttttattttattaaaggttaggcactagatgaccttgactctaggcatctgcattctcttgatctttgcttagggtgaagctcagaaaaggacttggttctgaaaggctgtctggaattagattgtcctacgtgattcccagtgaattgagatgaatttcctctggaagttcaagtcggattcgagaagctgaattaccaaacagaccctccccaacctactaacgaccctattactctgttcaccctagagcagacgaacggcagggaagacttgatctgtggacttttgaaagcaacttgaggaaaaacacataacagaatctataggtgtggacaatatgtgatattgctaaataatgtcaagtaggaaataaaagagactattgacaaacttttggc

SEQ ID NO: 259192 - DNA, 624 bp, Homo sapiens
  misc_feature (397)..(397): n is a, c, g, or t
  misc_feature (460)..(460): n is a, c, g, or t
  misc_feature (463)..(463): n is a, c, g, or t
ccggaagtgtttctggttttccggcccttataacatttgaaatggggccggggaatcaacccagtggagggggggcaacttgaaccctgccaaaaagcccctctcaagaaggtaatctggaagatcttcaggaacttggccattctgggccttctagtatccaaaccatatgtgatctgccagttggaggaagggggtgagcccttcatggtggagagagaaatctcaacaggagcccactcagactggaagagaaggtctaaatccaaggaatcaatgccaagttggggaatttccaaagaagaattattccaggtagtatcagtggaaaaacacattcaagatgtgctgcagttctcgaagttgaaagcagcctgcggttgtgatggccagttanagatgcagcagataaaacaggagagacacctgaaacaaatgtcaaccattcacaaatctgccnccncccttagcagagattataaatggaatggatttgggaaaagcttaggtttaagatcagcccttgttaaccaacccagcattctcatgggaaaaggttcttataaatgtgatacagaattcaggcagcctttagggggaaacaactctcagagaacccccccc

SEQ ID NO: 259193 - DNA, 2613 bp, Homo sapiens
tctcccaacgccagctgactcgatttcgtctcggtcttccccagagctggacacgaggcaccatgatcagagagacacattccctgcggacggcgctcccatcggatactggagggacgcgacactagaggcaggcagtacttcagggtgaccataagtctcccaaacagccacaacggctcgctctcccagctaaggcgacagcgctgccattttggatcctgttcagccacgggaagccggcgtttgcacacattttcggacgtcatattaaagcgcaccggacgccgagacttctgggagatgaagtccttgcgaaggccccgcattgattgggagcgcagtcgccaggaccctgtgcgcaggcgcgttggtttcccgacctgaagaggcgccgtcttcccgggtcccgagcactctgtgccggaggactctgcccttgtccacaaggagagcacacaggagagaatggctgctgtgtctccgaccaccagatgccaggaatcagtgacattcgaagacgttgccgtggttttcacagatgaagagtggagtcgtctggtccccatacagagggacctctacaaggaggtgatgctggagaactataacagcattgtgtcattgggccttccagttcctcaacctgatgtgattttccaattgaagagaggggacaagccgtggatggtagatcttcatgggtctgaggagagagaatggccagagagtgtctctctagactgggaaactaagcctgagattcacgatgcttcagacaaaaaatcagaaggatcattgagggaatgccttggaaggcaaagtcctctgtgtcctaaatttgaagttcatacacccaatggcaggatgggaacagaaaagcaaagcccttcaggggagactcgtaagaaatccctctcccgggacaaaggcttgcggcgacggtcagccctgtccagggaaattctcactaaagagagacaccaggaatgcagtgactgtgggaagaccttttttgaccactcatccctcacccgccatcagaggactcacactggggagaagccctacgactgccgcgagtgtgggaaagccttcagccacaggagcagcctcagcagacatctgatgtcacacactggggagagcccctacgagtgcagtgtgtgctcaaaagccttctttgaccgttcgtccctaactgtccatcagcgaattcacactggagagaaaccctttcagtgcaacgagtgtggaaaagccttttttgaccgttcatcccttactcgacaccagagaattcacactggagaaagtccttatgaatgtcatcagtgtgggaaagcctttagccagaaaagtattcttactcgccatcagctaatccacactggcaggaagccttatgagtgtaacgagtgcgggaaagctttctatggtgtctcgtctctgaatagacatcagaaagctcatgctggggaccctcgctatcagtgtaacgagtgtggcaaagctttctttgaccgctcatcccttacacagcatcagaagatccacactggagacaagccatatgaatgcagcgaatgcgggaaagcctttagccagcggtgccggctcacgcggcatcagcgtgtccacacgggagagaagccctttgaatgcactgtgtgtgggaaagttttcagttcaaaatcttctgttattcaacatcaacggcgttacgccaaacagggaatagactgagttgggcaaaagcttgggtaggacaagaacttccatacaaatttgagatagatctcgcctgtcttaaagctgccatttgctcattctacccactctggctgccgttgtcctgtcctgcttctgcgccagagtgtttaataagcactcccttcctgctgtgttacagaactgtaggggaggccatggaaatgactctaaagatacaaaattttgaagaggtttgtcagacaataggatagatgttaggaggagacacacctcttgtctgagaacctaggccccaggtatcactgcactttaagaaactggaggctgcaacaggagggaaaggcagaatgatatcacagcagtactatttttttttttcagaacatttgttttgatggctgttagtccccctctcttggagcattttggggcactaatcttgttctcttgtgtcccagcttttagacctcttacttccactgctagtagctagcacttactgagcacctgcaatgaggtaaagactcagctaagggttttacaggaagtagattaattgatcctgtcaccaaccatatgaagtaggcactgttaccatctgcatctccagatgagcaccctgaggtttagagagattaaatcacttgcccaaggtgaaccagctggtaaaaggtgatgccaggtcttgaagacaggtccaccttcaaaatctattctctttaccattatgctcgatggtttgtttgttttataatttatgtatatgtattatcctctcaactagattgtaagcacttggaggtgtgacttacaggtctttgtatctcacacagtgccttgctaataggtgctcaataaatatttatatgagtgaatgac

SEQ ID NO: 259194 - DNA, 713 bp, Homo sapiens
  misc_feature (20)..(20): n is a, c, g, or t
  misc_feature (51)..(51): n is a, c, g, or t
  misc_feature (486)..(486): n is a, c, g, or t
  misc_feature (549)..(549): n is a, c, g, or t
  misc_feature (552)..(552): n is a, c, g, or t
ctctttcacgcacacaaaangccctccaagagaaataacccaagagctgcntccagtcagagcatcatgatcaaagtcctggatggcgcgatagtctggatggagatcctgacctgatgacatttgaagatgtggctgtggaattcagccagtgggagtgggggcagctgaaccctgctcagaaggacctctacaaggaggtgatgctggagaacttcaggaacttggccattctgggccttctagtatccaaaccatatgtgatctgccagttggaggaagggggtgagcccttcatggtggagagagaaatctcaacaggagcccactcagactggaagagaaggtctaaatccaaggaatcaatgccaagttggggaatttccaaagaagaattattccaggtagtatcagtggaaaaacacattcaagatgtgctgcagttctcgaagttgaaagcagcctgcggttgtgatggccagttanagatgcagcagataaaacaggagagacacctgaaacaaatgtcaaccattcacaaatctgccnccncccttagcagagattataaatggaatggatttgggaaaagcttaggtttaagatcagcccttgttaaccaacccagcattctcatgggaaaaggttcttataaatgtgatacagaattcaggcagcctttagggggaaacaactctcagagaacccccccc

SEQ ID NO: 259195 - DNA, 490 bp, Homo sapiens
tctatgatattttgttatagcagcccctgaacagactgaggcagcatgtaaaaaagtcccacatatacagaacaaacagaaagaaaatatgcaaaactactactatagtccaggtggctggtcactagaccaggctagtaatcagtcacaaggccataattgatatctatgccttccttctttcactactcattccctatttcccctaattttagctagaaccgcagatgagtgaatttttttacctgttgaagtaacccaaaccttcatttctttcttttttttttttttttttgagatggagtctccttctgtcgcccaggctggagtgcagtggtgagatcttggctcactgcagcctccacctctcgggttcaagcgattctcctgcctcagcctcccgagtaggactacaggcacgcgccatcatgtctggctaatttttgtatttttagtagagatgggatttcaccatgttggccaggcttgt

SEQ ID NO: 259196 - DNA, 245 bp, Homo sapiens
tgatggtcttaccttctttcatgtataatacgcataagaggagattttacatattttgtgtattaaagggctttgaccacgcaattcatttccaaggtgacagtagttaccttgtgaaatgataatgaaaccacaacaacaaaagtcagcagtgaggattagcaaagaaaaaactgggaccaggagtggaggtgctgattgatgtaatgtagtcaccatgtacatgttgctatggaaattatgca

SEQ ID NO: 259197 - DNA, 218 bp, Homo sapiens
agcatctttcactcctgccagctgtgcctgtgagttccacttgctccatgttcttgccaacattcgatggtattggtctgtttaattcagctattctagtgaggggatagtggagtctcactgtggtgttaatttgtattttcctgataactaatgacgttgaacatctttatatttacttattggccacttacatattttactttggaaattgtctc

SEQ ID NO: 259198 - DNA, 337 bp, Homo sapiens
atattattctctgcaatttcactctctgcgcctttgtcttacttcattcattcccatccacaagctgagtcaatgggttatacaaaataaattcatttcaacatttattttatggctactatgtatgtaccagaaactacaaaaggaaaaagaggccgggtgcagtggctcacgcctgtaattctagcacttcgggaggcggatgttgcagtgagccaatatcgcaccactgcactccagcctgggcaacagagcaagactccgtctcgaaaaaaaaaataaattttaaaaactacacatggggtacaatgtacactcctcggcagatgaggtggtg

SEQ ID NO: 259199 - DNA, 544 bp, Homo sapiens
catataaacaaggattaaaaataattaaaataattatataaacaagggttaaaacgtatgtgggtgttatggtagaggaatgtgcaaaatgtggagtggggacccatggcgagagccatctttaatatcattggcttgtcaaatgggcagttctaagggagcttggccttacctgctctggggaattgcaggttgccacataacaaagcatttctgtgtgggtacagataaggtggctgtgtctgtgagaaagcctgggaaaatgcaaaggaaaactatgtctgcatagcagaggcaatactgtcacaccactaatccaagctgaagaaactcaattgctgagttctaactttttactttacttgtaaattgtattcatgatgatttgtttataaatcaaaaactttaaatggacctatatatttcagtatatcatggaagtttttcgtataattcttgtagatgcttttgtaaagagaaaacattcctttttttcaatattaatttcatataagattacactgattaaacaattttccttata

SEQ ID NO: 259200 - DNA, 400 bp, Homo sapiens
aagccaatctctccctgcttttctcatctgcctcccagaatctgatgtcttgctgagtagctggccaggtgtccccattcttagtgacttggaggaggtgggagacttggcaaagcagcaggaatacacacacacccctcacctctgtcctctgcaatcccctgaaaaacaggctcgtctgctttaactggaatcacaaacttttaagttctagaatgaagtagcagatgtttatgtgaaacgatcctatttctctaatattcactcagcaagtagttgtcaagatggggtttacatattgaaatccatggatgggaggattggcaagaactttgaacaatggggtcaatgagatgctgaggagaagccctgcctaggggaagaaaatgaggcgatgggg

SEQ ID NO: 259201 - DNA, 309 bp, Homo sapiens
tttactaatacttatatcagctttttatttttctaagaaaagtaaaaacactaagataaacacacacacacacatatatatatctctcgcagtttttctaaattttcattcactgttaggaataatttttgaagactttaagaactctaaaatagagttgtattttaggtaaatgtttaacagttacattctagaatgatgtctttataatttttttgaagtatgctaccagtaaattgaccgttacagaattcctctgttagctaagatttgttcttgtgtaactttgaggcttattataagaagttt

SEQ ID NO: 259202 - DNA, 479 bp, Homo sapiens
tgccaatccaggagacctacctttcaatctctgttatttacctctagagtttgggaagaccacataaactctttgactctgaatctactcttgtgtaatgtagggatgacaatggtgaccctcagggtggttacataataaaaataatgcaatgcgcagttacgtgaccactcaggttgggtatcaataaaaattcactagaccgggcgtggcagctcacgcctgtaatcccaacattttgggaggctgaggcggatggattgcttgaacccaggagttcgagaccagcctgggcaacatggcaaaaccccttctctacaaaaaaatacagaaaactagctgggcatggtggtgtgtgccttcccagctactcagagggctgaggtcaggggatggcttgagtctaaaaggtggaggctgcagtgagctgtgattgcaccactgcactccagactgggcaacagagcgagacttctttc

SEQ ID NO: 259203 - DNA, 307 bp, Homo sapiens
agaagatgagcattgaaacttcatgttgcaggcagaaaggggatcatacaatgcaggggaatcacgttatttatatggcaaagaactagaattatattttcaagtaataaaaaagttcattttcagtgtttattgcaaatgcttaattttttctatgccctcatcctctgctattgctagcgtcaacataaacaggtgctgattgaaatgggatgttgtgaaaccacacatgaaaggcccccaaatgattttaccctgggggaagaatattctgaatccggacttcccaggcagggagcccaggagt

SEQ ID NO: 259204 - DNA, 552 bp, Homo sapiens
ccagtttttcctcaagtggattaagccaatttaccaatgaccaggtttttctactctgaaacagtaacaagcctgccagaaatgatgtgcagcattttcctggcttagttcagaaactcgatttgtgtttaagctgtcaatttaatccacactgcctttttacttttatcaggatattcttcaggtagaaaagaatggagggaggctttaggcatgactaccgtcctaagtataaagttggttaaaaaaacaaaaatccctactcggcccaaatagcattgtgctttataattcattcttttcacatacagtaccctgcgttatcatggctaatgttttcctgctgagctgccatcatcttttgtcaagctgtcagggttttaaattgaggtaccttccacatttggatagaggtcattatcctgttgcctggttgcattgcctctgctgagcaggttaactgcttgaggtcttttatctagataaatgttttgccagcacttttgctctgtgatgacacgagctgttccttagaggtcaaatagtgatgct

SEQ ID NO: 259205 - DNA, 1069 bp, Homo sapiens
taagaatgagtttcttactgaacaactttctaaaacgcaaattaaactcaataccttaaaagataagttccgtaagacaagagatactctcagaaaaaagtcatcggctttagaaactctccaaacgacctaagccaaacacagcagcaaataaaggaaatgaaagagatgtatgaaaatgcagaagataaagtgaataattccactggaaagtggagctgtgtagaagagaggatatgtcatctccaacatgaaaatccgtgccttgaacagcaactagatgatgttcatcagaaagaggatcataaagagatagtaactaatatccaaagaggctttattgagagtagaaagaaagacctcatgctagaagagaaaagtaagaagctaatgaatgaatgtgatcatttaaaagaaagtctctttcaatatgagagagagaaagcagaaagagtagtggttgtgagacaacttcaacaagaagcggctgacagccctaaaaaaattaactatgttagagtctccactggaaggtatatcacgttgtcatattaatttggttgagacacaggtcccaaagaagaaattatttcaagtggaaagtcaatttgatgatcttatggcggagaaggaagctgtatcttcaaaatgtgtcaatttggctaaagagaatcaagtttttcaacaggagttattatctatgaaaaaagtacaacaggaatgtgaaaaacttgaggaggataaaaagatgttggaagaagaaatattaaatcttaagacacatatggaaaacagtatggtagaacttagtaaactacaagaatataaatcagagctagatgaaagggcaatgcaggcagtagaaaaattagaagaaatccatttacaggaacaagcacaatataaaaaacaattagagcagttaaacaaggatataatacagcttcactaaataagaaggaactcacacttaaagatgtggaatgtaaattctacaaaatgaaaactgcttatgaagaggttacaactgagttagaagaatataaggaagcctttgcagcagcattga

SEQ ID NO: 259206 - DNA, 226 bp, Homo sapiens
agactagattactcagaggagtttcctggagtagggggaggggagtattacttattttttccttttgcccctgactaatttggcttggcagagtagagttactgattttgcatttatttaaaattttgataccttgttcaacatggatttttagaattacttttgatttttaaaactgttgcatttgaatactgtttattccgatgatggagtttcttggtgcccc

SEQ ID NO: 259207 - DNA, 410 bp, Homo sapiens
  misc_feature (76)..(76): n is a, c, g, or t
  misc_feature (108)..(108): n is a, c, g, or t
  misc_feature (117)..(117): n is a, c, g, or t
  misc_feature (257)..(257): n is a, c, g, or t
  misc_feature (376)..(376): n is a, c, g, or t
tgacaccacccctggcccacgatgaatagaggtgcaagagaagagtccagcctcttttttttttttgagtcccctntgtcgcccaggctggagtgcagtggtgcaatnttggctcantgcaacctctgcctcccgggttcaagcaattctcctgcctcagcctcctgagtagctgggacttgcaccaccatgcctggctaatttttgtatttttttttagtaagagacagggtttcaccatgttggccaggctgttntggaactcctgacctcaggtgatccacctgccctggcctctcaaaagtgctgggattacaggcgtgagccacccaccccactctgttgtcaccatttcgtgtgcattattgctcctcangaggttgcagtcagatgtcagctggggctgcagt

SEQ ID NO: 259208 - DNA, 488 bp, Homo sapiens
tcacctgaggtcaggagttcgagaccagcgtggccaacatggtgaaaccccgtctctactaaaaatacaaaaattagccgggtgtggtggcgcacgcctgtaatcccagctactcggggggctgaggcaggagaatcgcttgaactctggagacagaggttgcagtgagccgacatagtgtcactgcactccagcctggcgacagagcgagactccgtctcaaaaaaaaaaaaaaaaaaaaaatcaaaaaggtagctatcttacaggccacattctttgatcataaggtatagaaactggaaataattcatggtaacatcaccaccacctcatgttttggaaattcataattacatttcagaaaactccagaatcaaagatgaaatgaaaattgaagttacaagttggaaatcaaggaaaaggagaataaccacttctacaacttaggggacccagagaaacttatattcaatgaaacttcgtaacct

SEQ ID NO: 259209 - DNA, 509 bp, Homo sapiens
taaggacaattaatgaaggtgaagaaatagtggtgacttgaagttggttggggtttataaacaaaatttgcaagtttgaagacagaaaccaagttcttattttgggatcatagattctcccttattttgataagatgtgagtggggataggaggtgataggatttagcaaagaaaactgaagcaaaaaagtgggaagaagatcagaatagtatgttttggaagccaagagatgagtttcaaggatgggaggttgacagagccttttgcagagaagttaaaagaatggagaaaaggccattgattttgaaaatagggtaccatgtagtgagttgagagaatagctttgacaatgaggtaagtaaggaacaaaggctttaggagattaaggaagtatgggggtaatgaaagaactggagaagcattggatagagactttttttttttttcccgcccctgagatacggtcccactccagcctgggaaacaagagcaaaaccactctcaaaaa

SEQ ID NO: 259210 - DNA, 352 bp, Homo sapiens
caaaaaaaaaaaaaaaaaagaaagaaagaaaagtgtggtattatgcatactaacaacagggaaaagtgaaccagctcccaactgaatcctactttgctaagttgtgtacatgttttctttattcatttccattcacttatgtacaagttaaatatatattttttaattcctgctgtatccgtcaggggactagcaggaaacagaatcaaacagggacgatttaagagaagttaagaagggactaggaggctggctgtggtggctcacgcctgtaatcccaacactttgggaggattgcttgagtccaggagtttgaggccagcttgggcaatatagcaagaccccatcacta

SEQ ID NO: 259211 - DNA, 297 bp, Homo sapiens
gaagaggatgcccagagtgtaaagaaggagatggggatgggcaacagggctccagagggctaccaggctgtgcgttcacaggtcggaggagcagaaaatgcgtccatcgcaacaagaagggggactactgtgagtggaaagcttgctcatggagagggagacattcactcctctcactgtcccctatccctgctgtcccaaggagagagcaccccagttatgtgattgagtgtagtattttttaaatgtcagtactggtttgatttttaactaagtaaaaatggaaaattaaacaaa

SEQ ID NO: 259212 - DNA, 649 bp, Homo sapiens
tttcctcccaccctgtgattccttttcaaaattgtttagctgttctggttcctttgcctgtccacataaattttagaatgctcttgtctagagctacaaaaacatcttgcttagattttgataggaattgtattatacctgtatatcaatctggggagaattgacatctttactgcattaagtcttccagtccacaggtatggcatgtctctccattgattgacaactctgatttcattcatcagtgctttgtagtttttgacacataagttgtgtacatgcgtttttagaattatacccaagcatttcctttcctggcctgtgccatctcgaataagagtggcaagagcagacatccttgccttgtcaccgccttaggggacacctttcagtcgctcactgtcgatgatgttggttgcaggtttctttctagatgctctttatcaagttaaggaggttatcctatattgctttttttctgagagattttattttgttcaattttgttaaatgcttttccagcattgattgatatgattatgtgatttttcttctttagcctgttaataatggacattacatggattggttttttgaatattgaacaagccttctattcctggaataaactccacttggccatggcaca

SEQ ID NO: 259213 - DNA, 530 bp, Homo sapiens
ccaactctgagtatacttagggaaacataatgtctcggagctaatttctggacactgaagatggaataataaattattttgcaagtaattgtgtttacaattctcagcttccagcaaaactgaagaagaacctaacctagttgccagttgaccataaaatttaattaggggcatataattcaaaaggaggtttaaaaattgagtgtcccatctattcctaactcgctgagaattttatcacaacaggatgttgaattttgtcaaatgtttattcttcatctatggatatgatcatatggttaagcttatttaatatgtcaatattgagaaatatattgatggatttttttaattgagtaaagttgctattcaaatctagttccatccccatctactcacttctgtgaatgaaaattctcagtgatacgtgtataagaattttaaaaatagcaatataattcatgctgaaacctgtatttttctattagtaagtagcattcaaattaagatacctgaacaaattggaaaaa

SEQ ID NO: 259214 - DNA, 433 bp, Homo sapiens
ttataggcgtgagccaaggtgcccagccctgagagaatgtttattaaagaaccgagtaaacacttttctgtgatggttttggatttgtatattgatttccaaaattccaggtattcttagtgggctcagtttattttctgttctgataatcttgaaacggaatcctactgttagggcagacaattgggatttggattaccttggtgtttatactttagtgcaaactacagaaatgaaaatgtagactctgtactcatcaaaagtaatgaatcttttctgaaattgactttttttttctttttttggaatggagtctcactctgttgcctaggttggagtgcagtggcctgatctcagctcactgcaacctctgcctcctgggtacaagcaattctcctgtttcaacatatcaagtagctgggattgccagcgc

SEQ ID NO: 259215 - DNA, 413 bp, Homo sapiens
aagacaagaataaagagaagatcctaaaagtattcaggaagaaaacaggtcatgtacaaaggatcaggaatcaaaatggtaagagactttacaaaagcaacgctggaagctagaagataatggaacaatgccttcaaaattctgaggaaacatgatttctatctagaattccatactcttaagtgtgagcgtcaagatgttttcagacaggaaagatgtggtggttttaaaacatgtccaataatcctttgatactcctaatttcaaatggtagagactaatactctttcttgaatacgggtaggatgggccaggcacggtggctcacgcctatactcccagcactttgggaggctgaggctggcggatcacttgaggtcacaagttcaagaccagcctggccaacatggtga

SEQ ID NO: 259216 - DNA, 182 bp, Homo sapiens
gcacagtaccaagtaaccattttagtaagtgttaggcattattagtaatattcatcttcattgtcataaatattgataatcattgtggttaatatttttctgccagagtgtgtcttgaagcagcttattctgcaattcttcttaaaactgccagagttctgtttcttttttttttttttgag

SEQ ID NO: 259217 - DNA, 1016 bp, Homo sapiens
ctccgtctcaaaaaaaataaaaataaaaaagaagtcattagagttggtttctggtgaggattctcttctgggctgccttcttgctgtgtcctcacctggcctttcctctgtgcactgacaaacagggagatctctgatgtcccttccccttctcattaagacacaagttttattggattagggccctacccttatgacctcatttaaccttgtttatctccttaaaggcactatctccaaatatagtcacattgagagttagggcttcaattgatgacttggatttgggggagtagacacaattcagtccttaacactgatgatgctaggggacttttgtttctttcaccaaagaggctctagtttttacatctactgagtacatttgatgattttatgtatgatttgatatattaactctatagaaattaatgatagatactccatagtaatgacgtatacccacttaggaatcagccaagtgaaattttttgtttttatatgacttaattccactttaatcctaaggtaataaatttaagcatttcacatgtgtgcagatttaaaactatgctaaattttttactatttgagtcctatcaggttcctttaagtgaaattggcttacttatagtacttatgaattaaatgtatttctgaaaagtgttacgctttaaaaactgaatttttcccatgcattgtgattctaagcgtacttagttcatcaccccctccttctacccttgtccaatttacattgtcttctatgcttaattaccttcctgttttttgttttatttagttacagactttgttggggtggggggagaaatgtgttggatttctttagatatcattgatatggcattgaagttagttttcttctgtgttttatgatttctgctttatatttatgatctttttcttcattgaggttaaacatgatttttaaatgggattattttattttgtaatgattaaattatatagtaaattgtgaggatatgtaggtttcc

SEQ ID NO: 259218 - DNA, 727 bp, Homo sapiens
ggagataaggttctggccttcaaacactattttcactgacaatttctctttccttgcttgaataatcccactagcaatctaaagaaagaacttttattccaaagaaacatactcataaagctgtgagttgttaaagagaacatgtgagtttctcatattcctaccttccactcctcctgtttgcccaccctttcctccaactccacattcaacttaggatagttttatttacacaatgaggtctgattgttttggggctttctttgtcatatatcatgccatttaatggtaagcaatacatttgtgactattcttttaggatgcatcagactttccctataaatctgaacagagtgagtggtatggaaaactagctgctagaattttgtttttgcgagtaaaaggcaacgtaacataaaaattaaacaaacatcttcctttccaatcactatctgcatgttacaaaccatgtagatttgtaactttgccaatacactatggtggaggaagggtgcctctgttccaagggcttcactccttggagatgtgttttcagaccgtggaacacagtggggtcaagtctatcagtatgaggcacagggacaatggggagactaatttaaaaagcataatgtgggcatcagacagaattgggtttaaatttctgtattttcctcaccagtcaaaaggcgttgcttggttcagtctgaacttcatttccctatct

SEQ ID NO: 259219 - DNA, 820 bp, Homo sapiens
gccggaccatggttgccgcccggggcctaggactggttgtgcctggtagaggctgtttaggattgcccgaggcgagatctgctcagctgcttttcgtctgtctttgaggtgtggggatgaaggccggggcagtccctgagagtgcatcgctgtaggtccagggtctcacggaattttgcagaacgttccagaggagactgaatgggatcctcttaatttctgtccccatttcggccttttcttttcttccaccatgtattacctttgctccgctcagagagatgtcctctaataacgccagcgacgcattgtgctcctagcagaggcacgcaccaacctcccgtgtgttcgcatagtcaaatacagtttgctcctttgcacatttagcgctgtgataaacaaggataagtttttgtaatataagtctaatcattacgaagagggaatggggctgctcccaaaccagaagagtttgcatcacactgctaatgacaattggtaaagattaaagagccctctgcattatagtggatacctagagctagagtattcgattaagcaaatcatgcggtgatatcgttgaatactttgaccctggacgtttagtgttctctgaagtttcatccccaaccaatgtgaccagtgcatctggtttcaattccaaggactgggtcagcaaaaatagtacctctcacaggcggaaggtactttggttgtaaaattagcggcagcccaagtttggaaaatgctactgcctttctgaggcacattcccctgctatgtatattggtcagaaaaccaagtcaaactagcttagacc

SEQ ID NO: 259220 - DNA, 438 bp, Homo sapiens
ggtgggaagaagtccccacacacttggtcacagcaatcttctatgttgatcgattgtctttgagtaagagaattaaaaaaaatgctttgagtttgagtttctcagacagctcttcagacaaacccccttgtgatattctgccagcacagccctccattcatgggggactgggcccctcacttctcccaaactcattactgcctcttaatcaccacaggctggtcctgttttctctgcctgtcctaatgcgagcatcaagacctagtcaagccttgccttctccatgaagcctccccctccattcttccggttagccctgctatcagtgcagttcttctggcacatcacagtgagcattgcgttagaagtggcctgtttcatatctgagtcttgacatctttaggtattagaactcaaggagtgttacttaatcatcca

SEQ ID NO: 259221 - DNA, 531 bp, Homo sapiens
tattttgcctggctattaatatttttaaaacttcataaagatagccattatttaagtactgcgtaatgatttcagccacatttttgccattgctgggtacaatattagcactgttaagccagcagtccttacgatggcagtacatctaatggtgtgggagagaccacaggacgcgttctctaatttggcactagctcacagtgaactggtgttacaaactcctctgttgacattcctttgacatatgaaatgaccatctgctcttaaattctacttctccagtcttgagggtttacttttcccagatcaagcatcttttactgtgcagtcccagtgaggtagtagctgtctgccgaaagggggcatttgtagttagcccaggctaaacaagtgctaaaaggaagtggatcttttcaatatcatgagccacgagtaggaaatttgattgagaggcatttgtgtcaagtggtacatttttgaacctcttggcaaagaaactgaagtttatttttttttaagtcttttattatg

SEQ ID NO: 259222 - DNA, 434 bp, Homo sapiens
tagggctctctctgttgctctcagctgcagccacgtgttgccccatggagactgggccaggagctgctggatcttactgtttctcaagagaagttgtgaaatctcctcattttaaactcttggcaattatttcatttttgtaaacattgggagagcaaacaaaacatgtcggtaggctgtatttagcccacaagctgccagtttgctatctatgttctaggctttctgtgcttgacttagcaaaatatttactaagcgcctgctgtacctgtagctcctcagtacctggtcatgtttactgttctgccacctcaggcgtgctggctcagtcatcctatcaggtactaaatcagtttagtgggcttgaaatggtgtttcaattcaaattaaaatgcaatttgcatttccctgattactgctgagattgaacattt

SEQ ID NO: 259223 - DNA, 352 bp, Homo sapiens
aaagaagccggagagcggtagaccagacatctagacctgaaaggctcgtgcggaggcagaggcgggatcttccggaggtgagaattgtttttttattgtagcagaatggggaggaattgaggggaaaacggagatagaacctgaaagagccccaaacgtgagaatctgtagctccccaagaataagatcttccagaaaaattagaccgaaaactaggcgtctgggaaccctgacatccttggaggagtagcatcatcatgaccctctgtgttccttttggcataaggacttgcttccattgtttgtttgttaaattgttgtgtttgtttaataaataaaaccttttcatgta

SEQ ID NO: 259224 - DNA, 186 bp, Homo sapiens
acttgtgactatctcatttaattcttcactcaactgcatcagtttggtactactattccccttatgttacataaaaggaatgctaggcacatacagtttgaattacttcccaatttcacacccctagaaggtggcagaactgcctggtcagtcctggagtaggaacagagcgcacaaaatacaaga

SEQ ID NO: 259225 - DNA, 160 bp, Homo sapiens
catgtcgcagcaaaaaatggcaagagccctggtggccacgtgtagaggaataaaccgcggcacctcctcagccattagcgggaaccaggaatggctccgtgtgccccacagagtgagggcagggttgtggagtcaaataaaaaaacaaggtaggccacgc

SEQ ID NO: 259226 - DNA, 675 bp, Homo sapiens
ctcacgaaggaactacaattggcagctcaaggtatattattgttttattcatagcagaaagttttacaatatgaattgtatttttcaattcaattcaatatgcattaaatctttattattttgttttttatttatttttgtagagacagggtctcactctgtcacccagactagagttcagtgatgagatcatagtccactacaacatgatactcctgggctcaagtgaacatcctgccccagcctcctgagtagctaggactacaagtgtgctccaccataccctgctagctttttaaaattttttgtagagacaggatcttgctatattgcccaggctggtctcaaactcctgagctgaagtgatccttctgcctcagcctccctaagtgctgggattacaggcatgagccactgtgcccagtcttgaatgtacttttaattacttataatagcatgtaattaaaaacaaacatgagtaaaacttaggaaacaggtgtgtaatatggaaatgaaggcaactggttaaaatagatgtttgtggcttttgacaaggaaaaagagtggccagatctagaaagaatgatggcaacagggttatggagggagacagaaaatgtaatgggaaaaaataatgcttacaaaagcaaacaaaaaagaagttagcattaaata

SEQ ID NO: 259227 - DNA, 381 bp, Homo sapiens
ctttttaacgaaacacaacattcacttctaacacagctcagaaaaatatatcgcttgaggagaaaatgttaacacgcttgctacattccaaactgtgaatctgtatgtgatgtgtttagcaccaaaaatcagcattggcacttatctgaaaaagagtaaatatattagttattgaaaattctactcctccattatcatttatttacgtggaatgtaaaattcctgggttataaaaatacaatttaaatgttaaatttaaccaatttgatatcttaggtgattccagtaaaatgtattatatttttcagtaggtatagaggaaaaaatgttactgtaataaagtagctttaaatagttataaagtgataattcatcccgaat

SEQ ID NO: 259228 - DNA, 248 bp, Homo sapiens
gtgtctttcggtggaagttcacttatagttttgtgagggaagaggagtgggaccatgggcctgaacccttctcaccctgcccctctagcccaaattttattttattttttcgttgtttcatgtagtttgtgtgttgctgtgtgacctttggtttcattctctgaatagatacaaataaaatattaagttttcttttccctttaccccttgaattaacttctaaaataaatgctttatttttcaacccg

SEQ ID NO: 259229 - DNA, 284 bp, Homo sapiens
gaattagggaggcttcaaggaggaggtggaacgagagcgatttggaagccctgggttttttaattccaaaagcaatgtttgtatgagaaagaaaattgcagtagaagcaaagagacttgaaacctaatcagaaaccatccttcctccggctcctccgaagcagccagtttattctgtgccttttcccttcttgaggtatacacatttttatgtagatttaatcagggcctgttttgtctgtttttctgttttcatggattattataaacctccttttctctaga

SEQ ID NO: 259230 - DNA, 564 bp, Homo sapiens
tggccttcgagcagcccagggagagtctctgcgtcctccagcccccgcttcccttcatgtcggaggtcctaagcccgcagcgaagtccgcaaagagctttccccgacgcctacgagaccggaagtgcctgggcccaggtggaggaaggacccgcgtggccgcctccgcgctctccctggggtccgtgccccttccggcgtttctcccgcgtccttcaccatggcaactcgggcgtcgggagcgtgggctgcgagccgagtgggtgggggagccgccgggctctatccgccagcccacgagaagtgacgaaggagcaccattgaaggagaattagacaaactggagtctactgagatgaggctgttgggaatggccctggtaccacatcctgagcagggatggccgatggaatggggagaagactcaggtggggcttgagtgtgtcctctgatgactgaagagccttgggagcaagcatccttcctgctactgtgtgtttgctggttccaatgatacataatttgtgcttttcgtaattaaagtattatcctgtaaaaaaaaaaa

SEQ ID NO: 259231 - DNA, 433 bp, Homo sapiens
tggccttcgagcagcccagggagagtctctgcgtcctccagcccccgcttcccttcatgtcggaggtcctaagcccgcagcgaagtccgcaaagagctttccccgacgcctacgagaccggaagtgcctgggcccaggtggaggaaggacccgcgtggccgcctccgcgctctccctggggagcaccattgaaggagaattagacaaactggagtctactgagatgaggctgttgggaatggccctggtaccacatcctgagcagggatggccgatggaatggggagaagactcaggtggggcttgagtgtgtcctctgatgactgaagagccttgggagcaagcatccttcctgctactgtgtgtttgctggttccaatgatacataatttgtgcttttcgtaattaaagtattatcctgtaaaaaaaaaaa

SEQ ID NO: 259232 - DNA, 358 bp, Homo sapiens
tgtcatgacctccatcatcagatggatgtaaacagcctctgcaacttaaggagggtgtggaggggcaacactgaagtcccctcctgtagcaacgatctggcacaacttctgcctcaagtctgcttttgttttttggtacattagataaatattgaagtctgtatatttctgtaaattatcatggtctttaacttttatttatttttcacctatcagtgtattggagcaatttcatatctgttgcatcagaccttggtgtttcgttgagttaaaagatatttgatttttaactttttctttcatttcctaatagagacagtgaatgttaaaggatatcaataaatttgattaaaactgc

SEQ ID NO: 259233 - DNA, 344 bp, Homo sapiens
catgaggtcaagagattgagaccatcctggccaacgtggtgaaaccccatctcaactaaaaatacaaaaattagctgggcatggtggcacgctcctgtaggcccagccatttgggaggctgaggcaggagaattgcttgaaccctggaggcggaggttgcagtgagctgagattgcaccactgcactccagcctggcgacagagcgagactccgtctcaaaaaaaaaaaaaaaagtgatctatttttatttagggaaatttgaaaatacagaaaaataatcagctactcaattctggctgctattaagtttcaaaatttcttgttgaaaagtacaggcccagga

SEQ ID NO: 259234 - DNA, 690 bp, Homo sapiens
taagaggaaggaaggggtcgtatagaaatcccaggaatctgggattctggcatttataaccaggaaagctgaatttgagtttagagtccactacaatatatttatttgattttgaataattacaaccttgatttgctccttggtaaggtagaaatagtaatatcttcctttccaacctcattgggaaaaaagagagaaaccaaaatttgtatctattatgtaccatatggttttattctgagaattgagagaaataacatattttaagtgtatgtaaatttttttttttttgagatggagtctcactctgttgcccaggctggagtgcagtggcgtgatcttggctcactgcgagctccacctcccgggttcacaccattctcctgcctcagcctcctgagtagctgggactgcaagcacctgccaccacgcccggctaattttttcgtatttttagtagagatggggtttcaccgtgttagctggtatggtctccatctcctgacctagtgatccacccgcctcagcctcctaaaatgctgggactacaggcgtgagccaccgtgcccggccaagtgtatgtaaattttaaaaatgcattgtaaactgtaaagtgaaccacaggataatcatgattttctccctgttcttcctgtcccccaggttgagcatgtggataactgagagatg

SEQ ID NO: 259235 - DNA, 577 bp, Homo sapiens
ccggcagtaagtacaggtgctggtatattggcagtgctaaaaagttgcatgggaactacaggaagtctaaaatgactcttaatcacttagctgtttctgggctacaggaaaaaggaaatgaatattactttgaaatcttactggaaaagtggctaaactggtttatgtaggtaagtttttgtaagcagacaaaaaatttctaagtgcagtcttctctgtataggaaagctaagtcagaattaggtaatattttgttgtttcaatagatactaatattttgaaaaatatagttacttgttattgagtatatcagaagttaattattatatcaatagttggttttttaagtaggctggtgatatttgcctcatggtaggtcactgtggcatttctgggtgttaggatgctgttactccttaaaccctgaaaaagtgaaaacattaaagattcctgtcaaatgggtactaacgattctcttctgtgtgtgagatatgttgctaggtatggcgtgttaaagtataaaacagaacatttatgtgtgtctatgtaataaaacataacatttggaaaagattat

SEQ ID NO: 259236 - DNA, 1636 bp, Homo sapiens
caatcggataggtagtcataccattaacagatacttccttgaaggtagaatattatttcctttctttacagttttgtgttacacaagtccaagtggtgccagcaaacttcttaccgtgaaatgttgtaaaacacctggcatactgaaatttctgaaacaaaaacacaagctccacattgataacttgataaataaccactaaagtttagatgcagggactgagatgatacaggcaaaatcttggtgttggtttctcttttaattcgtatcttcgatcacctaacctttctcaatccaagagcagttcagtcttttctccccaagtctaggatgccaaagagcatcataggaaaagataattagggattgaccagcatttcaattagttctcttcttcatctttgcatttctcaaaagtgttctcctggaccagagagaaagagctggtccattttttttcattctttctattcaaatttttccacccagacaatactttattaacacagatactgtagatccttccttggtcagtgaattattacaagaggagctatccttccaccaaagtgagtgaaaacaagttccagtatcttttcttccatccagttttgttctcagaatccaagtcagtcctgggtcttttctcactttagaccctggcctcagatgtgtttattcttgctatttaaaaatacctttaaatttcacatgctggcctgcagaacttgcatcctttgttctatactgttgactgcttgatggtattgaaaggtgactataatgagggaagaaaggaggaggtaaagagagaagaatttgtcccagatctgtttaaagtttcaaaatttaaaaagggacccattaaattatgggaaaatggctatagagtgtgagcctccgttgaccatatgctcaaagaccgtactctgccacctgccttccaggtagctattctagaaactcagtcctttgtggaaacccaactaccttttaaaagtctctttccagattccaaaaggacaagagatcagagagtcacatatacacctcttgttttattttcttgctttcacgggtattattgccaagaaaatcgtagggaaaaactttaaacttttcttttcagttgatccctttgacatcacctctcatgtttaaaatcaggaaaacacacccctaaaatttgcactctcttccgttttgaaaaagaaaacccacacacaaatgcacactattaccgtctttcaccctgcgctatatttccaaagtgtattataatccagatattgccccatctcaaacatgttaagtcagactgtgctgaaagactttccagggacggtcaacagggtatatgttcagtggctgccctgaaatcctggtggggatgaggatcacgcttcatcatcaaggggatgcccatcccctgataagctcccagtccttttggaagatttctttgaatgttaattgcattttcagttttgctcatttcccaccccaatgttttgtctgcaacatcgcttacactggattctttctatttttattcctatcattaaatggtagtgctgtaaattctgcattctgcaattaatgttaaataaactgctttaattcattgaaaatggct

SEQ ID NO: 259237 - DNA, 1582 bp, Homo sapiens
caatcggataggtagtcataccattaacagatacttccttgaaggtagaatattatttcctttctttacagttttgtgttacacaagtccaagtggtgccagcaaacttcttaccgtgaaatgttgtaaaacacctggcatactgaaatttctgaaacaaaaacacaagctccacattgataacttgataaataaccactaaagtttagatgcagggactgagatgatacaggcaaaatcttggtgttggtttctcttttaattcgtatcttcgatcacctaacctttctcaatccaagagcagttcagtcttttctccccaagtctaggatgccaaagagcatcataggaaaagataattagggattgaccagcatttcaattagttctcttcttcatctttgcatttctcaaaagtgttctcctggaccagagagaaagagctggtccattttttttcattctttctattcaaatttttccacccagacaatactttattaacacagatactgtagatccttccttggtcagtgaattattacaagaggagctatccttccaccaaagtgagtgaaaacaagttccagtatcttttcttccatccagttttgttctcagaatccaagtcagtcctgggtcttttctcactttagaccctggcctcagatgtgtttattcttgctatttaaaaatacctttaaatttcacatgctggcctgcagaacttgcatcctttgttctatactgttgactgcttgatggtattgaaaggtgactataatgagggaagaaaggaggaggtaaagagagaagaatttgtcccagatctgtttaaagtttcaaaatttaaaaagggacccattaaattatgggaaaatggctatagagtgtgagcctccgttgaccatatgctcaaagaccgtactctgccacctgccttccaggtagctattctagaaactcagtcctttgtggaaacccaactaccttttaaaagtctctttccagattccaaaaggacaagagatcagagagtcacatatacacctcttgttttattttcttgctttcacgggtattattgccaagaaaatcgtagggaaaaactttaaacttttcttttcagttgatccctttgacatcacctctcatgtttaaaatcaggaaaacacacccctaaaatttgcactctcttccgttttgaaaaagaaaacccacacacaaatgcacactattaccgtctttcaccctgcgctatatttccaaagtgtattataatccagatattgccccatctcaaacatgttaagtcagactgtgctgaaagactttccagggacggtcaacagggtatatgttcagtggctgccctgaaatcctggtggggatgaggaggaagatttctttgaatgttaattgcattttcagttttgctcatttcccaccccaatgttttgtctgcaacatcgcttacactggattctttctatttttattcctatcattaaatggtagtgctgtaaattctgcattctgcaattaatgttaaataaactgctttaattcattgaaaatggct

SEQ ID NO: 259238 - DNA, 638 bp, Homo sapiens
tgatgattaatcatgtttttctacttctttgttgagtaattgtgaatagtatctagtggttatgaatgatctgggctttagagattacagaagaaagtatttgcagaattagggttcaagctctcttgttctctcttttaaaggattgcctctatcattttgtagcagcagtggctgccccctagtcttctggttctttaatccaataagacagtaaagttttcataagagttttagctgcccatgttagtgatgactgtggcctgccttcaggctaaatgccttaaaaatgaaaaactctagtgctctgcccaccttccaattgttgattaccttccagtttctgctgttcttctctctccagcagttgttttttctactaccgttttatcatttgttttctggttgttttgtggccttccttccctccttcttgcttgcctgcttacgtgattttctcagtggtgtgtttcaatatcttgctttttcttgtttgtgtatctgttgtaggattttttatttgaggttgctatcaggtttgcaaataatataactcattattttaaactgatgacaatttaacactaatttcaaaaactaacagagaaaactaataaaaattctacaatttaacttca

SEQ ID NO: 259239 - DNA, 589 bp, Homo sapiens
attgttagaaggtcattgcaaaccgagtcatcaaatttctaggtcataataaagaagtaagcgaagcagttttcctttctagatccctgagaattaagttaactttggatttgctactccctattcaagctgagattttattgttacctggcaataaagcctgtttaatagctctcatctctttctttacttcttgtctaagcttctggtcttcgtagattcaacttaataagtctgttttctaacttctcctgtgttcattttttaacatagtaagtactcaggaaatgcttacttggaacaacatttatatttaatatgcactttaagcgcctcttggtgagtggagtacggcagtctcctatgaaacatgttgaatttagtattctcttcctatcaacaatgcaagcaataatcagtcgggttcttttgttcaagaaaatggcggatgagaatgatattcaagaaaataggcagggactggagaaagcacctatttgatagaattttttttttgtatgtatgattttggaactaggtcagcacagcagtgtttatgaaacattggtaagatgggaaaattctctta

SEQ ID NO: 259240 - DNA, 878 bp, Homo sapiens
caaatgtattagcataaattgctcaaaatatccttatctttttcatatctgtaggatttgagagctgtcccctttttaattcttgatatcagacatttgcaatttctctttttttcttgataagtcttgctagcggtttatcaatttttaaaatcttctttttattttaggagatagggtctttctatgttgcccagactagactccaacccctgggctcaagcaatcctcctgcatcggccacctgagtagctgggattacaggtatgtaccacagcacccagcttaattttgttaatctttttattttttgtttttaatttttttagagacagggttttgttccgttgcctagactggagtacagtggcctgatcattacacactgtgacctcaaactcctgggttcaaaccatcctcctgtctcagtctctcaagaagctgagactacaagcacaacccaccaccgctggctaatttttaaaattttttgtagagactggtcttattgtgttgctcaggctggtctcgaactcctcacctcaagtgatcctactgcctcagcctcccagaatgttggaattacaggcgtgagccaccatgcctggcccacattacctcttaagatgactcaaaagcgcttcaaacataattgtgcccaagacaagctcaaagtctttcctctcagacctgattcttttccagtgaacctacacatttattgtaggtttgagttaagaaaagtgccaacagtgcaacacataaataggcaaaggacatgatctgacagtccacagaaaaataagggctttcggtatgaaaaaatcctccacctcattcataagaagaaaaactaagttgtatctatacaatggaat

SEQ ID NO: 259241 - DNA, 362 bp, Homo sapiens
tgagcaagtgctcacgggtagaaagctcatgcagtgtctcccacacccagaggattcgaaaatgaccctggaggtgtaaaagctgtctctggagattaaacgactggaacacgtgtgagacttgaagacgaacaatgccagttagaaaccagttaggaaggattttccttccctttccccacaaaacagagaagcagttatatttctctctttagcaattctgtgtttctcaagtactattatttactggggaaaaatatctgtgtttaggagaattcactaatattcttagtggcaccgatcacatgaaacaattcataatttttgtcttagttcagtttaagttcctgctttcctggatt

SEQ ID NO: 259242 - DNA, 515 bp, Homo sapiens
atcacttcatctcttttactttaggttttctgggatggatcactgttgtcttgtcagtgagaaggataagaagcaaatcatttttagagggtgatagcattctcttaatgcctaaggcttgcttttggatttccttccatcttcagtattcctaggtttgcctgctgttgttcataaggaaaaaaagatttttttttttgaggcacttactcatactgcaacactacttctatcagttttgttctttcatcatggattataaagataaacatgacattaggaaacatttcaggcaaaatgctcaagtgtattttgtttaagtaaacttctaatatcatatcaacttgcaatttatcctttaaaaggggttttgagaggatgaagggcaaatggcacataaactttttccatgagcctcaaattctggctagtaatttttttaaaaaatagcttttacatttctttataaggggctataccaggttatgatgccaacagaagacatacatgctagg

SEQ ID NO: 259243 - DNA, 351 bp, Homo sapiens
agcccccggggagcagcagaagtgcgtgggaacagagttgaacaggatgtggacttggacctgagcctggccctgccgctccccaccccgagttcttgcctggatcggggcaggaaagggaggctccattctggcctgaggcctgggtgggcctcctgccctaaacacaaggattgggacctggctctgtgggctcatccagtcattcaacaaacacttattggccgggcacggtggctcccacctgtaatcctaatactctgggaagccaaggcgggcggatcacctgagctcaggaatttgagaccagcctggccaacatggcaaaacaccatctctactgaaaaaaaa

SEQ ID NO: 259244 - DNA, 412 bp, Homo sapiens
gattcaacaaaaagagtattatctaaacccagcgcattagtctgttctcacattgctataaaggactacctgaaactgggtaatttataaagaaaaaaggtttaattggctcacagttcttcagtctgtatgggtaggctggctggggaaggcctcaggaaactttcagtcatggtgcaaggcaaaagggaagcaggtatatctccacatgaagcaggagagagatagtgaagtgagaagtgctacacacttttaaacaatgagatcttgtgagaactcaatcactatcacaagaacagcaagggggaagtctgctcccatgatccattcacctcccacttccaacactgaaagattacagttcaacatgagatttgtgtggggacacagagccaaaccaaattacattacc

SEQ ID NO: 259245 - DNA, 340 bp, Homo sapiens
gggcaacatggcaacaagccacagtcactgtgggcgggcctgagtggggagtgcaggggttcctgtcctgtgtgtctgtctcacaggggagtcctgacctgaccctcacagcccctccacccagaccttcctgcatgttccacccagcccaccctcctgcacccaagagcacccagccctcccttctgctcatgcccctcccttctcaaatccctcccagcagtgcagctctgggctaggacacagcctagggaacgtgactgagaaagagccaagaaaacttgatcagtgatcaagttggtgtttaagtaagattttcaataaaaagtagaattgggta

SEQ ID NO: 259246 - DNA, 667 bp, Homo sapiens
ctgaagtatctggctttagggttttacactaatgaaatgattttagggttttacaccaatgaaatgatagacacacaaagtgtgggaagctgaagtctgccctaaaactgaaggaacagaaagtttcatttaggaatttaaaattcagaagagataagaagcagaaactttaaggctgtgtgaaagggctggaatctacaaatggaaatcaagggaatgaactaaaagtcaaggaattatcaatttaacataaaatacttccatgatataaaagattataaaaataaagatgatagaagcagtgatgtgttttttctctaatcttaagaaccaaaaagaaaagcagtgtatgtgttttctagtttccattcattcaccaaaacatagctactgtcctaccagttctagagaaacgaatagagcataccaatgtcacattttcaccacacagaaaagaaacgctgtgaactccaagatgtcttgatcatcttttacctgtatccatatttatcactgcactttatcatgagtgaggctgagagtctgaattatacttgtgtgtgcctttgtattcctccctttgataagttaattcaaatggggaaaggggactcctggctgactgattccattgtacggttcgagaaggcccaaaatccaacattct

SEQ ID NO: 259247 - DNA, 521 bp, Homo sapiens
ccacaaacccccatgacactagtttacctatgtaataaacctgcatatgtaccacaaaattaaaagttaaataaaagcatggtaacaaaataaaataaaaataaataagtaaataaaagaaaaaaatgaaatattgagaagtgattaattatcacaatgctcaataaataaatgttctgagaggccatgtgaattatatgtgttatatattacatttcataatacattcatatattaatacattaataaattcacacatatattatttcagatttacccagatttatgtgaactccaaactaattttttgtgtcatataatcatcatggcattaactgcctttcttgtttcaaagattatattattctttattgcccctagtagtctcttccccagtagagggccaactactcttctaagctcacatagatagacataataatttagatttaggtacatcaaatacagtaaacaacagaatagttctgaatttttcaaaaattttccatagtttctgattc

SEQ ID NO: 259248 - DNA, 323 bp, Homo sapiens
aataaaatctggaactgaagtttcactcccctcatggaacaaatgtatcaagacttggtcagaactgaaggccagaacactttcaaaagtgaaggggtacaagctcaggaatgttaggtgttaagatcccttaccatactttaccatatatggtcttgtttaaagttcttccaatcaagacctacccaccagcacttctgcataccagcctgctctctctaacccagaaaacttgccccagactccagaatggggagatggaattgagctttgtctcctgcctcctcgccgccaaccccacaataaaacctttttttttctta

SEQ ID NO: 259249 - DNA, 384 bp, Homo sapiens
tgagcctcagtttccccatctgtgaaactggagtcgtaacagacccttctatttaaagtggttttgaggcttcagtgatgcccggcccatgcttagccaagtgtggtggacagaacagtggtgctcaaaagatgttcatgtcctcatccccagaacctggaaatattttaatggccaaaggagctctgtgggtttgattaaattaaggatcttgagatggggagagtgccctggattatctggtgggcctcacgtaacccccagaggccttataagggaaagagggaggcaagagagctggaaccagagctgtgaagatgcaagcagagcctggagtgatgccagcgctttcagcagctttgaagacgaggaagggactgtgag

SEQ ID NO: 259250 - DNA, 899 bp, Homo sapiens
gtgaatctttaattatgactataaaagaaattgtgattggaaatagaatttttatgctagtggttatgatttcattgaaaataggaaatcttatttaagaactctggtcacaaaacctccccagatagtgacgtaaataagacccagtgtaacaactgtggcattgacatgtcagttcatgtagattgagtcacaatttgatttcgagaatggccatatcccattttgtcttactccatggtgttcctgagcacttggatacaaatagattctgtttcctaaaagtagccaaatctttgtagttcaagtgaatattccagactaaaatatgtgtctttttgaaggtccttaagccttacatacttaattgtgtaatttggcaaatatttgctgttgtgttgtgtcaagtcctgtgatagagacagttcctacctttctggagctttcacagtgtgactcatttcagtacgtaagtcggagccagttttaatagaatgttctctggttgacttctgttgtaaggaataatttcatttcatgtctgggtcaatatgtgaaagattaaattattagggcaaactgaaaaaaaaaatctagttttacccccccaccaccacattcccaaaataatttagcatggtttataacaaatatcaagcaacaataattagaagcagataaaagctcagcaagtagagggcaagaataaaaaacctaactgttagatctcatgctgtaggctccagccaagttgtctctgagcttcctaagagcaaagagccaactggcaagttagtaatcaggcaattgccataattttctaatggaggaggggagtggtcatgtgcattctaagctctttaaagccgaggagtaagctttctttccttcatgatctc

SEQ ID NO: 259251 - DNA, 449 bp, Homo sapiens
agacagatcatccgttctgagtagggcttaattggacaaactaaagctttggaggccaaattccctgtctcaaaaatgaattgcagaaatcagtctgtgactggctaacagtttgtggataacatagttcaaaggtatgtgaaagggcttcagatacgctgcttcctgacccagcacagtaaggatcatttacgtgccttcacttacaagatcttgccctgtcactaaaaagcttctagatagagctagctatatacaactctctcaaagaacagcagctaagagcatttgataaatgcttagaaaaacttagcttacattttcttttcagccagctggagcctattggcttttgaaattaacaggaaggaacaggcactggaaggagcttcataaaccatcaacccagtcttatctccatagcaacatggttttctcacatctgaata

SEQ ID NO: 259252 - DNA, 2138 bp, Homo sapiens
agttcgcctctgcagcctctgcggggaagtgccggggctgctcgaggctcagttcttaggactgcaaggaggcagccccggcgtgcggcggtgcgcacagtctagagtggccagggcgcgagagtgcaacgtcctcctggccccgagcgcgtcgtcgcgccccgggagcagaccctcgcccagcagttaccgccgtcccgactttccgttccagttgcagctcctgccgggcaacatgtcaagagccgccgccgctacagctgccgccgccacctggggaagagcagcagcagcagcggcggccgcgggcacacgggggcaataaaccgagccacccgggcgtccagcgtgccggggaaccctctctgcgctcactgcccggcgggacccacgccatgtgctgagccatgtccctggccgcgcccgcgggcagcgcatggggcagcgcctgagtggcggcagatcttgcctcgatgtccccggccggctcctaccgcagccgccgccgcccccgccgccggtgaggaggaagctcgcgctgctcttcgccatgctctgcgtctggctctatatgttcctgtactcgtgcgccggctcctgcgccgccgcgccggggctgctgctcctgggctctgggtcccgcgccgcacacgacccgccagccctggccacagctccggacgggacgccccccaggctgccgttccgggcgccgccagccaccccactggcttcaggcaaggagatggccgagggcgctgcgagcccggaggagcagagtcccgaggtgccggactccccaagccccatctccagctttttcagtgggtctgggagcaagcagctgccgcaggccatcatcatcggcgtgaagaagggcggcacgcgggcgctgctggagtttctgcgcgtgcaccccgacgtgcgcgccgtgggcgccgagccccatttcttcgatcgcagctacgacaagggcctcgcttggtaccgggacctgatgcccagaaccctggacgggcagatcaccatggagaagacgcccagttacttcgtcacgcgggaggcccccgcgcgcatctcggccatgtccaaggacaccaagctcatcgtggtggtgcgggacccggtgaccagggccatctcggactacacgcagacgctgtccaagcggcccgacatccccaccttcgagagcttgacgttcaaaaacaggacagcgggcctcatcgacacgtcgtggagcgccatccagatcggcatctacgccaagcacctggagcactggctgcgccacttccccatccgccagatgctcttcgtgagcggcgagcggctcatcagcgacccggccggggagctgggccgcgtgcaagacttcctgggcctcaagaggatcatcacggacaagcacttctacttcaacaagaccaagggcttcccctgcctgaagaaggcggagggcagcagccggccccattgcctgggcaagaccaagggcaggacccatcctgagatcgaccgcgaggtggtgcgcaggctgcgcgagttctaccggcctttcaacctcaagttctaccagatgaccgggcacgactttggctgggattgagcagacccgggctatgtaccttacccacgtggcttatctattgacagagattatatgtatgtaaaatgtacagaaatctattttataataatttatttttaattcataagcaattaattcactaagctgcctagccacactctttagagagttagcttcataatctgttaacattccaaagtgtttaactctagtatttcgttttcttcttcacaattgatggtgcttctattttttcttctcccctacctgttatatttaaaacaaagaaaagcacaacttgagatttttgttgttacgggtattcagccttcagtcaccgtctgagttctccagttgctgcctccttgtcttgtcttgggtctcccattccagcttccctgtctcttcctgcctgtgtacctcgtaggaacgctgagctgcctcaacagggctgtattctgaagggcaggcctcatgcagcagcctccttgcagatgtggtgtcccgtccaatgatgtagcctgaaagccacagccctagggttctg

SEQ ID NO: 259253 - DNA, 2808 bp, Homo sapiens
agttcgcctctgcagcctctgcggggaagtgccggggctgctcgaggctcagttcttaggactgcaaggaggcagccccggcgtgcggcggtgcgcacagtctagagtggccagggcgcgagagtgcaacgtcctcctggccccgagcgcgtcgtcgcgccccgggagcagaccctcgcccagcagttaccgccgtcccgactttccgttccagttgcagctcctgccgggcaacatgtcaagagccgccgccgctacagctgccgccgccacctggggaagagcagcagcagcagcggcggccgcgggcacacgggggcaataaaccgagccacccgggcgtccagcgtgccggggaaccctctctgcgctcactgcccggcgggacccacgccatgtgctgagccatgtccctggccgcgcccgcgggcagcgcatggggcagcgcctgagtggcggcagatcttgcctcgatgtccccggccggctcctaccgcagccgccgccgcccccgccgccggtgaggaggaagctcgcgctgctcttcgccatgctctgcgtctggctctatatgttcctgtactcgtgcgccggctcctgcgccgccgcgccggggctgctgctcctgggctctgggtcccgcgccgcacacgacccgccagccctggccacagctccggacgggacgccccccaggctgccgttccgggcgccgccagccaccccactggcttcaggcaaggagatggccgagggcgctgcgagcccggaggagcagagtcccgaggtgccggactccccaagccccatctccagctttttcagtgggtctgggagcaagcagctgccgcaggccatcatcatcggcgtgaagaagggcggcacgcgggcgctgctggagtttctgcgcgtgcaccccgacgtgcgcgccgtgggcgccgagccccatttcttcgatcgcagctacgacaagggcctcgcttggtaccgggacctgatgcccagaaccctggacgggcagatcaccatggagaagacgcccagttacttcgtcacgcgggaggcccccgcgcgcatctcggccatgtccaaggacaccaagctcatcgtggtggtgcgggacccggtgaccagggccatctcggactacacgcagacgctgtccaagcggcccgacatccccaccttcgagagcttgacgttcaaaaacaggacagcgggcctcatcgacacgtcgtggagcgccatccagatcggcatctacgccaagcacctggagcactggctgcgccacttccccatccgccagatgctcttcgtgagcggcgagcggctcatcagcgacccggccggggagctgggccgcgtgcaagacttcctgggcctcaagaggatcatcacggacaagcacttctacttcaacaagaccaagggcttcccctgcctgaagaaggcggagggcagcagccggccccattgcctgggcaagaccaagggcaggacccatcctgagatcgaccgcgaggtggtgcgcaggctgcgcgagttctaccggcctttcaacctcaagttctaccagatgaccgggcacgactttggctgggattgagcagacccgggctatgtaccttacccacgtggcttatctattgacagagattatatcataacatggcttgaagtaaaaggcagtatccaagtccttcacctggtcttgccctgtctactttctgatcattctgatggtctgatgtggctgttgatgtggaactgcagaagagttcagagaagagtatgcaacaaagccataggaaaacacacaggagcttttccctccccttcaggtccccgccctctttccaagctggacaattttttattaagttgtttattccctgccttaaaactgaaacaggaaattttctggtagaaggagggtcatttagtcacgaacactgaagtgggtcaaaattctattctgggtcaaatccttgaattcaaacagatgtccataatcagtactgatggaatagagcaagtttttctatgtaagacaaataaatcaaacatcatgtgcatctcctcataagggtctgcaagggtctgatggtttaaagttcctaacagatctggttgcagcatctgccggagcttgcaccccatcatcggacggtcatcttcctgctgcagaagttaggtaacataagacttagatttcttcctgttctagcaatctgcaagaccaccaggcttaactttttagctgccagaagacaaacccccttttctgtttcggcaatttgtcctggcacgtgttttggacttcctccgatttacacgaaaagctctgatattcattggagtactttattttttttcctcagttttgtttcttttctcatgtaaaaacaaacaaaaaggtcaacaaaaaaaaattgaggtttttcttgtttctatctagttcatgctttctttgcggtgtttgaacagtagtctgttaacttagtaggtggtacctggaaaggtattttaagtatagtgactgtttaataaatacttaattggatgatggaggaggagaaattgttttcttcccaggattctctttgggggtcattttgtgtgacagatatattttagacatttggagaaacagtttcagatcctgccaggatatttttgtaaaaaaggaaaatggaagattccaataaactagaaacagtacgtatctaagatgctgacacagaagctagtgtgacttttcagcttatcaagaggatggccaataaaacttaaaggtgtggttag

SEQ ID NO: 259254 - DNA, 713 bp, Homo sapiens
gcaagactcagggagtatcctgccctgttcacaggggcagagctggatttgagcccaggtcttagaagacagaggccgtggccttttccctatgcctttctgcctcctggacctgtggagcagagatgttcactcatgcctgggccattctgtgcaccagtgcccctctcttcagggaagatattcaatcagagtgtgtagccccagtaattctggcattgggtgcaaggttgcacaagatgacttttaagaccccatccaaacgtcagctcctattcttccaattcaaacaggagtaaatgaacagatcgcagtttaagagcttcatggtgtctttatattcttcctgccgctctgtgccaatcagcatgtctgttctttcaggactgcatgataaccttcttgaaagacatctcatattccactccaactccaaaaattttagtagctcccatttgcctatggaataaacaaaataatatggaatgaatgaagaaacaaacaaacaataaagacacattttccttttcaaaacttgtcatattattttgagcccatgttagccccctttgtagagtctttccttctgggaaacccgtcttcttacatttccatgctctgtcttctgtaaccaggctgttctctctggctaaaatgtgctcctccctgacagccctactttaatactttccctcttctaagggtcacctcta

SEQ ID NO: 259255 - DNA, 316 bp, Homo sapiens
caactttaggcctaaagtgactccccactctgtcagtcaaggaatttggtacttctcagccttctcccactcaatttctcttccttctcatttctcaccctccctcagccatcagtttttttacatcaacataccttatatcatctacatttcattctgtgactgaatgtgttatgtactctgactataggttggttacaaaaattgaaaaccagtaaacaaggatacggaattttaggtaggaggaataagttcaagagatctattgtacaacatactgattataattaataataaagcatgtagttttgaaaat

SEQ ID NO: 259256 - DNA, 660 bp, Homo sapiens
ctctctgtacgtttatcttttcagtcttccttcgattctctctgtaagatgtgccctacttgtttttgaacactggtctctccccgttctcttgttcgcacttgtctttacttcctcctcaatcaatgtgttgttccatttgcttttcaagttcaatattttgaaatactctaccagcatgtggtttgttaaaactccctttggttgtttatattgctccataactttgtttaaaggctacatttctttattaagttgatcaaggtggaaaaaagaactatctatggttttgagtgaaatgcctatgaacctattctaaatagttcagttttacaacttcaagaatgcattttcccagtgaatttaaccatactaaatatccagtatccaatgacaacttacaacactgagaagacgtaatactgacacatttgttaaaaagtaagttgtgtgtctgtatgtgtgagtttatgtgtatccaagagtttatgtgtatgtttgtgcataagtgtatttcttgtgtagtagctcttaatgtatttttaactgagcaagttcctgcaacattacctctttttgtaaagcttcccagagttggtttggcaatgcaaacctatttactgagaggaattggattcagacatcattttcatttaagga

SEQ ID NO: 259257 - DNA, 464 bp, Homo sapiens
aagtcgtatcagggctcattctgcaactattaaggttctttattaataacttaagtcttaaatcattaaataacatcttaagttctttatttgttgaagtaatttaaaggtattatgagacaggagaaattaagttccaatgtagttcatattttttccagagatttgtttgattatttttaggtactcaaatgtaaaattgaatttactcctgaatatctctggggagcctcactttgtaagtggaatggcctaatattttttagtacctgtctggctgttttggtcggtaagattaactttgcctgtttttctgagtcagtggttaaattatattttagtattttctctatcagcagacaattttattattacagagtaatatttaagattacagagtaaggtttaagttggaaatcactgagaagttggaagctgtcatggaatgagtttttcctcatcta

SEQ ID NO: 259258 - DNA, 215 bp, Homo sapiens
aatcatatcaactaatcagccatctattcatcatttaacatgacagaactgaggaaaaatcctttaggagaataaaaaaattacaaaatcccgacggactctaagtctagttactccttttcatatgttttaaatgcttgtcactggaaatttatctgatggtccagacttttagcacagaaactctgggatagtttacaaagaaaacctggaaa

SEQ ID NO: 259259 - DNA, 473 bp, Homo sapiens
ccagcaagttaataccagcatcctgccggttcagtgcggggcgcaagccagccctcctcacagccccttggagcctggaagaagcgaccctctgctgttggaggatggcctgggacacggaggccccagcactcgccaggcttcatgtgcgtggggacccctgtgtgccatccagcgcccatgatggcagcaggaccagggagtgcctgggcacaacggggagctggcaccaactcaggcgagggtgccgggggccctgggtcactagagacccctgcccatcagagctccctgacgggtgacagggaggggctcccactgcctacaagggagcaaaaagggactctgggggagggtgggcggcagagtacaatgacctgttgtgtgtgcactcacatcgacaggtgaatgcggatcacgctggtccctgtctggggttctcttccccagactttctctttctgaaggggagg

SEQ ID NO: 259260 - DNA, 341 bp, Homo sapiens
tacggcacgagggtcattgacaagtccacatgcacagcagcacgagtggttaactcaccaagaaactggccttggtgaaattcagtaggccggtaacagatgcccaccgtgggccagccctagcaagcagggcctgagttttagaaactctggtagtggggagttttagaaactctggtagtggagctaacactaagatttgaatttatttattcaacaatttttttataccaaatccttgccgtttgcttcagatgaaaaaaggggaaagaaatcctgtgaaactggtagtagtcctcatgcctaaaaagggacttcatgagttttaggtaacctctcaa

SEQ ID NO: 259261 - DNA, 728 bp, Homo sapiens
gatgagaaaacagaggctcagagatgttaacaggcacagagctggcaagtgaaagcacaaggattcaaacccagatgcagtggagaccaaggtgtgctactgctgactagccccaccgtctgtccgtaccatgctggacaaccagggcactccagaaagccttcttcatgggcttctgggctcccagggatgagctgggggtgggttgccttttgtgcccctcactgaattgagagaacccccctctgctcctttgccttcggtgccctaggctggaccctttcctgtttaagcaacagagcagtgggagcggccctgctgtgcaagcctctcgagcacagtctgcattcagtcatttgtcatggaaacagtgtgggaacggaacaggtgatgagcccttccatcaaaggtgtattcagtacctactgtggcctccagatgcagaaagtcaaagtagtgcctgccttcggatcccccagccccgtggaggaaacatagaacacctcatggcagtgagctgagaggactcaggaggagtgaggggctgaaaggccagggcagggacgggctgagctgctgcttagagggtgtccccgtgttgctactgccctcctagctcctctccactcctttgctttggtccccagctaagggccagagtgcacttctatcaacttagaatataacaataatcattaaacaccatgtggtggcctgagaaggagtct

SEQ ID NO: 259262 - DNA, 647 bp, Homo sapiens
actctatctcaaaaaaaaaagaatgatctcagatagatactgaattcttattttaaaaataggcagtaataggaacaaaatagctaaagtgcagacaaccactagagaaaacacaattgtagcatttgggttatgtagagagattacctgcattaggtctgcattcagtataagaagactgttgtagatgcatttatttggttagattcaagtttggtgttgataaataatgcagtgaaattatgttatattctaggcagatagataatgaataattattatactagggcttttgccctttgcaaggcagaaagaaagtgatagaagtataaaatgtgattcttgccattaagaattgtcatagtctcatgaagtaatagtgatcactacaagaaagtatctagtcctgagttatttagtgcatggactgtaagtgttcagcagagaaaactggtcaagacagatgtagtacatctccattgttaatggaggaaatgagacttaaacttggtcttaaaatgtgggtaggatttagaaaggagaaaggataaatatatttcaggagcaccatgaggtaagcatgttcttggaatagtggtgatggctagcttgactagagttagaaggttcacactgattaggaatga

SEQ ID NO: 259263 - DNA, 1760 bp, Homo sapiens
caggctgcgggcggctgcagacctgggagcggagatccgcccgccgcccccgacgccgccgagcacgtcagcggcgcgcagccggggctcggagaccgacgggcagaacgacgggcggcgactgcggcgaccgcgggacggcgagaggcacgcggcgggaggggaccggaatccgcagctccggccgcgccatggacggcaacgacaacgtgaccctgctcttcgcccctctgctgcgggacaactacaccctggcgcccaatgccagcagcctgggccccggcacggacctcgccctcgcccctgcctccagcgccggccccggccctgggctcagcctcgggccgggtccgagcttcggcttcagccccggccccactccgaccccggagcccacgaccagcggcctcgcgggcggcgcggcgagccacggcccttccccgttccctcggccctgggcgccccacgcgctcccgttctgggacacgccgctgaaccacgggctgaacgtgttcgtgggcgccgccctgtgcatcaccatgctgggcctgggctgcacggtggacgtgaaccacttcggggcgcacgtccgtcggcccgtgggcgcgctgctggcagcgctctgccagttcggcctcctgccgctgctggccttcctgctggccctcgccttcaagctggacgaggtggccgccgtggcggtgctcctgtgtggctgctgtcccggcggcaatctctccaatcttatgtccctgctggttgacggcgacatgaacctcagcatcatcatgaccatctcctccacgcttctggccctcgtcttgatgcccctgtgcctgtggatctacagctgggcttggatcaacacccctatcgtgcagttactacccctagggaccgtgaccctgactctctgcagcactctcatacctatcgggttgggcgtcttcattcgctacaaatacagccgggtggctgactacattgtgaaggtttccctgtggtctctgctagtgactctggtggtccttttcataatgaccggcactatgttaggacctgaactgctggcaagtatccctgcagctgtttatgtgatagcaatttttatgcctttggcaggctacgcttcaggttatggtttagctactctcttccatcttccacccaactgcaagaggactgtatgtctggaaacaggtagtcagaatgtgcagctctgtacagccattctaaaactggcctttccaccgcaattcataggaagcatgtacatgtttcctttgctgtatgcacttttccagtctgcagaagcggggatttttgttttaatctataaaatgtatggaagtgaaatgttgcacaagcgagatcctctagatgaagatgaagatacagatatttcttataaaaaactaaaagaagaggaaatggcagacacttcctatggcacagtgaaagcagaaaatataataatgatggaaaccgctcagacttctctctaaatgtggagatacacaggagcttctatcttgctgaaatattgcttcatatttatagcctgtggtagtgcacatggttaacataaaagataacactggttcacatcatacatgtaacaattctgatctttttaaggttcactggtgtattaaccaaacgttgtcacaaattacaaatcaatgctgtaatataatttgcacctggaatggctaacgtgaagcctgaattaaatgtggtttttagtttttaccatcacc

SEQ ID NO: 259264 - DNA, 2092 bp, Homo sapiens
caggctgcgggcggctgcagacctgggagcggagatccgcccgccgcccccgacgccgccgagcacgtcagcggcgcgcagccggggctcggagaccgacgggcagaacgacgggcggcgactgcggcgaccgcgggacggcgagaggcacgcggcgggaggggaccggaatccgcagctccggccgcgccatggacggcaacgacaacgtgaccctgctcttcgcccctctgctgcgggacaactacaccctggcgcccaatgccagcagcctgggccccggcacggacctcgccctcgcccctgcctccagcgccggccccggccctgggctcagcctcgggccgggtccgagcttcggcttcagccccggccccactccgaccccggagcccacgaccagcggcctcgcgggcggcgcggcgagccacggcccttccccgttccctcggccctgggcgccccacgcgctcccgttctgggacacgccgctgaaccacgggctgaacgtgttcgtgggcgccgccctgtgcatcaccatgctgggcctgggctgcacggtggacgtgaaccacttcggggcgcacgtccgtcggcccgtgggcgcgctgctggcagcgctctgccagttcggcctcctgccgctgctggccttcctgctggccctcgccttcaagctggacgaggtggccgccgtggcggtgctcctgtgtggctgctgtcccggcggcaatctctccaatcttatgtccctgctggttgacggcgacatgaacctcagcatcatcatgaccatctcctccacgcttctggccctcgtcttgatgcccctgtgcctgtggatctacagctgggcttggatcaacacccctatcgtgcagttactacccctagggaccgtgaccctgactctctgcagcactctcatacctatcgggttgggcgtcttcattcgctacaaatacagccgggtggctgactacattgtgaaggtttccctgtggtctctgctagtgactctggtggtccttttcataatgaccggcactatgttaggacctgaactgctggcaagtatccctgcagctgtttatgtgatagcaatttttatgcctttggcaggctacgcttcaggttatggtttagctactctcttccatcttccacccaactgcaagaggactgtatgtctggaaacaggtagtcagaatgtgcagctctgtacagccattctaaaactggcctttccaccgcaattcataggaagcatgtacatgtttcctttgctgtatgcacttttccagtctgcagaagcggggatttttgttttaatctataaaatgtatggaagtgaaatgttgcacaagcgagatcctctagatgaagatgaagatacagatatttcttataaaaaactaaaagaagaggaaatggcagacacttcctatggcacagtgaaagcagaaaatataataatgatggaaaccgctcagacttctctctaaatgtggagatacacaggagcttctatcttgctgaaatattgcttcatatttatagcctgtggtagtgcacatggttaacataaaagataacactggttcacatcatacatgtaacaattctgatctttttaaggttcactggtgtattaaccaaacgttgtcacaaattacaaatcaatgctgtaatataatttgcacctggaatggctaacgtgaagcctgaattaaatgtggtttttagtttttaccatcaccaatttctatgactgttgcaaatacagaatctattagaaaacagggtcttggaaatgtagaattttggcgcactatgaggaaaaacaagctatctttgtaaagcataattgagtttaatgtaattgttgtaaaaaaaaaagtgtgcttgctctacttaaaattcctcacaatgttgaattttgacctgtattcagaagaattccaaaacaggtcagttaaataaggaaatatagtatttgtcaaaccagtatcagagaaaagttacattaatgtatttgattacttgatctggtatctacttattaatgaataatcaacatttttctagtgaa

SEQ ID NO: 259265 - DNA, 499 bp, Homo sapiens
tagtttgggtttcctgacagcatcgtggctgtgtttcaaggatgagtattttgtgaaagaaaggaccagacagaagttgaatcatctcagaagtcatgctgtaatacttccacctcattctgttcaacaaggcaatcacaaagtcctgcccaagtttaagggggtggggacatagacccccctacaacctctccatggaggaaggagtgtcagtgtcatattgaaagaaaggcatattggatgagacatatgttggtatagtcatctttggaaaatataatctgcaacaatcttccatcaaattataaatccttgacaaaatcctatttgaatagccaggtccaatgaaaatgtcacaactgctataaaatctttctgcatgctaaactagtttctcctttcactatgttcccagaagactttgcccatttccccattatacagtttataattttgtatcataattatttaataaatatttattttaaaattatataag

SEQ ID NO: 259266 - DNA, 520 bp, Homo sapiens
atttttcattttgtcagactgcattttctcttttcaactagagttcaaacaaaataattttagataacatcctaagaacatttggaaacatgacatttcaggtctattttccctctttgccttaaaaaagtatatacagctataattactaattgctgcgctctaagtagagacagatgatacatatgtttgtgacaattttccagagggagagctaagtaaccaggctcatttttccataatgtgaatgttattcacaaactattaccataattgatgcaccaaaccactgtagagtaaataatgtgttgtgtgtgggaagcaagctagtagtcaatgaatattaaagaacaaaacctcattttaaaagagaaactgtaattaaaatcattctgaattcatgctgcacaaccagttaaaataacttggctgccatttatctgtgtaattctgtgtataaagggagtaggtatatgatttgttatatagaagtaagtatttacatgcacatttttatgaa

SEQ ID NO: 259267 - DNA, 411 bp, Homo sapiens
  misc_feature (411)..(411): n is a, c, g, or t
gcagctagggtcacaatctgagggggcctcctctctgcccccctggaagactctgctcttggcccctggagagttccagctctcaggggttgggccctgaaagtccaacatctgccacttaggagccctgggaacgggtgaccttcatatgacgaagaggcacctccagcagccttgagaagcaagaacatggttccggacccagccctagcagccttctccccaaccaggatgttggcctggggaggccacagcagggctgagggaactctgctatgtgatggggacttcctgggacaagcaaggaaagtactgaggcagccacttgattgaacggtgttgcaatgtggagacatggagttttattgaggtagctacgtgattaaatggtattgcagtgtggagacatgn

SEQ ID NO: 259268 - DNA, 1543 bp, Homo sapiens
  misc_feature (1543)..(1543): n is a, c, g, or t
acagttagcctcgagaacctttgctttcagccggactccggactcctccggggacagcgcagcgcccgccagagccctcggcgctccctcccgctggcggcctccgcagccttcgagtgggtcctccgcccccggccctcccctctcaggcggagccaaactgcggccccgcctttacagtctcggaaaggtccccagactggaggctctgaggaaggggtgtggggagtcgggggcggagacttggggcggggggcgggcaataaactcccaggccccgcccacgccccgccggggccctaatcctggacccgggatcccgtgcgcctggagacagggtccagatctgcctcgagcccctcgaaaccaggactccagcacctctggtcccgccctcacccggacccctggccctcacgtctcctccagggatggcgctggcggctttgatgatcgccctcggcagcctcggcctccacacctggcaggcccaggctgttcccaccatcctgcccctgggcctggctccagacacctttgacgatacctatgtgggttgtgcagaggagatggaggagaaggcagcccccctgctaaaggaggaaatggcccaccatgccctgctgcgggaatcctgggaggcagcccaggagacctgggaggacaagcgtcgagggcttaccttgccccctggcttcaaagcccagaatggaatagccattatggtctacaccaactcatcgaacaccttgtactgggagttgaatcaggccgtgcggacgggcggaggctcccgggagctctacatgaggcactttcccttcaaggccctgcatttctacctgatccgggccctgcagctgctgcgaggcagtgggggctgcagcaggggacctggggaggtggtgttccgaggtgtgggcagccttcgctttgaacccaagaggctgggggactctgtccgcttgggccagtttgcctccagctccctggataaggcagtggcccacagatttggtaatgccaccctcttctctctaacaacttgctttggggcccctatacaggccttctctgtctttcccaaggagcgcgaggtgctgattcccccccatgaagtctttttggttaccagattctctcaggatggagcccagagcttggtgactctctggagctataatcagacctgtagccattttaactgcgcctatctgggtggggagaagaggcggggctgtgtgtctgcgccaggagccctgggaacgggtgaccttcatatgacgaagaggcacctccagcagccttgagaagcaagaacatggttccggacccagccctagcagccttctccccaaccaggatgttggcctggggaggccacagcagggctgagggaactctgctatgtgatggggacttcctgggacaagcaaggaaagtactgaggcagccacttgattgaacggtgttgcaatgtggagacatggagttttattgaggtagctacgtgattaaatggtattgcagtgtggagacatgn

SEQ ID NO: 259269 - DNA, 1230 bp, Homo sapiens
  misc_feature (1230)..(1230): n is a, c, g, or t
acagttagcctcgagaacctttgctttcagccggactccggactcctccggggacagcgcagcgcccgccagagccctcggcgctccctcccgctggcggcctccgcagccttcgaggatggcgctggcggctttgatgatcgccctcggcagcctcggcctccacacctggcaggcccaggctgttcccaccatcctgcccctgggcctggctccagacacctttgacgatacctatgtgggttgtgcagaggagatggaggagaaggcagcccccctgctaaaggaggaaatggcccaccatgccctgctgcgggaatcctgggaggcagcccaggagacctgggaggacaagcgtcgagggcttaccttgccccctggcttcaaagcccagaatggaatagccattatggtctacaccaactcatcgaacaccttgtactgggagttgaatcaggccgtgcggacgggcggaggctcccgggagctctacatgaggcactttcccttcaaggccctgcatttctacctgatccgggccctgcagctgctgcgaggcagtgggggctgcagcaggggacctggggaggtggtgttccgaggtgtgggcagccttcgctttgaacccaagaggctgggggactctgtccgcttgggccagtttgcctccagctccctggataaggcagtggcccacagatttggtaatgccaccctcttctctctaacaacttgctttggggcccctatacaggccttctctgtctttcccaaggagcgcgaggtgctgattcccccccatgaagtctttttggttaccagattctctcaggatggagcccagagcttggtgactctctggagctataatcagacctgtagccattttaactgcgcctatctgggtggggagaagaggcggggctgtgtgtctgcgccaggagccctgggaacgggtgaccttcatatgacgaagaggcacctccagcagccttgagaagcaagaacatggttccggacccagccctagcagccttctccccaaccaggatgttggcctggggaggccacagcagggctgagggaactctgctatgtgatggggacttcctgggacaagcaaggaaagtactgaggcagccacttgattgaacggtgttgcaatgtggagacatggagttttattgaggtagctacgtgattaaatggtattgcagtgtggagacatgn

SEQ ID NO: 259270 - DNA, 318 bp, Homo sapiens
tgtgcaccttccacattctgatttatgtcttggcctgtaacttgtgtcttcctgaaatgagtaaaaccaaactgtaacccggccgcctcggggccactcagtcaagctgtaacccggccgcctcggggccactcagtcaagctgtaacccggccgcctcggggccactcactcaggctgtaacccggccgcctcggggccactcagtcaagctgtaacccggccgcctcggggcgactcactcaaggcttcctgggtttgcttctctccaggccacagtcacatgtacaggctcagaataaacctctgtaaaatgttc

SEQ ID NO: 259271 - DNA, 387 bp, Homo sapiens
atcgcaggcccagcctgttgttatttaaaacaaaaaatgtctaatagtgagggcatttcgccaagttgcctaggctgatcatgaatcctgaactcaggccatcctcccaccttggccttctaaaatgttgggattatgggtgtgagccccggctagcatgaattttctaagtcagaccaaagaactgttgacaggtaattttttgttgaaggaggctgttctgtgcattgttggatttttagcagcgtccctgacctcagtccaatagatgccagtaacaactccctcccgattatgatcaccaaaaatgtctccagacatcgccaagtgttccaaaggtcacttctctgatatcattttatttaactttccaacatttgggaaaaa

SEQ ID NO: 259272 - DNA, 918 bp, Homo sapiens
caaaatgattagttaattatccataaatgttccttttgaaactgaccaagaaggccccccatccccgtaaactgattcgaactttggagaaggaaaggccgaaagatagtagctagccctacaattttggatatcttaatttctaaaacaggttttctagaacttgctttctgtctttatgttcatacttaaagaagttataggtgtttttaatatatatcctaagtgaggactgaagctttgaattacattaaaaattaatccgtcttatttttgtaagtttggaattcttaagacttaatctgttcaatgcaaaatacaggctggacatccctaatctgaaatccaaaactttttgagtgccaacatgacactacaagtggaaaatccacacctgatctcgtgacaggtgtgcaaaattaattaaaatactgtataaaatcacctttaggctatgggtttaagaaggtgtataggaaacataagtgaattttgtgtttagacttcagtgccatctccaagatacttcaaatatgtatgtgcaggtactccaaagtccaaaacacttcggtcccaagcattttgaataagggatactcaacatgtgccagaaaatgtttgggcatgctatagaaaccattttcttctagcaaagttactcatcccagtgaactcacaggtatttatctaaagtaaacatggggaaggataatttacttcccaccctatgtgcagctcattacgtcaaaatagagaagtgctgttatctcagatgtggctctagaaatttaattttttaagctgatctttaagtgttggtgttctgcagagtgcttactgctaaagtgaacagaattcatgaggcaattagaatttgaaaatagtgatttagaagacagtgcaattcatgatttacct

SEQ ID NO: 259273 - DNA, 865 bp, Homo sapiens
caaaatgattagttaattatccataaatgttccttttgaaactgaccaagaaggccccccatccccgtaaactgattcgaactttggagaaggaaaggccgaaagatagtagctagccctacaattttggatatcttaatttctaaaacaggttttctagaacttgctttctgtctttatgttcatacttaaagaagttataggtgtttttaatatatatcctaagtgaggactgaagctttgaattacattaaaaattaatccgtcttatttttgtaagtttggaattcttaagacttaatctgttcaatgcaaaatacaggctggacatccctaatctgaaatccaaaactttttgagtgccaacatgacactacaagtggaaaatccacacctgatctcgtgacaggtgtgcaaaattaattaaaatacttgaattttgtgtttagacttcagtgccatctccaagatacttcaaatatgtatgtgcaggtactccaaagtccaaaacacttcggtcccaagcattttgaataagggatactcaacatgtgccagaaaatgtttgggcatgctatagaaaccattttcttctagcaaagttactcatcccagtgaactcacaggtatttatctaaagtaaacatggggaaggataatttacttcccaccctatgtgcagctcattacgtcaaaatagagaagtgctgttatctcagatgtggctctagaaatttaattttttaagctgatctttaagtgttggtgttctgcagagtgcttactgctaaagtgaacagaattcatgaggcaattagaatttgaaaatagtgatttagaagacagtgcaattcatgatttacct

SEQ ID NO: 259274 - DNA, 492 bp, Homo sapiens
caccgaaccaccatggcacaccacatacttatgtaacaaacctgtacgttctgcatacgtatcctacccagaacttaaagaaaaaaaaaagcctccaaatcttaactcttagaaaaggaagacagattgctgggagggaactcacagcaggaatacgatccaggtggagaaaagccaggtaaggaacctcctcaatggtccagcaacacacagatccaatgaaaagctagaaatgcaagagtggctacagattaggaatactaatgccagacaaagagtttccacaattagcaaaatacctctgatgcagggtgaaggctgctccaacccagtcctgcacagcccagaagagagaatcagaacctggctctggagtatagtccctagaccaggagcagcagcacctgcaagcttgttagaaatgcagaatctctaacctcagaaccaatgaattaaaaaaaaaaatccccagtgttctacatgcacattaaa

SEQ ID NO: 259275 - DNA, 627 bp, Homo sapiens
tttttgtttttaacacaagatatgccactaatgtctgacaagcatttaatctagtggctttcctgcattttccatggatcagatgcattctaatcctctgaaatgattattaaatacagattgccagcctttatataatgcctgctaaatttaccagttgggatctgcacatatattggtaaagagtgccctagcagtttctgaccttctgtctgctttcagaatccacatgagtcaaattatctccttttatgtataatcttatcaaggactattgaggtggcacaggtggggatggaatcctggatgtgttcagaactcctttcattttactaagcttcctttatactaccagaggaatccacttccagtctcgagtcacttagaagagggggccgggcgtgatggctcatgcctgtaatcccagcactttgagaggtcaggagatcaacaccatcctggccaacatggtgaaaccctgtctctactaaaaatgcaaaaattagctgggtgtggtggcatgcgcctgtaatcaggaggctgaggcaggagaatggcttgaacctggtaggtggagattgcagtgagccgagttcacactactacactccagcctggcgacagaaa

SEQ ID NO: 259276 - DNA, 501 bp, Homo sapiens
atacagaagcaatatcttccatgaaacatttcctacctctaggctgacatgttttcctctgctgagcctcttagtaaccattccttctttccacttcatgaccaatttcttgaaatcagggattgtgtatttctcaatttgttactttaccccaaagtctatcatgttgcctggtattcaacagacatcaaaaaatgtttgctgtaagatgggcagtgtggctcatacctgtaatcccagccttttggaaagccaagaaaggcggatcactgagctcaggagtctgaaaccagcctagccaacatggcaaaaccgcgtctctacaataaaagaaaaaaacaaatacaaaaagttatccgggcttggcaacgcaagcctgtagtctcagctacttgagaagcagaggtgacaggatgatctgagcccaagaggtcgaggctgcaacgagctgagatagcgccactgcaccccagcctgggcaacagagaccctgtctcaccc

SEQ ID NO: 259277 - DNA, 244 bp, Homo sapiens
tgccagcctgctccatttcaggccaatgtttatgctaaataagatcatgaggatgtttatctcataggactgggagctgggaattggttccacaccagttgtggcagcggaagggatcactcagtgattgaagttacttttggaaaggtctagaaagatcgcagctcagtcgttttcttatctagacatagcacacatagcctcaggaaggtgagccccaaaccacaccgactcccctgagaaa

SEQ ID NO: 259278 - DNA, 448 bp, Homo sapiens
ttgtttaacatatttaaatgcctactttgcactaggtgctaggatatactagggaaggagacagacatggaccttgccctcacacagcttacatgtcattactactattaaacacaccagctccctaagaaaaataagactgcacttaactaggaatatagacatgtttaccttgaagctcagtgcctgtcatggtaggagcttgataatgcatggtaaacattcccttcagagggattcttcatagcctgagatggctgaggttgcttaaaatggaagcccactaatttttttttctttctaacttttattttaggttcaaggggtacatgtgcagatttgtgatatgggtaaattgtgtgccacaggggtttggtgtacaaatagttttgtcacccatgtaatcaggataatacccaataggtagttttttagtcctcaccccctg

SEQ ID NO: 259279 - DNA, 425 bp, Homo sapiens
ttttttttttcgagacaaggtcttgctctgtgacccaggctggagtgcagtggtgcgattacggctgactggctgactggctgactggctgactggctgactgcaacctgcaccttctcctccacctcctaggttgaatcctctcacctcagcctcccaagtagctggaattccaggactgtaccactatgcacggctaattttttttttcttttttgagacagggtctcactatgttgcccagggtggtctttaactactgagctcaagccatctgcccaccttgcctctgaaagtgctggaattacacatggccaactatttttttaaacatggttattaggaaatatgttacttgtatgtgaaataagcaagtatatgaaatgatctcattatttttagacaaattattttcttaaggagat

SEQ ID NO: 259280 - DNA, 194 bp, Homo sapiens
gcagagatcaaatggcaaaagaagaaacaagagagaggggctaggctctgtttaacaaccaggtcttctgggaaggaatagagtgggaactaactcattgctccctgccctcacaaacagggagagcattaatctattcatgatctaaccccatgacccacatatctcccactaggccccacctccaacattgg

SEQ ID NO: 259281 - DNA, 233 bp, Homo sapiens
aaaagaacggcatcggaccctcacctcacatccacaaaaacccactcaacatgggctaaagactgagacataagactggaaaccataaacgtactagaagaaaacacgggggaagcatgatgacattcatctaggcaaaggtttcttggatctgacaccaaaggcacaagcaacagaagcaaatgtgaacatgcaggacaacatcaaaccagtgagctcctgcatcagcaggg

SEQ ID NO: 259282 - DNA, 821 bp, Homo sapiens
agaaattctcctgccttagcctcctgagtagctgcaataacaaagcgtgcgccaccacatctggctaatttttatatttttagtaccgatgggatttcaccacggtgaccaggctggtctcttaactcctgagctcatgcgatccttcctgttaggcctcccaaagtgctggaatttcaggcatgatcctccgcacccggccctcttttttttttttattttgagatggagttttgctctgtcgcccaaccgggaggtgcaggttgcagtgagccaagatcacaccactgcactccagcctgggcagcagagtgagaccgtgtcccaaaaaagagaaggagaaacagagatcatgtggaaaaagttattttttatttatttacttagttttcagtttggtttgagactcgtgttttaaaccagagggcatggttactgagggataacatcaatagaactcctataattgaggggataattatcaaggtattagatgattcactggctattacaaagaacacagaaattatgaaacctggttctgtaacttatagtttttcatattatttttataccatggataactcttctatgtgtattcataggtgtaagattactggcagtgtcatatgaaacaacatattacattttttaagcctggaaagcatctagtatggctgtgcacgtagtgatgacattgactttttttacttaaagaagagctaccacttcaaatccacacggtggcagttctcctgcctagccagctgccactggactctctcccctgtatataagcccccaataactacgtcttattt

SEQ ID NO: 259283 - DNA, 437 bp, Homo sapiens
cctccttcccctcatccagcccctccaggacaattctgaagctgcctgaatggaaaaaaaacagagaaaaccctaaaagtcatctcagaatgatggtacctgccccctccccaggctcctcccttgaaaccggcaattcttacagcctacacagatggcacatgacctgcaatctcttctgttgactgtgtacattggttggcctttattgagcacctgccgtatgcagaggctaccagccatccatgcccttgggcagtgggaatgccagcctgttacagtgatttcatttccatgagctcatcccaaactttcaattctgccatatccttttcaaactgtccctgatccttcccatcccactcctggcaagtccggctcctgtgacagggacactgagagcctaagcaaatgatagagagagagagagaaaaaaa

SEQ ID NO: 259284 - DNA, 449 bp, Homo sapiens
agccctagctgctgcgctggccgaagttttctcgtcggtaaaataggataacagtgcaccatagggtcgttttgataaagaagaaaggtagggcacttaacacagttcctggtaaagagagttcaaatgaaagtgaaggaggccgggcgcggtggctctcacctgcagtcccaagcactctgggaggcctgtaaggtgcctgtaatcccagctcctcgggatgctgaggcaggagaatcgcttgaacccgagaagtgaaggttgcagtgatccgagatcgcaccactgcactccatcctgggcgacagagcgagaccctgtctcgaaaaaaaagttaaggtttttttgggggaaagaggtgaaaacgtatttaaatgttctttcgagcctttaaaaatgtgtatagttgaaaatactaaaattgaaagtgttaatttcttttacagttt

SEQ ID NO: 259285 - DNA, 432 bp, Homo sapiens
atcagaacagggtggtttcctaatttttagattgctggccttttctagaaaataaaggcaaggtgtgcatacttgaggtttgagggctaccattgcctcctggcagaggaaatgagtaggcctgatagttgctaggttaaaaagaaacagtagttgaaatactgagaaaagtttaatgaaaagtaactttggctcttaagtagaacagtttgaggacagtgaaaaattcagtagctaagggttgtgtgctctctacacagggatggtgtgtggatttgtggataaggtatgcaacagagtactcctctttgagcatttttatatcttgaattaactatagcacaggagttggcagactatggcttgtgggccagatctggcccgctgcttgtttttgtgtggccacgaactaaggatagtttttacgtatgt

SEQ ID NO: 259286 - DNA, 553 bp, Homo sapiens
gcagcacagcctatccccagaccgcttagtccttcataacatatatctccacggaaaagggtatttcctcccgtcagaaaaagcgccccagtctggtctgggttggtttttatttcacgttgttgcaagtaggcgaagtcccttctgtctcctcccttggggtaagtggaaaggagtccggcagggggcccgcagtggcctgcacaggggaactgggtagcgagagagttccaggcaattccgggggctgccccacagaagcaggtggggatcgacagtggctctccggcccagggaggagagcgcggtcgcgggtccctcccctcagcctggaggctgcagccgctcgagtcggcccgggtgggggcggggtgggggcggcgcggagggcacggagattacggcggcgccacccgggacatccagggccccgaggccctgggcggtccccacgcgagatcgcaaaccatgacaataggcagtcacccgaggtcaaataaaaacggagtgggtcccccgcgcgccgccgccccccgcgtccctggcggcctcc

SEQ ID NO: 259287 - DNA, 498 bp, Homo sapiens
tgcttgagcccgggaggcggaggcagtgagcagagatagcgccactgcacttcatcctcggcgacagagcaaggctctgtctcaaaaaaaaaaaaaaaagtgtaataccaacaaatagtgcctgcacatgttaaaatttaatgtttatacctaatatgctctataggatgacttgctggtttttgagcaaaggaaccagatagaagaaaaatttaatcttgggcccggcgcagtggctgcaatcccagtactttgggaggccgaggcgggtggatcacgaggtcaggaatttgagaccagcctaaccaacatggtgaaacacccctttctttactaaaaatacacaaaaaattagccgggcatggtggcatgcacctgtaatcctagctactcggaggctgaggcaggagaatctcttgaacccgggaggtggaggttgcagtgagccgagattgcaccgctgcactccagcctgggcgactgagcgtgctccatctc

SEQ ID NO: 259288 - DNA, 438 bp, Homo sapiens
acaagcattatttgctgataccacttttctgttgttggcctatatcattatacctgttcacatcatccagtgttcctttccccatggcacatttgagaaatggtacataactgtattgtctcatcctaaccgttaatcactttcccaaacatgaatattttccaggctgagcacggtagctcatgcttgtaatcccaacactttgggagaccaagatgggaggatcacttgagcccaggagtttatgagaccagcctgggcaacacagggagaccccatctctacaaaaaaattagaaaattagctgggcatggtggcatgcacctgtagtcccggctacttgggaggctgagatgggaggatcgcttgagcccaggagcttgaggctgcagtgagctgtgatcgcaccactgcactctagcctgggtgacagtgaga

SEQ ID NO: 259289 - DNA, 485 bp, Homo sapiens
ccactagattgtatcacaaaagttctagggagggttcttacttgtctaatgagatcatttgcttctccctgaacacatcactgtagcctggaaaatgggggtctctgattagctaggcctgggtcacattgcctactttcgtgatgatgaatagaagataggaattggggaggctatagacaaacatgattattatccttacaaaactacatgaaataagaaaggagtccccaaatggaaggggctgctattaccaaatggcaatgagggaaaaacattcaggacacccataatcattacctattacagtctatcatcgaccccttccatgcaaaggtgaagtggccatttattccagtgtcattgctagacttcttaacatttttcagaaggggacagcaatctgccactcagatgaccactgtgaagcatatgaatatattcttgatcggtaattttgaataattgaacgctgaatgttcaca

SEQ ID NO: 259290 - DNA, 502 bp, Homo sapiens
cacagccaaaccatatcaccccatttcacccttggatgacataacaacaagatgctgtctatgaagcagagagccctcactagacaccaaatctgttgccactgtgatcttggactttccagccttccgaactacgatcaataaatttatgttttttattaattacccagttgaaggcataggttatagcagtccaagtgctctaagacggtgtcgttttccacagtagagattatttttgtaggttatacaaatacttctgaagaacatttaaagctacatgtcagtcataccatagtgtaggcatagatatgtaacagatttatcccactctcttccactctgataactaagagtagatttgaatggagggctgaaggaggaaggcaaaattaaaaggataaatagagcataaaatactattttggaagggcagaagtgggtaaccgatggcatgagcaagagcattagacctcagagaaagaagacacaggtaggatga

SEQ ID NO: 259291 - DNA, 616 bp, Homo sapiens
  misc_feature (34)..(34): n is a, c, g, or t
gtctcggctggtgtatgttttctgcctaggatgnagtttcgctcttcttgcccaggctagagtgcagtggcacggtctcagctcactgcaacctccgcctcccgggttcaagtgattctcttgtctcggcctcccaagaatcatcttttagaaaacatgaaatacagggaatgatacaatattatgtctacgatttgcttcaaaatgatgtgtggataggggaatagatgaaacaagatgagccaagataatggtttaagattagtgatgggttacttttgtgttgatttaaattttctgtaataaaaaattaagattttaatgttaattacaaagtaatccatattcacatttcattgctattatagtcagattctgaaaatatctttaaataataattaatcatattaagatttacatctagaagacttcaataatttttctcacatgatggtcaacccaatacgcgtacttccaaagaagatgctatcatacagttttggcttgaattttaatgtttgcatttttttctcatcttgccttccctgtacaatgaaactctcgtattgtgggaaactgcggagaagtcagctgtcagtgtcctcctaggaaatca

SEQ ID NO: 259292 - DNA, 266 bp, Homo sapiens
tgttccctcctgcagaaggcgaggcagtgccaggctgcttcctgattggcagaaaaacagcaggaacttgattcctttcttaacccttccttgcggtttctgccacctccactgttctaagtggctgactgtgacaatgtctcgttcccactcccctctcattccccaggctggagaggacctactgggtttctatttaggatctgtgttatagtctgttttcatgctgttaataaagacatggacccaaggctgggtaatttata

SEQ ID NO: 259293 - DNA, 328 bp, Homo sapiens
actaacttcatcctcaaaaaatacttgaaaatacttgccatgtctgggcatgctggcccacacctgtaaccccaacactttgggaggccaaggtaagcaattgcttgatcccaagagttcgagatcagcctgggcaacatagtaaaactctgtctctactaaaaatacatggtgccaggcatggcaccatgagcatgtagtcctagctacctgggaggctgaggtaggaggatcatttgagctcaggaggttgaggctacagtaagtgatgactgtgctactgcactcccgcctagcctggaggaccatagagaggccctctctcaaa

SEQ ID NO: 259294 - DNA, 378 bp, Homo sapiens
atttttaaaactaacaaatactaagccaaacaccgccaggctctgctgcctcacagagtgtggcgatctgaatacacgtgtctctgtgggccgggtggtttggcttcgctccctgttctactgaaatcatacgccatgagatgttggaaggccttccaacatctcatccttgaactctcccacagtgtttaatgaatggctacattagtttttgtaatcccttaccatttacaaacaatatttatgtatattacttcttaattctacaataaccttattaggcaagtattaagactatctacaaacgagtaagtcgactcaacagtttcatcctatttccctcaagccatagatgactcaatagatgctgtgcaactg

SEQ ID NO: 259295 - DNA, 235 bp, Homo sapiens
gaaactgccaaatgaatgtttgaagggctgggccattttgtactcccaccagcagcataagagagttccagtggctccatatccttgtgaaaattttcaggaataagttttaaaaaggagctggagaggttctgtagatgagggggctgcagggcaggtggcaggagaggaggccagggaggagggcgacccatggatacaccagccacccccatcccctgcaacactgtccact

SEQ ID NO: 259296 - DNA, 411 bp, Homo sapiens
tctctggaggtgagttcaattcatgttcttatttgcttgctcaggtagcatcctttatagctttgctgatctaaaatatttcagttagactacagaatatatactaagtccttgtctggctaaaaactgttagattctaagaaactatcatcttggaatggcaaaattgtaatgtgaaaactagagcccaaattatttgatccttgcttgcttcaagatttatttatttatttatttattttttttttttatttttatttttttattatactctaagttttagggtacatgtgcacattgtgcaggttagttacatatgtatacatgtgccatgctggtgcgctgcacccactaatgtgtcatctagcattaggtatatctcccaatgctatccatcccccctcaaaccta

SEQ ID NO: 259297 - DNA, 238 bp, Homo sapiens
tgccaaattgcaacacgaagacttaatgaacaggcattccccctcccacgccacccccacccctgctaattgttcttttggcagctgattgttcaatacattctattttgtatgatctcttgaggtaaatggttgaaaaaatctgttaggtaaatagttaagagaaaacgtttttcctctttctcaaaccaacagcttgagtccttcttattaaatgtatttaattttttaaaactta

SEQ ID NO: 259298 - DNA, 380 bp, Homo sapiens
gcttccctttgatgggagtcacagtgttgtataacctaatctcagaagttacatgccatcatttttgccatcatctgttaaaagcaagtcaccaggttcaacccatataccagaggagaggcatgctcaaagatgtcaataccaggaggcagaaatcattgtgagccatcttagaagctgtacaccacactcccatttcacaaatcaagaaactgaggtactgccaggtgtggtggcacacgcttataatcccagcattttgggaggccaaggcaggaagattgcttgaggtcaggaggttgaggccgcagtgagccaagattgcaccattgcactccagcctgagcaacatagtgagatccttgtctcaacaacaacaa

SEQ ID NO: 259299 - DNA, 429 bp, Homo sapiens
ccatgcatactcgggccggcagtgtctttgcctcttggctttgtaatgttgacagtgacacaaaccacattgctgtgttgtggactgaatgtgcatctctccttgtaccccttaatccctatgttgaaccctaacactcagtgtggttgtgtttggagatgagacccgtaagggaggaactgagcttagatgaagccatagggtggggccctgatccaataggattcacattcttgtaagaagagacaccagaaagctccctctccctccatgcatgcacaccaaggaaaggccctgccagaactgcaggaaggcagctgcctgcaagccaggaggagcaccctcactagaaatggaatcagccagaaccttgatcttggacctccagcctccagaactgtgagaaaataaacctcttgcttcagccac

SEQ ID NO: 259300 - DNA, 274 bp, Homo sapiens
aggttgctgagactctgccagctcccacactattcccacgtccatgggcgcaggggccaggtcagtgcttccaaaggaggctgcatccttagtggctgtggctccctccaacaaaccctaaatgagatcttccttctcaatgtcacctgttgtcgtgttgttgtaactatcactgcagcttttattcacttcattgggtaatcactgagtttttcctccattgctgtagaacatgtggcttgctcttgtgtgtaaaaagactgaatttaaccgc

SEQ ID NO: 259301 - DNA, 442 bp, Homo sapiens
tttggtactcagtcagctcttggtaaatataaatcctccttgctaaaattattttcttcaaaatacttctggtatttgttttagatgacagttccccaaattgagaacttttgttacaaaactgctccagagacatctttgaaaacccaaggctgcaactgctgtcggatttcagaatgaaaaggaggttttcctctggcctctttcactcctcagtggactttaaagatgttgggaacaatttggtcttgttttatgtgtcgtggattctctttttgtgagatagttacctaaattagtaaaacatgtagacagcaaatgaaccagactcgcaataaccccctgagcaattggccctcaactacttacttcacaaggtcgtgttcaaggctgggtcaggagattgatgtgtataaagacagtttaaattctttgcagaaaa

SEQ ID NO: 259302 - DNA, 681 bp, Homo sapiens
tctgggctctgttccaccagttgtgtattctgccagacaggaattggacatatatccactcaattatccccagagagcaaaagctcctagagggcaggggccacctcatctccttagtcctccctgatgctgcacaactgccactgagtaccgagatctggagagaggacatatgggggcatcgtccattcttgaagcctattttccatgaagctttccttaattcccccaagctgacatttccatcctcctctgaatgtcacagacatgatccatgtgactcttcaccctgcattgtaatcagtggcttctatcttcttcctggttatctccccttccaaaacatgaggcttgtcactcatgagggtaaggcccatggttgattgtacttgtatccttcatagggtcttatatatattgggtcctagatatgtgtttatggactaaaaaattgtcttatgcatttaaagtctattaaaataactgcaaaatacacccctttccttggggaaagatggaccgactctggtcaacattgctcctcagattttaggtttcctttataacttttaaaaattaccatttcagctctggatttaaacagtaccacaattcgttatcaaattcttgcacatcatttcctccagagcatacgatttaaaagtcaaaaactaggtattg

SEQ ID NO: 259303 - DNA, 700 bp, Homo sapiens
cacactccctggtataggacatttaattaaaatcccaggagacagctagcccaagctgcacacagctccagctgagcctttcctctcccagattcaatgtcttcagacaacagaaactagatgggatatgccatgtgccactgactgtttcagcataatgccatactgacagtgaggcatgagggaattctgttctttaatttttattttatttattattattatttttgagatgtggccttgctctgtcaccaaggctgaagtgcaggggctcaatcatggctcactgcaaccttaacctcccaggctcaagcaatcttcccacctcagcctcctgagtagctgggactatgggcacatgcactaccatgacccgctaatttgttgtgtttttttgtttgtttgtttaattttcatttatttatttttttgtagagacagggtctcaagatgttgtgcaggctactcttaactcccgggttcaagtgatcctcctgctcccaaagtgctggggttatagtcatgagccacaccattgtgcctggctgaattctgttcttatgggcaagacaagaatgttagaagtaattttgattatactgaatttctgtctcacaaactggcttctgaatgtaatccctgcatgagatggcatatgatcctttatgtagcaaacagaatatctggaaaagacatttcc

SEQ ID NO: 259304 - DNA, 366 bp, Homo sapiens
atatgctgggagattagcatattttaaaatattttacgtaaaaatgaagaaaatgacatagaacaaagtgagcacaagggtcacattgagaggttttaactataattaaattttcatctaataaatatgataattataaagaaaaccagctggtttttggaagacatcaaagtgttctgtatcaagcaataatctccattaacctattctgaaaggcaggagcaggatggactgcatattctgaactttgggaggtaaatctgtgttggagctgctcactgtccatggaggagtggagcacaaagtatctgggggtgaaggtcatggcaccatttttcagcagggggaggaataatttttggtttg

SEQ ID NO: 259305 - DNA, 496 bp, Homo sapiens
gtactttatgttttaggagattacgtcagttttattttctattccttgtatttttaatttctgcaatcattttttaaaaaatttctagagtcctatttaatttcttctttttttaatgtggtgttctgttctcagttcatgaagcattctttttttcctatcgctaaagatttttattgatagtttttgggcttttttgaacatttagtttgtcctccaagttacttttttcgattttggtgtcgtctctcatgttagaagcttccttccagtgtctggtaactcttttgctttctgcttttatttataagtagggcaattaaaaagctaattggatttctgtgtgcatgagtgtggagggtttatcaactgtgggctttgctgaaggatgatatagctaggttatttccttgaagaactcctggtatgattatcttttcaggtccttatacatggtgtggtcagatttgccgcccccgcccccccccccccccaa

SEQ ID NO: 259306 - DNA, 840 bp, Homo sapiens
caaaaaagaaaaaaaaaaaaaaaaaaaaaagtagaaatgctaaccacctgccaaccccaacaggttcctctgacaatcagatgtaatgggtgggacaagctataccaatggatgacatcactatctcataacaaaaatatcagtgccagagagagtattataaggaaactgacactcagtaaggtttaatgagtaaactagattagcaacttcacattcactgagtgatttcacatccagtgtggcatctagtccacattttaagtgtaaatcccactatgaataacttacaggaaatcatttcatcatttgttctgaacctctgtttcttcatctgtaaaaagagaatgcgggccgggcgtagcggctcacacctgtaatctcagcactacgggaggccaaggtgggtggatcacctgaggtcaggaattcaagagcagcctgaccaacatggtgaaaccccgtctctactaaaaatacagaaatcagccgggcgcaatggtgcgtgcctggatcccagctactggggaggctgaggcaggagaatcgcttgaaccagggcggcagaggttgcagtgacacgagatggtgccattgcactccagtctgggtgacagggcgagactctgtctcaaaaaaaaaacctctcctccctgccctgtgtccccgagtatagacctcatgcacaggtttcctggctctccagcttccagatgggtctgcccagcaggaggcaccagcagaagtttggtgggaggaagaaagagaggtcagggtatttcttcccccacctcaatccttgacaggaaactggggctgcttcccttgaacaaagttatc

SEQ ID NO: 259307 - DNA, 404 bp, Homo sapiens
ccttttcgccaatgaatccagccctcctcagccttcaatgtgtccatgtgcctaatttctcctggttgtgacacaaaaacctggatttagctaaactaaggagcaaaacttctacatcagtttggtggcacatctggggatcaaggaagggtttctgatatctttgaagattgtgacactggaataaaggaaaacatacaggactcatgaagagctgacatgttcgtgaatatcaagcaaaacaagagttaatggaatggactgaactaatagaaaactgaaataatcttttttacttttgcttggaacactgctgattctcattttgtttttcagactcaaggaagcttattttgaactatttatggcctttaataattgagtaaggtaaactcctgtgaaca

SEQ ID NO: 259308 - DNA, 385 bp, Homo sapiens
aaataccctattatctcttaaattttacctaatctttgacgttagatgcaaccacattaaaacacaaggataccatggatttgaaaagatgcagttagcaattgactcctctcctcaatcaagccaccatactaatttcattaattttaaaacaatcccttattttatgtaaacaaattgttggacaccatttattagcattgcagcaggattttatgttattatcttttgaaaaacctttctaccacttttaccagttgctttgtgctaatttataagcttgtctgagtttaaaggagctgtaagcctaggcatggtgtctcatgcttgtaatcccagcactttaggagaccacggcaggaggattgcttgaggccacgagttc

SEQ ID NO: 259309 - DNA, 337 bp, Homo sapiens
tagggaaaggaagttcgtgacatggctatcaaatagacaactgatgtatctctaaaaaattccccaatgtccaaggagatacccccttattaaatatgtgagagtctcagagcactataattatttccgtgtcattaaatttagtacttaaatatcctttacttaaatattctgtcatgcaaattagtcttgtctccccaaagaaaatacatagaaactatatcccatactgtcttctacttattaagccagaagactgaacactttttagctgaataattgttactgctaagggtacagttgcattcctttaataaaacaaaacaaattcactcct

SEQ ID NO: 259310 - DNA, 803 bp, Homo sapiens
ctgtcccacgcgtacggtcagcttggactgccagaacaaaataccatggactgggtagcttaaacaacagaaattcatttctcatagttctggagtatgggaaatccaagatcaaggagccagccaatttggttttctggtgaaggctctcttcctgccttgcagatggcctcttccttgttgtgtcctcatatggcagagagagtgagctctggtctcttcttcttcttataaagactccaattccatcattgacaacctcatctaaacctaattacgaagagctctgaaatcatattgcttcagcaatggccaaactatttataagtatttcttctggaaggaaaagactctgaaggccataataactgttttcaaatatgtagagagctactgtaggaaagcagaattagagtttttctgtatggctcaaaaaaagtataagttttgccaataaataagtgaaagatacagggatatagatttcagctcaagatgaaaaattttccaggcaccgaagttgtccacatgctaaatgggtgcctgtgggtttctagtccctgaaagtgacactgggtatgagcattggcagaacacatattcaagcctcaaaaatcaatgtttagctttttacttattgtagcaattatcctttaataaattttctgagaaattaggtacccaaatcaccccttggactttctatttcatcctttatgatcattcttaagtttatggagttgcttgattctttgaatttaggctaggttgacttgacaataaaagtcttgtttcatggaatc

SEQ ID NO: 259311 - DNA, 709 bp, Homo sapiens
aaagccacctttgggaaagggcctgtttcatgccgcaagtgtaggagtataagtagaaaataacaggacaaaaagcacaaaacataaggctcacattcgttgtgcttgttatggtaggaagagattgtggcaaaacctggaaacacagccacgttacccaggaggcaaaaggactgcaggggagagagcgtgaacaaggaagcttgcctggcttccaattctgctccgttcccacactgggactcagttggttgccagttactgcgtgaattttctggcgctgggacaatgaccttccctgcatccacaggagccctctgagggagctggccactctgcctcctagtcaccgtgaggcttgttattaagctactgtgtatgtctgtaccttttgtaacatggacctgctgtccacaaggtcttcagcattgcttacaaactggcacgtaaacataatacatgcaaaacttgcatcctttgcagttccaggaagagagagaatggaaatgtccagagatctgttcttgattttgtgtttttatcatggactttgtctactgagtactattttaaacaagttttggtttttgtttcatttttgaaccttgatctagagcttgatgaatagattcctgttctcttcactaagtcttgacgtggagtggagttgataactgacagtggcgtctacctatttctgttgagataa

SEQ ID NO: 259312 - DNA, 680 bp, Homo sapiens
aaagccacctttgggaaagggcctgtttcatgccgcaagtgtaggagtataagtagaaaataacaggacaaaaagcacaaaacataaggctcacattcgttgtgcttgttatggtaggaagagattgtggcaaaacctggaaacacagccacgttacccaggaggcaaaaggactgcaggggagagagcgtgaacaaggaagcttgcctggcttccaattctgctccgttcccacactgggactcagttggttgccagttactgcgtgaattttctggcgctgggacaatgaccttccctgcatccacaggagccctctgagggagctggccactctgcctcctagtcaccgtgaggcttgttattaagctactgtgtatgtctgtaccttttgtaacatggacctgctgtccacaaggtaacaaactaaggctgtcatggatgcacactagggtttgcaagttaaaatttaatcctggtcttagacatagaagttatttttaaatttaagtgacacatgctgcacaacaaaccccaggttctagctttcactctacttttgcagttaactacatgcagtcaaaatttaaaagtgccaaacgctagcagatcaaatccataacattttcaaacagatgaattttatcacttacaatgtcaaatacaaaaagtgtatggaa

SEQ ID NO: 259313 - DNA, 4951 bp, Homo sapiens
aaatcatccgtagtgcctccccgggggacacgtagaggagagaaaagcgaccaagataaaagtggacagaagaataagcgagactttttatccatgaaacagtctcctgccctcgctccggaagagcgctaccgcagagccgggtccccaaagccggtcttgagagctgatgacaataacatgggcaatggctgctctcagaagctggcgactgctaacctcctccggttcctattgctggtcctgattccatgtatctgtgctctcgttctcttgctggtgatcctgctttcctatgttggaacattacaaaaggtctattttaaatcaaatgggagtgaacctttggtcactgatggtgaaatccaagggtccgatgttattcttacaaatacaatttataaccagagcactgtggtgtctactgcacatcccgaccaacacgttccagcctggactacggatgcttctctcccaggggaccaaagtcacaggaatacaagtgcctgtatgaacatcacccacagccagtgtcagatgctgccctaccacgccacgctgacacctctcctctcagttgtcagaaacatggaaatggaaaagttcctcaagtttttcacatatctccatcgcctcagttgctatcaacatatcatgctgtttggctgtaccctcgccttccctgagtgcatcattgatggcgatgacagtcatggactcctgccctgtaggtccttctgtgaggctgcaaaagaaggctgtgaatcagtcctggggatggtgaattactcctggccggatttcctcagatgctcccagtttagaaaccaaactgaaagcagcaatgtcagcagaatttgcttctcacctcagcaggaaaacggaaagcaattgctctgtggaaggggtgagaactttctgtgtgccagtggaatctgcatccccgggaaactgcaatgtaatggctacaacgactgtgacgactggagtgacgaggctcattgcaactgcagcgagaatctgtttcactgtcacacaggcaagtgccttaattacagccttgtgtgtgatggatatgatgactgtggggatttgagtgatgagcaaaactgtgattgcaatcccacaacagagcatcgctgcggggacgggcgctgcatcgccatggagtgggtgtgtgatggtgaccacgactgtgtggataagtccgacgaggtcaactgctcctgtcacagccagggtctggtggaatgcagaaatggacaatgtatccccagcacgtttcaatgtgatggtgacgaggactgcaaggatgggagtgatgaggagaactgcagcgtcattcagacttcatgtcaagaaggagaccaaagatgcctctacaatccctgccttgattcatgtggtggtagctctctctgtgacccgaacaacagtctgaataactgtagtcaatgtgaaccaattacattggaactctgcatgaatttgccctacaacagtacaagttatccaaattattttggccacaggactcaaaaggaagcatccatcagctgggagtcttctcttttccctgcacttgttcaaaccaactgttataaatacctcatgttcttttcttgcaccattttggtaccaaaatgtgatgtgaatacaggcgagcgtatccctccttgcagggcattgtgtgaacactctaaagaacgctgtgagtctgttcttgggattgtgggcctacagtggcctgaagacacagattgcagtcaatttccagaggaaaattcagacaatcaaacctgcctgatgcctgatgaatatgtggaagaatgctcacctagtcatttcaagtgccgctcaggacagtgtgttctggcttccagaagatgtgatggccaggccgactgtgacgatgacagtgatgaggaaaactgtggttgtaaagagagagatctttgggaatgtccatccaataaacaatgtttgaagcacacagtgatctgcgatgggttcccagactgccctgattacatggacgagaaaaactgctcattttgccaagatgatgagctggaatgtgcaaaccatgcgtgtgtgtcacgtgacctgtggtgtgatggtgaagccgactgctcagacagttcagatgaatgggactgtgtgaccctctctataaatgtgaactcctcttcctttctgatggttcacagagctgccacagaacaccatgtgtgtgcagatggctggcaggagatattgagtcagctggcctgcaagcagatgggtttaggagaaccatctgtgaccaaattgatacaggaacaggagaaagagccgcggtggctgacattacactccaactgggagagcctcaatgggaccactttacatgaacttctagtaaatgggcagtcttgtgagagcagaagtaaaatttctcttctgtgtactaaacaagactgtgggcgccgccctgctgcccgaatgaacaaaaggatccttggaggtcggacgagtcgccctggaaggtggccatggcagtgttctctgcagagtgaacccagtggacatatctgtggctgtgtcctcattgccaagaagtgggttctgacagttgcccactgcttcgaggggagagagaatgctgcagtttggaaagtggtgcttggcatcaacaatctagaccatccatcagtgttcatgcagacacgctttgtgaagaccatcatcctgcatccccgctacagtcgagcagtggtggactatgacatcagcatcgttgagctgagtgaagacatcagtgagactggctacgtccggcctgtctgcttgcccaacccggagcagtggctagagcctgacacgtactgctatatcacaggctggggccacatgggcaataaaatgccatttaagctgcaagagggagaggtccgcattatttctctggaacattgtcagtcctactttgacatgaagaccatcaccactcggatgatatgtgctggctatgagtctggcacagttgattcatgcatgggtgacagcggtgggcctcttgtttgtgagaagcctggaggacggtggacattatttggattaacttcatggggctccgtctgcttttccaaagtcctggggcctggcgtttatagtaatgtgtcatatttcgtcgaatggattaaaagacagatttacatccagacctttctcctaaactaattataaggatgatcagagacttttgccagctacactaaaagaaaatggccttcttgactgtgaagagctgcctgcagagagctgtacagaagcacttttcatggacagaaatgctcaatcgtgcactgcaaatttgcatgtttgttttggactaatttttttcaatttattttttcaccttcatttttctcttatttcaagttcaatgaaagactttacaaaagcaaacaaagcagactttgtccttttgccaggcctaaccatgactgcagcacaaaattatcgactctggcgagatttaaaatcaggtgctacagtaacaggttatggaatggtctcttttatcctatcacaaaaaaagacatagatatttaggctgattaattatctctaccagtttttgtttctcaagctcagtgcatagtggtaaatttcagtgttaacattggagacttgcttttctttttctttttttataccccacaattcttttttattacacttcgaattttagggtacacgagcacaacgtgcaggttagttacatatgtatacatgtgccatgttggtgtgctgaacccagtaactcgtcatttgatttattaaaagccaagataatttacatgtttaaagtatttactattacccccttctaatgtttgcataattctgagaactgataaaagacagcaataaaagaccagtgtcatccatttaggtagcaagacatattgaatgcaaagttctttagatatcaatattaacacttgacattattggaccccccattctggatgtatatcaagatcataattttatagaagagtctctatagaactgtcctcatagctgggtttgttcaggatatatgagttggctgattgagactgcaacaactacatctatatttatgggcaatattttgttttacttatgtggcaaagaactggatattaaactttgcaaaagagaatttagatgagagatgcaattttttaaaaagaaaattaatttgcatccctcgtttaattaaatttatttttcagttttcttgcgttcatccataccaacaaagtcataaagagcatattttagagcacagtaagactttgcatggagtaaaacattttgtaattttcctcaaaagatgtttaatatctggtttcttctcattggtaattaaaattttagaaatgatttttagctctaggccactttacgcaactcaatttctgaagcaattagtggtaaaaagtatttttccccactaaaaaactttaaaacacaaatcttcatatatacttaatttaattagtcaggcatccattttgccttttaaacaactaggattccctactaacctccaccagcaacctggactgcctcagcattccaaatagatactacctgcaattttatacatgtatttttgtatcttttctgtgtgtaaacatagttgaaattcaaaaagttgtagcaatttctatactattcatctcctgtccttcagtttgtataaacctaaggagagtgtgaaatccagcaactgaattgtggtcacgattgtatgaaagttcaagaacatatgtcagttttgttacagttgtagctacatactcaatgtatcaacttttagcctgctcaacttaggctcagtgaaatatatatattatacttattttaaataattcttaatacaaataaaatggtaatggtctaatcacctttt

SEQ ID NO: 259314 - DNA, 884 bp, Homo sapiens
gagtagcaaatcagaaagtactgtgcctgatcttttaactcccagcccaatgtgctcttctactcatgttatttaaatagaagatttttgtaggtgtaccacataggaagagcaaatgaaataaactctttaggctggcccagaatgccttcattgtgaggaagggtgctccaagtcacggccactaggttgtcttcacccatgtattttgcgatgtcaccctggagaatgtccaccttgtgttcagatgcttagaataaaatgtcactgtaagatcacaagcctgtatgtggaatgtagaaaaataaccacagctgatgtaaatgaaaagaacctcctcagttgttgcaaaaatcagtgccctaaagagcttccttgtggtcatagatgcaaagagatgtgtcatcctggtgaatgtccctttaactgcaaccagaaggtaaaacttagatgtccttgtaaaagaataaaaaaggaattgcagtgcaacaaagtacgtgaaaatcaggtttcaatagaatgtgacacaacgtgcaaggaaatgaagcggaaagcatctgagataaaagaagcagaagccaaagctgctcttgaagaagaaaaacgaagacaacaggtgaactaaacgcttgaaaaccgactgaggtcgtcggagaagacaggaaagagctgaatggagttgagctatacattgggaaacacttattttttcatttagtgggggagggggtgaagttgctggacttccctgtttcttaaaaatttggtttatgctccaagggctataggtgctggcataacgtttatacgtttttaacagcgaacagggaaggggatatcttttaaagacgacaaggggaaaatataaggaggtatgctataaa

SEQ ID NO: 259315 - DNA, 1992 bp, Homo sapiens
gaatcttggattgtcagaatcacacatgtatgaaagaatgccacaaagtaaccaaaactgatggctgcactggaaaaaacaaggctggcccagaatgccttcattgtgaggaagggtgctccaagtcacggccactaggttgtcttcacccatgtattttgcgatgtcaccctggagaatgtccaccttgtgttcagatgcttagaataaaatgtcactgtaagatcacaagcctgtatgtggaatgtagaaaaataaccacagctgatgtaaatgaaaagaacctcctcagttgttgcaaaaatcagtgccctaaagagcttccttgtggtcatagatgcaaagagatgtgtcatcctggtgaatgtccctttaactgcaaccagaaggtaaaacttagatgtccttgtaaaagaataaaaaaggaattgcagtgcaacaaagtacgtgaaaatcaggtttcaatagaatgtgacacaacgtgcaaggaaatgaagcggaaagcatctgagataaaagaagcagaagccaaagctgctcttgaagaagaaaaacgaagacaacaggctgaactagaagcttttgaaaacagactgaagggtcgtcggaagaagaacaggaaaagagatgaagtggcagttgagctatcactatggcaaaaacataaatattatctcatttcagtgtgtggagttgtggttgtagtgtttgcctggtacatcacccatgatgtcaattaaaaaaagttttgatcttttaatgtaactcagattggatttagataagttgttaaatttgaaatattagaaaatgtatattatagaacatgatatatatttacattcatctctgtattctctcagctgttgttagaaggacagaatgttaaactttatcttaattagtatactagaaagggcagtataatactgtttaaagtgaaggcatgactgaaactaaaatatttcataaggcttagctagaggcagagtaacgtgtttttgttcattgggcttccttgtacttagttttttcatttaataattcaaaccaacacttttaaaaaaataattcagatgagactgagccatatctgcagtaagagaaatatttcttaatgttttggttacttatgatagagtacttttcttgttactgttaactttgtgctttttaaaaaaagtgattctctaacagacctcttaaattgtgacatgaaggtatgtaattagatttcagaaattggtttattagtgaggaatttttatcaataaatgtcatggggcgtgttcttcagaatatatagttattttcaacaaatgccaggctagattcctcacatgtggctatttcttatgtaagaagcttttaactgaagttggcatgtttcgtaaaacttgcgtgtcttttaaaaataataaaaggaagatgagtatttatgaagaatatgtgctgacaacagggcttatgaggtctatgtaccttaatctcgtttctccttaccacaatcttaaatagatttcagctgaaaataatcagttcttatgaaaacaaatagagaaatatcagtaagtcaaatctgtttgaattataattcctttcaaatagttttgctatttaatttatatgattaatgttttcattaaaatttttgataccaaatttgtaatctagaatatttattattagctaaaatattcaggagcctataattttaagttaggcattagtgtcaatgtatgaaattctgatacttcatgtggaagacagtcattgatggatacctaaaagtatctaaaaagtagatatgttttttttattattattatatttttattattattacacttcaagttttagggtacatgtgcacagcatgcaggtttgttacatatgtatacatgtgccatgttggtgtgctgcacccattaacttgtcatttagcattagctatatctccaaatgctatccctcccccctccccccacccca

SEQ ID NO: 259316 - DNA, 1938 bp, Homo sapiens
gaatcttggattgtcagaatcacacatgtatgaaagaatgccacaaagtaaccaaaactgatggctgcactggaaaaaacaaggctggcccagaatgccttcattgtgaggaagggtgctccaagtcacggccactaggttgtcttcacccatgtattttgcgatgtcaccctggagaatgtccaccttgtgttcagatgcttagaataaaatgtcactgtaagatcacaagcctgtatgtggaatgtagaaaaataaccacagctgatgtaaatgaaaagaacctcctcagttgttgcaaaaatcagtgccctaaagagcttccttgtggtcatagatgcaaagagatgtgtcatcctggtgaatgtccctttaactgcaaccagaaggtaaaacttagatgtccttgtaaaagaataaaaaaggaattgcagtgcaacaaagtacgtgaaaatcaggtttcaatagaatgtgacacaacgtgcaaggaaatgaagcggaaagcatctgagataaaagaagcagaagccaaagctgctcttgaagaagaaaaacgaagacaacaggctgaactagaagcttttgaaaacagactgaagggtcgtcggaagaagaacaggaaaagagatgaagtggcagttgagctatcactatggcaaaaacataaatattatctcatttcagtgtgtggagttgtggttgtagtgtttgcctggtacatcacccatgatgtcaattaaaaaaagttttgatcttttaatgtaactcagattggatttagataagttgttaaatttgaaatattagaaaatgtatattatagaacatgatatatatttacattcatctctgtattctctcagctgttgttagaaggacagaatgttaaactttatcttaattagtatactagaaagggcagtataatactgtttaaagtgaaggcatgactgaaactaaaatatttcataaggcttagctagaggcagagtaacgtgtttttgttcattgggcttccttgtacttagttttttcatttaataattcaaaccaacacttttaaaaaaataattcagatgagactgagccatatctgcagtaagagaaatatttcttaatgttttggttacttatgatagagtacttttcttgttactgttaactttgtgctttttaaaatttcagaaattggtttattagtgaggaatttttatcaataaatgtcatggggcgtgttcttcagaatatatagttattttcaacaaatgccaggctagattcctcacatgtggctatttcttatgtaagaagcttttaactgaagttggcatgtttcgtaaaacttgcgtgtcttttaaaaataataaaaggaagatgagtatttatgaagaatatgtgctgacaacagggcttatgaggtctatgtaccttaatctcgtttctccttaccacaatcttaaatagatttcagctgaaaataatcagttcttatgaaaacaaatagagaaatatcagtaagtcaaatctgtttgaattataattcctttcaaatagttttgctatttaatttatatgattaatgttttcattaaaatttttgataccaaatttgtaatctagaatatttattattagctaaaatattcaggagcctataattttaagttaggcattagtgtcaatgtatgaaattctgatacttcatgtggaagacagtcattgatggatacctaaaagtatctaaaaagtagatatgttttttttattattattatatttttattattattacacttcaagttttagggtacatgtgcacagcatgcaggtttgttacatatgtatacatgtgccatgttggtgtgctgcacccattaacttgtcatttagcattagctatatctccaaatgctatccctcccccctccccccacccca

SEQ ID NO: 259317 - DNA, 1853 bp, Homo sapiens
  misc_feature (1)..(1): n is a, c, g, or t
ntgaggcgctctcaggagctgcgggagtagtccaatagtggcacatagtaattattaagttgatttttaaaaattttatggtattctcttttttaagttaagagaaaataagcaagtaatcactatttgaagcagatatttaatgcttgcaactatatcatcattaaatattaagacatcaaataatacttataaccttaagctatcagatgaactttgcttttttatggcagacaggtctttgagggaaaaatcatttaaaatttgaaaatcgggttgtttgtaggaattgcagtgcaacaaagtacgtgaaaatcaggtttcaatagaatgtgacacaacgtgcaaggaaatgaagcggaaagcatctgagataaaagaagcagaagccaaagctgctcttgaagaagaaaaacgaagacaacaggctgaactagaagcttttgaaaacagactgaagggtcgtcggaagaagaacaggaaaagagatgaagtggcagttgagctatcactatggcaaaaacataaatattatctcatttcagtgtgtggagttgtggttgtagtgtttgcctggtacatcacccatgatgtcaattaaaaaaagttttgatcttttaatgtaactcagattggatttagataagttgttaaatttgaaatattagaaaatgtatattatagaacatgatatatatttacattcatctctgtattctctcagctgttgttagaaggacagaatgttaaactttatcttaattagtatactagaaagggcagtataatactgtttaaagtgaaggcatgactgaaactaaaatatttcataaggcttagctagaggcagagtaacgtgtttttgttcattgggcttccttgtacttagttttttcatttaataattcaaaccaacacttttaaaaaaataattcagatgagactgagccatatctgcagtaagagaaatatttcttaatgttttggttacttatgatagagtacttttcttgttactgttaactttgtgctttttaaaaaaagtgattctctaacagacctcttaaattgtgacatgaaggtatgtaattagatttcagaaattggtttattagtgaggaatttttatcaataaatgtcatggggcgtgttcttcagaatatatagttattttcaacaaatgccaggctagattcctcacatgtggctatttcttatgtaagaagcttttaactgaagttggcatgtttcgtaaaacttgcgtgtcttttaaaaataataaaaggaagatgagtatttatgaagaatatgtgctgacaacagggcttatgaggtctatgtaccttaatctcgtttctccttaccacaatcttaaatagatttcagctgaaaataatcagttcttatgaaaacaaatagagaaatatcagtaagtcaaatctgtttgaattataattcctttcaaatagttttgctatttaatttatatgattaatgttttcattaaaatttttgataccaaatttgtaatctagaatatttattattagctaaaatattcaggagcctataattttaagttaggcattagtgtcaatgtatgaaattctgatacttcatgtggaagacagtcattgatggatacctaaaagtatctaaaaagtagatatgttttttttattattattatatttttattattattacacttcaagttttagggtacatgtgcacagcatgcaggtttgttacatatgtatacatgtgccatgttggtgtgctgcacccattaacttgtcatttagcattagctatatctccaaatgctatccctcccccctccccccacccca

SEQ ID NO: 259318 - DNA, 3323 bp, Homo sapiens
gtttatgtttgttcattcatcgaccaacagacaacacaccaggaagagctttagggcattgtgtgaacactctaaagaacgctgtgagtctgttcttgggattgtgggcctacagtggcctgaagacacagattgcagtcaatttccagaggaaaattcagacaatcaaacctgcctgatgcctgatgaatatgtggaagaatgctcacctagtcatttcaagtgccgctcaggacagtgtgttctggcttccagaagatgtgatggccaggccgactgtgacgatgacagtgatgaggaaaactgtggttgtaaagagagagatctttgggaatgtccatccaataaacaatgtttgaagcacacagtgatctgcgatgggttcccagactgccctgattacatggacgagaaaaactgctcattttgccaagatgatgagctggaatgtgcaaaccatgcgtgtgtgtcacgtgacctgtggtgtgatggtgaagccgactgctcagacagttcagatgaatgggactgtgtgaccctctctataaatgtgaactcctcttcctttctgatggttcacagagctgccacagaacaccatgtgtgtgcagatggctggcaggagatattgagtcagctggcctgcaagcagatgggtttaggagaaccatctgtgaccaaattgatacaggaacaggagaaagagccgcggtggctgacattacactccaactgggagagcctcaatgggaccactttacatgaacttctagtaaatgggcagtcttgtgagagcagaagtaaaatttctcttctgtgtactaaacaagactgtgggcgccgccctgctgcccgaatgaacaaaaggatccttggaggtcggacgagtcgccctggaaggtggccatggcagtgttctctgcagagtgaacccagtggacatatctgtggctgtgtcctcattgccaagaagtgggttctgacagttgcccactgcttcgaggggagagagaatgctgcagtttggaaagtggtgcttggcatcaacaatctagaccatccatcagtgttcatgcagacacgctttgtgaagaccatcatcctgcatccccgctacagtcgagcagtggtggactatgacatcagcatcgttgagctgagtgaagacatcagtgagactggctacgtccggcctgtctgcttgcccaacccggagcagtggctagagcctgacacgtactgctatatcacaggctggggccacatgggcaataaaatgccatttaagctgcaagagggagaggtccgcattatttctctggaacattgtcagtcctactttgacatgaagaccatcaccactcggatgatatgtgctggctatgagtctggcacagttgattcatgcatgggtgacagcggtgggcctcttgtttgtgagaagcctggaggacggtggacattatttggattaacttcatggggctccgtctgcttttccaaagtcctggggcctggcgtttatagtaatgtgtcatatttcgtcgaatggattaaaagacagatttacatccagacctttctcctaaactaattataaggatgatcagagacttttgccagctacactaaaagaaaatggccttcttgactgtgaagagctgcctgcagagagctgtacagaagcacttttcatggacagaaatgctcaatcgtgcactgcaaatttgcatgtttgttttggactaatttttttcaatttattttttcaccttcatttttctcttatttcaagttcaatgaaagactttacaaaagcaaacaaagcagactttgtccttttgccaggcctaaccatgactgcagcacaaaattatcgactctggcgagatttaaaatcaggtgctacagtaacaggttatggaatggtctcttttatcctatcacaaaaaaagacatagatatttaggctgattaattatctctaccagtttttgtttctcaagctcagtgcatagtggtaaatttcagtgttaacattggagacttgcttttctttttctttttttataccccacaattcttttttattacacttcgaattttagggtacacgagcacaacgtgcaggttagttacatatgtatacatgtgccatgttggtgtgctgaacccagtaactcgtcatttgatttattaaaagccaagataatttacatgtttaaagtatttactattacccccttctaatgtttgcataattctgagaactgataaaagacagcaataaaagaccagtgtcatccatttaggtagcaagacatattgaatgcaaagttctttagatatcaatattaacacttgacattattggaccccccattctggatgtatatcaagatcataattttatagaagagtctctatagaactgtcctcatagctgggtttgttcaggatatatgagttggctgattgagactgcaacaactacatctatatttatgggcaatattttgttttacttatgtggcaaagaactggatattaaactttgcaaaagagaatttagatgagagatgcaattttttaaaaagaaaattaatttgcatccctcgtttaattaaatttatttttcagttttcttgcgttcatccataccaacaaagtcataaagagcatattttagagcacagtaagactttgcatggagtaaaacattttgtaattttcctcaaaagatgtttaatatctggtttcttctcattggtaattaaaattttagaaatgatttttagctctaggccactttacgcaactcaatttctgaagcaattagtggtaaaaagtatttttccccactaaaaaactttaaaacacaaatcttcatatatacttaatttaattagtcaggcatccattttgccttttaaacaactaggattccctactaacctccaccagcaacctggactgcctcagcattccaaatagatactacctgcaattttatacatgtatttttgtatcttttctgtgtgtaaacatagttgaaattcaaaaagttgtagcaatttctatactattcatctcctgtccttcagtttgtataaacctaaggagagtgtgaaatccagcaactgaattgtggtcacgattgtatgaaagttcaagaacatatgtcagttttgttacagttgtagctacatactcaatgtatcaacttttagcctgctcaacttaggctcagtgaaatatatatattatacttattttaaataattcttaatacaaataaaatggtaatggtctaatcacctttt

SEQ ID NO: 259319 - DNA, 1339 bp, Homo sapiens
aattcgcggccgcgtcgaccggctgcgagaagacgacagaggggggttgtagtgtttgcctggtacatcacccatgatgtcaattaaaaaaagttttgatcttttaatgtaactcagattggatttagataagttgttaaatttgaaatattagaaaatgtatattatagaacatgatatatatttacattcatctctgtattctctcagctgttgttagaaggacagaatgttaaactttatcttaattagtatactagaaagggcagtataatactgtttaaagtgaaggcatgactgaaactaaaatatttcataaggcttagctagaggcagagtaacgtgtttttgttcattgggcttccttgtacttagttttttcatttaataattcaaaccaacacttttaaaaaaataattcagatgagactgagccatatctgcagtaagagaaatatttcttaatgttttggttacttatgatagagtacttttcttgttactgttaactttgtgctttttaaaaaaagtgattctctaacagacctcttaaattgtgacatgaaggtatgtaattagatttcagaaattggtttattagtgaggaatttttatcaataaatgtcatggggcgtgttcttcagaatatatagttattttcaacaaatgccaggctagattcctcacatgtggctatttcttatgtaagaagcttttaactgaagttggcatgtttcgtaaaacttgcgtgtcttttaaaaataataaaaggaagatgagtatttatgaagaatatgtgctgacaacagggcttatgaggtctatgtaccttaatctcgtttctccttaccacaatcttaaatagatttcagctgaaaataatcagttcttatgaaaacaaatagagaaatatcagtaagtcaaatctgtttgaattataattcctttcaaatagttttgctatttaatttatatgattaatgttttcattaaaatttttgataccaaatttgtaatctagaatatttattattagctaaaatattcaggagcctataattttaagttaggcattagtgtcaatgtatgaaattctgatacttcatgtggaagacagtcattgatggatacctaaaagtatctaaaaagtagatatgttttttttattattattatatttttattattattacacttcaagttttagggtacatgtgcacagcatgcaggtttgttacatatgtatacatgtgccatgttggtgtgctgcacccattaacttgtcatttagcattagctatatctccaaatgctatccctcccccctccccccacccca

SEQ ID NO: 259320 - DNA, 2845 bp, Homo sapiens
gaatcttggattgtcagaatcacacatgtatgaaagaatgccacaaagtaaccaaaactgatggctgcactggaaaaaacaaggctggcccagaatgccttcattgtgaggaagggtgctccaagtcacggccactaggttgtcttcacccatgtattttgcgatgtcaccctggagaatgtccaccttgtgttcagatgcttagaataaaatgtcactgtaagatcacaagcctgtatgtggaatgtagaaaaataaccacagctgatgtaaatgaaaagaacctcctcagttgttgcaaaaatcagtgccctaaagagcttccttgtggtcatagatgcaaagagatgtgtcatcctggtgaatgtccctttaactgcaaccagaaggtaaaacttagatgtccttgtaaaagaataaaaaaggaattgcagtgcaacaaagtacgtgaaaatcaggtttcaatagaatgtgacacaacgtgcaaggaaatgaagcggaaagcatctgagataaaagaagcagaagccaaagctgctcttgaagaagaaaaacgaagacaacaggctgaactagaagcttttgaaaacagactgaagggtcgtcggaagaagaacaggaaaagagatgaagtggcagtcttgagagctgatgacaataacatgggcaatggctgctctcagaagctggcgactgctaacctcctccggttcctattgctggtcctgattccatgtatctgtgctctcgttctcttgctggtgatcctgctttcctatgttggaacattacaaaaggtctattttaaatcaaatgggagtgaacctttggtcactgatggtgaaatccaagggtccgatgttattcttacaaatacaatttataaccagagcactgtggtgtctactgcacatcccgaccaacacgttccagcctggactacggatgcttctctcccaggggaccaaagtcacaggaatacaagtgcctgtatgaacatcacccacagccagtgtcagatgctgccctaccacgccacgctgacacctctcctctcagttgtcagaaacatggaaatggaaaagttcctcaagtttttcacatatctccatcgcctcagttgctatcaacatatcatgctgtttggctgtaccctcgccttccctgagtgcatcattgatggcgatgacagtcatggactcctgccctgtaggtccttctgtgaggctgcaaaagaaggctgtgaatcagtcctggggatggtgaattactcctggccggatttcctcagatgctcccagtttagaaaccaaactgaaagcagcaatgtcagcagaatttgcttctcacctcagcaggaaaacggaaagcaattgctctgtggaaggggtgagaactttctgtgtgccagtggaatctgcatccccgggaaactgcaatgtaatggctacaacgactgtgacgactggagtgacgaggctcattgcaactgcagcgagaatctgtttcactgtcacacaggcaagtgccttaattacagccttgtgtgtgatggatatgatgactgtggggatttgagtgatgagcaaaactgtgattgcaatcccacaacagagcatcgctgcggggacgggcgctgcatcgccatggagtgggtgtgtgatggtgaccacgactgtgtggataagtccgacgaggtcaactgctcctgtcacagccagggtctggtggaatgcagaaatggacaatgtatccccagcacgtttcaatgtgatggtgacgaggactgcaaggatgggagtgatgaggagaactgcagcgtcattcagacttcatgtcaagaaggagaccaaagatgcctctacaatccctgccttgattcatgtggtggtagctctctctgtgacccgaacaacagtctgaataactgtagtcaatgtgaaccaattacattggaactctgcatgaatttgccctacaacagtacaagttatccaaattattttggccacaggactcaaaaggaagcatccatcagctgggagtcttctcttttccctgcacttgttcaaaccaactgttataaatacctcatgttcttttcttgcaccattttggtaccaaaatgtgatgtgaatacaggcgagcgtatccctccttgcagggcattgtgtgaacactctaaagaacgctgtgagtctgttcttgggattgtgggcctacagtggcctgaagacacagattgcagtcaatttccagaggaaaattcagacaatcaaacctgcctgatgcctgatgaatatgtggaaggttgtaaagagagagatctttgggaatgtccatccaataaacaatgtttgaagcacacagtgatctgcgatgggttcccagactgccctgattacatggacgagaaaaactgctcattttgccaagatgatgagctggaatgtgcaaaccatgcgtgtgtgtcacgtgacctgtggtgtgatggtgaagccgactgctcagacagttcagatgaatgggactgtggtgagctacttgtttctgccatctgttgtactctctcatgcctgtcagccactgaagctgaatggatcctaaattacttcctggattttactgaccaagttcatctattttgttttactgttataaaagctgatagtgctgatctatgtgtgttatttccaactcacagaaaatttccccacgaagctacttctctatttgaaatatctatattgtatggaaaaacgtttgggttcaaaatgttgtaatcatataattgctgggagaggatttaaaaactcttcattaaaacccaacttcaataaattta

SEQ ID NO: 259321 - DNA, 823 bp, Homo sapiens
gaatcttggattgtcagaatcacacatgtatgaaagaatgccacaaagtaaccaaaactgatggctgcactggaaaaaacaaggctggcccagaatgccttcattgtgaggaagggtgctccaagtcacggccactaggttgtcttcacccatgtattttgcgatgtcaccctggagaatgtccaccttgtgttcagatgcttagaataaaatgtcactgtaagatcacaagcctgtatgtggaatgtagaaaaataaccacagctgatgtaaatgaaaagaacctcctcagttgttgcaaaaatcagtgccctaaagagcttccttgtggtcatagatgcaaagagatgtgtcatcctggtgaatgtccctttaactgcaaccagaaggtaaaacttagatgtccttgtaaaagaataaaaaaggaattgcagtgcaacaaagtacgtgaaaatcaggtttcaatagaatgtgacacaacgtgcaaggaaatgaagcggaaagcatctgagataaaagaagcagaagccaaagctgctcttgaagaagaaaaacgaagacaacaggctgaactagaagcttttgaaaacagactgaagggtcgtcggaagaagaacaggaaaagagatgaagtggcagtcttgagagctgatgacaataacatgggcaatggctgctctcagaagctggcgactgctaacctcctccggttcctattgctggtcctgattccatgtatctgtgctctcgttctcttgctggtgatcctgctttcctatgttggtgggtgaggccattattaaataaaaatgaagttaaagtg

SEQ ID NO: 259322 - DNA, 684 bp, Homo sapiens
  misc_feature (1)..(1): n is a, c, g, or t
ntgaggcgctctcaggagctgcgggagtagtccaatagtggcacatagtaattattaagttgatttttaaaaattttatggtattctcttttttaagttaagagaaaataagcaagtaatcactatttgaagcagatatttaatgcttgcaactatatcatcattaaatattaagacatcaaataatacttataaccttaagctatcagatgaactttgcttttttatggcagacaggtctttgagggaaaaatcatttaaaatttgaaaatcgggttgtttgtaggaattgcagtgcaacaaagtacgtgaaaatcaggtttcaatagaatgtgacacaacgtgcaaggaaatgaagcggaaagcatctgagataaaagaagcagaagccaaagctgctcttgaagaagaaaaacgaagacaacaggctgaactagaagcttttgaaaacagactgaagggtcgtcggaagaagaacaggaaaagagatgaagtggcagtcttgagagctgatgacaataacatgggcaatggctgctctcagaagctggcgactgctaacctcctccggttcctattgctggtcctgattccatgtatctgtgctctcgttctcttgctggtgatcctgctttcctatgttggtgggtgaggccattattaaataaaaatgaagttaaagtg

SEQ ID NO: 259323 - DNA, 735 bp, Homo sapiens
gtttatgtttgttcattcatcgaccaacagacaacacaccaggaagagctttagggcattgtgtgaacactctaaagaacgctgtgagtctgttcttgggattgtgggcctacagtggcctgaagacacagattgcagtcaatttccagaggaaaattcagacaatcaaacctgcctgatgcctgatgaatatgtggaaggttgtaaagagagagatctttgggaatgtccatccaataaacaatgtttgaagcacacagtgatctgcgatgggttcccagactgccctgattacatggacgagaaaaactgctcattttgccaagatgatgagctggaatgtgcaaaccatgcgtgtgtgtcacgtgacctgtggtgtgatggtgaagccgactgctcagacagttcagatgaatgggactgtggtgagctacttgtttctgccatctgttgtactctctcatgcctgtcagccactgaagctgaatggatcctaaattacttcctggattttactgaccaagttcatctattttgttttactgttataaaagctgatagtgctgatctatgtgtgttatttccaactcacagaaaatttccccacgaagctacttctctatttgaaatatctatattgtatggaaaaacgtttgggttcaaaatgttgtaatcatataattgctgggagaggatttaaaaactcttcattaaaacccaacttcaataaattta

SEQ ID NO: 259324 - DNA, 1660 bp, Homo sapiens
gaatcttggattgtcagaatcacacatgtatgaaagaatgccacaaagtaaccaaaactgatggctgcactggaaaaaacaaggctggcccagaatgccttcattgtgaggaagggtgctccaagtcacggccactaggttgtcttcacccatgtattttgcgatgtcaccctggagaatgtccaccttgtgttcagatgcttagaataaaatgtcactgtaagatcacaagcctgtatgtggaatgtagaaaaataaccacagctgatgtaaatgaaaagaacctcctcagttgttgcaaaaatcagtgccctaaagagcttccttgtggtcatagatgcaaagagatgtgtcatcctggtgaatgtccctttaactgcaaccagaaggtaaaacttagatgtccttgtaaaagaataaaaaaggaattgcagtgcaacaaagtacgtgaaaatcaggtttcaatagaatgtgacacaacgtgcaaggaaatgaagcggaaagcatctgagataaaagaagcagaagccaaagctgctcttgaagaagaaaaacgaagacaacaggctgaactagaagcttttgaaaacagactgaagggtcgtcggaagaagaacaggaaaagagatgaagtggcagttgagctatcactatggcaaaaacataaatattatctcatttcagtgtgtggagttgtggttgtagtgtttgcctggtacatcacccatgatgtcaattaaaaaaagttttgatcttttaatgtaactcagattggatttagataagttgttaaatttgaaatattagaaaatgtatattatagaacatgatatatatttacattcatctctgtattctctcagctgttgttagaaggacagaatgttaaactttatcttaattagtatactagaaagggcagtataatactgtttaaagtgaaggcatgactgaaactaaaatatttcataaggcttagctagaggcagagtaacgtgtttttgttcattgggcttccttgtacttagttttttcatttaataattcaaaccaacacttttaaaaaaataattcagatgagactgagccatatctgcagtaagagaaatatttcttaatgttttggttacttatgatagagtacttttcttgttactgttaactttgtgctttttaaaaaaagtgattctctaacagacctcttaaattgtgacatgaaggtatgtaattagatttcagaaattggtttattagtgaggaatttttatcaataaatgtcatggggcgtgttcttcagaatatatagttattttcaacaaatgccaggctagattcctcacatgtggctatttcttatgtaagaagcttttaactgaagttggcatgtttcgtaaaacttgcgtgtcttttaaaaataataaaaggaagatgagtatttatgaagaatatgtgctgacaacagggcttatgaggtctatgtaccttaatctcgtttctccttaccacaatcttaaatagatttcagctgaaaataatcagttcttatgaaaacaaatagagaaatatcagtaagtcaaatctgtttgaattataattcctttcaaatagttttgctatttaatttatatgattaatgttttcattaaaatttttgatacca

SEQ ID NO: 259325 - DNA, 5233 bp, Homo sapiens
gaatcttggattgtcagaatcacacatgtatgaaagaatgccacaaagtaaccaaaactgatggctgcactggaaaaaacaaggctggcccagaatgccttcattgtgaggaagggtgctccaagtcacggccactaggttgtcttcacccatgtattttgcgatgtcaccctggagaatgtccaccttgtgttcagatgcttagaataaaatgtcactgtaagatcacaagcctgtatgtggaatgtagaaaaataaccacagctgatgtaaatgaaaagaacctcctcagttgttgcaaaaatcagtgccctaaagagcttccttgtggtcatagatgcaaagagatgtgtcatcctggtgaatgtccctttaactgcaaccagaaggtaaaacttagatgtccttgtaaaagaataaaaaaggaattgcagtgcaacaaagtacgtgaaaatcaggtttcaatagaatgtgacacaacgtgcaaggaaatgaagcggaaagcatctgagataaaagaagcagaagccaaagctgctcttgaagaagaaaaacgaagacaacaggctgaactagaagcttttgaaaacagactgaagggtcgtcggaagaagaacaggaaaagagatgaagtggcagtcttgagagctgatgacaataacatgggcaatggctgctctcagaagctggcgactgctaacctcctccggttcctattgctggtcctgattccatgtatctgtgctctcgttctcttgctggtgatcctgctttcctatgttgggtgcctgtatgaacatcacccacagccagtgtcagatgctgccctaccacgccacgctgacacctctcctctcagttgtcagaaacatggaaatggaaaagttcctcaagtttttcacatatctccatcgcctcagttgctatcaacatatcatgctgtttggctgtaccctcgccttccctgagtgcatcattgatggcgatgacagtcatggactcctgccctgtaggtccttctgtgaggctgcaaaagaaggctgtgaatcagtcctggggatggtgaattactcctggccggatttcctcagatgctcccagtttagaaaccaaactgaaagcagcaatgtcagcagaatttgcttctcacctcagcaggaaaacggaaagcaattgctctgtggaaggggtgagaactttctgtgtgccagtggaatctgcatccccgggaaactgcaatgtaatggctacaacgactgtgacgactggagtgacgaggctcattgcaactgcagcgagaatctgtttcactgtcacacaggcaagtgccttaattacagccttgtgtgtgatggatatgatgactgtggggatttgagtgatgagcaaaactgtgattgcaatcccacaacagagcatcgctgcggggacgggcgctgcatcgccatggagtgggtgtgtgatggtgaccacgactgtgtggataagtccgacgaggtcaactgctcctgtcacagccagggtctggtggaatgcagaaatggacaatgtatccccagcacgtttcaatgtgatggtgacgaggactgcaaggatgggagtgatgaggagaactgcagcgtcattcagacttcatgtcaagaaggagaccaaagatgcctctacaatccctgccttgattcatgtggtggtagctctctctgtgacccgaacaacagtctgaataactgtagtcaatgtgaaccaattacattggaactctgcatgaatttgccctacaacagtacaagttatccaaattattttggccacaggactcaaaaggaagcatccatcagctgggagtcttctcttttccctgcacttgttcaaaccaactgttataaatacctcatgttcttttcttgcaccattttggtaccaaaatgtgatgtgaatacaggcgagcgtatccctccttgcagggcattgtgtgaacactctaaagaacgctgtgagtctgttcttgggattgtgggcctacagtggcctgaagacacagattgcagtcaatttccagaggaaaattcagacaatcaaacctgcctgatgcctgatgaatatgtggaagaatgctcacctagtcatttcaagtgccgctcaggacagtgtgttctggcttccagaagatgtgatggccaggccgactgtgacgatgacagtgatgaggaaaactgtggttgtaaagagagagatctttgggaatgtccatccaataaacaatgtttgaagcacacagtgatctgcgatgggttcccagactgccctgattacatggacgagaaaaactgctcattttgccaagatgatgagctggaatgtgcaaaccatgcgtgtgtgtcacgtgacctgtggtgtgatggtgaagccgactgctcagacagttcagatgaatgggactgtgtgaccctctctataaatgtgaactcctcttcctttctgatggttcacagagctgccacagaacaccatgtgtgtgcagatggctggcaggagatattgagtcagctggcctgcaagcagatgggtttaggagaaccatctgtgaccaaattgatacaggaacaggagaaagagccgcggtggctgacattacactccaactgggagagcctcaatgggaccactttacatgaacttctagtaaatgggcagtcttgtgagagcagaagtaaaatttctcttctgtgtactaaacaagactgtgggcgccgccctgctgcccgaatgaacaaaaggatccttggaggtcggacgagtcgccctggaaggtggccatggcagtgttctctgcagagtgaacccagtggacatatctgtggctgtgtcctcattgccaagaagtgggttctgacagttgcccactgcttcgaggggagagagaatgctgcagtttggaaagtggtgcttggcatcaacaatctagaccatccatcagtgttcatgcagacacgctttgtgaagaccatcatcctgcatccccgctacagtcgagcagtggtggactatgacatcagcatcgttgagctgagtgaagacatcagtgagactggctacgtccggcctgtctgcttgcccaacccggagcagtggctagagcctgacacgtactgctatatcacaggctggggccacatgggcaataaaatgccatttaagctgcaagagggagaggtccgcattatttctctggaacattgtcagtcctactttgacatgaagaccatcaccactcggatgatatgtgctggctatgagtctggcacagttgattcatgcatgggtgacagcggtgggcctcttgtttgtgagaagcctggaggacggtggacattatttggattaacttcatggggctccgtctgcttttccaaagtcctggggcctggcgtttatagtaatgtgtcatatttcgtcgaatggattaaaagacagatttacatccagacctttctcctaaactaattataaggatgatcagagacttttgccagctacactaaaagaaaatggccttcttgactgtgaagagctgcctgcagagagctgtacagaagcacttttcatggacagaaatgctcaatcgtgcactgcaaatttgcatgtttgttttggactaatttttttcaatttattttttcaccttcatttttctcttatttcaagttcaatgaaagactttacaaaagcaaacaaagcagactttgtccttttgccaggcctaaccatgactgcagcacaaaattatcgactctggcgagatttaaaatcaggtgctacagtaacaggttatggaatggtctcttttatcctatcacaaaaaaagacatagatatttaggctgattaattatctctaccagtttttgtttctcaagctcagtgcatagtggtaaatttcagtgttaacattggagacttgcttttctttttctttttttataccccacaattcttttttattacacttcgaattttagggtacacgagcacaacgtgcaggttagttacatatgtatacatgtgccatgttggtgtgctgaacccagtaactcgtcatttgatttattaaaagccaagataatttacatgtttaaagtatttactattacccccttctaatgtttgcataattctgagaactgataaaagacagcaataaaagaccagtgtcatccatttaggtagcaagacatattgaatgcaaagttctttagatatcaatattaacacttgacattattggaccccccattctggatgtatatcaagatcataattttatagaagagtctctatagaactgtcctcatagctgggtttgttcaggatatatgagttggctgattgagactgcaacaactacatctatatttatgggcaatattttgttttacttatgtggcaaagaactggatattaaactttgcaaaagagaatttagatgagagatgcaattttttaaaaagaaaattaatttgcatccctcgtttaattaaatttatttttcagttttcttgcgttcatccataccaacaaagtcataaagagcatattttagagcacagtaagactttgcatggagtaaaacattttgtaattttcctcaaaagatgtttaatatctggtttcttctcattggtaattaaaattttagaaatgatttttagctctaggccactttacgcaactcaatttctgaagcaattagtggtaaaaagtatttttccccactaaaaaactttaaaacacaaatcttcatatatacttaatttaattagtcaggcatccattttgccttttaaacaactaggattccctactaacctccaccagcaacctggactgcctcagcattccaaatagatactacctgcaattttatacatgtatttttgtatcttttctgtgtgtaaacatagttgaaattcaaaaagttgtagcaatttctatactattcatctcctgtccttcagtttgtataaacctaaggagagtgtgaaatccagcaactgaattgtggtcacgattgtatgaaagttcaagaacatatgtcagttttgttacagttgtagctacatactcaatgtatcaacttttagcctgctcaacttaggctcagtgaaatatatatattatacttattttaaataattcttaatacaaataaaatggtaatggtctaatcacctttt

SEQ ID NO: 259326 - DNA, 2953 bp, Homo sapiens
gaatcttggattgtcagaatcacacatgtatgaaagaatgccacaaagtaaccaaaactgatggctgcactggaaaaaacaaggctggcccagaatgccttcattgtgaggaagggtgctccaagtcacggccactaggttgtcttcacccatgtattttgcgatgtcaccctggagaatgtccaccttgtgttcagatgcttagaataaaatgtcactgtaagatcacaagcctgtatgtggaatgtagaaaaataaccacagctgatgtaaatgaaaagaacctcctcagttgttgcaaaaatcagtgccctaaagagcttccttgtggtcatagatgcaaagagatgtgtcatcctggtgaatgtccctttaactgcaaccagaaggtaaaacttagatgtccttgtaaaagaataaaaaaggaattgcagtgcaacaaagtacgtgaaaatcaggtttcaatagaatgtgacacaacgtgcaaggaaatgaagcggaaagcatctgagataaaagaagcagaagccaaagctgctcttgaagaagaaaaacgaagacaacaggctgaactagaagcttttgaaaacagactgaagggtcgtcggaagaagaacaggaaaagagatgaagtggcagtcttgagagctgatgacaataacatgggcaatggctgctctcagaagctggcgactgctaacctcctccggttcctattgctggtcctgattccatgtatctgtgctctcgttctcttgctggtgatcctgctttcctatgttggaacattacaaaaggtctattttaaatcaaatgggagtgaacctttggtcactgatggtgaaatccaagggtccgatgttattcttacaaatacaatttataaccagagcactgtggtgtctactgcacatcccgaccaacacgttccagcctggactacggatgcttctctcccaggggaccaaagtcacaggaatacaagtgcctgtatgaacatcacccacagccagtgtcagatgctgccctaccacgccacgctgacacctctcctctcagttgtcagaaacatggaaatggaaaagttcctcaagtttttcacatatctccatcgcctcagttgctatcaacatatcatgctgtttggctgtaccctcgccttccctgagtgcatcattgatggcgatgacagtcatggactcctgccctgtaggtccttctgtgaggctgcaaaagaaggctgtgaatcagtcctggggatggtgaattactcctggccggatttcctcagatgctcccagtttagaaaccaaactgaaagcagcaatgtcagcagaatttgcttctcacctcagcaggaaaacggaaagcaattgctctgtggaaggggtgagaactttctgtgtgccagtggaatctgcatccccgggaaactgcaatgtaatggctacaacgactgtgacgactggagtgacgaggctcattgcaactgcagcgagaatctgtttcactgtcacacaggcaagtgccttaattacagccttgtgtgtgatggatatgatgactgtggggatttgagtgatgagcaaaactgtgattgcaatcccacaacagagcatcgctgcggggacgggcgctgcatcgccatggagtgggtgtgtgatggtgaccacgactgtgtggataagtccgacgaggtcaactgctcctgtcacagccagggtctggtggaatgcagaaatggacaatgtatccccagcacgtttcaatgtgatggtgacgaggactgcaaggatgggagtgatgaggagaactgcagcgtcattcagacttcatgtcaagaaggagaccaaagatgcctctacaatccctgccttgattcatgtggtggtagctctctctgtgacccgaacaacagtctgaataactgtagtcaatgtgaaccaattacattggaactctgcatgaatttgccctacaacagtacaagttatccaaattattttggccacaggactcaaaaggaagcatccatcagctgggagtcttctcttttccctgcacttgttcaaaccaactgttataaatacctcatgttcttttcttgcaccattttggtaccaaaatgtgatgtgaatacaggcgagcgtatccctccttgcagggcattgtgtgaacactctaaagaacgctgtgagtctgttcttgggattgtgggcctacagtggcctgaagacacagattgcagtcaatttccagaggaaaattcagacaatcaaacctgcctgatgcctgatgaatatgtggaagaatgctcacctagtcatttcaagtgccgctcaggacagtgtgttctggcttccagaagatgtgatggccaggccgactgtgacgatgacagtgatgaggaaaactgtggttgtaaagagagagatctttgggaatgtccatccaataaacaatgtttgaagcacacagtgatctgcgatgggttcccagactgccctgattacatggacgagaaaaactgctcattttgccaagatgatgagctggaatgtgcaaaccatgcgtgtgtgtcacgtgacctgtggtgtgatggtgaagccgactgctcagacagttcagatgaatgggactgtggtgagctacttgtttctgccatctgttgtactctctcatgcctgtcagccactgaagctgaatggatcctaaattacttcctggattttactgaccaagttcatctattttgttttactgttataaaagctgatagtgctgatctatgtgtgttatttccaactcacagaaaatttccccacgaagctacttctctatttgaaatatctatattgtatggaaaaacgtttgggttcaaaatgttgtaatcatataattgctgggagaggatttaaaaactcttcattaaaacccaacttcaataaattta

SEQ ID NO: 259327 - DNA, 304 bp, Homo sapiens
ggcgcagtcttggctcactgcagcctctgcctcccatgctcaagtgatcctcccacctcagcctcccgagtagttgggactacaggtgtgagccaccatgcccggatattttttgtatttttagtagaaatggggtttcatcatgttggccaggctggtcttggaactcgctgagacaggcagactgcttgagtccaggagttcgagaccagcttgggcaatatggtgaaacccatctctacaggggaaaaaaaaaaatagctaggagtggtggtgtgtacctgttgagtcccagcaggactca

SEQ ID NO: 259328 - DNA, 299 bp, Homo sapiens
ttttttttggagacagagtctccctctgcagtccagccttggcaacagagcaagactctataaataaataaataaaaaacccactgcacctggcccatttttttttaaattatactcatggcctggcatggtggctcatgcctgtaattatagcactttaggaggctgagacaggcagactgcttgagtccaggagttcgagaccagcttgggcaatatggtgaaacccatctctacaggggaaaaaaaaaaatagctaggagtggtggtgtgtacctgttgagtcccagcaggactca

SEQ ID NO: 259329 - DNA, 499 bp, Homo sapiens
tcattacttatgttattagtagggtttccagtcacctgtagtctatcagtagttacgttttgggggagtcaagagttatagcagattttttattgcctgagggtttgtcccctaatctccatgttgttcaagggtcaactatagatgcttttattacacatctcctttgaaaactgggtagcatataattaatacattttagtcctgcctgacactcatttaaaacaagcaaacagagatcccaactaataacatgaatatgtgagactttaaactatttttattacatacgtaattatcatactacaaatcccaaagattttcttttgatttacatagcagaatattattaatcaagttatcactaaaataaaggcatttctttgggaagtcagaggaatatagtccagacatacagttggcccaccaaatccttgagttctccctccttggatccaaccaactgcagatcaaaaataatgaaggtgaaaaaatagaa

SEQ ID NO: 259330 - DNA, 277 bp, Homo sapiens
aaaaaaaagactcaagcatggcaaattaaacatatgaaaaaacgtccaacatcattagccattattagggcaataaaaactacaacaaaatgagataccactacacacttattagaatggttaaattaaaaatactgacaataccaagagctgacgaggatgtgcagagttgtattccattgtatggatgtaccattgtttatgcatttaaccattaaagaacatttgggttgttttcagcttttggctaccataaataaagcttctgtgaacattt

SEQ ID NO: 259331 - DNA, 546 bp, Homo sapiens
gcttagtgagatttgaatatattaggaacattaactttttaaataaatgtagtttcctgtctttttgatcaatgggagggcagctgtgcctaatttaggactgatttattctaatctctcttaataaatgcttgtattcagagtctgtttggaatttaacccaatgcttagaactccttaaatatacagaaatatattttaggggtaattgattcatggaactctcctactttggagcacaattgttataattgtccagaaactggccaaataatgtagaacgcgcaagttgttgggaagcccttttgtttcctgatagttacatgtaattccagcagtatttggaaataatttgctaagatgttagaatgtaacatttgaagactcgttagaaaaatcaataaaattatctttggctaataggtggtacacatcttagtctatttaatatgcctttccaaatactgtgtctgttgagaattggtgtatataactagatgactttaataattagtgcctgagtctagaattgagatgtttagtcgt

SEQ ID NO: 259332 - DNA, 1061 bp, Homo sapiens
tttgagacagagtttcactcttgttgcccaggctggaattcagtggctcgatcttggctcaccacaacctctgcattctcctgcctcagcctcccgagtagctaggattataggcacctgccaccatgcccggctaattttgtttgtaattttagtagagatggggtttctccatgttggccaggctggtttcgaactcctgacctcaggtgatctacccgcctcagcctcccaaagtgctgaaattacaggcgtgagccacctcacctggccatgttctttatggaatactacaatgtgttgtcacaggatttgttattcagatgtcaatcatttttatttatatatttctgggtaaaacttattagtggtgtgaggagtgcagaatatggaagcttacctaaattctttttctgccagccaacattttaaaagacaaatgatgcatcctttctcaatgctgctaattctttaaattttacatgtcccaatttattccatttgagatttattttaatgttttcaacccctgtgtaacatgtatcatgaggagaaagcactatcattgatcatcactatggattaaaatataggaatattttacagggcagtatgggtgggggtgggagacatattggaatcgtgttttctgggataaaatttttaaaaagaattaatcattagccctgagtattttagtcatttgtgcctatagaaaacaacatgctcttttattgtggactttcttcttttaagtgaggtttaatttatatacaatacaataacagatttttaagtattcatttgagatgttttgacaactgtatatatacatgtaaccatcactggaatcagatatagaatattccccttaaatattgtcaggtaaacacattgagaatattttttccagtctgtggcttacctacttattttcataatgaatgttttacttgtgatgaagatttaacttacccttttactttaatgattaatattttctgtgttctttctaataaattttacgaactctgagttataagatttctcctaagattttt

SEQ ID NO: 259333 - DNA, 734 bp, Homo sapiens
tttgagacagagtttcactcttgttgcccaggctggaattcagtggctcgatcttggctcaccacaacctctgcattctcctgcctcagcctcccgagtagctaggattataggcacctgccaccatgcccggctaattttgtttgtaattttagtagagatggggtttctccatgttggccaggctggtttcgaactcctgacctcaggtgatctacccgcctcagcctcccaaagtgctgaaattacaggcgtgagccacctcacctggccatgttctttatggaatactacaatgtgttgtcacaggatttgttattcagatgtcaatcatttttatttatatatttctgggtaaaacttattagtggtgtgaggagtgcagaatatggaagcttacctaaattctttttctgccagccaacattttaaaagacaaatgatgcatcctttctcaatgctgctaattctttaaattttacatgtcccaatttattccatttgagatttattttaatgttttcaacccctgtgtaacatgtatcatgaggagaaagcactatcattgatcatcactatggattaaaatataggaatattttacagggcagtatgggtggggggacttttttttttaagggaggttaattatttcctccataacagttttttagattatttgggatggttggaactgttttttccatgtacctattgtgataaatttgatatca

SEQ ID NO: 259334 - DNA, 400 bp, Homo sapiens
agtctctacccaccatactccctggaagtggagagcaatcacagatctgctggtttctttctctgcacctggcaacctctggagggcaaggcctgcacttttccagctgtgacaccagcccatgtgtctcatatcatttctctctcatgtagcaagaatttctccccagaaaggaggtggcaaagatgggcagggggtgcaaaggtgggggctctgacagccaggttccagggtgcactgctgagccagcccacaaccatggtgaggcagggagattccgcaggactccgtatccgtgctttgaagatggctttcgtgcttttagtcttttctttgttcatttgttgtttgttttctgatgatgttttagtaaaaagttcttttgaaaatcccaagcttt

SEQ ID NO: 259335 - DNA, 467 bp, Homo sapiens
tttttacaattttgggtgtctatctttggcatgtttcctgttatgtgagcatgacatgctgtgtatgtgagtgagcttgtagggcgtggtgggacttaggcatttgcagacagtgtttagatgaaagattacatgtaatgataaatctgaatccctccattttatttgggtggaaccatgaccaaaaatggtaggaagacgaaaggccagaaagagactttgccagagagttcacggagttttcttaccccgcatgctgactaaagaaaacatgggcttttctgaaaccagcttcaactacagtataaactatatcagaagcttacttgataagccttgcggagctgctctgaggaatagtgtgaattccttccttgccttattgttgactgttaatgaacatgttttgtcatttatctgtttaagtttttcagaaaataaaagtaaatttctgttagcacatttta

SEQ ID NO: 259336 - DNA, 546 bp, Homo sapiens
agcacagggcagagtgtcttacttcattcttatatgctgctgagcttgatgtcgactcagtttgtatttgattcctgaagttagaatatctcagaaatctttctttgggcagtatttgctaatgtaattattatttatcccagttcattccatacattaagtattctggaagggtatttaactcttcacattcttattggccaaccagtatctaatacatggaatgaggtttcaggccctgcctccactgaggcgcttcccactgggaagtactagagaatatttttaaagagtctctgtggacacacagcaagttttaggtttttttgtttttgtttttgtttggtatatctagaaacacactttgtgaatgtgaaaggttctcttgtacccaactagaaataatcactgactgcctctgaagataatgatggagaatttgttaaaagatttctctttaattataaagtggctatgcaaatgtgattacagtttaaatttattttcgtagtgaaaatagcttttgggggcattcaggcattctag

SEQ ID NO: 259337 - DNA, 819 bp, Homo sapiens
cccttctgctttccacctatgaaaatataatgttcatctgctctggaggacacagcaaggtgccatcctggaatgagagattgggccctcaccagataaggaacctgctgatgccttgatcttggactttgcagcctccaaaaactatgaaaaaataaatttctattatttataaattacccagtttcagatattttgctatagcagcacaaatggaaatgccctttaaagtttctcagattgctcctgtgtttcatagatgggaaatcatactgatgactcaaccatatatagcattattttgctggttcatgctacctcagcggaaacagctgccaaaggtcatctgacataatagctgatgaattcaagcccagtggatttcatttgcaattttcaatttactgaggcctccaaaccccacggtgataaaagcttcccctatcgtggcctgtcacaaacatcaagaaactgcacaaacccacaagaaagaaaaaagagaaagctgtgcatcatcacagctatagataaggagaacaggaagaaatggtatcatgcaggaagatggggagcagcctgtgtggctagttctctaaatgccaattgaaacgaaaagactatgaggaacaatcaaataacttccacagaataacaacatgtttctttggagcttttatgtgaaaattgccttctaatctctgacttgacatgctcccacacaaaaatgtaagtgtaaatatgcaaataaataaatgaataaacaatgatgcggccgaaaacccttatccgctctccgaaacggccgcatgcacatcaaaa

SEQ ID NO: 259338 - DNA, 1579 bp, Homo sapiens
cccttctgctttccacctatgaaaatataatgttcatctgctctggaggacacagcaaggtgccatcctggaatgagagattgggccctcaccagataaggaacctgctgatgccttgatcttggactttgcagcctccaaaaactatgaaaaaataaatttctattatttataaattacccagtttcagatattttgctatagcagcacaaatggaaatgccctttaaagtttctcagattgctcctgtgtttcatagatgggaaatcatactgatgactcaaccatatatagcattattttgctggttcatgctacctcagcggaaacagctgccaaaggtcatctgacataatagctgatgaattcaagcccagtggatttcatttgcaattttcaatttactgaggcctccaaaccccacggtgataaaagcttcccctatcgtggcctgtcacaaacatcaagaaactgcacaaacccacaagaaagaaaaaagagaaagctgtgcatcatcacagctatagataaggagaacaggaagaaatggtatcatgcaggaagatggggagcagcctgtgtggctagttctctaaatgccaattgaaacgaaaagactatgaggaacaatcaaataacttccacagaataacaacatgtttctttggagcttttatgtgaaaattgccttctaatctctgacttgacatgctcccacacaaaaatataaatggtagatcctttgattgatttgccagggaagtcaaaggactgacatagcaactacttgtaagtggatctagatgtagtacatatcaaagatgcattagcaagaagaagaaagccatttttccccctgtcaaactatttacaatgaacttaggcaggatcgggaactgaatcctgttcccaggcagttgttcaaattgagcaaaccatatgtgtgtttcttggagaatagcaagtttgataactcagcaggtcacctttgtcctatcctacttgactcataccacggcctggaaaaggagaaagcaaatagatgtccactgcttgaggtgtagctgctgggagaatttagtttcaaacggagatgtcttgatcctgtttctaccaaataggttcaggaaggcttatgaagtttgtctgatgcagtaagaggacttggcagtgggcatgtaccaacctgccgaatgccaatatttctgatgacacgtgacaagaaaatctgagaatgatatcaacaggaccagaatattaactttatttgtgtgttgctaactgtgtgacaatcacagtttggaaaggaaaagagaataattcctagttgaactcatatggcagtgagagattgccttctgtagagttattctttaaaattgtcgcagcaaaaacaaaagtaggagctacttgttgtaagtgaatcttgagttctttgaaattaaactgtttcttaagattcttctattagcaaaaaagttagcaatcttttaattcttcaaagtctcaacatagaaaatagtttcctcagtagtcgaaaatgacaggaattaacattttgaaataagagaaataaaac

SEQ ID NO: 259339 - DNA, 468 bp, Homo sapiens
gtgctgggattacaggcatgagccacctcacccagccgcggttagatctttctttttaggagataagccaggcagaggttgaggatcacaggagccattgtcattctggcacggctggagcagagtttctgtggccatgtgtcccctgtggtggcaggcaagagaacacctgggcaggaaggccacagatgagaagcagctcaaaccaaggccccaacctgcaggggtttttctggctctacctatgaagcctcctaacctgttcaaagcagtattcaaccagccgaagcagcttgttttccacagggaatctggaggtgactattgctagtatttggagcccaggaacctattcctacacatacccatggccctgtctctattttgccctatctacatgtaaggtttgtgtcagccttgcaaaaggggctgtgggctgagaaaataaagcctggcttcctctctgaa

SEQ ID NO: 259340 - DNA, 583 bp, Homo sapiens
taacagcacctcagagaagatttggaaaataaatgagctgatgagagcaattttctgcttcctgggccaccacagtcttctttgctgtttttgattgcaaccattttcagagaagaatcaacaccaaagattacatgtatataaattacctagtaacgagcatgacctctgtccaagcagaaggcaagcaggggagaagatttagctgctcaactacagttattctctcaacccaagctaaggtagttggtgccatacatttcccacaggactactattttccaatatcaacatctttaatttatttatttatttttgttttagtgcactagctggaagtttcgatataatgttaaatacaaaggatgagagtaaatattcttacatttttcctggtcttatgaagaaagaattttctttcaccattaagtattatgttgtctgtaggtttttcacatatgttcatagtgggttgaagcactctctttttagtcctagctgagagttttaggttaagaataagtattatttattattattattatttatttattattataaataaaatacatttattacatta

SEQ ID NO: 259341 - DNA, 474 bp, Homo sapiens
cactttctcgagaaagaggttattttgcctcttagcagcagtagacaaatatatgcaaacagtctaaacaaaagcctatgtattgcttgaagttaaattaaaacttgttcagacagggcattgacactgacagtagccacctcaactcaacttcacctactgaaaaaaatctactaaacgacacctggaactcattacattctttcatttgagttttgctgccttaatattgtatcacactgagaatctaagtattatctggctttctttcaagtattgtttcctgagaagttatttgcctaaaattcattcatactcctctaatctttcttcctctcccctcacctccccttttttcctccaccatttcctttggactttcacactccagaattcaaatgataccactgggtcctagggggttgtgtactataatttatgtggtgaaggacctggtgatttgatgtgaaaata

SEQ ID NO: 259342 - DNA, 444 bp, Homo sapiens
gcagtgagctgaaatcatgccactgcactccagcctgggcaacagattgagactccgtctcaaaaaaaaaaaaaaaaaaaaaaaaacatcagaacacacatataccaacatcaaatgtaaagcataatggcaaaaaaattttagaagagaaggttctagtggaacaggggtaaagaagatgatgagccatctaagaaagaaagaacatcagcatactcatactttagggtcctaattaaaagccaataaagtgttagctagaggaagaattttttgattacatgtgtcattgcaagcaggtgttcactatgcctgaattcctgctactaagtataaggaatgggtgagaatgttatttacccagaaacactaatgtctatagttatgttttccctaatgataaatcgttaagttctgtcaataggatacttattaaaaaaaaaa

SEQ ID NO: 259343 - DNA, 723 bp, Homo sapiens
gatttttttattattattagaccagggaaaggtcaggaggaggagtggagaggatctgataaaattagaaagattagaagaaataatagaaatgatagacttgaaataataggatgatggaaatgataggtggggattagggagatgcacgtctcacatttcctggaaattgtgatgtgtgaggcccatttcagatgcatttcctaagcatgctcacagcagcgtgctaaatgtatccactttcattcaacaagcatttcctgagacctcttctggtcagccagagttatattctgggagctcagttctaaatactccctgatcttaagtagctcacagcctaatgagggacgcagagagcagtgatagtagagagtgctttggagcacacaggaaggtgttgaggtcattaggagaaactgtctcagctgagtcttgaaggataagcagggattagccagatgatgaaggggtgggagggtgattctacccagaatagaagcactttggcactcatatagcaacatgaggaacagaagtcattcaggatgtccagagcaaagaagatgtgcgtttgcaccaagaggtgaccctggagaggatacaggactcttacatgtgtgttcagacctaaagtgtgtgttgtggggagcctgtgacaggttgtaagcagaggagcaatctagccatatggagactgcgttgagagtggaaatctagaag

SEQ ID NO: 259344 - DNA, 430 bp, Homo sapiens
gccctgatgttctagcatgtgattacttcactcctggactgtgactttcagtgggagatggaagtgtttcagagaactgaaactgtggaaaaatgacctttccttaacttcaagctactcttaaatttgagggtctggaccaaaagaagaggaatatcgggttgaagtcaagataactgataaggagagagtaatgactaactccaaagatggcttcattgaagaaaaggcattttaagattttttaaaaatcttgtcagaagatcccagaaaagttctaattttcattagcaattaataaagctatacatgcagaaatgaatacaacagaacactgctctttttgattttatttgtactttttggcctgggatatgggttttaaatggacattgtctgtaccagcttcattaaaataaacaatatttgt

SEQ ID NO: 259345 - DNA, 225 bp, Homo sapiens
aggctgagagaacagggcgggcacttggctttttacacagccagtgcagtctgcacatatagaaacgggtagaggcagcttccaaaattatgggaatagatgcatttttttttcctcaagcacttgagttatgtaattaagttgggctttgtagagatgttatttacaaggctttggtggggaacaaaatttactatctttttttttttggcttctaatttgtgg

SEQ ID NO: 259346 - DNA, 354 bp, Homo sapiens
cgcaagcatcccttcctttgcctggttgtattgcccctttcctgcactgcccattgcttctctttcctggacatcattagcctaccctttaggagccagttcagatgctgcctcctccaggaaaccttttctggtccagaagtcatctcttcctcttaaggttttgtgtagttctttctagtctcctttctttatattgattctatcacttacagcattcctccttagtttgcagctttctgtgccttactaggatagcttccaggggacagtaaccaagttttttttttttttttttttgctttttttccccagctttactgagatataattgacacataaaaattgtatata

SEQ ID NO: 259347 - DNA, 475 bp, Homo sapiens
gccgcccagggctgccaatgccccggcggcgctgttctgaacaaactgttttggccagcctgtgaaatccctggaaattgacgattccagcaaagcgtcgtgaactgggaaagcaccaaatgttctactcaaaagccgcgaagggacaaaacaagctagacccgaggcccagatgaagcgggaggaggaggcttgcgagaggaagttcaaggggggaggtactaggcgggcagttcaggcacgaggcacaggtcccccatgggtgaaaggatgactttacccggaacactgggaaccttttcagagcacaaacaaaaaacattttcaactgaccgctccaagtgaatttcagttcaactcaaaataacaaaattactaagtcggaaaggacttctgaaattttctagtaaacaacggtctaacgaatacatagaaatgatgtttagggtttatattagccacatatagaatggag

SEQ ID NO: 259348 - DNA, 339 bp, Homo sapiens
ataagtgaatggaagggatgtgtgctatagggaaactttggagtgttttctaattcatccaagaaagtcagcccttcagttctttacctatcacagaacaggtaagtagcacccgcctcatcatcgcactgtggtggcgcccactcccactggggatttgaacacagggaggaagctgggctctaagactacaggagcctctgcttgggtgacagccaaggtgtgtggctgctagcagttcttcagccactccagtttgacagaagcttttcttttcatttatgacaccccccaccttcctgagatcttcacagcagtagcaaaccagggaatcttgta

SEQ ID NO: 259349 - DNA, 410 bp, Homo sapiens
agtaaatagcctgtttaactgtgtttaatccattgtttcccatctttgaacgaaatatattttcccttttttaatatttattttttgtttacttataaaatcttgacagccagaagagatcataagggtagcagtcctcagttgccagtcggtgagtggttaccatgtgaggactaaccactttataatcacttactcatagatcgtcctgtgtattttactaaacacacacacacacacacacacacataaatagcacatgaccctaatttctgagaagtacagtaagtattgactgtattgaccacacaccgttttgtgtatgatatctgtttcaagcctttgtccttgagacatgggctgttttgcccagtgatgtttactaaaataaaagcaagccttaaatgtca

SEQ ID NO: 259350 - DNA, 1059 bp, Homo sapiens
tacatactttaaccaaagaaaagcataacttataccataatgaggtaatcattagattctgagaggctaattagaataagttatttatatactttgtaaaattgttcagttcctatagaatagcataatggaaaaacgaagaatagtatcacgagtcagaactggatgctagccttaattctgttattcactggtttgggaaagtctattaatcaactgatctttaatttcttcatctttaatcaacaaaccactctgacagtctatgccaacaattaggatgaaatgaaatatgaatatgaaggtgctttaagaaaaaaaactatcgaatgctattcagttacagagaactgtaactgctaaaggataacagtattttcagtgaatgcttcgaataattcatattgttttctgctttcattaatgactgtatgtgaaactcagaaaaatggcaggtggccttactatcaactttgcagtactaattttacttctctgaatattttatcataagagaagcacaagactaagtctgccaaaggccagcaatttaaacagaatgattctaaaaatttataatatcttgcctattattaaaattttctgtaactggaagacaggttaggaaattttataatccacagcgaactaaagcacagctgtttacctgctgaatacatgacattcttcagacttcatagtcccctttcaataaattttactgggttcaaagcccacattacactttagcaccctttttgttaagaaaaaaatagctagttcaaaaatgaagaggtacagggcaagaagccgttagtttgtcaaaacctaagttaaataacaaaaatacgaacactgctttatacctagtaagttccacatcaatcaaattactatgagcacaaagactggagttaaaaaaaattatcaacactatatttaaaaagtttattagaagaaggaaaacaaggaaagaactagtcagctagctccaggtagaaaaataaggcaatactagaaatatttaatgttcttcacaacaagtgaagtatctccaaa

SEQ ID NO: 259351 - DNA, 415 bp, Homo sapiens
gctaccaaagagaaagatgttgtaatcacatctgcatgtcctaaattttgaatttagatattccaatttgcatcagtctttctgtggctcaaataatgatgattatggaatgaattttaatgtccctacttgtgaataattagctttctcaaatgtaggctttttacaaattttaaattttaaaatattagtttaaatgtgtgttatactgataaaatttcatctttcaaattatagtctattattttaaagggatttttcagtatgatatgggccattttgttcatctatcgcaaagtaaaaatgtaaagtcgttacagagaattgtttcacaaaacttatatttcatgtcaattgtatttattttaataatagctcacaatgcctttagtaagtaataaagtctcttattaga

SEQ ID NO: 259352 - DNA, 176 bp, Homo sapiens
catgttttttatcaccaagacagctggtattgtttacaacatatgtctgagtattatttttaagtttctaattgccagtatctccagtttttaaaaggacacaaaccaacctctttgtaaaacttctgccctccaaaggctttatgttctctaagatagttaagaagattaaaaaa

SEQ ID NO: 259353 - DNA, 599 bp, Homo sapiens
agtccctttaaacacatgcatttattaataccccaccttgtttcagaaaggatttaggatgtcaggaagttacttaatatcagggcttcagtttcctcacctctaaatgagagatttcatccaggtgatctaaattccttacagctctaatgttttgtgacctctgattccaatgatttgttggtcatctgcacttagaaatcctgctaacacttagtatgtagattatgaaaaactaaaagaaaaaaatctgaacctataaccctgttctcctaatgtgatttcttttaatggcatcaccatcctactaccagtgacccagggccaaaacttggtgtcattttcaactcctctagcccttgcccctacatctcacttaactgagtcatatggaactaactatgtaatgtcattcccatccttccccaactaggccctttcgtatggcctcatgtgattgaagcccttgctgactggctgtcccattctgttgacccttaatcttgatgctgctgagtcaatttcttgaagcacaaccgtaacaatgccaatgctttgttctattttatttatttatttatttttgagatggagtctca

SEQ ID NO: 259354 - DNA, 223 bp, Homo sapiens
catatgtcaagggcgacccaatgtttgcttcctgttccctaggtgggttttccatggggactgcttctaacccccaatccccacacactccacctgggctgaaactgctgcctcttttccaatatatagaaagaaatgtggctccaccctgcatttccgtaagactcagctagttacaaatttagaaccttggaaacaatgataaaacattcttcaagagaaa

SEQ ID NO: 259355 - DNA, 398 bp, Homo sapiens
caaagagcaagccagggtgggcctcttaaagcacaggtttcttgagtggtcccagaggtaacacaccccacatggtctcactctgcctctaggggaggcacttcagaacccactgttaatcaggacaaaggatccctccgtggaacaattctggggagctgcattcccaagaacagcagattaaaaatcaaatccgggaaaggagctaaaaccttgcgtgctgcaagatataactcatgtgtacgtgtttgtgaatggcgtgtggggatggtgcatggggatggtgtagatgaggggatggatggacctatgaaaagctcagagatctatcagagcaagcctgggcaaaatagcgagactccatctctaccaaaagaaaaaaattagccagatgtagc

SEQ ID NO: 259356 - DNA, 1039 bp, Homo sapiens
ccacagctgccgcccgggtagcttcccgcagacgccgtaggtagcacgcgatggaacgcggcggaggggagcgtggacacggctgccgggcgctgcggccatcggcgccctggacgcccgctccggccttcggggccggatatccccactctcgcgggctctttcgcgtggacccctcctccggccgacactcacactgcggtgaacgccagtcagctggcgtgaaataaggtcgctgggaaggcaccaagtcaccaaggtgggggatggccaggtcgtggtagttgcgacaaagaaaaatataagtcacattgcatttgtttctcgcccacccaccgctcccggcgtctcttcccgggctccttgccagcgtgccgaggcgcaggcagggtgatggaggctccccggccgggaggatctgccggggagagcggcttccctcatcgattcgggagcgccaggcccggcgcgcccgggctcctgtgacctgcgagcccgcgaattccagcggcataagataaggagcggcgagggcccaacaggactgaggtcagccagctataaatacgcctccagctccaccgcgggctcacgctggtgacctcgtgtaccctccggaggctcattccgtccatttggaaaatgcaaataattgtcaccacctcttttcttccatttcccctcattcatggtggaaaatgcttttaaaagtattcgatgacccgtatgtgaggaaagaggagataggcccctttttcaccaaatgtgactttaacctccttagtaatccaagaaatgtatcaagtttaagtcacttaacaaaagatgttcttttaaaggtgcattttaaaaaatcacttttaaaactgggtaaactgggtaaaaagaaagggggaaggaaaacaatgtgccaggcatttgtattgacacacattcttgcctgaagaggtgtttagattccagggtattcccttatattctggtataaatgtttgaattcccgtgtattttgtttcaattttttggtttatcttttatt

SEQ ID NO: 259357 - DNA, 738 bp, Homo sapiens
ccacagctgccgcccgggtagcttcccgcagacgccgtaggtagcacgcgatggaacgcggcggaggggagcgtggacacggctgccgggcgctgcggccatcggcgccctggacgcccgctccggccttcggggccggatatccccactctcgcgggctctttcgcgtggacccctcctccggccgacactcacactgcggtgaacgccagtcagctggcgtgaaataaggtcgctgggaaggcaccaagtcaccaaggtgggggatggccaggtcgtggtagttgcgacaaagaaaaatataagtcacattgcatttgtttctcgcccacccaccgctcccggcgtctcttcccgggctccttgccagcgtgccgaggcgcaggcagggtgatggaggctccccggccgggaggatctgccggggagagcggcttccctcatcgattcgggagcgccaggcccggcgcgcccgggctcctgtgacctgcgagcccgcgaattccagcggcataagataaggagcggcgagggcccaacaggactgagctctttccgaagtctgattcaggtgcctgaaaatcaacctatggccaccaagcctatttgagcatggagggtactgggggagacgtacataagtgagcagtcacaaagtaggcgcgtgaaaactttccatggccaccaaacggaacctgggggaacaagcttcacattggctttaacgcgaaaagccct

SEQ ID NO: 259358 - DNA, 4280 bp, Homo sapiens
  misc_feature (1458)..(1458): n is a, c, g, or t
actcactataggggctcgagcggccgcccggggcaggtcttttaactctccacagtggagtccattatttcctctggcttcctcaaattcatattcacagggtcgttggctgtgggttgcaattaccatgtctgactcagtaattcttcgaagtataaagaaatttggagaggagaatgatggttttgagtcagataaatcatataataatgataagaaatcaaggttacaagatgagaagaaaggtgatggcgttagagttggcttctttcaattgtttcggttttcttcatcaactgacatttggctgatgtttgtgggaagtttgtgtgcatttctccatggaatagcccagccaggcgtgctactcatttttggcacaatgacagatgtttttattgactacgacgttgagttacaagaactccagattccaggaaaagcatgtgtgaataacaccattgtatggactaacagttccctcaaccagaacatgacaaatggaacacgttgtgggttgctgaacatcgagagcgaaatgatcaaatttgccagttactatgctggaattgctgtcgcagtacttatcacaggatatattcaaatatgcttttgggtcattgccgcagctcgtcagatacagaaaatgagaaaattttactttaggagaataatgagaatggaaatagggtggtttgactgcaattcagtgggggagctgaatacaagattctctgatgatattaataaaatcaatgatgccatagctgaccaaatggcccttttcattcagcgcatgacctcgaccatctgtggtttcctgttgggatttttcaggggttggaaactgaccttggttattatttctgtcagccctctcattgggattggagcagccaccattggtctgagtgtgtccaagtttacggactatgagctgaaggcctatgccaaagcaggggtggtggctgatgaagtcatttcatcaatgagaacagtggctgcttttggtggtgagaaaagagaggttgaaaggtatgagaaaaatcttgtgttcgcccagcgttggggaattagaaaaggaatagtgatgggattctttactggattcgtgtggtgtctcatctttttgtgttatgcactggccttctggtacggctccacacttgtcctggatgaaggagaatatacaccaggaacccttgtccagattttcctcagtgtcatagtaggagctttaaatcttggcaatgcctctccttgtttggaagcctttgcaactggacgtgcagcagccaccagcatttttgagacaatagacaggaaacccatcattgactgcatgtcagaagatggttacaagttggatcgaatcaagggtgaaattgaattccataatgtgaccttccattatccttccagaccagaggtgaagattctaaatgacctcaacatggncattaaaccaggggaaatgacagctctggtaggacccagtggagctggaaaaagtacagcactgcaactcattcagcgattctatgacccctgtgaaggaatggtgaccgtggatggccatgacattcgctctcttaacattcagtggcttagagatcagattgggatagtggagcaagagccagttctgttctctaccaccattgcagaaaatattcgctatggcagagaagatgcaacaatggaagacatagtccaagctgccaaggaggccaatgcctacaacttcatcatggacctgccacagcaatttgacacccttgttggagaaggaggaggccagatgagtggtggccagaaacaaagggtagctatcgccagagccctcatccgaaatcccaagattctgcttttggacatggccacctcagctctggacaatgagagtgaagccatggtgcaagaagtgctgagtaagattcagcatgggcacacaatcatttcagttgctcatcgcttgtctacggtcagagctgcagataccatcattggttttgaacatggcactgcagtggaaagagggacccatgaagaattactggaaaggaaaggtgtttacttcactctagtgactttgcaaagccagggaaatcaagctcttaatgaagaggacataaaggatgcaactgaagatgacatgcttgcgaggacctttagcagagggagctaccaggatagtttaagggcttccatccggcaacgctccaagtctcagctttcttacctggtgcacgaacctccattagctgttgtagatcataagtctacctatgaagaagatagaaaggacaaggacattcctgtgcaggaagaagttgaacctgccccagttaggaggattctgaaattcagtgctccagaatggccctacatgctggtagggtctgtgggtgcagctgtgaacgggacagtcacacccttgtatgcctttttattcagccagattcttgggactttttcaattcctgataaagaggaacaaaggtcacagatcaatggtgtgtgcctactttttgtagcaatgggctgtgtatctcttttcacccaatttctacagggatatgcctttgctaaatctggggagctcctaacaaaaaggctacgtaaatttggtttcagggcaatgctggggcaagatattgcctggtttgatgacctcagaaatagccctggagcattgacaacaagacttgctacagatgcttcccaagttcaaggggctgccggctctcagatcgggatgatagtcaattccttcactaacgtcactgtggccatgatcattgccttctcctttagctggaagctgagcctggtcatcttgtgcttcttccccttcttggctttatcaggagccacacagaccaggatgttgacaggatttgcctctcgagataagcaggccctggagatggtgggacagattacaaatgaagccctcagtaacatccgcactgttgctggaattggaaaggagaggcggttcattgaagcacttgagactgagctggagaagcccttcaagacagccattcagaaagccaatatttacggattctgctttgcctttgcccagtgcatcatgtttattgcgaattctgcttcctacagatatggaggttacttaatctccaatgaggggctccatttcagctatgtgttcagggtgatctctgcagttgtactgagtgcgacagctcttggaagagccttctcttacaccccaagttatgcaaaagctaaaatatcagctgcacgcttttttcaactgctggaccgacaacccccaatcagtgtatacaatactgcaggtgaaaaatgggacaacttccaggggaagattgattttgttgattgtaaatttacatatccttctcgacctgactcgcaagttctgaatggtctctcagtgtcgattagtccagggcagacactggcgtttgttgggagcagtggatgtggcaaaagcactagcattcagctgttggaacgtttctatgatcctgatcaagggaaggtgatgatagatggtcatgacagcaaaaaagtaaatgtccagttcctccgctcaaacattggaattgtttcccaggaaccagtgttgtttgcctgtagcataatggacaatatcaagtatggagacaacaccaaagaaattcccatggaaagagtcatagcagctgcaaaacaggctcagctgcatgattttgtcatgtcactcccagagaaatatgaaactaacgttgggtcccaggggtctcaactctctagaggggagaaacaacgcattgctattgctcgggccattgtacgagatcctaaaatcttgctactagatgaagccacttctgccttagacacagaaagtgaaaagacggtgcaggttgctctagacaaagccagagagggtcggacctgcattgtcattgcccatcgcttgtccaccatccagaacgcggatatcattgctgtcatggcacagggggtggtgattgaaaaggggacccatgaagaactgatggcccaaaaaggagcctactacaaactagtcaccactggatcccccatcagttgacccaatgcaagaatctcagacacacatgacgcaccagttacaggggttgtttttaaagaaaaaaacaatcccagcaggagggattgctgggattgttttttctttaaagaagaatgttaatattttactttaaagaaaaaacaatcccagcaacctgcccgggcggcgctcgagccctatagtgagt

SEQ ID NO: 259359 - DNA, 393 bp, Homo sapiens
cgaggttggaaaaggttgtgaaaccttttaactctccacagtggagtccattatttcctctggcttcctcaaattcatattcacaggtaagtaacttatacttgtctctgcaaatccattccctcttccctttaactcttactttgtggagtggagtgtttctggtttattaaacattggtctcttgtccagtgtaaacaacgctacaatacttggatagaaacttacaggatgcattaatgatttcacaacattgtatacaatacagatgactcttggttgctgtcttctttatagcaatgctatttcatgtatcaatctcttagagagagagagagtggtgtacatgggtgtgtggtacaaatggccgaatagattgaataatctgctcaa

SEQ ID NO: 259360 - DNA, 1363 bp, Homo sapiens
actcactataggggctcgagcggccgcccggggcaggtcttttaactctccacagtggagtccattatttcctctggcttcctcaaattcatattcacagggtcgttggctgtgggttgcaattaccatgtctgactcagtaattcttcgaagtataaagaaatttggagaggagaatgatggttttgagtcagataaatcatataataatgataagaaatcaaggttacaagatgagaagaaaggtgatggcgttagagttggcttctttcaattgtttcggttttcttcatcaactgacatttggctgatgtttgtgggaagtttgtgtgcatttctccatggaatagcccagccaggcgtgctactcatttttggcacaatgacagatgtttttattgactacgacgttgagttacaagaactccagattccaggaaaagcatgtgtgaataacaccattgtatggactaacagttccctcaaccagaacatgacaaatggaacacgttgtgggttgctgaacatcgagagcgaaatgatcaaatttgccagttactatgctggaattgctgtcgcagtacttatcacaggatatattcaaatatgcttttgggtcattgccgcagctcgtcagatacagaaaatgagaaaattttactttaggagaataatgagaatggaaatagggtggtttgactgcaattcagtgggggagctgaatacaagattctctgatgatattaataaaatcaatgatgccatagctgaccaaatggcccttttcattcagcgcatgacctcgaccatctgtggtttcctgttgggatttttcaggggttggaaactgaccttggttattatttctgtcagccctctcattgggattggagcagccaccattggtctgagtgtgtccaagtttacggactatgagctgaaggcctatgccaaagcaggggtggtggctgatgaagtcatttcatcaatgagaacagtggctgcttttggtggtgagaaaagagaggttgaaaggtatgagaaaaatcttgtgttcgcccagcgttggggaattagaaaaggaatagtgatgggattctttactggattcgtgtggtgtctcatctttttgtgttatgcactggccttctggtacggctccacacttgtcctggatgaaggagaatatacaccaggaacccttgtccagattttcctcagtgtcatagtaggagctttaaatcttggcaatgcctctccttgtttggaagcctttgcaactggacgtgcagcagccaccagcatttttgagacaatagacagggtatgtataagccaaaagtaaaggccattaacaggtggg

SEQ ID NO: 259361 - DNA, 913 bp, Homo sapiens
agcgggccagggagtgatcccagcagagagaggctgggcatgaagggatggggtgatgatatgtcaattaggcttcagctcctgctccagggccctttcatggaggcttatttcctaggtcctctcccaaggacaccctctccatgctctcaaccgcatcctcccctgagtctcacggtcagactacagtctatggcctacatcttccctctccccgagtcccaaccccagctttctcagttcctggctgcaatggtcctaggccccccactcaatttccaaaccttttgcctggtgccaccttctctacccagaactttggcctacctgtcagtcctgccctgcgtgtcacctcagcctggaagtccataggactgtgatgaagatgactgcttgcattttctgaatcactttgtcgatgagacatgcatcctattagatctaacaaagcttcacagaaaggttgttttgaagttgacactgaggaagatataagtgctctaggatcagtatgtgaggctgccacaaacatgctatagtctgcacattcttgcagagaggttgcagagtctgcttgggagagaagcctcaaaaacatggctggtgtcttggcagagtttgctctggcccccaggagggtgtacaaacagccttcatgagaaggtgacttgctggccactcttaaccactagaagaaactgatgccatggaactttgaaaaatcagaaagcaattccacaaaagaagaacctctgaagatagtagagcccaatgaagataaatgacatcgcccataggagggaacagtggtatcaacctaaaggggctcactgccctatgtgctggaggccaatactatgacaatgggtttttgagaaaataaaagctttgcattgagattcaacccctaaaa

SEQ ID NO: 259362 - DNA, 459 bp, Homo sapiens
acaagcagccagcaatggatatccagggcatggtgtctggaatcactccgggctatcctgacctatgcttcctggcagcctatctgttaccttctatttttgtggaggaagtatctcgagtgggcatgagatggaccacgggagacatatttgacagtgaatctgcacttttgcctttcagagaggcataaaagcacacacgagttatagaaaatgcaggagtattatctccccctctcattaagctgtcatccgcttcggtgcagatctgtctcttggttttgaatctcactttcccccacttctggctctccttggagtatttttgatctcatgcagccacctttatgatagatgaatcattcctatgtcaaccatagtcatcatgaatcctctgagtgagctggcaagagaaaatcgcttttaagagaacagacctcctaggggccacgggtggtt

SEQ ID NO: 259363 - DNA, 496 bp, Homo sapiens
ggaaaagtaagaaaaggatttacagtaactatactaaaactatatataaatgtataaactacattttaatgaatctatacgaagaataaaatttctaagaagaaagcaactgaaaagaaaatttttatttacctcattcttttttaaatgaaagaaacagcctgggggtaaagattctgttgacagacaatcatgctggccccagatttcaggacctttgtaacaggtctctatactaaattacctctattgaactaccttgtgagggctctatttttctgactggatgctgattaacggtagtatttttcttctaagtagtactcctgaatagcaaaaattagatgtgcaaaatcattctacatattgcataccgagcacttttctctctctgtcttctgtgtgttcaagcatagtcagcacactcctttgtgcaacgtgtgcccctctcatcttccaccagctatcctcagccagaaaccaggtggctctggcc

SEQ ID NO: 259364 - DNA, 382 bp, Homo sapiens
aaaatatttattacctgcagtgcttaaatttaaagggtaaaattaattaaagaaatcctcacattagaattacatgtaatataattatatgtaataaacctaattatattacatataatgcatgatcctctacgaatttaatttgaatgtgaagatttctctaattgcatatatataaacatacacctacagttttatgtgagagaacaattctgtcttacacattatatgatttcacacctttgaggatagattgctagataaaagagataggaaaaaatatttagcagtttcatagttcattggggtcaagaagaaagaggagtgtggcaagttcattttcttcttacaattacaacatcagagaagaaatgaagtaaaa

SEQ ID NO: 259365 - DNA, 383 bp, Homo sapiens
accctaggttccagaccggcccagaactagattggctcacaccaatccaggattcaggcccaccccatttccaggttggcagccctagccctaggccttagtcaggtatctggcaagcatctgcagacccaggctccaggcctcccgaggcctaagccagtttctgccaccccactctccaggccagttcctatggtcccatcctccagcagacccagggtccaggcccatcacagttgactccagtattgggcaggtgcctacagacccagtatctagtactgcctctgtggacttaggttccagtccagttcctacagccctaggacccaagccaccctttgtggccctagtgtccatgcccacttctgaatatgttggtt

SEQ ID NO: 259366 - DNA, 1983 bp, Homo sapiens
ctgctgcttcgcggcggtggctttgtgccacttttcccagggcttgggcatcattctggacccatgttcggtgaaccggttactctcagagctgctttcgggcgcagctcctgctgcagccagggcccgttttaagagaggcttccaggtccagccctcccgctgcagcctgcagggagcgagccggcctgtcccgatgacatagacactaggtttttacagcaattctctgatgaccttgatatggtagaacgctgtgtatttcaagagtaagctctcgtttgaggagactaacaattcctgttttcgccagatttcttcttgaatggcaacctaaatgccagtccaaagaggcccccaatagacttgttcacccttcatgtcctcaactctggggaagttaagtaatcaagttgaagaaacacttccactacttaaaaaggtacctgcaaattactttcacatttgttcagctatcctaatgggattttcacttagtaaatctgctactcaggtatctgctatacatatggattcaaaagtggatgatcacttaatacgagggactgaaaaaagcaggttggaaccagcgactcagttatttcaaaacaccaagaaaataagattagaagacacaaatcaagaaaactttacaaggattgaagggactggcacaggatctctttctgggaaagccttgggttcagtggtatatgtcaaagaaagtgatggactagaaatgacagatgtggaatgaagcaatttgtacgtattaccaaagaaaccaaaaactgcctttgactaaggggggtgttgaaagagaacttaaccttattaggaaaccctgacaaaatgatggaagactattgccttattttgcactatttgtgaatcatcttacactgcatttttttatgatgcttattcaaaaggcagttgctttagggtgaaaaagccttccaagattcaaagcagatttctctggtattatattatatccttcttaaaaaccagagtttttaagtaacagtatttgaatggcatcaaaacattttcattttaatgtatttctttaacaagtggttaaaaaaagtgtccaagcagccgggcgcagtggctcacacctgtaatcccagcactttgggaggccaaggcgggtcaatcacctgaggtcaggagttcgcaaccagcctggccaatatggtgagaccccatctctactaaaaatgcaaaaagttagccaggcatggtggtgggcacctgtgatcccagctacctgggaggctgaggaaggagaatcgcttgaaccctggaggcggaggctgcactgagctgaggtcatgccattgtactccagcctgggcaacaagagcaaaactccgtctcaaaaaaaaaaaaaaaaaaaaaaaagtccaagcaatgtgacatccgtatttcacaatatttctggtgtatcagttttgtatgttacatttccattttgggattctgctttatgatactttactttcttacattttgcatttttgttctgtaaaagatcactgccaataaactgcaaaagaccaataaattgcatatcttcagaaggatttcacattttaaatcgtgcctttaaaactgctttttccccccacatagaatccattttagagttagaaaagtgttctttccaagtgttaatagtttgtcttgcagatggtaccattttatgtcaccaatatttaatatgagaaaaaacaacctgtttaaaaaccttgttttgtatatcagttatgaaaatatctggtagttggaaatctctttaatattcattttaaaagaggaaagggcatcttttccggggggaagctatattttattaatcagaaaaatactaaacaaatgtgtttgtagggaatattgagagtgaaaaacaattgttgaatgggacataagccaaaaagacaatgctttttattatttacagaacgtaattcttta

SEQ ID NO: 259367 - DNA, 2125 bp, Homo sapiens
ggcagcctggagtcaggggagcctggggaccacggccttggtcagctctgcacgatcagggctgaatcaggaagtggcagatctagcaacaaagtccagattcctgaccgatattccttctccacatgccagtccttttccaaatcccctcaccttaaagtgacaaatgagctttttagtgaaaaagaatgagcgctgcattcttctaccaattttttggagcccagaatgggggggaaaaaagtcttcttaatttttcttaatacctaccatgtcccttcttaaataactcaagagcttctggatgataatggtgactttatctccttttcctgcagatgacatagacactaggtttttacagcaattctctgatgaccttgatatggtagaacgctgtgtatttcaagagtaagctctcgtttgaggagactaacaattcctgttttcgccagatttcttcttgaatggcaacctaaatgccagtccaaagaggcccccaatagacttgttcacccttcatgtcctcaactctggggaagttaagtaatcaagttgaagaaacacttccactacttaaaaaggtacctgcaaattactttcacatttgttcagctatcctaatgggattttcacttagtaaatctgctactcaggtatctgctatacatatggattcaaaagtggatgatcacttaatacgagggactgaaaaaagcaggttggaaccagcgactcagttatttcaaaacaccaagaaaataagattagaagacacaaatcaagaaaactttacaaggattgaagggactggcacaggatctctttctgggaaagccttgggttcagtggtatatgtcaaagaaagtgatggactagaaatgacagatgtggaatgaagcaatttgtacgtattaccaaagaaaccaaaaactgcctttgactaaggggggtgttgaaagagaacttaaccttattaggaaaccctgacaaaatgatggaagactattgccttattttgcactatttgtgaatcatcttacactgcatttttttatgatgcttattcaaaaggcagttgctttagggtgaaaaagccttccaagattcaaagcagatttctctggtattatattatatccttcttaaaaaccagagtttttaagtaacagtatttgaatggcatcaaaacattttcattttaatgtatttctttaacaagtggttaaaaaaagtgtccaagcagccgggcgcagtggctcacacctgtaatcccagcactttgggaggccaaggcgggtcaatcacctgaggtcaggagttcgcaaccagcctggccaatatggtgagaccccatctctactaaaaatgcaaaaagttagccaggcatggtggtgggcacctgtgatcccagctacctgggaggctgaggaaggagaatcgcttgaaccctggaggcggaggctgcactgagctgaggtcatgccattgtactccagcctgggcaacaagagcaaaactccgtctcaaaaaaaaaaaaaaaaaaaaaaaagtccaagcaatgtgacatccgtatttcacaatatttctggtgtatcagttttgtatgttacatttccattttgggattctgctttatgatactttactttcttacattttgcatttttgttctgtaaaagatcactgccaataaactgcaaaagaccaataaattgcatatcttcagaaggatttcacattttaaatcgtgcctttaaaactgctttttccccccacatagaatccattttagagttagaaaagtgttctttccaagtgttaatagtttgtcttgcagatggtaccattttatgtcaccaatatttaatatgagaaaaaacaacctgtttaaaaaccttgttttgtatatcagttatgaaaatatctggtagttggaaatctctttaatattcattttaaaagaggaaagggcatcttttccggggggaagctatattttattaatcagaaaaatactaaacaaatgtgtttgtagggaatattgagagtgaaaaacaattgttgaatgggacataagccaaaaagacaatgctttttattatttacagaacgtaattcttta

SEQ ID NO: 259368 - DNA, 888 bp, Homo sapiens
gagccagaaccgattctggaacagcttctcccgcccccgggccagagagggttccccagcccctggaaagccaggacaccccctaggctgtcccagcacgcctcagcctcaggtcctgagccaacatctctctgcgctgcctgtgaatccagactgtgactccagactgagggccaaaccgagaccactccctccaccgtcagttggccataattgtcagggtgacctccccgaccgaccgtctccaccgaccgtctcctccagacagcagcccacagaacagccaccgaccaaactgccttgcccatgagacaggagcaaaaccagcttagaaaactttcccactgttggagtaaaacccagaattctcccagaaaggagaagcataaggaactttgaatttatcttttatactttaaaagcagcagaacttgagacattcattcctcggagctttgttgaagaattgaggaaggggtgcttaataatcccattcaagaatagttcctctggaagggagagaaaactcagaaatccctgagtactgtgatactccaaaatgggaaggcctggaaaaacctaggtcattaaaaactgaagcttaaatttctacattgcttaattttgtctcaactgcacaagccaacagagtgtgagaaatctctctgcgtgccagcctcccttttcgtcacacaactctggaaacagttataggaagattgcagcaacaaattgtaaacaaaaccaggtcaagaaacagaggagagggccaggcagggtggctcaggcctataatcccagcactttgggcagctgaggcaggtggatcacctgaagtcaggagttcaagaccagcctgggcaacatggcgaaacctcctctctaatt

SEQ ID NO: 259369 - DNA, 468 bp, Homo sapiens
attatttagtttcaaatagaatttaaagggaagaagtatgaaggatagtgacttaaagtacacagaaactgttgtacagttttgaacacccaggttacacactttattcaaatgctggtagcctcttttaggtgtgtgttttcttttccaaagccatatctaaatgcttacttacataaacacgtgagtcacctctgcattctggggagttttaacgttgctcatttttgccacaataggaagaagtgtcttggtttggatggttctgtcgtggaaaatgggtccgcaagaaatgcttgttgaatgaatgatgatatctcccttttaatagctgggaaaaccaaggcaaaaagtcatggccggaggaccacacttcacttcctctgcttctctttctgggtctattgcatatataaataatttgggggcaataaaggattggaattttatgtgtactatcagatgcca

SEQ ID NO: 259370 - DNA, 621 bp, Homo sapiens
gtacagcaagggccaggcgtggtggctcacgcctgtaatcccagcactgggtgactgaggtgggtggatcatttgaggtcaggagttccagaccagcctggctaacatggtgaaaacccacctctactaaaaatacaaaaattagctgggcatggtggcaggcgcctgtaatcccagctatttgggaggctgagacaggagaattgcttgaatgtggaggcagaggttgcagtgagccgagatctcaccactgcactccagcaaaaaaaaaaaaaaaaaaaaaaaaaaaaaaaatacagcaaaattgcaatactttaatgcagagaaattcacatggtggaagccacatgaaatctagctaaaggaaattctagaatgctaggtacagatcagtgcaagcagaagtcactatctgctcctgtctaaagagacaaaccctgtctctactaaaatcacaaaaattagccgggtgtggtggcatgcgcctgtaatcccagctactcaagaggctgagatgggagactcacttgaacccgggaggcggaggttgcagtgagccgagattgcaccactgcactccagcctgggaaacagagcgagactccatctcaaaaaaaagaa

SEQ ID NO: 259371 - DNA, 256 bp, Homo sapiens
aacaaccaaaaccatcttccaggaaagacacctatttgcctggattcagtcctgaacatatgtaccacccaactgtagtcacaaagaggaattctgtttatagaaaactattgttaatatttttaaaccatttgctacattactatattttaaaagcttaaaatttcacagagaaaaataattttaccttttggaattactacattttggaattacaaaattttgccgaaaaattcttaagacagctgagtctgca

SEQ ID NO: 259372 - DNA, 169 bp, Homo sapiens
tgaccccacccctttttcttttgaggacaagaaggcttcaaaattaagccaatctgctatttgtagatttggagaatgttctcccctttcagattttcaggtttcaagttgcatccaaaagagaagagactcagtcctcctctccactgacagaatacgacctcaacat

SEQ ID NO: 259373 - DNA, 701 bp, Homo sapiens
gatagtttagcctgaacaacacactctctgtctagagactcagccagctatgctttcgctgagtgaagggctccactaacacatccctgactgacgctataaggctggccaggttctgggcctcaggaatcaccacccagtctgtgcaaggcttgggatgagaagcgaatcactccaggaggctcagttaatggcagagtcaggcctcaaatacaggtttcctgatgtctaaacctgggccctttcaaaagcccccaaacccagggaggactggtcttgatcatgagctccttaaggttttttgcttgctgtagaagtttaccgtaaaatgttacctcagaaatacaggatgtacttctcaggggattagggggacatccaggggtcttggggtctctggctgtgcccaggaacactgctcagtgaggattggtcccagccatggagggtgctggtgcccagaaatttagagtggctgtggctaagtgacccatatgcttttcatggactgtttcttacccttataacaacctaagagccaggtatgaattgtccattttatggatgaagccataagacctagagaggttaggtcaactattgaagactcaggtttgtctgactccaaagcccaaggaactctttttcaccactccatacacgtagacaaccctgtgtgaaagcttggctctggagaacag

SEQ ID NO: 259374 - DNA, 404 bp, Homo sapiens
aaatctctttaacattgatcctgttgttagttgtaatctcagtatattctgataatttcctttgaatatgtaactgttcctttcatactgtgggcatctgttgtcttctctttttatagcaatgaaagtatgaacagattccaatgtgggttcttagctcaaaattctctggctctaatgtcaggccaatttatttagctagtttatacaactggacatatttctataatagaaaaatgactaaatgtttcttaacatattgtttacagagatagagcccatgttgtaaggctatgtaactcttcctctcaaaagaagattattggttttagcatgttttcctccctttaatttaatcttaagcaggtgaacctttttgagggctttttggaaagctctgagga

SEQ ID NO: 259375 - DNA, 447 bp, Homo sapiens
agaaaataaaattacaaatatacagaacatacataatgagattctatttggttcacattttaacattacctttctacaccatctgcctctggattttcaataagacatcttttggtttgtaaatcttcgtctttgccaaaagacagtttctagaggttcagaaagttgtcacactaatacagtcacaaaatgaagcagcatggagcagcttaggaggacacaggagagtgggtgttttattacatttccgtcccagatcattgtttctaggaggtaattcataaatttttaattcttctagtgttcttgagcaatgtaaaaaggaccactcctcacccagttcaacctcttttatcacagtagttgcaacaattttattatgcaagattggttattctattatcttgatgcttatttaatagcaaagcataatttatgcccttctct

SEQ ID NO: 259376 - DNA, 647 bp, Homo sapiens
gtttatatctggaattatccatttaatacatttggactactgttactgccggtagctgaaaccatgcaatgcaaaaccatggatgaggagaaactaatatataagcaaatattttaaaacttactcactaatagtgttttttcatatcttttctataaaattttctgttcttcccaatatcttcatttcaaccaatgtggcaatatcattctccagataatctgatctccctgacctgagcgaactttcattctgtcccttttcctccccagttcccatcagccaatatatgctatagatttcttatatcatacctgtttcatccattttttcatttctacctcttctcctccaaatatatttttggatactttgtttttttgaaagtttattctaactctcatactttaaatccatctaatacataccattcacgccacattcacgccattttctctgttcagatgtttaaatagaacccagttgcctaggataaagctgaaatcattatcctgatattctagactctccacaagctgattctattgctgaaaggaagtgatccttccttccttcttccctccttcagtaaatgtttatggtgcacctagtatatgccaggcactgtgctagtcagtggagattca

SEQ ID NO: 259377 - DNA, 347 bp, Homo sapiens
acactgtccgtctttgcactgaaggaagaacacggtggcacaacccagtgtcttcactgcgccacacggacaaaggacacctctgtcacaggccggcacagctccctgggcaaaagtgacacgaccatgttattactccctagtcaagcccacgggaaagaaaaatgcctccctggagtttctgcaacacagccccctgttctctaccactactgcccgctccaccgcaggcctgccccgtcttcctcctcctccgggcactaggatccttgcagtggactcttttcaggttaaaactgaggatggacagcaagcagttagtcattacttgctatataaaaaggatt

SEQ ID NO: 259378 - DNA, 779 bp, Homo sapiens
aggtgtgcgccaccatgcctggccattttctgtgtttttgaaacacacatttacttatttaatgaaaatagaacatcatatactaagatatttcagcatagttttgttccacttagaaaaagttatggcaattttatcagtaactgtctaacttaatacccatacatgatgcaggataggtgtgtccccaaattggggcttaacctgggagggttcttggcttcacttaggatggagttcaagggtgagccagtggtgttaaacagtgactttgattgaagtggcagtgtacagcagtggcagaggggctgttccttgtggctaccccataggcagtgtgcccacaatggcagctctggttctacagtcatatttataccactttgagttacagacagattaaggggcagagtatgcagtaatttctagaaaaaggattgtagcttctgtgtctttgggttgttgccatgggaagggcagtaacttccatgcgttgccgtggcagtggtaacctgacataaatatgctgaggcaagtctccctttaatttttcattttcaagctattttaaactatttttaaaccttttttcacatgtttattcttccagatatattttattaccatttttgtgtcattttctaaaaaccttttttatttcatttggaatttaatttagtctatgttttatttagagaattgaactcttcgtaagattactttttttcctacaggaacatgatgtgtatctattttcttggttcttctttcaatctttt

SEQ ID NO: 259379 - DNA, 474 bp, Homo sapiens
gtgctctgttaatttgtgtttgctccataccccaccctatataattgataatatttgcatctttttgtttttagtactattattttttggtttatcaaactttgtaacatggtgctttattgtggacttttcaaagaacaccttgccaaatttggtaattcctagcaattgtcatttcctgttggaatttcttaaagtggaatctaatggaaaagtaattcttgaccttgtgtatttagtaaaattaaaggcatagttgattttaggattgtcataaaaattaatattttgttttaaaagactttttagactttcaatgctaattgatcctattgttggaagtagatgatataaactttaaagctttttgggtagaactttcacattcaccatgtctaaatattttaaagaggaaatggattgactcgcagacattttgtactaaggaatagaaaatctttgaattgctattta

SEQ ID NO: 259380 - DNA, 304 bp, Homo sapiens
caactcccaaacccatcatctctggcagaattcttgcaatagttctctctcttatttaaacaattcagtggttttttagtgcacagtcatttgccatatgttgacatttcaggaaatgacagaccatgtacatgatagtggtcccataagattataacactgtatttttactgtaccatttctaagtttagatacacaaatacttaccattgtatcacaattgcctacagtattcagtacagtatcatgttgtataggtctgtaggagctataggagcaacagggtataccatatagcctaagt

SEQ ID NO: 259381 - DNA, 984 bp, Homo sapiens
gggaagagaagaagaggaaccagatctttttgtggacagctcttttgcaaagccgtccggcctgaatattcagtctgacataatgacttacattcataaattctaaaatgttaaatatttaaaagaaatattttctcagaaacataactatgtttcttcaacttgtgtcctggtagaagttttttaaggagcaaggaaggagtaatgaagagagaagcatgatttattattaactgctattgtgtaaatgcatacctctaaagtattgaaaataatcttgttatgttaatcttatggttataccacttacagtctgcaatttatgattacactatgaatttgctctaagaggaagaagtttacaaagtaaaagtaaacttcaatgaagcattttataaggtttgtcaaaataagtgagattttattgtacaaaccagaaaaatataagtttcattttacccagaattgtggatgtgtttttaggtgaatacttgtaatgaagtttatgaattaaagaagaaagtcatagaaaggctggaggacctttgcaagaatgtggaactgctgagtgcaaagctaaggatgtatcaaatggaggcagaggacactgactctcacagttctgaggaaatagatacggaagagatggaggccctgcttcctcaggccccagcatcctttttagtgcagaagtctcctccccgcaatacagcatggaaacgtgcactgaggattttcatcatgtttgatgtcctcaccgtcactggacttttatgttacatactattttttggtgctacatttctctttgaaagggtgcttctgagaatgcttgggtgccgcaccacatgggacctacgggagatgagagagcctttcttgaatttggaagtggaagccttgttaccctcctaaagatacagaagttactgtcaccctactgactttctcaccagtaaacattgtggctgttcctgtattgtg

SEQ ID NO: 259382 - DNA, 310 bp, Homo sapiens
ttttcagaatttggttaacacagatgttttctctctttgtaggaaacgtgcactgaggattttcatcatgtttgatgtcctcaccgtcactggacttttatgttacatactattttttggtgctacatttctctttgaaagggtgcttctgagaatgcttgggtgccgcaccacatgggacctacgggagatgagagagcctttcttgaatttggaagtggaagccttgttaccctcctaaagatacagaagttactgtcaccctactgactttctcaccagtaaacattgtggctgttcctgtattgtg

SEQ ID NO: 259383 - DNA, 688 bp, Homo sapiens
  misc_feature (1)..(1): n is a, c, g, or t
ncaaatgtaattattcgctctcgccaagctctcatagatgcgctcttattggaaaactcaaatcattttctatgaacatgtaaatttgatatttacactgtaagatcagcattaaagctattctatagcgttgtagagttgtgctgtccaatatggtagccattaggcattaggtcgagcccttgaaaggtggctagtccaagttgagacatgccataagtgtaaaatacatactagaattcaaatactgtgtgtgaaaataatgtaaatgatctcagtatgtttatattgattacatgctcaaataacatttttgacatattatgttcaataaatttattactaaaattaattttacctgtctttaccttttgatgtagcttaagaaaacataaaattacatatatgacttgcatttgtgatctgcactacatttctatcaggcagttctgcttacagtttaaaaatttgtaggtgggactgccccctttctgtctcgtactccaatttgacttaaacaaaaaaattggcgtttttaaaacaaagcttccttgtatggaaaagaactcttatgggtaaaaaaactgaaaatcagagaaggtaagtggcagagctggtaatttaacattacatttcaatatcccatactgagagtcaagtctatacacatgtatgtatatatatatgt

SEQ ID NO: 259384 - DNA, 126 bp, Homo sapiens
tttgtctaccaatatgacttcaagattatctacagatgtgcatttagctttagaaattcagtttttaaatcatctggtaggttggaagtatgtggttgaatacttgtggttttctttcagtataat

SEQ ID NO: 259385 - DNA, 315 bp, Homo sapiens
ctgctgataagaacagttggcctgtggtagagaagggaggtcaaggggaagagtgaaggtcactttcataatattatcatcaactaggagatacataaaaataatactggtcataatctttacaggatgaaatcgagaatctccaatgaaatattaaattggccatattctataatgtaacagcctgttggcatttttatgcccaatcaagtgggcatttttatccatatacagtgttatgcattccctggaatatatttgaataaggatgattgaacagctttatgatgaagaaacactaaatacattgactat

SEQ ID NO: 259386 - DNA, 396 bp, Homo sapiens
tcacagacacaaggcccggagccatgttgtccctttgctcctacaaaggaaacaggatgcccaaaacaggacttgtaaatcccaactcaaaacctccccgttccgcagggacacagggtgctttgctccttgaaggagtagtggatgcctccttatttacatccttcgtgcttacaaggcagtgggggtgtccaggggacatcagccaccctgtgctggggcacttcagaggctccggggagctgccatgctctctctccatcccaaaagatgggtctggggaggccactggggcaggcgagcccgctcctgtgaggagtgaaccccaccccccgccgctctgctggtgtgagtgacagttatcaacagaccctgaatgggggcttcccagaaaag

SEQ ID NO: 259387 - DNA, 598 bp, Homo sapiens
gacattgtttcacttaatcctcataacagccttatgaggtaggcactattattattcctattttagagggaagaaaacaaacaaggagttacattgctttattcaagacccctcagctggagccaggtttccatcccagcctgttgcttctagctccttcagtggactacctgcctaagggatggtggggggtgggggaaggaatggcacagagccagggaggactttatcaaaagacacccaccctctcacccaagcactggcattaagaacccaggggaaagccaagtctaatatcagggctctccaggccttcctctttgcaacagcagttagcagattttcctagtgggttacagtgcttggctttagatatgacacccacctcttcatgggctgtaggacaagaacaaagtgtgtttacatatgctcttcccactaaggtaaaccaaggaattggtttataatggaggatttgctgcagaaatgctactgggggctctgcctgagacacacattcatgcaatatttcttcagaatccctgaactgcaagtttgggattaaggtgctaccatccagtagaggaaaggaagctca

SEQ ID NO: 259388 - DNA, 601 bp, Homo sapiens
aatttgcatttcattggaatgtatgtgttttcactaaattgattatttatgttatactcccttccagtgatccttaaaaatgttcatgcactgagaatcaccaatgaacagagatggaagggagcttagagatcatccaacctgacctcctttacttttacagatggagaaactgaggagctgagaggttaaatcccaggcactcaagaagtacctgtgaaatgtgaggccagatggaattttccttctgctccaaagtcctggcagggtgggaatcttcagtgggacagggagccacagaggctttgctagcaatgaggggatggccaccgtgaaggaagggtgccctggtccaggatggaggtaggacccacctgtgcctctaaggataaccgtcaccaacccaaacccgatgggagcatctctaagatgaagtagagtccaagtggggaagacagggggacagaaaggtccagagactcagagaactttgggacagggagaggatggtgcagaccctccagcaagagactcagggacccccagctgttccctgaaggagtcctggtgtgggttgaaaggtgacttgaagggaaaaggg

SEQ ID NO: 259389 - DNA, 466 bp, Homo sapiens
gagctcttgtttctgagactgttcttcctgcattcagatttgggtacagcaggggattgaagaagcaattttcagattccatggtgggctggattaaattactccacaggccatatgtctcacagacctactagagtggattaagtgttttgctttctgtttgcatttgaatattttcataaaagaaagaaaatgttaatgcaggcctagtaaaggagaaagagacgaacaaacaaattcaggtggcaaagaagcctcctagatatttcctgttggtgcatgacagccaggactagatggatttgaagatgaaaaggttgaagcaggacattctgcttggatttcattaactattaacatacgttctatcaaggacaaagagtaagcattaggcttttgtctgtttgtttttaacacctttccagagcttgttgatacagattgctgaaatttaaaaataaaaaaa

SEQ ID NO: 259390 - DNA, 2014 bp, Homo sapiens
  misc_feature (46)..(46): n is a, c, g, or t
  misc_feature (126)..(126): n is a, c, g, or t
  misc_feature (170)..(170): n is a, c, g, or t
  misc_feature (249)..(249): n is a, c, g, or t
  misc_feature (261)..(261): n is a, c, g, or t
  misc_feature (354)..(354): n is a, c, g, or t
  misc_feature (944)..(944): n is a, c, g, or t
  misc_feature (1164)..(1164): n is a, c, g, or t
  misc_feature (1239)..(1239): n is a, c, g, or t
  misc_feature (1640)..(1640): n is a, c, g, or t
  misc_feature (1674)..(1674): n is a, c, g, or t
  misc_feature (1696)..(1696): n is a, c, g, or t
  misc_feature (1709)..(1709): n is a, c, g, or t
atttacaaattagccaggtgtggtggtgtgcacctgtagtcccagntactcgggaggctgaggtaggaggattgcttgagcccaggaggttgaggctgcagggagccaaggtcataacatgcactncagggtgaatgtggtgagaacaccaggaaggaggaccttgcatngttttaccaaagctcagcacccccacccagccctggatgccacgccatcctgcttcccagggggctgccctgctccctntccgtggccttntagtgagttctccaggaagaaggctgaggctggcattttgaggaacacccaggtccagggtatattaaattccacttacatgtcctttaaatntttcttaatttttgtaatctagcttaacttctacaaatgctaattgtatgacacttcaccccaagcagcctggcctttccactgttaatgtcagtgcatgggggagtctgaagtgcagtcctggtgggggtgtctcaggaggaactgaggaaaagcttctgaggggtcccagggtttcaggccctcacaatgtgactgcatgaaactgcgattttggggaaaagccatggggcaggccaggcagggcagcccatgggagcacgtgggtttgagatcaggctcagccacatccagccgtgcaaacgtgggcaaggtcctttgccatcctgggtctctctcctcctctgggacatcaggaggatcctccccatgagagcgagggtggtgtatgtgggcacagctggggtttgccaggtggctgtcttcaccacataggtggtacacaggtgcccagagggcctctcccacatgtggaacattccctccaccactgcgcaggaggccaggcttaaataacacaaggggattcctgcactgaagcttccaccattctgagtggggggaccaggtaaggtgcagagagagacggnagggcctacctgtcaccagagcactctgaaaaggggaaaggtcaggaaagtgaggcagggctgagagttaggacacccccctggctggctaggcagaacagggagcctggtgctatgcctgaagtctggctaggacaccccacgccacctcatcccatctgaacctcagtttccttgcctgtaaaatgagggctaagtctctctacctcagaggatggcngccagatcgagtgagatggccccgtgacagccctctgcgaaggggatggcagggtgaggggagctcttatcgccnttcaccaccactgtcttggggctctctgcagccagagctgtggggtcatcacctgtccctcagtttcccaagatggccttgcagctccagcccctccatctctggctccctgcaactggagcagcccgagctccagtcatgaggtacaggaggggaggggaagggacagggctccctggaagggagctgctgagatggggataatcagtgtttctccagcagagactcaggggagaggcagggatctcagatcgcatgtctctgagggctcaggaactgcagtctgaatggaaagtcagtgatttcactcaacatgcttttcactctgtgctgggtgatgctgaagaagtgggaagaccaggtccctgaccttgggcagctccccttccaataggggagtntgtggaccagtcccctgagagaacatttacattntgctgaggggtaggtagagttntggtgaacagaantagttatgtagcctctctagcctcagtttccccactcaacggcagttgggggttgagagcattaatgcataaaaagtgcttggcctggtgaaaccctgtctctactaaaaaaaaaaaaaaaaaaaaaaaaaaaaaacactacaaaaaattagccgggtgtggtggcgggcgcctgtagtcccagctactcgggagcctgaggcaggagaatggcgtgaacccgggaggcggagcttgcagtgagccgagatggcgccattgcactccagcctgggcgacacagcgagacccagaaaaaaaaaaaa

SEQ ID NO: 259391 - DNA, 518 bp, Homo sapiens
  misc_feature (46)..(46): n is a, c, g, or t
  misc_feature (126)..(126): n is a, c, g, or t
  misc_feature (170)..(170): n is a, c, g, or t
  misc_feature (249)..(249): n is a, c, g, or t
  misc_feature (261)..(261): n is a, c, g, or t
  misc_feature (354)..(354): n is a, c, g, or t
atttacaaattagccaggtgtggtggtgtgcacctgtagtcccagntactcgggaggctgaggtaggaggattgcttgagcccaggaggttgaggctgcagggagccaaggtcataacatgcactncagggtgaatgtggtgagaacaccaggaaggaggaccttgcatngttttaccaaagctcagcacccccacccagccctggatgccacgccatcctgcttcccagggggctgccctgctccctntccgtggccttntagtgagttctccaggaagaaggctgaggctggcattttgaggaacacccaggtccagggtatattaaattccacttacatgtcctttaaatntttcttaatttttgtaatctagcttaacttctacaaatgctaattgtatgacacttcaccccaagcagcctggcctttccactgttaatgtcagtgcatgggggagtctgaagtgcagtcctggtgggagaggccctttgggcacctgtgtaccacctatgtgg

SEQ ID NO: 259392 - DNA, 707 bp, Homo sapiens
gttataatgaacataaacagcagctgaaaaaaataaccccacacttgatacttaggggatttgcctaaacacaaagaaaacaaatacctttatttttctcttctccacttccagatattattttaggtgacactacaggcagtgagaactgctataggattaatgcatcttaaagactttcttgcgttgaaaggaagatgaatcccaaatcctatagggtaaaatttggtgggagcaggtaaagagtctgtaggtttttgaagagctctgtccaaagttgaagggccgacattaagtcagggaacaaagctacacaaagaaagggtagggcttaaatatttttagctcctttcatttgaactaaggggatggtcacaacatcaattttgtatctttcttcttctatgttgtaacatccaccaatcatccccattccttgggcaaagatgattaaaaccacaggaagtcatgtggagatgttaaggatgtaccttcaggagaagactaaaatattaggcaataaaaaagaagtgtaacttttctaatacccccttctccagaggccagtgtacagacagatgcatcaagaaagcaatagtttccaaatactagttcccaaactatcaatgtgaaaaggagaccaagcagcactgagatatataaaaggagcacgagatggagagaagctgctgccaagatgacatctc

SEQ ID NO: 259393 - DNA, 597 bp, Homo sapiens
catatcaattcttagagtgtgatatgtgagattcttccaaatgatctgtggtctgggtctattgcccacagaaggttgatggcatcctggataagatcaggtcttctaaagcagactcggggttggaatttttgctccatcacttaccagccatgctacttggggtaaattacttaaacaatccgaaccttagcttcctcatctgtaaaacagaaataataataatatttctcatggggctgctgtgaggataaaattagataatgtacccaaagctcttcacacagaaaagcctcccctgctggatctctcatgtaccccctggattttctagcagagtgtggcttctccaaaaccttctcaaacagctgttgagaatcaatgtttgtaatgagaaatattgcgaatgaggagccagaaaaagtctgacagcctttgcagcagggggatgagaaggaggtggttgtgtgtgtcctcagctcagtggtaggtactgggcatgtggtaggaatgagaaagtaaaagtagctattattattaggatagtatctataacttttatttttttgcataaattaacaatttaacaaaaaccag

SEQ ID NO: 259394 - DNA, 449 bp, Homo sapiens
gagtagctgagattatgggcatacaccatcacacgtagctaatttgtgtatttttgatagagacgggttttgccatgttggccaggctggtctcaaactcctgacctcaggtgatctgcccaccttggcctcccaaagtgctgggattacaggcatgagccaccgcacctgaccagtagtaatattaataatagttctagccctcaagatttaccttgtgccttgctgagcactgacacacagtctaatcttatcagtaacttgtgagggagctcctgctattactattattacagattgagtatccctaatctgaaaatctgaaatttataatgctccaaaatccaaagctttttgtgggccgacttgatactcaaaggagatgcttattggagcatttcagatttcagatttttagattagagatgctgaaccagtacaatgcagca

SEQ ID NO: 259395 - DNA, 608 bp, Homo sapiens
atcgaacacgtgaattctgttagatgtggcccttgagatcagagagcgaagctagaaaaaaatggaagttacgactcattcaggaagaacacactgaaagtgaaagattcattaagaatgcgtctttaattctcagatggtgcaggggaagaggagcaggcgcacagatggaagctgaggaaggctgggctgacggggtcgctgtgggtgcagccagggtgtagggtgtgctggaaactcatcagagtcatttgagcaacctcggtcatggttgtggacatcaggcttccaaaactacaatttttcaaaatcagatcagagtctgagaggtgctggtagttagggactgtgccttaggtactgaccctgaaaggtggtgctgccttgaaggaggcctggtgaggtgacttcaaaatgcataccggccagcgggggaaggacccagagcccacctattaaatgagtctaacagtcatttaataaattgggaaattgggattctgaaagctgatgtgtgacttgctgaaagtccaaagctactcagagcagcaaagctaagcagagctgagacttagattcagacctcctgaccccaagaattgagagtt

SEQ ID NO: 259396 - DNA, 294 bp, Homo sapiens
caaaaaataaaattaaaaaaaaaaagtaaggagatttagggaccaactcgtccaactaggtacaggaggcaattgggccacagggggtcatgtgacttgtctgcagctacttgtaaagttacttctggtccagggctttttgcctcaaatactactactttttgggtcaggtactattttaggtactttctatatatgatctaatttttctgccagtcctactgaggaggctggggttgggaggatcatttgagcctgggaggtcaaggctaaagtgagccatgacggtgcaga

SEQ ID NO: 259397 - DNA, 692 bp, Homo sapiens
tacttgtttgctacttcactgaatttccacagttattcaggtttttatattgtagtactggtatgtatatttccatatattgtaaaatatttttctataagttttctcaagtctgtttttgaaccaggatataatcaagtgacaaacaacaacaacaaactttgtattgtagagttcataagaggcagggccagaagaggtcttatagccacattttgcctgggtctcctctggattttcaccatctgtatttggacagtgtgggggatgaaaaattaattgggattaagttactagaaaccactttgtgaatataatttcatttttccaactggtaaatattccttattcaaaataactttttgtggtatgctgtccaatgtaaatgttatttagtaatctgggtagttaccgaaatatttgggttctcttgttgacatagtcatgactgtagtttttgagggcagccattcagtaaaaagtgtttaagaaggttgctggtaaataatagattatgaaagctgtggggaatgcttttctgttttggccttttctatagagagttagctcagctgtccagagcacctgtgtctggttagctcagttaattagagcatgatactgatgacaccaaggtcacaggcttaatcccctagtggactccttgaatttgtttctgtgtcttggctgag

SEQ ID NO: 259398 - DNA, 298 bp, Homo sapiens
atcgaaaagcttggaggtgggaaatttacaaaaggtgattccagggtcagcttttttgtcacctgcttccgacttcggcagtttggagagggcgagtaagtaatacccttcagggtcttgggatgtggcccagcaaaatccttagagggactttgaagtcttagttttaagtttagaattaatgggcagagtacttaaatggccatttctccaaagatgtatacaaatggcccacaggcccataaaaatgttgcattccactctataacatgtttttgcataaaaaagttttaaaata

SEQ ID NO: 259399 - DNA, 730 bp, Homo sapiens
gcatctgtgcccagcctgttctataaagaaagatgtattcatgaacctaaccaagggagtctgagggagatgtagagaagcagagccattggaacatatgtaagcacgtgtgcccgtcttcagggaagggagccatttccccacttcttgagagaaaacagccctcctctagcaccacgaagggcttgatgatggtgccaaaggaagtggcagcagggcctggctgagaggggatgcccagcgggaaactccacagacacagcatatgctgtgcgctgccaacatacagagcactgcgctcgcaggatggtccatgaaaggtctggaagcagcccaggtgtcaatcaaccagtgggtaggtaaataaaatgtgggatatccatacaatatttggcaataaaaagggatgaattactgattcctgctataacatggatgagccttgaatatattatgctaagaagctagtcacaaagagccacatgtatgatttcatttacatggaatgtccagaataggcaagtctgtagacagaaagtagattcatggttgcctagggctcgaggaacagagggatttggcagtgacaactaaaaggtacagggtttcttttggggtaaagagatgttccaattgattgtgctagtggttggttgttcagctctatgaacacagtaaccactggagaatcagtactttagagggtggaattgcatggtacgtgaattat

SEQ ID NO: 259400 - DNA, 201 bp, Homo sapiens
ctgagggtggcttccagatggcctgagagtcagctgcctctgttttcttaggaatcttcagcaaaggggacagatgacctgcttgtgttgtgcaatttgtgtagtgctctggacctccctctctggggtcactgtctgctgccgtggccaaaacaacatgtgctgatttgtaaataaacacagtgaggagccccctgagcc

SEQ ID NO: 259401 - DNA, 677 bp, Homo sapiens
agaaaatttaatgactcacactcttacttcttttaagtactgctgctctaggctactctattcaacctaattctcaaaggcacctcaaactcaacatgtcaacaactcaaagcaaattatttccccttttgttctctacaaatatgcttctcatcaggtattatcatttctaccagcatctcagccagaaacctggaagtctattcctgccttccctccccacacctagtccatcacaaagtcctgttggttctatggttctatgggcttagtatctttgcagctggctactagtcattgtgctatctccagccatctccctattttcatccatgcccctcccaagttcattctctaggacattaactgaatgctctttcatgctactctcctgtttaaatcttttgatggtacaagttgagtatcccttatccaaaatgcttggggccacaagtgtttggattttgggttttttgggatttgcaatatttgcatatacataatgagatgtcctggggacaggtcccaagtctaaacacgaagtttattaatgtttcatatgtaccgtatacacataacctaaaggtaactttacataatattttaaataattttgtacatgaaacaaaccttgtgctaagtactgatatgtggaatttttcactttcagtatcgtg

SEQ ID NO: 259402 - DNA, 396 bp, Homo sapiens
gtctattgctagtttatttccctgatgagattctcttcctgggacagtgggtgtggtgtagggtttgctcttggtaagctatacaaaattgttaatcatcaggaggagatactgtctgtggagaaaattaggtagagattaaaacaaccaccaccaccaccatcaccaccaccaccaccatcaccaccaccaccaccatcaccatcaccaccaccatcaccaccaccaccaccaacaacaacaacaacaactttgaacctgagctcagtggcgcacacctgtagccccagctactcaggaggctgaggtgggaggattgcttgagtccaggagtttgaaattgcagtgagctgtgattgtgctactgtactccagcctcgatggcagagtgagacc

SEQ ID NO: 259403 - DNA, 451 bp, Homo sapiens
agactccatcttaaaaaaaaaaaaaaaagattatccagctgggtgtggtggctcatgcctgtaatcccagcactttaggagggcggatcacctgaggtcaggagttcgagaccagcctggccaacatggtgaaaccccgtctctactaaaaatacaaaaattagccgggtgttgtggcaggcgcctgtcatcccagctactcaggaggctgaggcaggagaattgcttgaacctgggaggcagaggttgcagtgagccgagatcgtgccactcactccaacctggatgacaagtaaaactctctctccaaaaaaaaaaaaaaaaaattaacccaaaaatttgtatgctcaagtttttttttaattaggttaatataattgtaacagccatattcaaataaagtatttctgtgggcttttaaatagttacaaaataaagcttatctcagtga

SEQ ID NO: 259404 - DNA, 482 bp, Homo sapiens
tacttggtgtaatttccagttctatacgtccctaatgaactccgttaacaggcagcataaatacaactctgttatacccatgcggcccctgaacaatccccttccccgagaaaggactccctttgccctccaaaccatcaatgccttagaggaagaaagtcgtggatttcctacacaagtagaaagaatttttcaggagtctgtgtataagacacaacaaactatatggaaagagacaagaaatatggtacaaagacaatttattgcctgagatgaaacatataacatgtggctggctcttgttttgtaaaccaaatgattaatcttcacttgagaaagcagtttctaggaaatgtttaaataaaagagagtcttcaccttaaagaaacctatggagcacaagaaagataaatttctgcaggacagcctataaaattgtggtactttttgatgtttcagtaaacttgacattgtcagagttt

SEQ ID NO: 259405 - DNA, 436 bp, Homo sapiens
atccagaagtaaacacatttcaggacacttaacatttaaattctatcaagaaatttattttctttgatgtggatgcagccaatttaaatttcatcacaggtgcagaagaaccagaagcaatagaaagaggagcaaatcgatcatcatctagtgcctgtgagctggatttgggtcacctgggtgcctccctgcttcgagaaccaacagtgtggtggtttcaaggacctcggcttctggtttgggaccacaaatatttcctaatctctagaaatgctctcagtttacgatctgctttagacacgcactactaagtttatatcaaaggacactctggtttgaaatgtgctctggtatccatcaatgaacatttttcttcatgctcggtagcaatgatggtttaaaactgttcttgccattaataaatctggaatagggg

SEQ ID NO: 259406 - DNA, 353 bp, Homo sapiens
acagggaatatgcagagttgatatggagataagaacccagtgatgaaggagaacccaagaatctgggggttcttctggtgactggtataaacacagataaggcaaaatgagattgtccagatagattcaaggcaggtagtgttagtaaggctgtgagtgtggggcagaaatgggtgggattgtaggctccttcttcacccctgatggtgggagaagaaggttcatgctcatctttcagttcactaattgtctcttcagctgtgtctaacctgctgtttaactcattcattgatttttcttttcttttgtagatcttataaatctccccaattgtttaaaatgatttcagtatc

SEQ ID NO: 259407 - DNA, 487 bp, Homo sapiens
ccaatttcaaggccagagagctgtaaatggtgaagacagggtttgaacacagaatctgaaacttttatatataggcctatgtttctcactctttgtaagctgggcccgtatcttgactaccttgtattcccagcccacgggcccatgcctggtacatggcagcagctcaatacattatttaattaaggagcaggaagaaaggagtctatggctccagctccatcctgacatagcctcttatgatgtcatcacacagtgggcatgtctcactgtccccaacaccaccaggcttaatgaacacagtatcttctgttcttgaacatagtatcttgatgaacagagaggttcacccaaaagtactcaaacatcaccttttttgcctgtcaggtcccagctgctgacacctgctctctggccctctcttacctgaccatccagagtcctatgtgtgtactttaaagcctcattggtcccttaggtaataaaa

SEQ ID NO: 259408 - DNA, 266 bp, Homo sapiens
gaaaagaatcataattttaagctagtaaaagttgggccagtcttgtttcagtttaaagaaaaataatttacaggaacttttagaacaaaagcagttaaagaatgacctgaggagaacatttaacatttaaagggatagtatgatttagtagtcaaggctgggcgcattggctcatgcctgttactccagcatttgggaggctgagaccagaggattgcttgagccctgggctttgtagcaagagctcatctctacagaaaataaaa

SEQ ID NO: 259409 - DNA, 466 bp, Homo sapiens
tcagtggcagttgaggttgctctttttatgtgggagagtgaaattagccaagattagatcccataaggagaaggaggggctcttataaccaagaccattgtctttctctagaagaggatggttagggacctgaaaagaaatgagattttgtgtttccttaggtaagataggattctttctcctcagaggtgattttagggaagtaattgaagatattttaaaggaaagctccatatctccaaaatattatttagtagctgaagttctaccaggtagtttcagttagctttcagatatgggatgctttgggttgggtgtgggggtgagagttgcaggggcaagttgcaggggcaagatgctgggcaaattgcaggggtgagagttgcaggccttaagtactctattaggggaatagagtacctaaagaattgtgtattttaagttaaaggttatacaagtatatggt

SEQ ID NO: 259410 - DNA, 289 bp, Homo sapiens
ccatcctccaggtttgcaaatcagatcaagttctgacaactggtaaagaggaagatgagaagatcctgccagataaattctctggtaccttcattgatctcattctttcaccatcaaaggggaatgcagtagtgccagcaggagcagaaaaaaaaaaaaaaaaccctaaaaagaacaagagagactagtcaaagctagtacagtgtttccctggtactgagtcatacttttacaatgacccaggcccacggcctcaactgatgacaaataatgagaatccaacaatcat

SEQ ID NO: 259411 - DNA, 346 bp, Homo sapiens
tctgcgggctggagtttggtgcataattaaaactcagcgtctgacagctgggcacagtggcttgcgcttgtacgcccagcactttggaaggctgcagtgggaggattgcttgagaccaagaattcaagaccagcctgggcaacatagtgagctccatctctgaaaactatgtttaaattagctgggcatgatggcatggccctgtagtcccagctaatggggaggctgaggtgggaggattgcttgagcctgggaatttgaggctgcagtgagccatgatcatgccagtgcactccagcctgggcaacaaagcgagaccctatctctaaaagaaataaaaagaaag

SEQ ID NO: 259412 - DNA, 694 bp, Homo sapiens
ggggatttctccccaccaccgagcaaactgcccagacatggacaccggcatgaactgggggtcctccagttaagttctgacactctctacctggagacagcgtcagatcccaggggttgggggcttagtcccccaagaccacccctgaccttcagacatcactcactagtacaggcctcgggaacttctgacaaccagctataaattgataaagaccccctctttattaatttgctagggtggctcgcagaactcggggaaacccttaggtttaccataaaggatgttacaaaggatacagatgaagagatggataggcgaggtataggggaaggggtgcagagcttccatgctctccctgagtgtgactctctccgggaacctccatgggttcagctacctagaaattcttagaactgtgtccttttgggttttcatggaagctttgtgacataggcaggattggccattgatggtcaacttaaccttcagcttttctcccctccctggagttcagggtggggctgaaaatctcaaccctctaatcctgccttggtctttccaatgaccagcctcaccctgaagctacctaggggctgccagccatcagccaactcatcagcattcaaaagtacatcactttggagattctaaggattttaggaggtgtatgtcaggaaatggattcaaaggc

SEQ ID NO: 259413 - DNA, 474 bp, Homo sapiens
aggcggggacgggggaagcagcacgggatcccagcctcaggcctgcccggacggtgttggttggggatcaagatgagtacactgcagccgagaacaagagccccagaggaactctttgtcccacaggagagcagcggatccacgcaagagaacatgcttgtatcttttcacggctcttctctgagaaatgaagccacaccacgatacagtcagcaagaggaagccgggaatgggagatggcaacagtccctgtcactggaacgctggcctctctggacaagccaccctttaggaaccccaccccttatgcctgtggcggtggcacggtgctgtatcctgcctgggctctggcctctactctctcctccctctggctctgcctcccctgtttctcaggggcctggatgcctctcgctctggccaaatgccttcaaaaaagatgacttcccagtccgtcagggagacactttctgg

SEQ ID NO: 259414 - DNA, 293 bp, Homo sapiens
ctgacctcaggtgatccacctgccttggcctcccagagtgctgggattacaaacgtgtgccaccatgcctggctttaatgggtatattttataatgttacatggaaaaatctgtcagaatttagttaaatctaatactcataattaaatcttattttacgcaaaaattgtagcatactaagttcatctatgatatgaaatactttctaatctttgaaagttaattctatttcctgaaaatgtaacatctttcttcaggaaagggtaagaggtggggtcaaagttgattatccc

SEQ ID NO: 259415 - DNA, 1162 bp, Homo sapiens
cacattgaagtacacgtttcaagggaatgagaaactggatgataggcaaggggagaaagtagaaatcagagagcgaaagttcgcggttctggttcttgtcccagggttagcccaggagcaagtgtggccatccatgttgctggattagagaaagcctaagcactgtgaagccaggttctgcatggactatctattaagtgatgaagtttcccagaatgcaatggcatcctgtgggaaatgtaatcatgggacaggcgtcattttgcttgcagtatacaggcaatgtcctaaaacatgacggtgaaaatggatgactttcgacttcgacttcaaaccattacagctacagagtggaaacaatttgagggtagaggttaggtctgctcttctccataatccctctcagaggatgcagtggtttatacagtgttaatggttcataaccagggtatttgttgaattaatgaataaataaacaaagaaataaatgatgagtgagttgacgaaacaggaacattgattggaagcagtagcgtgaattaaggagtttgttgacccttcctctttgttctgtgagtcataacaaatgaaagcaggaatggccctgtggaaaaggtctgtaagggatgggttattatcaggggatgacacagtttcatttagtctgaagaagtggaacacatgtaggaggatataattaagcatgggaggaaaataacgagtaatatgtgaaatgggaaagcaaaatgaaccgggaataaagttcttttttggtttctagtccaaagttaagcttgaggcatttcttgtttactataaccacaaaatatctaatatctgctaactaataactaatacctgctattttaacagatgttaaaataatacctaataaaaattcacctttgcaaggtgctatggaaagttattctttattgagcgcctttagaaacttgattacaaattagaaacagtcaaattaggaaatacaatccttaaatattaaatggaaattttaaataagcatcttgaacagagaatttgaaaaacttttatgtgttctctttgccccactagacccagctctggattacccagttaaaaaaaaaaatgtaagaataaaacaagtgtctaggattcagaggaatggggacatttaaaa

SEQ ID NO: 259416 - DNA, 190 bp, Homo sapiens
gatttttgtttggcattgtaatgaatgcataaatcagtttgggaagaactgacgtatttaagatattgagtcttccaatttatgaacatgttgtatctcttatttatcttctttgatttctttaaataatactttgtactcttccaggtagaggtgctgtacttcctttattaaaattattcttagatac

SEQ ID NO: 259417 - DNA, 685 bp, Homo sapiens
  misc_feature (19)..(20): n is a, c, g, or t
ctttttccctccctccctnntttttttccctccttcggccttctctctctctcggttatttctttcttgtcatttaatctggcagataaagtttggcagccagcctatcaaaggtcagagaggacctctgttttgttccaggaaaaggcaccgttacagttacagatgctctgtgatggagaatccataggaggaaccttgcgctgagctgagcaagaggcacagaaaccggcagaatccagcatccgggttgtcaggcttcctgctctcccttcctacccttctctcagaagagccctgctggctggtcaatactgtgaagcccactttagaatctctgattacactcttatgctcttcccttctctgtaaggagaagaggaattagaaactcgtgagatcaatcggttctcttcataggcctcgaaatggcctggacttttatcagaggctaggtcagggctgcaggaaggggctaagacaggaaatgctcgttggacagagctggaagaggtttgtatttgacttgtactcacctcctcagagactgcagatgtggcgtctccttttcctcctgaggacccctgcaaagcatttgtgcctaagacagaatgtttgaggagatggacactctgtctgtcaacatcttgtgctaccagctggatacattgtgtgctcaattgga

SEQ ID NO: 259418 - DNA, 543 bp, Homo sapiens
ttggaataatttgtaacttcttaggattcagaactaaactgaagtatatgtaagcttcagatcatgtcccagttatatggtgggaaatgcaattccagcacagcttcactgcctacacaaggaaggaaaaggtgtttctgcagataggacgctatccttccttgctccagccctgaatattagtgcatgcttcagggcaggtttaacagcaccaagagtgggtatactctttatattagcctggtagattgtgcttctaatctgctcacctggccagcacatgtcatgttattttccctaatcacgtttatagaaccatagtaaccagtactttcagtgaccatgacttagggtttttaattaatgactggatttaaaaacatccttgagttggttttggctgttgtgaatctttctcagatacagagtgtcctgagccagaaatctgagatataccaaggtgaaatccctgtttaccctatgcctttacttctcagagagagggttgaaaggaatactttatatttgtagaactgaaaaaaa

SEQ ID NO: 259419 - DNA, 620 bp, Homo sapiens
aaaaaatatacaaaaattagccaggcgtggtggtgcgcacctgtagtcccagctgctcgggagtctgaggcaggagaattgcttgaatcagggagtaggaggttgcagtgagtagagatcacaccactgcactccatcctgggcaacagagcaagactccatctcagaaaaaattatgtctagcttaatttgtcgcagataccatgctctggggattctaaaataatttctaatctgtactgaagcaatgcccagagtcaaccttgaaggctgtattgtaagcctcctccaggagggcactgactccctggcagggagagaagagggtgggaaatgatagagggctacggtgaagtgggattttacacacatttataaccttcacgacaatccaataaactagggaccaccatacctattttacagatgaggaaactgaggcccagagagattaagatgcttgcccaagtctcagagctaataaactgcagagttggaatttaaatcttggagaaacaactgataaggattagagagtctggtttccagtgtgagctctgaaaacgcttgcttgtatagctgctgggatatctgttttgttatgtttttttatcgcatta

SEQ ID NO: 259420 - DNA, 536 bp, Homo sapiens
ttgcacactctcttacccccattagtgggcttagtgttcatacccagggtgaacctggcagccatgctttaaaggcagagggtgggccacaggtgactgtggagaacaaaggactgtgaagtgggtggaaaataagcatcgttgtgctaaggcactgagacactgggctatgatagcagcagccagccctgcccaccctcactactacaagcattgccttccacattagtccccaaattgtgtgactactgctctaaatttttaatattagaaataaagtctcataaataataaaaagacaaacgacgttacaattctaatgggggaggggtgtacaaatgctttagttgtcttagaattcgtttgtatccagtactgctcaaagtaagtaaattccatgggaaagctttgatatctccagttgaatcacagatttgagctatagcaacatttgttgatatagactctgactagtgttctatttagcttctaactttaagaaattcccactggcagctgaacagtcccaattcttt

SEQ ID NO: 259421 - DNA, 404 bp, Homo sapiens
agttcctgggggaacagaactggtcccagatctggcgcttcttctgctgggaagcacgtgcaggagccggtgctccagaggcgagcagattctggctcaggggaaggggcttgtccagggccatccggccacacacagtgcagcagatgggccgaggtccccgccaccacccgggcgacaggaggggtgacctgcaccggaagtcaggagcaggccttctagctccagggccatcctgagaggaaagaagcacttcacctttccccattcattggaggcacgtccaggcttccaactaacctctctacgggaatgaatgtgaattcctctcaaactctgggcataagaaatgacacgtttttgttacatagacatattgcaaaaataaaaaataaaaagatgta

SEQ ID NO: 259422 - DNA, 539 bp, Homo sapiens
  misc_feature (12)..(12): n is a, c, g, or t
  misc_feature (14)..(14): n is a, c, g, or t
caactcgggggnanagaaaccagggttagaaaaattatacactctgattttcagaagggctgaaacttggagaactgatcccagggaaacaactgcctgcttcagctggtttaagaattttagtatgccccagaacaggttttcctcatactggcatttgtatttgtgggaagagagagagaccagactggctgcctgcttgtctgcttagcagcaaatacaacctgaagttaagcttgttgacagcatggcccactcacatccagagaagttgtggttagccctccacaagtgggggaaccttcttaggaaaacaagcgtgcatacaagaagctcatgtaaactctatatattgaaaacttgaatccaacattcgtgaacatgaaagaacaggacatttttggaaaactatgatgaaagaaaaggaacaagatgaataaacaaaagttatgacccaagaggatgtaagataaaaaagaacaataaaataaagttgtaattatcaccctttgagaggtctgaaggttcctgagaagaga

SEQ ID NO: 259423 - DNA, 3421 bp, Homo sapiens
agacgagtcccagagccgaccgcggcgcctcggccgctcggcgcctgcgcagtgaagaccgcggcgagccgcgcgcatgcgtgcaggcccggagccccaggcgctggtggggcagaaacgcggcgccctgcgtcttctggttccgaggctggtcctcaccgtttccgctccggcggaagtgaggaggagggtccttcgacccgtgctgagctggatggaccgcgagacgcgcgccctcgccgacagccacttccgaggcctgggggtcgatgtccccggcgtcggccaggctccgggccgggtagccttcgtctcggagccgggcgccttctcctacgccgactttgtgcggggcttcttgctgcccaacctgccctgcgtgttttccagcgccttcacgcagggctggggcagccggcggcgctgggtgacgcccgcggggaggcccgacttcgaccacctgctacggacctacggagacgtggttgtaccagttgcaaactgtggggtccaggaatacaactcgaaccccaaagagcacatgactctcagagactacatcacctactggaaagagtacatacaggcgggctactcctctcccaggggctgtctctacctcaaagactggcacttgtgcagggactttccggtggaggacgttttcaccctgcctgtgtacttctcgtccgactggctgaatgagttctgggatgcactggatgtggatgactaccgctttgtctacgcggggcctgcgggcagctggtccccgttccatgctgacatcttccgctccttcagctggtctgtcaatgtctgtgggaggaagaagtggctcctcttccccccagggcaggaagaggccctgcgggaccgccacggcaacctgccctacgacgtgacctccccagcactctgcgacacacacctgcacccacggaaccagcttgctggcccacccttggagatcacgcaggaagcgggcgagatggtgtttgtgcccagtggctggcaccaccaggtgcacaacctggatgacaccatctccatcaaccacaactgggtcaatggcttcaacctggccaacatgtggcgcttcttgcagcaggagctatgcgccgtgcaggaggaggtcagcgagtggagggactccatgcccgactggcaccaccactgccaggtcatcatgaggtcctgctcgggcatcaactttgaagagttttaccacttcctcaaggtcatcgctgagaagaggctcctggtcctgagggaggcagccgctgaggacggtgctgggttgggtttcgaacaggcagcctttgatgttgggcgcatcacagaggtgctggcctccttggttgcgcaccccgacttccagagagtggacaccagcgcgttctcaccacagcccaaagagctgctgcagcagctgagagaggctgttgatgctgctgcggccccatagcacctgtcgtgaggatagaaggacgggtggaagagaggcagcctcctgctccggggcccttccagaaataaagaccgccctccctgtgacctggggcccacccctgtcgaggcttgtggcctggctgttcatggccactgcctgggtgcctgttttcaggtgaggcccaatgaggtcagggacccaagatgggatgtggcccttctgacctgcagcaggcctgctgggagctcggagatggtgccaggacctggctcttttgggggccctgcctccttaggccaggacgcctgagctgacaggagtctgtgtctggtgtgccttctctggtggctcctcttaataggccagccctgtcccctcgtctcaggccattggaccacccctggctctgccctgtgggttcagggaggggttggagcagtgctgggcaagctcaccagggcctccaggcagggctggggttggcctccatcacctccaggtgatgggctgtggaaccagcggcctgcgccttcctctgggtacccagagtggagggctgggttgggctggcctttgccacctccctgcctttgcagggcctgtggacagctggagaggccacagatggggtggaatcccatctgctgctgaatcctcacctgggcctgagggactgtgcctgctgtgcactcacagctgggtcttcccaaggatgctgttctcaggagtggtgggtccccagcccctcttcacactgggtatgatggaggtgtgggcgggctcgtccaggccgatcaaggcacagcagtgagcagcggaggcctgtggtggggaatggactctcgtgggatcctcttgcagaggatgccccaggcctgaaccctctagtggatccacagtttgtggagactggcactctcccagccctgtccttgaccgagagtccagcattttttcagttggcccctggttggctgcctcaccccagcaggggaggaggcatccgaatccacagggacggcacgtgccatggctatgcacattgcctgcccgtggcatcaactggggccgctggcacttgtctaggatggaagcccccaagaagggcaggggtttctgtctgctctgttcagtgaatcatgtgaagtgcttgcaaaggcagctttacacagtaggtgcttcatatgtgtctgtcgaatgaatgcgctccagccaacagctttccagggacctgtatgctgggcccccctgctagctcccggggacccctggtctgtacgggaatgccctgagacatccggcctcctacagatggagctggcgctgcccaaaccacgggcagcaaaggtgctttgtcggggaggagggggaggtagcaaacatgcacggctgcagccttgccaggaccaggcccaggctgagtgtgggcgtggctcacccatttagcccctccggtaacctctgagcttgggcctcttggcaccctgccacacaggcacacctgaggccaagagtgggggtatgtgcctcggacactgccagcaggcagctgaggtgacctgtccttcagcttctgtcatgatgagggcagcactgtggaccccagggcagccagggcccagtgcgaactggcagcacaaggtagcacaggtcgcagcccattaccatccaggctgcttggtcctgcgctcctgaactgtatgtgaagaccctcatgcttccgcagtcaggaggcagtgcacagacgctcccgagagccctgctagcctcagtcactttttcttggttaaagcaggcattgagaatctcaggctggggctgttacagatgcagcaaaaacagcaaatgccagaagctctgtggggggagatagagccctccacagggcaacggctgaactgcagccggcatcgatgactccatagtcaatgaccatgactccttttgcatacctcactccagattggc

SEQ ID NO: 259424 - DNA, 3373 bp, Homo sapiens
agacgagtcccagagccgaccgcggcgcctcggccgctcggcgcctgcgcagtgaagaccgcggcgagccgcgcgcatgcgtgcaggcccggagccccaggcgctggtggggcagaaacgcggcgccctgcgtcttctggttccgaggctggtcctcaccgtttccgctccggcggaagtgaggaggagggtccttcgacccgtgctgagctggatggaccgcgagacgcgcgccctcgccgacagccacttccgaggcctgggggtcgatgtccccggcgtcggccaggctccgggccgggtagccttcgtctcggagccgggcgccttctcctacgccgactttgtgcggggcttcttgctgcccaacctgccctgcgtgttttccagcgccttcacgcagggctggggcagccggcggcgctgggtgacgcccgcggggaggcccgacttcgaccacctgctacggacctacggagacgtggttgtaccagttgcaaactgtggggtccaggaatacaactcgaaccccaaagagcacatgactctcagagactacatcacctactggaaagagtacatacaggcgggctactcctctcccaggggctgtctctacctcaaagactggcacttgtgcagggactttccggtggaggacgttttcaccctgcctgtgtacttctcgtccgactggctgaatgagttctgggatgcactggatgtggatgactaccgctttgtctacgcggggcctgcgggcagctggtccccgttccatgctgacatcttccgctccttcagctggtctgtcaatgtctgtgggaggaagaagtggctcctcttccccccagggcaggaagaggccctgcgggaccgccacggcaacctgccctacgacgtgacctccccagcactctgcgacacacacctgcacccacggaaccagcttgctggcccacccttggagatcacgcaggaagcgggcgagatggtgtttgtgcccagtggctggcaccaccaggtgcacaacctggatgacaccatctccatcaaccacaactgggtcaatggcttcaacctggccaacatgtggcgcttcttgcagcaggagctatgcgccgtgcaggaggaggtcatcatgaggtcctgctcgggcatcaactttgaagagttttaccacttcctcaaggtcatcgctgagaagaggctcctggtcctgagggaggcagccgctgaggacggtgctgggttgggtttcgaacaggcagcctttgatgttgggcgcatcacagaggtgctggcctccttggttgcgcaccccgacttccagagagtggacaccagcgcgttctcaccacagcccaaagagctgctgcagcagctgagagaggctgttgatgctgctgcggccccatagcacctgtcgtgaggatagaaggacgggtggaagagaggcagcctcctgctccggggcccttccagaaataaagaccgccctccctgtgacctggggcccacccctgtcgaggcttgtggcctggctgttcatggccactgcctgggtgcctgttttcaggtgaggcccaatgaggtcagggacccaagatgggatgtggcccttctgacctgcagcaggcctgctgggagctcggagatggtgccaggacctggctcttttgggggccctgcctccttaggccaggacgcctgagctgacaggagtctgtgtctggtgtgccttctctggtggctcctcttaataggccagccctgtcccctcgtctcaggccattggaccacccctggctctgccctgtgggttcagggaggggttggagcagtgctgggcaagctcaccagggcctccaggcagggctggggttggcctccatcacctccaggtgatgggctgtggaaccagcggcctgcgccttcctctgggtacccagagtggagggctgggttgggctggcctttgccacctccctgcctttgcagggcctgtggacagctggagaggccacagatggggtggaatcccatctgctgctgaatcctcacctgggcctgagggactgtgcctgctgtgcactcacagctgggtcttcccaaggatgctgttctcaggagtggtgggtccccagcccctcttcacactgggtatgatggaggtgtgggcgggctcgtccaggccgatcaaggcacagcagtgagcagcggaggcctgtggtggggaatggactctcgtgggatcctcttgcagaggatgccccaggcctgaaccctctagtggatccacagtttgtggagactggcactctcccagccctgtccttgaccgagagtccagcattttttcagttggcccctggttggctgcctcaccccagcaggggaggaggcatccgaatccacagggacggcacgtgccatggctatgcacattgcctgcccgtggcatcaactggggccgctggcacttgtctaggatggaagcccccaagaagggcaggggtttctgtctgctctgttcagtgaatcatgtgaagtgcttgcaaaggcagctttacacagtaggtgcttcatatgtgtctgtcgaatgaatgcgctccagccaacagctttccagggacctgtatgctgggcccccctgctagctcccggggacccctggtctgtacgggaatgccctgagacatccggcctcctacagatggagctggcgctgcccaaaccacgggcagcaaaggtgctttgtcggggaggagggggaggtagcaaacatgcacggctgcagccttgccaggaccaggcccaggctgagtgtgggcgtggctcacccatttagcccctccggtaacctctgagcttgggcctcttggcaccctgccacacaggcacacctgaggccaagagtgggggtatgtgcctcggacactgccagcaggcagctgaggtgacctgtccttcagcttctgtcatgatgagggcagcactgtggaccccagggcagccagggcccagtgcgaactggcagcacaaggtagcacaggtcgcagcccattaccatccaggctgcttggtcctgcgctcctgaactgtatgtgaagaccctcatgcttccgcagtcaggaggcagtgcacagacgctcccgagagccctgctagcctcagtcactttttcttggttaaagcaggcattgagaatctcaggctggggctgttacagatgcagcaaaaacagcaaatgccagaagctctgtggggggagatagagccctccacagggcaacggctgaactgcagccggcatcgatgactccatagtcaatgaccatgactccttttgcatacctcactccagattggc

SEQ ID NO: 259425 - DNA, 3717 bp, Homo sapiens
tttttttaaagagactaggtttcaccatgttgcccaggctggtcttgaactcctgagctcaggtgatgcatccacctcagcatctcaaagcactgggattataggcatgatcagtactttctaataagcagaaccattgtagtcagactgccccgccccctcccccgccagcagcgtctggctcagaggagggtctggggctctttgggggctgcagccatctggaagctccactggagccgattggtctcagttgccccactcgtgctgccctagtctcctcgtgcctcacgtgctgtcggtggtgcccttgcgccctcctcacagggactttccggtggaggacgttttcaccctgcctgtgtacttctcgtccgactggctgaatgagttctgggatgcactggatgtggatgactaccgctttgtctacgcggggcctgcgggcagctggtgaggccacggatgtgggagtggaacccgaaggggcctggtgacagaacggactgggaggcccagggtggcaggaggggggctgcttggcacaggcctcacagtgggtgccatcccttgagaccaaggggccacccctccttcagttggaccaggcctctggggtgccaagcaaagcccataccagcccctacaggcatgaaccaggcgctcttgctgccgcaggtccccgttccatgctgacatcttccgctccttcagctggtctgtcaatgtctgtgggaggaagaagtggctcctcttccccccagggcaggaagaggccctgcgggaccgccacggcaacctgccctacgacgtgacctccccagcactctgcgacacacacctgcacccacggaaccagcttgctggcccacccttggagatcacgcaggaagcgggcgagatggtgtttgtgcccagtggctggcaccaccaggtgcacaacctggtaatgtgctgcttctcctgccccctatcaggggccttcctgcaggaagacggcagcaccacctccccactctcccagccagagctgggctggaatggggtggctcatgggtgaggctgaccccttcacaaggtggtgtcgctgaggcctagcctctgtttcacccactgccggtccctgggtctacttgctctgggttcactgtggcctgaggtggtccgagcccgccacccacttccctgctgagcaagccctgctgggagacaggagggccctcttggctgcagagggctggaccccacagtgggttcctggcgcaggagatgtgggttggtcagggggcacctgccatgggctcaggcctgcctgcactgtgccccttccaggatgacaccatctccatcaaccacaactgggtcaatggcttcaacctggccaacatgtggcgcttcttgcagcaggagctatgcgccgtgcaggaggaggtcagcgagtggagggactccatgcccgactggcaccaccactgccaggtcatcatgaggtcctgctcgggcatcaactttgaagagttttaccacttcctcaaggtcatcgctgagaagaggctcctggtcctgagggaggcagccgctgaggacggtgctgggttgggtttcgaacaggcagcctttgatgttgggcgcatcacagaggtgctggcctccttggttgcgcaccccgacttccagagagtggacaccagcgcgttctcaccacagcccaaagagctgctgcagcagctgagagaggctgttgatgctgctgcggccccatagcacctgtcgtgaggatagaaggacgggtggaagagaggcagcctcctgctccggggcccttccagaaataaagaccgccctccctgtgacctggggcccacccctgtcgaggcttgtggcctggctgttcatggccactgcctgggtgcctgttttcaggtgaggcccaatgaggtcagggacccaagatgggatgtggcccttctgacctgcagcaggcctgctgggagctcggagatggtgccaggacctggctcttttgggggccctgcctccttaggccaggacgcctgagctgacaggagtctgtgtctggtgtgccttctctggtggctcctcttaataggccagccctgtcccctcgtctcaggccattggaccacccctggctctgccctgtgggttcagggaggggttggagcagtgctgggcaagctcaccagggcctccaggcagggctggggttggcctccatcacctccaggtgatgggctgtggaaccagcggcctgcgccttcctctgggtacccagagtggagggctgggttgggctggcctttgccacctccctgcctttgcagggcctgtggacagctggagaggccacagatggggtggaatcccatctgctgctgaatcctcacctgggcctgagggactgtgcctgctgtgcactcacagctgggtcttcccaaggatgctgttctcaggagtggtgggtccccagcccctcttcacactgggtatgatggaggtgtgggcgggctcgtccaggccgatcaaggcacagcagtgagcagcggaggcctgtggtggggaatggactctcgtgggatcctcttgcagaggatgccccaggcctgaaccctctagtggatccacagtttgtggagactggcactctcccagccctgtccttgaccgagagtccagcattttttcagttggcccctggttggctgcctcaccccagcaggggaggaggcatccgaatccacagggacggcacgtgccatggctatgcacattgcctgcccgtggcatcaactggggccgctggcacttgtctaggatggaagcccccaagaagggcaggggtttctgtctgctctgttcagtgaatcatgtgaagtgcttgcaaaggcagctttacacagtaggtgcttcatatgtgtctgtcgaatgaatgcgctccagccaacagctttccagggacctgtatgctgggcccccctgctagctcccggggacccctggtctgtacgggaatgccctgagacatccggcctcctacagatggagctggcgctgcccaaaccacgggcagcaaaggtgctttgtcggggaggagggggaggtagcaaacatgcacggctgcagccttgccaggaccaggcccaggctgagtgtgggcgtggctcacccatttagcccctccggtaacctctgagcttgggcctcttggcaccctgccacacaggcacacctgaggccaagagtgggggtatgtgcctcggacactgccagcaggcagctgaggtgacctgtccttcagcttctgtcatgatgagggcagcactgtggaccccagggcagccagggcccagtgcgaactggcagcacaaggtagcacaggtcgcagcccattaccatccaggctgcttggtcctgcgctcctgaactgtatgtgaagaccctcatgcttccgcagtcaggaggcagtgcacagacgctcccgagagccctgctagcctcagtcactttttcttggttaaagcaggcattgagaatctcaggctggggctgttacagatgcagcaaaaacagcaaatgccagaagctctgtggggggagatagagccctccacagggcaacggctgaactgcagccggcatcgatgactccatagtcaatgaccatgactccttttgcatacctcactccagattggc

SEQ ID NO: 259426 - DNA, 1544 bp, Homo sapiens
  misc_feature (49)..(49): n is a, c, g, or t
  misc_feature (92)..(92): n is a, c, g, or t
aagggccaagggggcttgggggttttggggcctttcccattcaaccttncccagggttgaatgggggcttgttgggaacccaagccgggccntggcggcctgcgccttcctctgggtacccagagtggagggctgggttgggctggcctttgccacctccctgcctttgcagggcctgtggacagctggagaggccacagatggggtggaatcccatctgctgctgaatcctcacctgggcctgagggactgtgcctgctgtgcactcacagctgggtcttcccaaggatgctgttctcaggagtggtgggtccccagcccctcttcacactgggtatgatggaggtgtgggcgggctcgtccaggccgatcaaggcacagcagtgagcagcggaggcctgtggtggggaatggactctcgtgggatcctcttgcagaggatgccccaggcctgaaccctctagtggatccacagtttgtggagactggcactctcccagccctgtccttgaccgagagtccagcattttttcagttggcccctggttggctgcctcaccccagcaggggaggaggcatccgaatccacagggacggcacgtgccatggctatgcacattgcctgcccgtggcatcaactggggccgctggcacttgtctaggatggaagcccccaagaagggcaggggtttctgtctgctctgttcagtgaatcatgtgaagtgcttgcaaaggcagctttacacagtaggtgcttcatatgtgtctgtcgaatgaatgcgctccagccaacagctttccagggacctgtatgctgggcccccctgctagctcccggggacccctggtctgtacgggaatgccctgagacatccggcctcctacagatggagctggcgctgcccaaaccacgggcagcaaaggtgctttgtcggggaggagggggaggtagcaaacatgcacggctgcagccttgccaggaccaggcccaggctgagtgtgggcgtggctcacccatttagcccctccggtaacctctgagcttgggcctcttggcaccctgccacacaggcacacctgaggccaagagtgggggtatgtgcctcggacactgccagcaggcagctgaggtgacctgtccttcagcttctgtcatgatgagggcagcactgtggaccccagggcagccagggcccagtgcgaactggcagcacaaggtagcacaggtcgcagcccattaccatccaggctgcttggtcctgcgctcctgaactgtatgtgaagaccctcatgcttccgcagtcaggaggcagtgcacagacgctcccgagagccctgctagcctcagtcactttttcttggttaaagcaggcattgagaatctcaggctggggctgttacagatgcagcaaaaacagcaaatgccagaagctctgtggggggagatagagccctccacagggcaacggctgaactgcagccggcatcgatgactccatagtcaatgaccatgactccttttgcatacctcactccagattggc

SEQ ID NO: 259427 - DNA, 550 bp, Homo sapiens
gcggccgcagaccccgggcggggaggaaaggccggcgggacccaggcccgggaggcccccgcctagagaggggcaccagggagggtgagggaggccaggcgcgtggcccctggagagttcctctgcagacggtttggagtgaggacggggcccagggagatggcatggaccgtgcctttcatttcaggagacgtggttgtaccagttgcaaactgtggggtccaggaatacaactcgaaccccaaagagcacatgactctcagagactacatcacctactggaaagagtacatacaggcgggctactcctctcccaggggctgtctctacctcaaagactggcacttgtgcaggtaatggggcttgggacgcaccgaggcgctgccttccctagcgctgcgtgaacccagaggcctttctgatgaaggtggcccctgggtgcacaacggagctatttttccccgtgaggcactttaatcagtttaaaagaaactggattgtcttccgcatggctgcaagtgttgttctttgggaggtcaatatggttttt

SEQ ID NO: 259428 - DNA, 1338 bp, Homo sapiens
gcggccgcagaccccgggcggggaggaaaggccggcgggacccaggcccgggaggcccccgcctagagaggggcaccagggagggtgagggaggccaggcgcgtggcccctggagagttcctctgcagacggtttggagtgaggacggggcccagggagatggcatggaccgtgcctttcatttcaggagacgtggttgtaccagttgcaaactgtgggatcctcttgcagaggatgccccaggcctgaaccctctagtggatccacagtttgtggagactggcactctcccagccctgtccttgaccgagagtccagcattttttcagttggcccctggttggctgcctcaccccagcaggggaggaggcatccgaatccacagggacggcacgtgccatggctatgcacattgcctgcccgtggcatcaactggggccgctggcacttgtctaggatggaagcccccaagaagggcaggggtttctgtctgctctgttcagtgaatcatgtgaagtgcttgcaaaggcagctttacacagtaggtgcttcatatgtgtctgtcgaatgaatgcgctccagccaacagctttccagggacctgtatgctgggcccccctgctagctcccggggacccctggtctgtacgggaatgccctgagacatccggcctcctacagatggagctggcgctgcccaaaccacgggcagcaaaggtgctttgtcggggaggagggggaggtagcaaacatgcacggctgcagccttgccaggaccaggcccaggctgagtgtgggcgtggctcacccatttagcccctccggtaacctctgagcttgggcctcttggcaccctgccacacaggcacacctgaggccaagagtgggggtatgtgcctcggacactgccagcaggcagctgaggtgacctgtccttcagcttctgtcatgatgagggcagcactgtggaccccagggcagccagggcccagtgcgaactggcagcacaaggtagcacaggtcgcagcccattaccatccaggctgcttggtcctgcgctcctgaactgtatgtgaagaccctcatgcttccgcagtcaggaggcagtgcacagacgctcccgagagccctgctagcctcagtcactttttcttggttaaagcaggcattgagaatctcaggctggggctgttacagatgcagcaaaaacagcaaatgccagaagctctgtggggggagatagagccctccacagggcaacggctgaactgcagccggcatcgatgactccatagtcaatgaccatgactccttttgcatacctcactccagattggc

SEQ ID NO: 259429 - DNA, 530 bp, Homo sapiens
gcggccgcagaccccgggcggggaggaaaggccggcgggacccaggcccgggaggcccccgcctagagaggggcaccagggagggtgagggaggccaggcgcgtggcccctggagagttcctctgcagacggtttggagtgaggacggggcccagggagatggcatggaccgtgcctttcatttcaggagacgtggttgtaccagttgcaaactgtggggtccaggaatacaactcgaaccccaaagagcacatgactctcagagactacatcacctactggaaagagtacatacaggcgggctactcctctcccaggggctgtctctacctcaaagactggcacttgtgcaggtaatggggcttgggacgcaccgctgcgtgaacccagaggcctttctgatgaaggtggcccctgggtgcacaacggagctatttttccccgtgaggcactttaatcagtttaaaagaaactggattgtcttccgcatggctgcaagtgttgttctttgggaggtcaatatggttttt

SEQ ID NO: 259430 - DNA, 3223 bp, Homo sapiens
ctggtactggtcccgaattcgtttgatgacgcgcgccctcgccgacagccacttccgaggcctgggggtcgatgtccccggcgtcggccaggctccgggccgggtagccttcgtctcggagccgggcgccttctcctacgccgactttgtgcggggcttcttgctgcccaacctgccctgcgtgttttccagcgccttcacgcagggctggggcagccggcggcgctgggtgacgcccgcggggaggcccgacttcgaccacctgctacggacctacggagacgtggttgtaccagttgcaaactgtggggtccaggaatacaactcgaaccccaaagagcacatgactctcagagactacatcacctactggaaagagtacatacaggcgggctactcctctcccaggggctgtctctacctcaaagactggcacttgtgcagggactttccggtggaggacgttttcaccctgcctgtgtacttctcgtccgactggctgaatgagttctgggatgcactggatgtggatgactaccgctttgtctacgcggggcctgcgggcagctggtccccgttccatgctgacatcttccgctccttcagctggtctgtcaatgtctgtgggaggaagaagtggctcctcttccccccagggcaggaagaggccctgcgggaccgccacggcaacctgccctacgacgtgacctccccagcactctgcgacacacacctgcacccacggaaccagcttgctggcccacccttggagatcacgcaggaagcgggcgagatggtgtttgtgcccagtggctggcaccaccaggtgcacaacctggatgacaccatctccatcaaccacaactgggtcaatggcttcaacctggccaacatgtggcgcttcttgcagcaggagctatgcgccgtgcaggaggaggtcagcgagtggagggactccatgcccgactggcaccaccactgccaggtcatcatgaggtcctgctcgggcatcaactttgaagagttttaccacttcctcaaggtcatcgctgagaagaggctcctggtcctgagggaggcagccgctgaggacggtgctgggttgggtttcgaacaggcagcctttgatgttgggcgcatcacagaggtgctggcctccttggttgcgcaccccgacttccagagagtggacaccagcgcgttctcaccacagcccaaagagctgctgcagcagctgagagaggctgttgatgctgctgcggccccatagcacctgtcgtgaggatagaaggacgggtggaagagaggcagcctcctgctccggggcccttccagaaataaagaccgccctccctgtgacctggggcccacccctgtcgaggcttgtggcctggctgttcatggccactgcctgggtgcctgttttcaggtgaggcccaatgaggtcagggacccaagatgggatgtggcccttctgacctgcagcaggcctgctgggagctcggagatggtgccaggacctggctcttttgggggccctgcctccttaggccaggacgcctgagctgacaggagtctgtgtctggtgtgccttctctggtggctcctcttaataggccagccctgtcccctcgtctcaggccattggaccacccctggctctgccctgtgggttcagggaggggttggagcagtgctgggcaagctcaccagggcctccaggcagggctggggttggcctccatcacctccaggtgatgggctgtggaaccagcggcctgcgccttcctctgggtacccagagtggagggctgggttgggctggcctttgccacctccctgcctttgcagggcctgtggacagctggagaggccacagatggggtggaatcccatctgctgctgaatcctcacctgggcctgagggactgtgcctgctgtgcactcacagctgggtcttcccaaggatgctgttctcaggagtggtgggtccccagcccctcttcacactgggtatgatggaggtgtgggcgggctcgtccaggccgatcaaggcacagcagtgagcagcggaggcctgtggtggggaatggactctcgtgggatcctcttgcagaggatgccccaggcctgaaccctctagtggatccacagtttgtggagactggcactctcccagccctgtccttgaccgagagtccagcattttttcagttggcccctggttggctgcctcaccccagcaggggaggaggcatccgaatccacagggacggcacgtgccatggctatgcacattgcctgcccgtggcatcaactggggccgctggcacttgtctaggatggaagcccccaagaagggcaggggtttctgtctgctctgttcagtgaatcatgtgaagtgcttgcaaaggcagctttacacagtaggtgcttcatatgtgtctgtcgaatgaatgcgctccagccaacagctttccagggacctgtatgctgggcccccctgctagctcccggggacccctggtctgtacgggaatgccctgagacatccggcctcctacagatggagctggcgctgcccaaaccacgggcagcaaaggtgctttgtcggggaggagggggaggtagcaaacatgcacggctgcagccttgccaggaccaggcccaggctgagtgtgggcgtggctcacccatttagcccctccggtaacctctgagcttgggcctcttggcaccctgccacacaggcacacctgaggccaagagtgggggtatgtgcctcggacactgccagcaggcagctgaggtgacctgtccttcagcttctgtcatgatgagggcagcactgtggaccccagggcagccagggcccagtgcgaactggcagcacaaggtagcacaggtcgcagcccattaccatccaggctgcttggtcctgcgctcctgaactgtatgtgaagaccctcatgcttccgcagtcaggaggcagtgcacagacgctcccgagagccctgctagcctcagtcactttttcttggttaaagcaggcattgagaatctcaggctggggctgttacagatgcagcaaaaacagcaaatgccagaagctctgtggggggagatagagccctccacagggcaacggctgaactgcagccggcatcgatgactccatagtcaatgaccatgactccttttgcatacctcactccagattggc

SEQ ID NO: 259431 - DNA, 3349 bp, Homo sapiens
agacgagtcccagagccgaccgcggcgcctcggccgctcggcgcctgcgcagtgaagaccgcggcgagccgcgcgcatgcgtgcaggcccggagccccaggcgctggtggggcagaaacgcggcgccctgcgtcttctggttccgaggctggtcctcaccgtttccgctccggcggaagtgaggaggagggtccttcgacccgtgctgagctggatggaccgcgagacgcgcgccctcgccgacagccacttccgaggcctgggggtcgatgtccccggcgtcggccaggctccgggccgggtagccttcgtctcggagccgggcgccttctcctacgccgactttgtgcggggcttcttgctgcccaacctgccctgcgtgttttccagcgccttcacgcagggctggggcagccggcggcgctgggtgacgcccgcggggaggcccgacttcgaccacctgctacggacctacggagacgtggttgtaccagttgcaaactgtggggtccaggaatacaactcgaaccccaaagagcacatgactctcagagactacatcacctactggaaagagtacatacaggcgggctactcctctcccaggggctgtctctacctcaaagactggcacttgtgcagggactttccggtggaggacgttttcaccctgcctgtgtacttctcgtccgactggctgaatgagttctgggatgcactggatgtggatgactaccgctttgtctacgcggggcctgcgggcagctggtccccgttccatgctgacatcttccgctccttcagctggtctgtcaatgtctgtgggaggaagaagtggctcctcttccccccagggcaggaagaggccctgcgggaccgccacggcaacctgccctacgacgtgacctccccagcactctgcgacacacacctgcacccacggaaccagcttgctggcccacccttggagatcacgcaggaagcgggcgagatggtgtttgtgcccagtggctggcaccaccaggtgcacaacctgcaggagctatgcgccgtgcaggaggaggtcagcgagtggagggactccatgcccgactggcaccaccactgccaggtcatcatgaggtcctgctcgggcatcaactttgaagagttttaccacttcctcaaggtcatcgctgagaagaggctcctggtcctgagggaggcagccgctgaggacggtgctgggttgggtttcgaacaggcagcctttgatgttgggcgcatcacagaggtgctggcctccttggttgcgcaccccgacttccagagagtggacaccagcgcgttctcaccacagcccaaagagctgctgcagcagctgagagaggctgttgatgctgctgcggccccatagcacctgtcgtgaggatagaaggacgggtggaagagaggcagcctcctgctccggggcccttccagaaataaagaccgccctccctgtgacctggggcccacccctgtcgaggcttgtggcctggctgttcatggccactgcctgggtgcctgttttcaggtgaggcccaatgaggtcagggacccaagatgggatgtggcccttctgacctgcagcaggcctgctgggagctcggagatggtgccaggacctggctcttttgggggccctgcctccttaggccaggacgcctgagctgacaggagtctgtgtctggtgtgccttctctggtggctcctcttaataggccagccctgtcccctcgtctcaggccattggaccacccctggctctgccctgtgggttcagggaggggttggagcagtgctgggcaagctcaccagggcctccaggcagggctggggttggcctccatcacctccaggtgatgggctgtggaaccagcggcctgcgccttcctctgggtacccagagtggagggctgggttgggctggcctttgccacctccctgcctttgcagggcctgtggacagctggagaggccacagatggggtggaatcccatctgctgctgaatcctcacctgggcctgagggactgtgcctgctgtgcactcacagctgggtcttcccaaggatgctgttctcaggagtggtgggtccccagcccctcttcacactgggtatgatggaggtgtgggcgggctcgtccaggccgatcaaggcacagcagtgagcagcggaggcctgtggtggggaatggactctcgtgggatcctcttgcagaggatgccccaggcctgaaccctctagtggatccacagtttgtggagactggcactctcccagccctgtccttgaccgagagtccagcattttttcagttggcccctggttggctgcctcaccccagcaggggaggaggcatccgaatccacagggacggcacgtgccatggctatgcacattgcctgcccgtggcatcaactggggccgctggcacttgtctaggatggaagcccccaagaagggcaggggtttctgtctgctctgttcagtgaatcatgtgaagtgcttgcaaaggcagctttacacagtaggtgcttcatatgtgtctgtcgaatgaatgcgctccagccaacagctttccagggacctgtatgctgggcccccctgctagctcccggggacccctggtctgtacgggaatgccctgagacatccggcctcctacagatggagctggcgctgcccaaaccacgggcagcaaaggtgctttgtcggggaggagggggaggtagcaaacatgcacggctgcagccttgccaggaccaggcccaggctgagtgtgggcgtggctcacccatttagcccctccggtaacctctgagcttgggcctcttggcaccctgccacacaggcacacctgaggccaagagtgggggtatgtgcctcggacactgccagcaggcagctgaggtgacctgtccttcagcttctgtcatgatgagggcagcactgtggaccccagggcagccagggcccagtgcgaactggcagcacaaggtagcacaggtcgcagcccattaccatccaggctgcttggtcctgcgctcctgaactgtatgtgaagaccctcatgcttccgcagtcaggaggcagtgcacagacgctcccgagagccctgctagcctcagtcactttttcttggttaaagcaggcattgagaatctcaggctggggctgttacagatgcagcaaaaacagcaaatgccagaagctctgtggggggagatagagccctccacagggcaacggctgaactgcagccggcatcgatgactccatagtcaatgaccatgactccttttgcatacctcactccagattggc

SEQ ID NO: 259432 - DNA, 1557 bp, Homo sapiens
agacgagtcccagagccgaccgcggcgcctcggccgctcggcgcctgcgcagtgaagaccgcggcgagccgcgcgcatgcgtgcaggcccggagccccaggcgctggtggggcagaaacgcggcgccctgcgtcttctggttccgaggctggtcctcaccgtttccgctccggcggaagtgaggaggagggtccttcgacccgtgctgagctggatggaccgcgagacgcgcgccctcgccgacagccacttccgaggcctgggggtcgatgtccccggcgtcggccaggctccgggccgggtagccttcgtctcggagccgggcgccttctcctacgccgactttgtgcggggcttcttgctgcccaacctgccctgcgtgttttccagcgccttcacgcagggctggggcagccggcggcgctgggtgacgcccgcggggaggcccgacttcgaccacctgctacggacctacggagacgtggttgtaccagttgcaaactgtggggtccaggaatacaactcgaaccccaaagagcacatgactctcagagactacatcacctactggaaagagtacatacaggcgggctactcctctcccaggggctgtctctacctcaaagactggcacttgtgcagggactttccggtggaggacgttttcaccctgcctgtgtacttctcgtccgactggctgaatgagttctgggatgcactggatgtggatgactaccgctttgtctacgcggggcctgcgggcagctggtccccgttccatgctgacatcttccgctccttcagctggtctgtcaatgtctgtgggaggaagaagtggctcctcttccccccagggcaggaagaggccctgcgggaccgccacggcaacctgccctacgacgtgacctccccagcactctgcgacacacacctgcacccacggaaccagcttgctggcccacccttggagatcacgcaggaagcgggcgagatggtgtttgtgcccagtggctggcaccaccaggtgcacaacctggatgacaccatctccatcaaccacaactgggtcaatggcttcaacctggccaacatgtggcgcttcttgcagcaggagctatgcgccgtgcaggaggaggtcagcgagtggagggactccatgcccgactggcaccaccactgccaggtcatcatgaggtcctgctcgggcatcaactttgaagagttttaccacttcctcaaggtcatcgctgagaagaggctcctggtcctgagggaggcagccgctgaggacggtgctgggttgggtttcgaacaggcagcctttgatgttgggcgcatcacagaggtgctggcctccttggttgcgcaccccgacttccagagagtggacaccagcgcgttctcaccacagcccaaagagctgctgcagcagctgagagaggctgttgatgctgctgcggccccatagcacctgtcgtgaggatagaaggacgggtggaagagaggcagcctcctgctccggggcccttccagaaataaagaccgccctccctgtga

SEQ ID NO: 259433 - DNA, 3194 bp, Homo sapiens
aggctgggtggatcggccgaaggttccgaggcctgggggtcgatgtccccggcgtcggccaggctccgggccgggtagccttcgtctcggagccgggcgccttctcctacgccgactttgtgcggggcttcttgctgcccaacctgccctgcgtgttttccagcgccttcacgcagggctggggcagccggcggcgctgggtgacgcccgcggggaggcccgacttcgaccacctgctacggacctacggagacgtggttgtaccagttgcaaactgtggggtccaggaatacaactcgaaccccaaagagcacatgactctcagagactacatcacctactggaaagagtacatacaggcgggctactcctctcccaggggctgtctctacctcaaagactggcacttgtgcagggactttccggtggaggacgttttcaccctgcctgtgtacttctcgtccgactggctgaatgagttctgggatgcactggatgtggatgactaccgctttgtctacgcggggcctgcgggcagctggtccccgttccatgctgacatcttccgctccttcagctggtctgtcaatgtctgtgggaggaagaagtggctcctcttccccccagggcaggaagaggccctgcgggaccgccacggcaacctgccctacgacgtgacctccccagcactctgcgacacacacctgcacccacggaaccagcttgctggcccacccttggagatcacgcaggaagcgggcgagatggtgtttgtgcccagtggctggcaccaccaggtgcacaacctggatgacaccatctccatcaaccacaactgggtcaatggcttcaacctggccaacatgtggcgcttcttgcagcaggagctatgcgccgtgcaggaggaggtcagcgagtggagggactccatgcccgactggcaccaccactgccaggtcatcatgaggtcctgctcgggcatcaactttgaagagttttaccacttcctcaaggtcatcgctgagaagaggctcctggtcctgagggaggcagccgctgaggacggtgctgggttgggtttcgaacaggcagcctttgatgttgggcgcatcacagaggtgctggcctccttggttgcgcaccccgacttccagagagtggacaccagcgcgttctcaccacagcccaaagagctgctgcagcagctgagagaggctgttgatgctgctgcggccccatagcacctgtcgtgaggatagaaggacgggtggaagagaggcagcctcctgctccggggcccttccagaaataaagaccgccctccctgtgacctggggcccacccctgtcgaggcttgtggcctggctgttcatggccactgcctgggtgcctgttttcaggtgaggcccaatgaggtcagggacccaagatgggatgtggcccttctgacctgcagcaggcctgctgggagctcggagatggtgccaggacctggctcttttgggggccctgcctccttaggccaggacgcctgagctgacaggagtctgtgtctggtgtgccttctctggtggctcctcttaataggccagccctgtcccctcgtctcaggccattggaccacccctggctctgccctgtgggttcagggaggggttggagcagtgctgggcaagctcaccagggcctccaggcagggctggggttggcctccatcacctccaggtgatgggctgtggaaccagcggcctgcgccttcctctgggtacccagagtggagggctgggttgggctggcctttgccacctccctgcctttgcagggcctgtggacagctggagaggccacagatggggtggaatcccatctgctgctgaatcctcacctgggcctgagggactgtgcctgctgtgcactcacagctgggtcttcccaaggatgctgttctcaggagtggtgggtccccagcccctcttcacactgggtatgatggaggtgtgggcgggctcgtccaggccgatcaaggcacagcagtgagcagcggaggcctgtggtggggaatggactctcgtgggatcctcttgcagaggatgccccaggcctgaaccctctagtggatccacagtttgtggagactggcactctcccagccctgtccttgaccgagagtccagcattttttcagttggcccctggttggctgcctcaccccagcaggggaggaggcatccgaatccacagggacggcacgtgccatggctatgcacattgcctgcccgtggcatcaactggggccgctggcacttgtctaggatggaagcccccaagaagggcaggggtttctgtctgctctgttcagtgaatcatgtgaagtgcttgcaaaggcagctttacacagtaggtgcttcatatgtgtctgtcgaatgaatgcgctccagccaacagctttccagggacctgtatgctgggcccccctgctagctcccggggacccctggtctgtacgggaatgccctgagacatccggcctcctacagatggagctggcgctgcccaaaccacgggcagcaaaggtgctttgtcggggaggagggggaggtagcaaacatgcacggctgcagccttgccaggaccaggcccaggctgagtgtgggcgtggctcacccatttagcccctccggtaacctctgagcttgggcctcttggcaccctgccacacaggcacacctgaggccaagagtgggggtatgtgcctcggacactgccagcaggcagctgaggtgacctgtccttcagcttctgtcatgatgagggcagcactgtggaccccagggcagccagggcccagtgcgaactggcagcacaaggtagcacaggtcgcagcccattaccatccaggctgcttggtcctgcgctcctgaactgtatgtgaagaccctcatgcttccgcagtcaggaggcagtgcacagacgctcccgagagccctgctagcctcagtcactttttcttggttaaagcaggcattgagaatctcaggctggggctgttacagatgcagcaaaaacagcaaatgccagaagctctgtggggggagatagagccctccacagggcaacggctgaactgcagccggcatcgatgactccatagtcaatgaccatgactccttttgcatacctcactccagattggc

SEQ ID NO: 259434 - DNA, 3132 bp, Homo sapiens
gcggccgcagaccccgggcggggaggaaaggccggcgggacccaggcccgggaggcccccgcctagagaggggcaccagggagggtgagggaggccaggcgcgtggcccctggagagttcctctgcagacggtttggagtgaggacggggcccagggagatggcatggaccgtgcctttcatttcaggagacgtggttgtaccagttgcaaactgtggggtccaggaatacaactcgaaccccaaagagcacatgactctcagagactacatcacctactggaaagagtacatacaggcgggctactcctctcccaggggctgtctctacctcaaagactggcacttgtgcagggactttccggtggaggacgttttcaccctgcctgtgtacttctcgtccgactggctgaatgagttctgggatgcactggatgtggatgactaccgctttgtctacgcggggcctgcgggcagctggtccccgttccatgctgacatcttccgctccttcagctggtctgtcaatgtctgtgggaggaagaagtggctcctcttccccccagggcaggaagaggccctgcgggaccgccacggcaacctgccctacgacgtgacctccccagcactctgcgacacacacctgcacccacggaaccagcttgctggcccacccttggagatcacgcaggaagcgggcgagatggtgtttgtgcccagtggctggcaccaccaggtgcacaacctggatgacaccatctccatcaaccacaactgggtcaatggcttcaacctggccaacatgtggcgcttcttgcagcaggagctatgcgccgtgcaggaggaggtcagcgagtggagggactccatgcccgactggcaccaccactgccaggtcatcatgaggtcctgctcgggcatcaactttgaagagttttaccacttcctcaaggtcatcgctgagaagaggctcctggtcctgagggaggcagccgctgaggacggtgctgggttgggtttcgaacaggcagcctttgatgttgggcgcatcacagaggtgctggcctccttggttgcgcaccccgacttccagagagtggacaccagcgcgttctcaccacagcccaaagagctgctgcagcagctgagagaggctgttgatgctgctgcggccccatagcacctgtcgtgaggatagaaggacgggtggaagagaggcagcctcctgctccggggcccttccagaaataaagaccgccctccctgtgacctggggcccacccctgtcgaggcttgtggcctggctgttcatggccactgcctgggtgcctgttttcaggtgaggcccaatgaggtcagggacccaagatgggatgtggcccttctgacctgcagcaggcctgctgggagctcggagatggtgccaggacctggctcttttgggggccctgcctccttaggccaggacgcctgagctgacaggagtctgtgtctggtgtgccttctctggtggctcctcttaataggccagccctgtcccctcgtctcaggccattggaccacccctggctctgccctgtgggttcagggaggggttggagcagtgctgggcaagctcaccagggcctccaggcagggctggggttggcctccatcacctccaggtgatgggctgtggaaccagcggcctgcgccttcctctgggtacccagagtggagggctgggttgggctggcctttgccacctccctgcctttgcagggcctgtggacagctggagaggccacagatggggtggaatcccatctgctgctgaatcctcacctgggcctgagggactgtgcctgctgtgcactcacagctgggtcttcccaaggatgctgttctcaggagtggtgggtccccagcccctcttcacactgggtatgatggaggtgtgggcgggctcgtccaggccgatcaaggcacagcagtgagcagcggaggcctgtggtggggaatggactctcgtgggatcctcttgcagaggatgccccaggcctgaaccctctagtggatccacagtttgtggagactggcactctcccagccctgtccttgaccgagagtccagcattttttcagttggcccctggttggctgcctcaccccagcaggggaggaggcatccgaatccacagggacggcacgtgccatggctatgcacattgcctgcccgtggcatcaactggggccgctggcacttgtctaggatggaagcccccaagaagggcaggggtttctgtctgctctgttcagtgaatcatgtgaagtgcttgcaaaggcagctttacacagtaggtgcttcatatgtgtctgtcgaatgaatgcgctccagccaacagctttccagggacctgtatgctgggcccccctgctagctcccggggacccctggtctgtacgggaatgccctgagacatccggcctcctacagatggagctggcgctgcccaaaccacgggcagcaaaggtgctttgtcggggaggagggggaggtagcaaacatgcacggctgcagccttgccaggaccaggcccaggctgagtgtgggcgtggctcacccatttagcccctccggtaacctctgagcttgggcctcttggcaccctgccacacaggcacacctgaggccaagagtgggggtatgtgcctcggacactgccagcaggcagctgaggtgacctgtccttcagcttctgtcatgatgagggcagcactgtggaccccagggcagccagggcccagtgcgaactggcagcacaaggtagcacaggtcgcagcccattaccatccaggctgcttggtcctgcgctcctgaactgtatgtgaagaccctcatgcttccgcagtcaggaggcagtgcacagacgctcccgagagccctgctagcctcagtcactttttcttggttaaagcaggcattgagaatctcaggctggggctgttacagatgcagcaaaaacagcaaatgccagaagctctgtggggggagatagagccctccacagggcaacggctgaactgcagccggcatcgatgactccatagtcaatgaccatgactccttttgcatacctcactccagattggc

SEQ ID NO: 259435 - DNA, 3026 bp, Homo sapiens
tcaggctaggtagaggcccgtgttaatcggccgaggcgccgcggggagtgcctgacttcgaccacctgctacggacctacggagacgtggttgtaccagttgcaaactgtggggtccaggaatacaactcgaaccccaaagagcacatgactctcagagactacatcacctactggaaagagtacatacaggcgggctactcctctcccaggggctgtctctacctcaaagactggcacttgtgcagggactttccggtggaggacgttttcaccctgcctgtgtacttctcgtccgactggctgaatgagttctgggatgcactggatgtggatgactaccgctttgtctacgcggggcctgcgggcagctggtccccgttccatgctgacatcttccgctccttcagctggtctgtcaatgtctgtgggaggaagaagtggctcctcttccccccagggcaggaagaggccctgcgggaccgccacggcaacctgccctacgacgtgacctccccagcactctgcgacacacacctgcacccacggaaccagcttgctggcccacccttggagatcacgcaggaagcgggcgagatggtgtttgtgcccagtggctggcaccaccaggtgcacaacctggatgacaccatctccatcaaccacaactgggtcaatggcttcaacctggccaacatgtggcgcttcttgcagcaggagctatgcgccgtgcaggaggaggtcagcgagtggagggactccatgcccgactggcaccaccactgccaggtcatcatgaggtcctgctcgggcatcaactttgaagagttttaccacttcctcaaggtcatcgctgagaagaggctcctggtcctgagggaggcagccgctgaggacggtgctgggttgggtttcgaacaggcagcctttgatgttgggcgcatcacagaggtgctggcctccttggttgcgcaccccgacttccagagagtggacaccagcgcgttctcaccacagcccaaagagctgctgcagcagctgagagaggctgttgatgctgctgcggccccatagcacctgtcgtgaggatagaaggacgggtggaagagaggcagcctcctgctccggggcccttccagaaataaagaccgccctccctgtgacctggggcccacccctgtcgaggcttgtggcctggctgttcatggccactgcctgggtgcctgttttcaggtgaggcccaatgaggtcagggacccaagatgggatgtggcccttctgacctgcagcaggcctgctgggagctcggagatggtgccaggacctggctcttttgggggccctgcctccttaggccaggacgcctgagctgacaggagtctgtgtctggtgtgccttctctggtggctcctcttaataggccagccctgtcccctcgtctcaggccattggaccacccctggctctgccctgtgggttcagggaggggttggagcagtgctgggcaagctcaccagggcctccaggcagggctggggttggcctccatcacctccaggtgatgggctgtggaaccagcggcctgcgccttcctctgggtacccagagtggagggctgggttgggctggcctttgccacctccctgcctttgcagggcctgtggacagctggagaggccacagatggggtggaatcccatctgctgctgaatcctcacctgggcctgagggactgtgcctgctgtgcactcacagctgggtcttcccaaggatgctgttctcaggagtggtgggtccccagcccctcttcacactgggtatgatggaggtgtgggcgggctcgtccaggccgatcaaggcacagcagtgagcagcggaggcctgtggtggggaatggactctcgtgggatcctcttgcagaggatgccccaggcctgaaccctctagtggatccacagtttgtggagactggcactctcccagccctgtccttgaccgagagtccagcattttttcagttggcccctggttggctgcctcaccccagcaggggaggaggcatccgaatccacagggacggcacgtgccatggctatgcacattgcctgcccgtggcatcaactggggccgctggcacttgtctaggatggaagcccccaagaagggcaggggtttctgtctgctctgttcagtgaatcatgtgaagtgcttgcaaaggcagctttacacagtaggtgcttcatatgtgtctgtcgaatgaatgcgctccagccaacagctttccagggacctgtatgctgggcccccctgctagctcccggggacccctggtctgtacgggaatgccctgagacatccggcctcctacagatggagctggcgctgcccaaaccacgggcagcaaaggtgctttgtcggggaggagggggaggtagcaaacatgcacggctgcagccttgccaggaccaggcccaggctgagtgtgggcgtggctcacccatttagcccctccggtaacctctgagcttgggcctcttggcaccctgccacacaggcacacctgaggccaagagtgggggtatgtgcctcggacactgccagcaggcagctgaggtgacctgtccttcagcttctgtcatgatgagggcagcactgtggaccccagggcagccagggcccagtgcgaactggcagcacaaggtagcacaggtcgcagcccattaccatccaggctgcttggtcctgcgctcctgaactgtatgtgaagaccctcatgcttccgcagtcaggaggcagtgcacagacgctcccgagagccctgctagcctcagtcactttttcttggttaaagcaggcattgagaatctcaggctggggctgttacagatgcagcaaaaacagcaaatgccagaagctctgtggggggagatagagccctccacagggcaacggctgaactgcagccggcatcgatgactccatagtcaatgaccatgactccttttgcatacctcactccagattggc

SEQ ID NO: 259436 - DNA, 1509 bp, Homo sapiens
agacgagtcccagagccgaccgcggcgcctcggccgctcggcgcctgcgcagtgaagaccgcggcgagccgcgcgcatgcgtgcaggcccggagccccaggcgctggtggggcagaaacgcggcgccctgcgtcttctggttccgaggctggtcctcaccgtttccgctccggcggaagtgaggaggagggtccttcgacccgtgctgagctggatggaccgcgagacgcgcgccctcgccgacagccacttccgaggcctgggggtcgatgtccccggcgtcggccaggctccgggccgggtagccttcgtctcggagccgggcgccttctcctacgccgactttgtgcggggcttcttgctgcccaacctgccctgcgtgttttccagcgccttcacgcagggctggggcagccggcggcgctgggtgacgcccgcggggaggcccgacttcgaccacctgctacggacctacggagacgtggttgtaccagttgcaaactgtggggtccaggaatacaactcgaaccccaaagagcacatgactctcagagactacatcacctactggaaagagtacatacaggcgggctactcctctcccaggggctgtctctacctcaaagactggcacttgtgcagggactttccggtggaggacgttttcaccctgcctgtgtacttctcgtccgactggctgaatgagttctgggatgcactggatgtggatgactaccgctttgtctacgcggggcctgcgggcagctggtccccgttccatgctgacatcttccgctccttcagctggtctgtcaatgtctgtgggaggaagaagtggctcctcttccccccagggcaggaagaggccctgcgggaccgccacggcaacctgccctacgacgtgacctccccagcactctgcgacacacacctgcacccacggaaccagcttgctggcccacccttggagatcacgcaggaagcgggcgagatggtgtttgtgcccagtggctggcaccaccaggtgcacaacctggatgacaccatctccatcaaccacaactgggtcaatggcttcaacctggccaacatgtggcgcttcttgcagcaggagctatgcgccgtgcaggaggaggtcatcatgaggtcctgctcgggcatcaactttgaagagttttaccacttcctcaaggtcatcgctgagaagaggctcctggtcctgagggaggcagccgctgaggacggtgctgggttgggtttcgaacaggcagcctttgatgttgggcgcatcacagaggtgctggcctccttggttgcgcaccccgacttccagagagtggacaccagcgcgttctcaccacagcccaaagagctgctgcagcagctgagagaggctgttgatgctgctgcggccccatagcacctgtcgtgaggatagaaggacgggtggaagagaggcagcctcctgctccggggcccttccagaaataaagaccgccctccctgtga

SEQ ID NO: 259437 - DNA, 1943 bp, Homo sapiens
agacgagtcccagagccgaccgcggcgcctcggccgctcggcgcctgcgcagtgaagaccgcggcgagccgcgcgcatgcgtgcaggcccggagccccaggcgctggtggggcagaaacgcggcgccctgcgtcttctggttccgaggctggtcctcaccgtttccgctccggcggaagtgaggaggagggtccttcgacccgtgctgagctggatggaccgcgagacgcgcgccctcgccgacagccacttccgaggcctgggggtcgatgtccccggcgtcggccaggctccgggccgggtagccttcgtctcggagccgggcgccttctcctacgccgactttgtgcggggcttcttgctgcccaacctgccctgcgtgttttccagcgccttcacgcagggctggggcagccggcggcgctgggtgacgcccgcggggaggcccgacttcgaccacctgctacggacctacggagacgtggttgtaccagttgcaaactgtggggtccaggaatacaactcgaaccccaaagagcacatgactctcagagactacatcacctactggaaagagtacatacaggcgggctactcctctcccaggggctgtctctacctcaaagactggcacttgtgcagggactttccggtggaggacgttttcaccctgcctgtgtacttctcgtccgactggctgaatgagttctgggatgcactggatgtggatgactaccgctttgtctacgcggggcctgcgggcagctggtccccgttccatgctgacatcttccgctccttcagctggtctgtcaatgtctgtgggaggaagaagtggctcctcttccccccagggcaggaagaggccctgcgggaccgccacggcaacctgccctacgacgtgacctccccagcactctgcgacacacacctgcacccacggaaccagcttgctggcccacccttggagatcacgcaggaagcgggcgagatggtgtttgtgcccagtggctggcaccaccaggtgcacaacctggtaatgtgctgcttctcctgccccctatcaggggccttcctgcaggaagacggcagcaccacctccccactctcccagccagagctgggctggaatggggtggctcatgggtgaggctgaccccttcacaaggtggtgtcgctgaggcctagcctctgtttcacccactgccggtccctgggtctacttgctctgggttcactgtggcctgaggtggtccgagcccgccacccacttccctgctgagcaagccctgctgggagacaggagggccctcttggctgcagagggctggaccccacagtgggttcctggcgcaggagatgtgggttggtcagggggcacctgccatgggctcaggcctgcctgcactgtgccccttccaggatgacaccatctccatcaaccacaactgggtcaatggcttcaacctggccaacatgtggcgcttcttgcagcaggagctatgcgccgtgcaggaggaggtcagcgagtggagggactccatgcccgactggcaccaccactgccaggtcatcatgaggtcctgctcgggcatcaactttgaagagttttaccacttcctcaaggtcatcgctgagaagaggctcctggtcctgagggaggcagccgctgaggacggtgctgggttgggtttcgaacaggcagcctttgatgttgggcgcatcacagaggtgctggcctccttggttgcgcaccccgacttccagagagtggacaccagcgcgttctcaccacagcccaaagagctgctgcagcagctgagagaggctgttgatgctgctgcggccccatagcacctgtcgtgaggatagaaggacgggtggaagagaggcagcctcctgctccggggcccttccagaaataaagaccgccctccctgtga

SEQ ID NO: 259438 - DNA, 228 bp, Homo sapiens
acccaaaataaggaaaacaaggatagatttttatagagaaaaatatcgctatcccctgttatcttctttgagctgtggaatcacctccacacatgttcacaggaatcccaacagagctggcatgctttctcagctttcttccctgtcctcccttttgtggacccagtgtgactaaatgagatggtgcatttcagactcagattcaataaaaggttcctgagcatctcc

SEQ ID NO: 259439 - DNA, 416 bp, Homo sapiens
tttccctggagaaaactgtcactcatcaagaggatgtccatggcaatctaagtggagattttcccaaagggactacaaatgtcagaacccaggtgatctgacatcaatgaatcttcctgaaagccccttgggatgtcatctgatgacatgagttagcattggtggactagggttggaagatctgacttgagagccaatttctctgtgtacactagtcagctgacctaaggtgtgtcattgccttctctgagtctcaagctcctcatctgtaaaatagaaagaatatggccttaccctgacagcatattgtaaaaattgatgagatatgatttaactataaatgtgctatgaatttaaccatgcagtttaatttatgtaactgtgaattgtagactcttatttaaacatgtggtatt

SEQ ID NO: 259440 - DNA, 317 bp, Homo sapiens
tattgctgcctcatataatgtataagttatttattatccatttcttcctttttaagataacttgtgggtatgtctgctcctagtaccccagtgccgagaatctggcctggcatgccatttcagaaatccctgctgaatgaacttcatgggagtggcacacctgagatgctataactgctccagaacccaccaggcttcactaacatcagcaagtgcttattcagtgtgtttgcatgctgaacatacaatgacagactgttcatgttccccagaaacaaaattaagtaatccaatgcaggcaagaaaactaaattgga

SEQ ID NO: 259441 - DNA, 519 bp, Homo sapiens
cctctgcatagatctttctaagtgatttattagggatacttttttgattgaggattttaatggagggtgatgaaggtaagggacagagtctctaagccaagaaagtcagactctgccttcaaatctggctccaactgcaatctatgtgagagcaggccatttaccctctttgagcctctgtttccttggtagtgaacaaggatgacaatgtattaacttcataaggttgttatgatcatcagtatcaaataatacatattgaacaagtagattgaccctggcacactgtaaaaactcaacaaatgtatttgcagttattgttacatataaaaataacttactacaaaatcgaccccatcttctgaatgccaagcctttccccccacttattatataatttgtcaaattcaaattattaaactgaaagagctttacatttttgataaagttatttacctttcaaatttcctggactcacttctcactggctagggaaaacgtttttctggttctcaagtg

SEQ ID NO: 259442 - DNA, 635 bp, Homo sapiens
ggggatgtgggaggcagacattaagggaagatgagggatggagctgcacaggaaaaagattgttttacaatgcacataaagccccccaggtaatctcttggtgctactctctgaagaatagataaaaagtctgtatgggtgaagtgatgactatcagttgcttctctcctctggtggttgatcttttctggtaacttgatgagatcctgagggagggtgtttaagacaattgcatttcttttggaagaaaacattttggtcaggtaaggaaatttcagagagagtcctttcttaaacttggttggggtcggaaagaccaggttagagagaccttgattctgaggcaacttctaaggcatctcagcatgtgccaatctttggggtatcactttctgagcctcagtagtacactagggtaagtgataatgtttcaatagcttgagtgtattaaatgcaatttcaacttatgatattttcaattgatgatgtgttcattgggatgtaaccccatcataagacaagaaacatctgtattagagaagttctgattccttgcatccttaatgcatttggctatgagaaataaaaatacagtactaagccctccaattgactgacggaccccctcttggcca

SEQ ID NO: 259443 - DNA, 581 bp, Homo sapiens
cttgcaggattgtttgtaaagattgaaagcaacatatttaattgtgcttgcgtggttctgggcacagaataggcacccgagtgtaggggcccctgaactttaaagttcattactttcatggtaattcctcctttggaatatatagcctgggaacatttgtctctagaccttgtttcagtttcttttaatgactccctttaggctctgcttcatggccaatgcaagattatggatcacctaaagagtagactaaaagtactattgtctagtaacttcaagtttgtaggttaactcactgtgaatcaaaagcttttaaaaatcttttgtgtggtcatagtttgtagtgtcttgtacctctcatctcagaagcaattgattcatagaaaaaattatttaggatttcagattaaagatgaagaactctttcaataagaaggaactgatttggttggattatttgtttctttcacccctgagttttcatggaaatcaggtttaaaaggttagaagcagttggttttcagcattgggaaagcttatctgatcaggcatgcgaagtggcctatgtcggatttctgagc

SEQ ID NO: 259444 - DNA, 161 bp, Homo sapiens
tataaaatatgctaccttgatctttatccttcttccaaactgctcaatcaaaattaattcatctcttccccttccttcctacagcaacatgttagagtcgttcttggagagcttatccacttcttctgccagttacattctcttgcgtgcatacaccaacc

SEQ ID NO: 259445 - DNA, 495 bp, Homo sapiens
aggttccagtgattctcctgcctcagcctcccaagtagctttggattagaggcatgtgccaccacgcccggctaattttatttttttttggtagagacggggtttctccatgttggtcaggctggtttcgagctcccgacctcaagtgatccgctcacctcggcctcccaaagtgctgggattacaggaaaaattttactttcatgaaaaaattcccaaactttatgcttcctctttttaatttaaattgttggtgagcaatggtatttaaaggacaagacaccttgaatgaatattactagtgttttagcaactcaaacattggctaaagggtatttgaaagttgtatgtctgcattaatgcaacttcagatttgtgtgtgtgtggatttgttcactgcttagtgatggtaaagtcaagagttttctttaattactctccatgaaaagatttttttctcttttgtgtgcttctggattcaattgcctgttttta

SEQ ID NO: 259446 - DNA, 281 bp, Homo sapiens
ttacgaggccagtatgtggctgggagggtttccaatcccctgaactgctgtcattggctgcattcacagattcatctctccctattacttatgagtctgccacacacaaaaactagtaacaagtacaaccctgaaaacacaggtagcaaaacaagtgaaagtgaaaaatccagtcttgagggcttcatttcaacacaaacctattcatgtgacaccagcttaggttggcatctgcacaagttaacctcatgcttgtgcaccagggcacagggaaaggaaag

SEQ ID NO: 259447 - DNA, 811 bp, Homo sapiens
ccagaaatggctccccagagaagctgggacagattcaaccctgccagcggatgccattgctaggaccgtgatgacacacatagaaacatgcacacagcgatccacctcacccagcccttcacatgagcaaggcgtgctgtgtaaaagaccccctgaattctcacaccaaccctgggacaaagctaccatcgttattcccgttttacaagcggggagacacaagcacagggcttcagtaactggcccgcggcactgaggccagcgagggcagagtcaggcgcaggcccggaggtcagttccactccggctgtgcttttcttctggtgccctgttttggcatttgtgtcatagttatactgatgcctaattcccaggctgcaatgaggcttagataagacaactgaatatcttaataaaaatcacaaactggctgacgctgcagatctgtaggagaagaggaagctcgttgctttgggggaatagcacatgctcccatttccccagcccactctttaagcaaagggaggtcatcctgtgatcacacaccttgtagcccagtatgagcccattctggtcctgttccggcacggatgtccatgtcagtaaaatctgggtcgagctgacagcctcggctgacacgttctcaggggcggctgaaggaactgcaaagaaccaatgaagtagattagcatccaaaatctagagtgtctacatacaaagatccagctttcacccaaataatcaagttgtccttgaaatagcaacgtattctaagcattttgtagtgatcagattaaacctacaggagtat

SEQ ID NO: 259448 - DNA, 1890 bp, Homo sapiens
ccggcggctgttgtcgggcctccagcgggcggggccgttggcggagcagagcggaggcgcagccgggcggagggcccacgagggctcagccttcccggtcagcggtggtgacggtatcccagagtgccagagaaccgttgcttttccgagttgctcttcttccaggctccgttggtggtcggcatggcccgtggaaatcaacgagaacttgcccgccagaaaaacatgaagaaaacccaggaaattagcaagggaaagaggaaagaggatagcttgactgcctctcagagaaagcagagttctggaggccagaaatctgagagcaagatgtcagctgggccacacctccctctgaaggctccaagggagaatccttgctttcctcttccagctgctggtggctccaggtattacttggcttatggcagcataactcctatctctgcctttgtctttgtggtcttcttttctgtcttcttcccttctttttatgaggacttttgctgttggatttaggttccattctaacctaggatgatctcatttggaaatccttaatttcatctacaaaaactgttttcccaaataggtcacattcacgcatatcagatggacagatgtatcattttggggtccaccattcaacccactacaaggagttttttaaacaaaaataggaaacttagatgtaacttagcacttttttttttttttttggagatggagtctcactctgtcaccagactggagtgcagtggcgccatctcagctccatgcaacctctgcctcctgggttcaagcagttctcttgcctcagcctcctgggtagctgggattacaggcacgcgctgccacacccaggtaatttatttattttttttttgagacagagtctcgcactgttgcccaggctggactgcagtggcgtgatctctgctcactgcaacctccgcctcccgggttcaagcgattctccagcctcagcttcctgagtagatgggattacaggcgcctgccaccacgcccagctaatttttttgtattcttagtagagatggggtttcaccatgttggccaggctggtctccatctcctgacctcgtgattcacccgcctcggcctcccaaagtgctgggattacaggcgtgagtcacagcccccggccataatttagcactttaaaaaataatagccatgttgggccaggcgtggtggctcatgcctgtaatctgagcactttgggagaccaaggcgggtagatcccttgtgcccaggagttcaagaccagcctgggcaacatggcgaaaccccatttctactaaaaatacaaaaattagctggggcgaggggataggccgagttccgggtgtaagggggccattagggagagcagagcgaggcagctgatcttccggattgggggccttgcccggaagctggacctcacggagatgaaacggaagatgcacgaggatatgatctccatacagaactttctcatctacgtggccctgctgcgagtcactccatttatcttaaagaaattggacagcatatgaagattggacatcacatgtgaatgcatgatatgaagagcctggttacagtttctactgttctctgcaagtaaataggcccagaaaggtataagagactctttgaatggacataaaaattctgcttgttaagaacaagttgagctctggtaactgatcttaatagctaaaatataaaaatatttgggaagtctgaaatgaggtctcctggccctggtgtgcccttaatgcctgtgacagttggcctctgtgaatattggtataattgtaaataatgtcaaactccattttctagcaagtattaataattaagggaagtatgtctgaaatggca

SEQ ID NO: 259449 - DNA, 1902 bp, Homo sapiens
aggcggagtccggctggagaatccccctgggtcgcgcagtgcggggatccccgcttcagtcggcagagagagagctcgcgggtggttccggtccggcttttcaggccggacgggtgcctgcccctcaggtgcgagtttgtgcggtaaagaacacaccccggagatgtggacacggccgccccaggagggtccttgtttggaggtggaaatcaacgagaacttgcccgccagaaaaacatgaagaaaacccaggaaattagcaagggaaagaggaaagaggatagcttgactgcctctcagagaaagcagagttctggaggccagaaatctgagagcaagatgtcagctgggccacacctccctctgaaggctccaagggagaatccttgctttcctcttccagctgctggtggctccaggtattacttggcttatggcagcataactcctatctctgcctttgtctttgtggtcttcttttctgtcttcttcccttctttttatgaggacttttgctgttggatttaggttccattctaacctaggatgatctcatttggaaatccttaatttcatctacaaaaactgttttcccaaataggtcacattcacgcatatcagatggacagatgtatcattttggggtccaccattcaacccactacaaggagttttttaaacaaaaataggaaacttagatgtaacttagcacttttttttttttttttggagatggagtctcactctgtcaccagactggagtgcagtggcgccatctcagctccatgcaacctctgcctcctgggttcaagcagttctcttgcctcagcctcctgggtagctgggattacaggcacgcgctgccacacccaggtaatttatttattttttttttgagacagagtctcgcactgttgcccaggctggactgcagtggcgtgatctctgctcactgcaacctccgcctcccgggttcaagcgattctccagcctcagcttcctgagtagatgggattacaggcgcctgccaccacgcccagctaatttttttgtattcttagtagagatggggtttcaccatgttggccaggctggtctccatctcctgacctcgtgattcacccgcctcggcctcccaaagtgctgggattacaggcgtgagtcacagcccccggccataatttagcactttaaaaaataatagccatgttgggccaggcgtggtggctcatgcctgtaatctgagcactttgggagaccaaggcgggtagatcccttgtgcccaggagttcaagaccagcctgggcaacatggcgaaaccccatttctactaaaaatacaaaaattagctggggcgaggggataggccgagttccgggtgtaagggggccattagggagagcagagcgaggcagctgatcttccggattgggggccttgcccggaagctggacctcacggagatgaaacggaagatgcacgaggatatgatctccatacagaactttctcatctacgtggccctgctgcgagtcactccatttatcttaaagaaattggacagcatatgaagattggacatcacatgtgaatgcatgatatgaagagcctggttacagtttctactgttctctgcaagtaaataggcccagaaaggtataagagactctttgaatggacataaaaattctgcttgttaagaacaagttgagctctggtaactgatcttaatagctaaaatataaaaatatttgggaagtctgaaatgaggtctcctggccctggtgtgcccttaatgcctgtgacagttggcctctgtgaatattggtataattgtaaataatgtcaaactccattttctagcaagtattaataattaagggaagtatgtctgaaatggca

SEQ ID NO: 259450 - DNA, 499 bp, Homo sapiens
gcaatattgttatggcctcttgaaaaatataatctgccataggacttatgttaagtaagtccactatcagcagctgaggaaatccttgtagggtattggtagccaagggccttctgccttcagtatcatcccaccccagcagctgaaggatgtcttttatttttctttatctaggcttcagagcgcctaccatatgtattttcctattctgtgttatgcataatttttttgtccctatgtttaacaatattgagagtaagcaaaaataacttagttacttgctccagaacatccttttccctaaagataagacagtgaacaaattaaaatagcttggtcatcacagcgcacttcaagacccttggtccactggtccctccaatccaaaattataatatcaaaacctctacccaatcccaagcagttccctatcttgcaaagcctgcctcaaaaatcacctacctcagtccttaaaaccccataatatcctcctggaatt

SEQ ID NO: 259451 - DNA, 319 bp, Homo sapiens
cccaagggaatggctgaattggcgtcgtgcgtcttctagatatgttttctctggcagaccggggagcttccagaaagcacatcaacagatggaaaggcaaacccctcagccatgagatgttgccgaagtttactccaaacaaggaagtcgggaaaatcgccacgcccacttccttctagccactgcccccagcactggcctggagccccgatagtgtttcttctccactgtccctgccaggaaggtaattgtcaaagtcaccggaggctctatgatgtgaaatgtacaatcgaattagaactcgccccttaccaaccat

SEQ ID NO: 259452 - DNA, 667 bp, Homo sapiens
attttcccaaaataaataatcctgtgtcatcatgaggaagagctttgggatggggtggggtgagggccgagggaaaagtttgctggggacccatcacggggcatcacctcctccttttccttttcctctctcctgtccccacccactggccacacaagctagagctgggccatttgctagacagagggggtggtgtttacagtttcgtgaaaggcaatcgctaaccctcttgaccaaccatcacaccctgttgaatgtaacaggtaacatcctgcacacacattcagatctgagtacttgacagcaactgtttttaatttgcagatgatagttggtttcatgaaaacaaagatcttcctgcaaatcttgtaggttaaaactaaataattaactgcatgaaagtgaagtactcaaaatacaattggacatcagatatgctgatgaaaagaaactgagaagtgcacccagcagagccagctgccctgccctctccacaggggcctggggatgggaatcctaccctcagtgggatatggtgctggagctgtgggttggagcgatgttcatgggatacatgtgcagaacatgcaggtttgttaaataggtatacgtgtgccatggtggtttgctgcacccatcaacctgtcatctacatttggtatttctc

SEQ ID NO: 259453 - DNA, 415 bp, Homo sapiens
gtctcacctctcatgaactatgaaccaatattttaaataaaccccctaataaccccccagtcactttgggaatataataattacactgaactgaatgtgtgtgtgcatgtggatgttggaattgcttacttgttaaatactgatgtttaaaatacacgacaaatcttgtaaccctattttggcatatctttttcttcttctttttggtttttgtttaatatggaagtggacagtgcctctcttgacctctggaaggccctatgaaaacctgaaaccgaggcaaggtgacaaagtctggtcattcagcactaagggccgcctcagattacttctttacttagaaaaacaaaatgttgttgcaaaagattcagagtcacaaatattcttcccgggcctgtcagtttctgaattctta

SEQ ID NO: 259454 - DNA, 613 bp, Homo sapiens
caggaagagctcattagagcttcttacctcccaggccctctgccactcataccacatgccagcccaccctccatttcacagggccaccccactcccatctcacagaggcagatgccagggccaagaaagggtgggggaccatttgtagccacacagctggtgtggcatggccagtgtggccagcaagcagggagtgagaagctgctccactgatgggtgcccaagaccccgaggcaggcgcaggtgaccatagcctgagagctcctggcaacactggtctgcagaccagcagtccagcctccactcatatccacattggccagaaacaagagtggtgctgctacacatgacagagtaaaaactgaggacaagcctggttgaggttctggctgggactgcatgaagttaagagaccataagcctgaagtggctggtgtgtgtgatgcctcatccagaaaagggcaggggccaggcatctgaggccaagcacagggtgggattgggcctgctgggcccagcccagtgttgcccctcagggccccagagccccaggggagcaggcgggggccatgagggcttggcagccgcagagacaaaccagcactttccctcc

SEQ ID NO: 259455 - DNA, 217 bp, Homo sapiens
gtcaatatttatgcctagcaaccttgacaatatccttttaattaaaatcaatggagaaataaaacatgcattagaatgcacgtgggatcactcacctcacgagacagagaaggaagactctgatattatgcacgatgtgattatgacaagacgctggatcttctgtatgagacatgggttctggtatttgcaattagatctcttcttttgacggttg

SEQ ID NO: 259456 - DNA, 584 bp, Homo sapiens
tctgaacagtagtctcagcagtgggcttcaaatattaaataaaccatgctgtaaagagatgttctgtcttacaagctttcttgttccatttatagagcacagttcaagtaggtttagtgtaactcttaagagccctaaaagttttagaatggtaaatgagtattgtcttcaacttaaagccaccagccatgttagctcctcacaagagtcaacctgtcctttgaagctttaaagccaggcatttttcctccaacataaggtgatttcatctacattgaaaatatgttttcatatttgtttagtatagccatgttcatcaaacatcttaccttgatcttctggaaacttgctgcagcttataatcagcaattgcttttttaccttgtactttcatgttacagtgatggcttctttctttaaacctggtgaaccaactttttctaacttccaacttttcctctgcagcttcctcacctctctcagacttcatataatagaagaaacttagggccttgatctggattaggtgtcagcttaagggaatcttgtggctagtttgaccttctatccagaccattcaaact

SEQ ID NO: 259457 - DNA, 687 bp, Homo sapiens
ttggtgagacttgaggagtggtaggcataaattctgcattctgtttttgtcacaataatatttgttggctactaggaatctaaatggagaagtaaagttggcagacggtcatacaagctgtagcccagaaaacagatataagatgaaattaagaaactatcatagaatattgtattaagaacttattgtaggccaggcactgtcctgattactggaaataaaatggtgaagaaaatacatatgtgataggcagaattcttggctaccaaggtccctgctccctgatgtgtaatatcctcttcttgagtatgggtgggacctgtctatatgatgaatatagctcccataattaggatatgctatggagcagtggtccccaacctttttggcaccagagactggtttcatggaagacaatttttccatggattgggggtgggggatggtttggggatgaaaccgttccacttcaaatcatcataaggagcatgcaacctagatccctcacctgcgcagttcacaatagggttcatgcgctcctatgagactctaaggccactgctgatctgacaggaagcgaagctcaggtggtaggtaattttccctccaccactgctcacctcctgctgcgtggctgattccgggtctatggccagaggttggggaaccctgctatatagcacagtt

SEQ ID NO: 259458 - DNA, 597 bp, Homo sapiens
  misc_feature (454)..(454): n is a, c, g, or t
  misc_feature (468)..(468): n is a, c, g, or t
  misc_feature (503)..(503): n is a, c, g, or t
  misc_feature (512)..(512): n is a, c, g, or t
  misc_feature (534)..(535): n is a, c, g, or t
  misc_feature (544)..(544): n is a, c, g, or t
  misc_feature (567)..(567): n is a, c, g, or t
atccctgcatttctagtagttacttattcacagtgtcttaattcttcttttaatatgcttctgtgttctaataacaaattatctgagatttttgaaaattacaactttattgagatataatttacttactatacaagtcacccactgaaagcatatataattaaatggcttttagtgtattcacagagttgtgcaagcatcacaatcattttagagtattttcatcacccccaaaagaaagctcatacttggccagatgtgctggttcacacctataatcccagcactttggggtgccgaggtgggagggttgcttgagcccaggagttcgaaatcagcctgggagtttgaaatcagcctgggcaacatagtgaaaccccatctattgagggaggagaggagaggggaggtggttttttttttttttttttttttttttttttttttttttttntttttttttttttntttttttttttttttttttgttttttttttttttnttttttttntttttttttttttttttttttnnttttttttnttttttttttttttttgtttttntttttttttttttttttttttttttgtttt

SEQ ID NO: 259459 - DNA, 388 bp, Homo sapiens
tctttgcagatgggattcagttaaggatgttgagatgaggaaatcatcctgcattacccaggtgggcctcacatgcaatcacatgtatccttaaaagaggcagtcagagggagattcaacatgcatgcagaggaggaggtcatataaagatgggccagagagggatttgaagatgttggacctgaagattctgcttatgcagccacaagccaaagaatgctggtagaccccagaagctggaaaggaagaaacgggttctcctccagaacctccagagagagcgcagccctgccaacaccttgatttcaacccaatgatacctgattttggacttctgacctccagaattgtgagagaataaatttctgtggtttcaggcaaccaagtt

SEQ ID NO: 259460 - DNA, 915 bp, Homo sapiens
ggagggcggggtaagaggacggccgttccgggttccgcctgagcccgcaacgcagaatgaggaggcgggagcggcgcggtgagagagaggcggatgaaggggcgccgacttctcttccagggccatgcgcggcccacgacgccggggccccggaggacgaggacgacgaggagcaggcggtggcggcagctccccacgctcacaaggccactgcttccccgcctcccggctccgcccgccgcgccgccactgtcgcacggcatgctgggagcgagaggcggggtcggccccgccgggcctggggagagaggcgggtcctgtcggcggggcggggccgagagaggcggggccgatagcaggccgccccgccccccacggccccaggctcttggacggcgaagaggtctgggcgtagtagtgacgaatcctaagacaagggatctccactactgcggccacacacttttctcccaaacgcttcccggaaagcaccggagggctgggcagtcaggtgtaaacaggcgtccaatcaaggacctgcagtgtgggtggtgggggctggtgccctggggtgcgagcgcacacaggcgtgcccttggtttcacgtgcgccagttttcccactttctacgggggggagtggaaagtgaaaatagtaagatcgagaggtggatatccaccttcccaacctccacctgaaatgtgcccatcgagtcctagcaccttttaccatttcttcccaatgaaaaaaactaaacgatgtaagggaagggagtaccacgaccaccaaaccctgtcctctgcaatgtgaaatgtgctttgaagtcctctcaccctgaggcttgcccgccttctgctggtgaaagaagctgggggctaggcgcggtgggtcacgcctgtaatcccagcactttgg

SEQ ID NO: 259461 - DNA, 696 bp, Homo sapiens
aagagacctgaggaataataaaacactagaaaggaaatcactaaggaattatcagtagactttctgcaagcagtacatttgtataatttattactggatatataacaatatgatctcttttaaaatatacttatttcaatataacatacataaatgtacataaataatactttgtgtagttaatgagtctttacctactcaaaggaagaaagagaaggttatcagcatctagaaagcacactcctgccccctcccaattacagccttctcaaaatctaatccctatcagagggtctatcattaggaattaattctgattgttgaactttatacccaatgtgtacagagtgtgctttcttttgtgttggacttccttcactcatcgttatgtgtgggagatgcacccatgttgtgtgtggttgtagtgtattcattttcattgcaatgtaatattccactgaagaagaagtcgtgatttatgcattatactgttgagggccgtttgggatgcctacaataaataacagtgctataacatccttgttcctgtttctggtggattcatgcaaacatttctattgagtggaattctatttaggagtggaattactggctgacttagatcacattccccagaagcaagagtctgagatgggtcttactgtgcaagtgatttacagaaagggtgctctcagg

SEQ ID NO: 259462 - DNA, 432 bp, Homo sapiens
caatatttcttactgtaaattatcaaatcacttttgggtgcattgtcagtctttctgtacatggattcgtttcactgtggcaaaggcaacttgcagataagctgataaagattccagaactacaaatcaaactaggccctggagtagcagtaaaattccaaacccaaaggcccatccagtctgtccactacattcctatattgatgagagcagaacagacactcatgagagacatgacttctgcttcccccataactaagaagagagattaccatactgatgatctccctggaggtttcatagcaaggtttgacttgatgaattaattaataaagctaaatatcctgaagatttggtggaaatatgctttgacatttacatctaagtgttcatccgtgaaaatcaataaaatattttttcatgcagacccta

SEQ ID NO: 259463 - DNA, 106 bp, Homo sapiens
cattcaagggaccagtccgcactgacacctgcctccagattgcaacaattctctatgaagtgtgcattcagctgtatgctatttagcgctgtgttaattattattg

SEQ ID NO: 259464 - DNA, 221 bp, Homo sapiens
gacccagatcaagtttgactgaaaggcaaacaccattcccaactggctttaccatctgtctttccacagagacaactcacaggctataaagtgcttaacatttccttggcttcagaaggcactagggaaggagagcttaaggtaccattaaaaaaaaaaagaagaagaagaagagaagaagaaagaaaaccacatcttggttaaatgagtggctttgttgc

SEQ ID NO: 259465 - DNA, 701 bp, Homo sapiens
tatgaatgagggttatgcagcttcactttttggaaaccagggtgactagattactgaatttaactattgattagccacataatgatgaaaagggaatcttggcctgggtatcacacagtaatggataatctgcttcctggggctttgctttggtggctatggcagctgagttggcgtggtagatggatagatgggaaaggactgcagaagtcagcataatcctcaattaggataagccttatggttaattgaatgttgagtgtacaggttaaatcccattataacgaactccaggggactggccaaattattttgttgtactgggattagactttattaaatattgtttaaaacagtctttttgttagaggtgttagagattttggaaaaatttccatttattgtaacaatttgacaagttgttcatgaaccttccatctttaatgcttttacctttaaaaagaaaagaaagcatgttgagctgggcagtggcagagcatgtatatcacccctccacaccatgttttgagtagctcttggtttatgtcgacaacctaattagtttgttagtaagtactaccaccatctaagtgtggtcagaagaatgggaaattccccaggtttgcaggtgactggtgctgttaattttttctgtccccaacaacatgtatatatatttttaaatttaaccctgatcctta

SEQ ID NO: 259466 - DNA, 411 bp, Homo sapiens
gttcagaaaagtttgtgaatgttgacagacccttactgttgaaatgcctgtgtttggtgcatatacaaactaagaagtaagaatatttgtttaaattttctactgtgttacctctactcttgcaatactggatccccttaactcacagccgcagaccgtgggaagaccggagtttcaccttataatatcagacattaaatatctacttttatctatacagtacacatagaaggctatgtgactatttagaattcaatgtttgtttactagttcatctttagcttacatgttcattagttctgagtagaaccaagaaaaactaattgaagagtatatgcttatgtattatctcttgctgtgatttaaccaatcttgttacatgtattactaataaaagtcccagcttgaatg

SEQ ID NO: 259467 - DNA, 687 bp, Homo sapiens
ttccttcctttctttctttccttctttcttaaataaaactcttcatttgtctctaataaaaatctgaattttaagcagactcttggaccgctgactcaaatccatcaagtcattcaactttagcccctgtctcattctcagtagcatttcaaaattactgcttttctataaagcttcaagagttttcccaattcttgaacttcggcttcctcaacatgttttctattttataggagacatcatggagagaataaatggattgcaaacttttctaggtattttccactgctttctgcaattaatttattaaccacttttttcaaggcacttgcctgctcctcttggatcatgatttccatcttcttcttccggatttgatgaatctgtgtgtgctgagcataagaggactttcaaatttgattgttgcaattcttagtaaaaccagcactgaagagatgaagcaaataatcattggtagtcttaacatcaacatcagcttcaaaatggtctgtcattttttaaaaattgataatggaggtcacttctcatgggtaagatctgtgtcatagaagatgatcaggcggtttttttcggaacatcctcattaagtaatttgaattttataaaagcaacttaatcatccttggatcagcaaatctcacttgcaaaacacatcacttgaggcca

SEQ ID NO: 259468 - DNA, 515 bp, Homo sapiens
gcgaggacagtatttctgtaacaggaaagattctcacagagtctattgctgcttttcagataactctcaattcttcatgttcatccttgacagatctcccaggctctggtcagagctgtggtcaggtttccaagcttgggagtgtctccccttccctcaaatgcagcctgttggaaactgaagccttaatcaacatccctcctatagccttctttccttttcttttcttttttgtttagagacagagtctccctccgttgcccaggctggagtgcagtggtgcaatcttggctcactgcaagctccacctcccagattcaagtgattctcctacctcagcctcccaagtagctgagattacaggcatccgccaccacactcagctaatttttgtatttttagtagagacggggtttcaccatgttggccaggctggtctcaaactcctgacctcaagtgatccccaccccttggcctcccaaagtgctagggttacaggtgtgagccactgtgcc

SEQ ID NO: 259469 - DNA, 652 bp, Homo sapiens
gcaatgtctgagaatccaaggatagagagcgtttacaaggcaaatggtgacctttgagagagcagtgtgagatgacgtttggaagcagaagccagattgtaaatggagaaggaattaatggtgactgaagttaagtacagactaacttctgagcaagtgttacatatccataatttatattgttgtaatagtgttgtggaatcaggaggaccagagagaggccttggggtatatacataaggatatctttattgagtgcactcagacccagcagacttaacatccaaagaccgggcccagaacaaagacagcacttgacttttatacacacctcaaaaaggggtgtggaccagcctgaagccggcttacagtggcatgaaagcagggatacagaggcaggacaaagacagttaattaaactgtaacaggttcataactcaggattacacatgaccattgctatgcaacccagatgtccattatctaggtttgcctagtgcctagcacggcttattccatgaccttcactatagcgtccaggtggcctgctcagacagtttatgaccttcactctactgcttagataaaacagaatacctgaagtcaccagttacagagaacaggaattttcataaactcataccataaaaca

SEQ ID NO: 259470 - DNA, 421 bp, Homo sapiens
tcatgtggctccttacctgctgagttttaactcacagaccaaagactcaatgtagggatcaatccaaatttcaagtatgttgatcccaattatagattcaggacctgcacaattgagtcttgggtatgtcagtggacccagtgggctcattaccagccagattttgaccacggcttcattcactactgccatttatttgcccccactctaaaagtggggccctgatgatgcttcagttctccagatataaatgtcaactctagtccttagaccaataatccttgaactgtcggagaattcccttttcttcagtgcacagtcatctatgtaaatagtcactgtggctacgtggtatcaaaattgctgaatatatagggaacataatgtttcttaagcaatataaatagaataaataagtatc

SEQ ID NO: 259471 - DNA, 756 bp, Homo sapiens
catatcacccctactgcaaagcatcactggaatcccaaagaggattccaggtaggctggcctcagtcctgactcttgacttgccatcatcctttctcgtttttgtctttcctgttagtttcttctgatacctcacgtgtcctttggtagaggctgtttcattttaattatttaatttcattttaattatctgccatttactaatgttagtctgaagttggcggtgatttgcagattctcagtagtagttctcatctgattggggggtggtgtctgcctgttttatagatgggacacaggcagagagtaatgtgcttaagataccaatgcctgggaagtaacatgcctaggttcattcctcaagctgtgcgattccagagcttttgctcttttcacaaaaattaactgggagacaagctgtgtccaggtggtgaagctaggtccaggagtacagcccagcatgtactcgaggtctaagttgtacaaaaaaggctgtaagacctttcaaactgatttttaaaataacagttttattgagttagttcatataccaaaaacattcacccttttataatgtactattcagtggtttttagtgtagccacagaactgttcaactgacaccactatctaatgttagaacattttcaccaccctgacagagaaactattagcatgtaagactaattttaaagctaacattattggagtagaagccaaggattgggctctcctgatcatcctgtgaactgagtga

SEQ ID NO: 259472 - DNA, 280 bp, Homo sapiens
tgtgtaaaatatcagagatgaaatattggcagaatttcatttcagtttttatggaaaaggaaaaaagaggttaaggaggattccagattgtgcattagtttattccttcattctagtggagtatgcagaattgaataagacacagactatgctcccaataaacttaaaatttcaaccactaatgttaatacatttaaaaatgaatgacttgctaaatagaagtataagcataactcggggaacagagtaaaatgaataattattattgactaaaaaaaaa

SEQ ID NO: 259473 - DNA, 688 bp, Homo sapiens
  misc_feature (357)..(357): n is a, c, g, or t
  misc_feature (365)..(365): n is a, c, g, or t
  misc_feature (409)..(409): n is a, c, g, or t
  misc_feature (423)..(423): n is a, c, g, or t
  misc_feature (427)..(427): n is a, c, g, or t
  misc_feature (429)..(429): n is a, c, g, or t
  misc_feature (434)..(434): n is a, c, g, or t
  misc_feature (441)..(441): n is a, c, g, or t
  misc_feature (454)..(454): n is a, c, g, or t
  misc_feature (456)..(457): n is a, c, g, or t
  misc_feature (462)..(462): n is a, c, g, or t
  misc_feature (467)..(467): n is a, c, g, or t
  misc_feature (473)..(473): n is a, c, g, or t
  misc_feature (480)..(480): n is a, c, g, or t
  misc_feature (482)..(482): n is a, c, g, or t
  misc_feature (493)..(493): n is a, c, g, or t
  misc_feature (495)..(495): n is a, c, g, or t
  misc_feature (518)..(518): n is a, c, g, or t
  misc_feature (526)..(526): n is a, c, g, or t
  misc_feature (539)..(539): n is a, c, g, or t
  misc_feature (558)..(558): n is a, c, g, or t
  misc_feature (567)..(567): n is a, c, g, or t
  misc_feature (570)..(570): n is a, c, g, or t
  misc_feature (594)..(594): n is a, c, g, or t
  misc_feature (600)..(601): n is a, c, g, or t
  misc_feature (603)..(603): n is a, c, g, or t
  misc_feature (615)..(615): n is a, c, g, or t
  misc_feature (617)..(617): n is a, c, g, or t
  misc_feature (632)..(632): n is a, c, g, or t
  misc_feature (637)..(637): n is a, c, g, or t
  misc_feature (646)..(646): n is a, c, g, or t
  misc_feature (651)..(652): n is a, c, g, or t
  misc_feature (659)..(659): n is a, c, g, or t
  misc_feature (664)..(664): n is a, c, g, or t
ctcttccttttttcgctttctttctgtccttttctctgtcttcctttcttcctcttttccttgcttctttcttttcctctctcttcccttttccttccttctttcattttatttatttatttattttagagacggggtctcgctatgttgccaaagctggtctagaactccccagttaaagcaatcctcccatctcagcctctcgtgctgggattacaggcatgagccaccaagcctggcctctttttctttatttctctctttccttctcttcctctctttctttcttcctttctgtcttcctctctttttctttttttgtctctctctgcccctctttttctccctccctccctncctccctnccttcctcttccccttccccttccccttcccctccttcccttcnttcctctccccctntctntnccctnttccccntcccccctctccncnncttcnccctnctctcntcctccncncttcccccctncntcccctcccccctcctctctctntccccctncctttctccctcnctcctcctctctcctcccnccttccccnccnctcctcttcctcctctctccctcnccctcnncntccctctctccntnctcccctcccccctncttcncctctcttnctctnnccctctncctcntccctccctccctccttcttctcc

SEQ ID NO: 259474 - DNA, 678 bp, Homo sapiens
  misc_feature (357)..(357): n is a, c, g, or t
  misc_feature (365)..(365): n is a, c, g, or t
  misc_feature (409)..(409): n is a, c, g, or t
ctcttccttttttcgctttctttctgtccttttctctgtcttcctttcttcctcttttccttgcttctttcttttcctctctcttcccttttccttccttctttcattttatttatttatttattttagagacggggtctcgctatgttgccaaagctggtctagaactccccagttaaagcaatcctcccatctcagcctctcgtgctgggattacaggcatgagccaccaagcctggcctctttttctttatttctctctttccttctcttcctctctttctttcttcctttctgtcttcctctctttttctttttttgtctctctctgcccctctttttctccctccctccctncctccctnccttcctcttccccttccccttccccttcccctccttcccttcnttcctctcccaacacattatttaacacattctctcatcacacaccccaataccaatttaccttttcaaaccaactatcaccatacctaactcccccaccacaaacacatttaccaaccaccaacccccattctcacaaaatcattcaatcctcttctcacccacaccctctttccttaccatattcccctacccctttcacctcatcccccataacattttcctaacttctcttccatccctccctttttatcttccctctccttctcc

SEQ ID NO: 259475 - DNA, 442 bp, Homo sapiens
  misc_feature (357)..(357): n is a, c, g, or t
  misc_feature (365)..(365): n is a, c, g, or t
  misc_feature (403)..(404): n is a, c, g, or t
  misc_feature (438)..(438): n is a, c, g, or t
ctcttccttttttcgctttctttctgtccttttctctgtcttcctttcttcctcttttccttgcttctttcttttcctctctcttcccttttccttccttctttcattttatttatttatttattttagagacggggtctcgctatgttgccaaagctggtctagaactccccagttaaagcaatcctcccatctcagcctctcgtgctgggattacaggcatgagccaccaagcctggcctctttttctttatttctctctttccttctcttcctctctttctttcttcctttctgtcttcctctctttttctttttttgtctctctctgcccctctttttctccctccctccctncctccctnccttcctcttccccttccccttcccctttaactacctnnctacatacctacaccatttcaatcccttcttctnatct

SEQ ID NO: 259476 - DNA, 472 bp, Homo sapiens
cgttttgcatacttaaacttatgaacacagaaatcatataaaatcattcttggcagttcttctcttgaccagaatgacacatgccatgatgatcttatcataacgtgcagcaggaagtggctaatgaggtcatcctagcaactacaacctcgtcaaagaggcccatattttctggtgaaataaggcaaccaatctattcatttagctcagtctctcttttcatctaagttgttatcacaaaattcccaagtgttgggtttatagccacagattcttccttcaaatgaagtaggctcgtgcaattgtctattcttgtaaaagctgctactaattttgtacttcctcatattgacctcagaatcatcctgaaaatgattctctgccctcgtcctgaatatgggctcagttgatgaagaaaaatacaatttggaaaaaaacgattcaggacatctaaagagactgagctgacaaa

SEQ ID NO: 259477 - DNA, 739 bp, Homo sapiens
ttccatgtggctggggaagcctcacaatcatggcagaaggcaaggaggagcaagtcacatcttacatgaatggcagcagggaaagagagaacttgtgcagggaaactcctctttttaaaaccatcagatctcatgagacttattcactaccgtgaaaacagcacaggaaagacttgcccccatgattcagttacctcccaccgggtccctcctacaacacataggaattcaagatgagatttgagtggggacacaactaaaccatatcagttatcaacttcatggtttgtccatgattctcctagttttagcactgaaatttctatgtttcaggaaacctctcaatcctgggcaaactgaggcacttgattaagagacatttgattcttgctttataaggttgttcatgagtttcacttccaaaaagcaaaatgggtttccagacagaaaagtacatggattttggagtaaggctcaacagggtttgatatggtttggctgtgtccccactcaaatttcatattgaattctaactcccacaattcccatgtgtcatgggaagaacccagtgggaggtaactgaatcatgaggccaggtcttttccatgctgttctcatgataccgaataagtctcacgagatctgacggaattataagggggagtttccccacccaatctctctctctctttgcctgccgccatccacgtaagatgtgagttgctcttctgccatgatt

SEQ ID NO: 259478 - DNA, 513 bp, Homo sapiens
ggcctggctcaccagctcaggtgggccagtaacagaaattcttcaaaacagactgttgtagctgagaacagtggctgtgagctccagggttagaaaagcctgttttcaagtcctggaattgccacatattagctgggtaactttgggcatgacatttactctctctgaatttcagattgcaaaaactcattggattgttttgtggattgaaagaaataatgtaaatttaggccgagtgctttgacttacgcctgtaatcctagcactttgggaggccaaagcaggagggtcacttgagctcaggaatttgagaccacccctggcaacatagtgagatcctgtctctacaaaaaattttttttaaattatccagcatggtggtacacgcctgtattcccagctactcaggagactgaggtgtgaggattgctagaacctgggagatcaagtcaacagtgagccgtggttgtgccactgccctccaacctcagtgacagaggaagaccctgtctc

SEQ ID NO: 259479 - DNA, 457 bp, Homo sapiens
gctccttctgtttggcacttagtaagatctgaaagtttgagggttgggatggtggattttttatttttatttttttaaactaaggattgtgaaggctgtccagatttgtcatttggcagttaacctggtcagtcagcagtatctggatactaaagaatccttagtggtagactgtgtgcaaatgaaagaaacgttaagtccagtgaatttgactaggggtggaaacttatgctccgcagctcttcatggtgacaaggaggcaggagtgccagggtcaagggttacaagtggactccagcattggcgccaggggaatttgcattttatggacatgtaaaatttcaaatgggacaagtaggacctgccatgggttgtcttactaggtgaggattgctttttaaaaggctgcctggtttcccccttatttattaaaagtgaaagaatattttagtatcca

SEQ ID NO: 259480 - DNA, 586 bp, Homo sapiens
gagaggctgaggcaggagacttgcttgaacctgggaggcagaggttgcagtgagccgagatcgcaccattgcattccatcctgggtgacagagcgagactctatctcaaaaaataataataataattaatttataatatatcagtatatataaagtaagtaattcaaatatgtctaacttacttccaaggagtgtctaatttgaaatatgtaaaatttgatagatcagaaagtttttttgctgtgtgacttttcaatcatttattaagatttcagtgcattattatctgggttccctttaagactgtaagaaatgttagacaattttagcttattacttataggatgagaagagaataagagtggttgatgggactaaataaacaatcttaaagtaataaaaaggaccgaggagtatgactaccccaattttccatatctgaagctgagataaaaaattaatcaggtttcctgggttacatatctgtttacccactaactacattagtgactctggacattttattcagtggtctctaccccataagagtattgtaaaaattagatgaaataatcatgtaaatcgc

SEQ ID NO: 259481 - DNA, 504 bp, Homo sapiens
aaccaaggaaataaatactctgacctccttatcctcctgctgcccagtcttctgccagttcctcccacaaactaaagccactgaaagccagagagcaagggagcccattaatgtagtccataaaggtcagcctcctggagcgtggagcaggctgaagaagggtgggaaggacatctggagaggccagtggagaatatccagcacataaaatacatccctgtttttatacttctctttggcagttcttagtattttaaaaattataaagtggaaacctcaaaaaacaaaaggagtactgaaatttattaaaaacttttattttaaaacatgttcttaaagtcctaaatctgtcccccttttacatttagttaatgtttgcattctattccatggataggattacatttcaaatggtgccaagtgttcatgtgattttagcatattaattcaataaaattttaatatttgtaaaaagggtattttaaataaaagcattattttaaa

SEQ ID NO: 259482 - DNA, 4889 bp, Homo sapiens
cttattgcactattgttatttcaattttacagagaaaaacaggcatagagtgatgaaatagcaagtacatatataaacaacaaatggcagagctggaacgccaatcctagcaatctgaaccagcatttaaaaacgaggaattaaagcacatagggtgagaaaaattatagggaagggacaagagctcaaggggacacctggaaaagaaatactataatttaaaaaattaccaacgggctaattatacttgtgttttactggcagagcgctttgtctgttagctcttttaatcccgctaataattctgtgaggttggtactataagttccatttttcagacaaggacgcttaatagatgataacggacacattccctgcttgctctgatctgcatctcaacagctggctctggagcaagcaaagggagactaagggaaacagagcggagcagggcaaagaaagccgactgaaagtgagaaatgcaggaaatgtttcccatctaggcagaagctggttccagcattcaaatctctccagccggcccgccaccacgtcacaaagcccgcctctcagtgacaaagccccgccccgttcccttggctgttctctgagctcccaatacttccctccttctctttggcccctgctaccccgcctagcatcatttcctgtgcgctggatgctgattggtccgacagtcggaagtgagggcgggcggtgggggccgttgccgcagtgacagtgctaggggagtccgaagatggcggcgtcgcgtcgctctcagcatcatcaccaccatcatcaacaacagctccagcccgccccaggggcttcagcgccgccgccgccacctcctcccccactcagccctggcctggccccggggaccaccccagcctctcccacggccagcggcctggcccccttcgcctccccgcggcacggcctagcgctgccggagggggatggcagtcgggatccgcccgacaggccccgatccccggacccggttgacggtaccagctgttgcagtaccaccagcacaatctgtaccgtcgccgccgctcccgtggtcccagcggtttctacttcatctgccgctggggtcgctcccaacccagccggcagtggcagtaacaattcaccgtcgtcctcttcttccccgacttcttcctcatcttcctctccatcctcccctggatcgagcttggcggagagccccgaggcggccggagttagcagcacagcaccactggggcctggggcagcaggacctgggacaggggtcccagcagtgagcggggccctacgggaactgctggaggcctgtcgcaatggggacgtgtcccgggtaaagaggctggtggacgcggcaaacgtaaatgcaaaggacatggccggccggaagtcttctcccctgcacttcgctgcaggttttggaaggaaggatgttgtagaacacttactacagatgggtgctaatgtccacgctcgtgatgatggaggtctcatcccgcttcataatgcctgttcttttggccatgctgaggttgtgagtctgttattgtgccaaggagctgatccaaatgccagggataactggaactatacacctctgcatgaagctgctattaaagggaagatcgatgtgtgcattgtgctgctgcagcacggagctgacccaaacattcggaacactgatgggaaatcagccctggacctggcagatccttcagcaaaagctgtccttacaggtgaatacaagaaagacgaactcctagaagctgctaggagtggtaatgaagaaaaactaatggctttactgactcctctaaatgtgaattgccatgcaagtgatgggcgaaagtcgactcctttacatctagcagcgggctacaacagagttcgaatagttcagcttcttcttcagcatggtgctgatgttcatgcaaaagacaaaggtggacttgtgcctcttcataatgcatgttcatatggacattatgaagtcacagaactgctactaaagcatggagcttgtgttaatgccatggatctctggcagtttactccactgcacgaggctgcttccaagaaccgtgtagaagtctgctctttgttacttagccatggcgctgatcctacgttagtcaactgccatggcaaaagtgctgtggatatggctccaactccggagcttagggagagattgacttatgaatttaaaggtcattctttactacaagcagccagagaagcagacttagctaaagttaaaaaaacactcgctctggaaatcattaatttcaaacaaccgcagtctcatgaaacagcactgcactgtgctgtggcctctctgcatcccaaacgtaaacaagtgacagaattgttacttagaaaaggagcaaatgttaatgaaaaaaataaagatttcatgactcccctgcatgttgcagccgaaagagcccataatgatgtcatggaagttctgcataagcatggcgccaagatgaatgcactggacacccttggtcagactgctttgcatagagccgccctagcaggccacctgcagacctgccgcctcctgctgagttacggctctgacccctccatcatctccttacaaggcttcacagcagcacagatgggcaatgaagcagtgcagcagattctgagtgagagtacacctatacgtacttctgatgttgattatcgactcttagaggcatctaaagctggagacttggaaactgtgaagcaactttgcagctctcaaaatgtgaattgtagagacttagagggccggcattccacgcccttacacttcgcagcaggctacaaccgcgtgtctgttgtagagtacctgctacaccacggtgccgatgtccatgccaaagacaagggtggcttggtgccccttcataatgcctgttcatatggacactatgaggtggctgagcttttagtaaggcatggggcttctgtcaatgtggcggacttatggaaatttacccctctccatgaagcagcagctaaaggaaagtatgaaatctgcaagctccttttaaaacatggagcagatccaactaaaaagaacagagatggaaatacacctttggatttggtaaaggaaggagacacagatattcaggacttactgaaaggggatgctgctttgttggatgctgccaagaagggctgcctggcaagagtgcagaagctctgtaccccagagaatatcaactgcagagacacccagggcagaaattcaacccctctgcacctggcagcaggctataataacctggaagtagctgaatatcttctagagcatggagctgatgttaatgcccaggacaagggtggtttaattcctcttcataatgcggcatcttatgggcatgttgacatagcggctttattgataaaatacaacacgtgtgtaaatgcaacagataagtgggcgtttactcccctccatgaagcagcccagaaaggaaggacgcagctgtgcgccctcctcctagcgcatggtgcagaccccaccatgaagaaccaggaaggccagacgcctctggatctggcaacagctgacgatatcagagctttgctgatagatgccatgcccccagaggccttacctacctgttttaaacctcaggctactgtagtgagtgcctctctgatctcaccagcatccaccccctcctgcctctcggctgccagcagcatagacaacctcactggccctttagcagagttggccgtaggaggagcctccaatgcaggggatggcgccgcgggaacagaaaggaaggaaggagaagttgctggtcttgacatgaatatcagccaatttctaaaaagccttggccttgaacaccttcgggatatctttgaaacagaacagattacactagatgtgttggctgatatgggtcatgaagagttgaaagaaataggcatcaatgcatatgggcaccgccacaaattaatcaaaggagtagaaagactcttaggtggacaacaaggcaccaatccttatttgacttttcactgtgttaatcagggaacgattttgctggatcttgctccagaagataaagaatatcagtcagtggaagaagagatgcaaagtactattcgagaacacagagatggtggtaatgctggcggcatcttcaacagatacaatgtcattcgaattcaaaaagttgtcaacaagaagttgagggagcggttctgccaccgacagaaggaagtgtctgaggagaatcacaaccatcacaatgagcgcatgttgtttcatggttctcctttcattaatgccattattcataaagggtttgatgagcgacatgcatacataggaggaatgtttggggccgggatttattttgctgaaaactcctcaaaaagcaaccaatatgtttatggaattggaggaggaacaggctgccctacacacaaggacaggtcatgctatatatgtcacagacaaatgctcttctgtagagtgacccttgggaaatcctttctgcagtttagcaccatgaaaatggcccacgcgcctccagggcaccactcagtcattggtagaccgagcgtcaatgggctggcatatgctgaatatgtcatctacagaggagaacaggcatacccagagtatcttatcacttaccagatcatgaagccagaagccccttcccagaccgcaacagccgcagagcagaagacctagtgaatgcctgctggtgaaggccagatcagatttcaacctgggactggattacagaggattgtttctaataacaacatcaatattctagaagtccctgacagcctagaaataagctgtttgtcttctataaagcattgctatagtg

SEQ ID NO: 259483 - DNA, 598 bp, Homo sapiens
ctgccacaatttatctagaagatctagacaagacaattgaaggtggctatagcacacaacagattttcaacatagacaaaacagccttttattggaagaagatgtcatctaggactttcctagccagagaggagaagtcaatacctggtttcaacgcttcaaaagaagggctcaggtcagtggcttatacctgtaattctagcacttcaggagaccaaggcaagacgatggcttgagctcaggtgtttgagactagcctgggcaacacagcaggaccctgtctctacaaaaaattttaaaaagcacccaggtgtggtggtacacacctgtagtccaagctatttgggaggctaggcaggttgattacttcagcccaggaagtttaggctgcagtgagctgtgattgtgtcactgtactccagcctgggccacaaactgagactctgcctcaaaaaaaaatgcagctggtgactttaagccaatactcactcaccattctgagaatcctaaggcccttaggaattatcctaaatctactctgcctgtgctccataaatgcaacaacaaagcctggatgacagcatatcttttgacaatg

SEQ ID NO: 259484 - DNA, 442 bp, Homo sapiens
aaaaatgcataatgacactcacagcctatgatgtgtcggatgtcctgtgctccaacatggctccaccatagccctggcattgggcatccctggatccatttttacatagaaggaagctgccaaggggcagacctcagatggcagtgtggatcagtttgaccacattgtctctgcagtctctttaatctaatgtgtgtctgggagctccagggttttgaatgggtctccattttccaaaatgtgggcatgccttgtggttcattcagagacaaccaacagatgggccaagtcaggatggctttgtgatcaggaacatggcttggccattagacagcctgggctcaaatcccagggggattatccatgagtgacctatccttagaaaagctacctaggtgaaggactgtgcttcacacatgcctggcacatgcaggaagctctt

SEQ ID NO: 259485 - DNA, 726 bp, Homo sapiens
actctggggactctgcctcttagcaaatcaacacccaattcctgggaacatttttggtgccttctgctacctcctcttcagggatggctgcagggcactttgtcctatgagtcggggtggagaatgtccagtctcctcccctcccaatcacttcctccatcatccaggtctccattcaccatgttacttccttcacttctccttgcccaatccctcccacaaggaagcccctaaaacaggttcccagatctggtccccagcatctgcccctcacaccagggcctttcaggaagatgagttctatggctccattctctctgactccagattcaccacactgaaaggcagcctctagaccagccctggatggattgcacaaactggagactgcggaagacctctgccaaggaaagcctggccctccccagtcctgtctgccccctctgagccctgtctaagattacagcccatggcccttcctctccttcctttcccagagcaagagccacagcagttagcccatgacagtgccagagacagccctggcctggggaaccaaggaccagaagggaagaccaggcctctagttcctcggcaccagacctgacccagccaggcctggagtgtcaacatgagtgtgaatgtgagtgaaagggtgaacgtggtgaaagcatagcttttgaactcccagactgcagtgcttccaataaaaccacctagcaccca

SEQ ID NO: 259486 - DNA, 538 bp, Homo sapiens
aaattttcaagggaaggggatgaaaaaatggcatgctttggagcgaaattgcaactggggatgcagcatagtatttccagaaggatccagaaacaaagtgtcaaaatctgtattgtaagaaggctggtgctcctgaaatctagcaggcaggtgcttactagaagtcacaagttgttcatttctgtcttcaacatcatttgatactatagacttattcataaggtcaattgcctagtcaggcttatgcaatgcagtggatagattctgtaatgttggaaagattctgtgggatggaaagattctgtgggatgcaaaaagaaactgtgtctctgatgttgccattttcaccccaggatgatttgctttacaacgtgctgtctgcaaataagtttgtggttaaaattttagtttactccccatgatgtgctattcatctagtttcttctcatcaggaattctggatttcttatttgcctcttaaaaagtaaaacttttaaaaaatttatgaaaatataacctcatttaacaagttcattga

SEQ ID NO: 259487 - DNA, 335 bp, Homo sapiens
gcaagccggagtcctcggctggagtgggccccaggacacctccttgcctttcaagccctgagagcctcttccctggcttcttaggaaaacctcctggcaggtctctaggaaaagcagtagctcccctcccccagccccaccttccccattccgggccattgcactaacttcctcctgagccacccgaggcatggctcccacctccccctgaccaactggggagcttccgaacctggcagatcctatcccaccccaatatcctgttagatcagactcagccgtttaaaagaaaaatatcctttccactttccataacatttcctattggaattgat

SEQ ID NO: 259488 - DNA, 433 bp, Homo sapiens
tgagatgtagcagacagcaactcggagacccgcagattcaccaagtagacagaagggaagtgggtttccttctctgtcccatcgggaagagaacccaccagaatatctaacccagacccccaaatgccattctgatttctggctgtgctttctcccgtctcccacaatagccgttgctttcagagaaataccttctccaagtcagaccccctgcccttctcactcacaaaacccttgcattgaatctggtgacacttctccccctgtgaagcggcaggactcacctggaagttgttctggtctttccctctggacagaaggtcctgaaatcgctcaccaggcgttttttgaggtctccatcactcagccaggaacctcaaaatctctgtgaattcatctttctcaataaacactcttgctagccctgtcttga

SEQ ID NO: 259489 - DNA, 207 bp, Homo sapiens
ttttttctggtagaaaatttaacaggatcttttgttaggcaaagtaaatgagactggcttaggttatgaactagttttttttttccccaaaaaatgtttatttttgttatattattaaagccatacccacccatacaaattttgtttttaaaagcaggaaaaaaattcacccataattctaacagtccaataaaacctgacatttag

SEQ ID NO: 259490 - DNA, 2701 bp, Homo sapiens
  misc_feature (2672)..(2672): n is a, c, g, or t
  misc_feature (2687)..(2687): n is a, c, g, or t
  misc_feature (2694)..(2694): n is a, c, g, or t
cccaattccgccctgcccccgccgcggcggcgctagccgccactgagggaccgaccctataaaggccgctccgcgaggggtgcgcagcattcggcagagggcgcttcgacgggctgggctgtgcgcctgcgcagtgtgggtcgctccggattccctgccccggccggccccgcctcggctccgcaccctcgccccgctctcagccgccgctctgccccgcagcagccagccccgtgtccggcagtatgttcagctgggtcagcaaggatgcccgccgcaagaaggagccggagctcttccagacggtggctgaggggctgcggcagctgtacgcgcagaagctgctacccctggaggagcactaccgcttccacgagttccactcgcccgcgctggaggacgctgacttcgacaacaagcctatggtgctcctcgtggggcagtacagcacgggcaagaccaccttcatccgacacctgatcgagcaggacttcccggggatgcgcatcgggcccgagcccaccaccgactccttcatcgccgtcatgcacggccccactgagggcgtggtgccgggcaacgcgctcgtggtggacccgcggcgccccttccgcaagctcaacgcgtttggcaacgctttcctcaacaggttcatgtgtgcccagctgcccaaccccgtcctggacagcatcagcatcatcgacacccccgggatcctgtctggagagaagcagcggatcagcagaggctatgactttgcagccgtcctggagtggttcgcggagcgtgtggaccgcatcatcctgctcttcgacgcccacaagctggacatctccgatgagttctcggaagtgatcaaggctctgaagaaccatgaggacaagatccgcgtggtgctgaacaaggcagaccagatcgagacgcagcagctgatgcgggtgtacggggccctcatgtggtccctgggcaagatcatcaacacccccgaggtggtcagggtctacatcggctccttctggtcccacccgctcctcatccccgacaaccgcaagctctttgaggccgaggagcaggacctcttcaaggacatccagtcactgccccgaaacgccgccctcaggaagctcaatgacctgatcaagcgggcacggctggccaaggttcacgcctacatcatcagctccctcaagaaagagatgcccaatgtctttggtaaagagagcaaaaagaaagagctggtgaacaacctgggagagatctaccagaagattgagcgcgagcaccagatctcccctggggacttcccgagcctccgcaagatgcaggaactcctgcagacccaggacttcagcaagttccaggcgctgaagcccaagctgctggacacggtggatgacatgctggccaacgacatcgcgcggctgatggtgatggtgcggcaggaggagtccctgatgccttcccaggtggtcaagggcggcgcctttgacggcaccatgaacgggccgttcgggcacggctacggcgagggggccggcgagggcatcgacgacgtggagtgggtggtgggcaaggacaagccctcctacgacgagatcttctacacgctgtcccctgtcaacggtaagattacgggtgccaatgttaagaaggagatggtgaagtccaagctccccaacaccgagctagggaagatctggaagctggccgacgtggacaaggacgggctgctggacgacgaggagttcgcgctggccaaccacctcatcaaggtcaagctggagggccacgagctgcccgccgacctgcccccgcacctggtgccgccctccaagcgcagacatgagtgatggcgcccggccccgcacctgccatttgcacgcccggccgggaggcagagacggggggaggggaagcctcaccatttctcaaggtccataaagactgagcggatgtttcctcgcctctcgaaaaggaaaaccaccatctttcttttaaggctgttcctgggcctggcgggggaggcaggggtgagaggatggaattgtgtgcacaagaactgtggctattttaatataacgttagaggctgcgttctttgtcgccgcctcccctgtgtgccagccctgtgtgcacggcctctgccccccggcctttgctgtggctggagctggacagtgcagcgactgcgaccgtgggggagccaggtcgcccttttggcagctgctaggctgaggctgcatggacaggaacaccaggcaccctccgtgtgcttctgagctgaggttgcttcacgggaccgtggcttccttcctcacctggctctgcctcccccgtgctctcgggcgaagtgggttcttgtgccttcccctcccgggcccaggctccccgtgcgcgggccctgccctttcctcccgcgccccaccggctccgacgcgcaaccccgctcagcagtcacagaagcagggcccagccaccttggtctttttttgggagttcaggggagtaggagaatgtcttccagaaaaatacataagctagtttctgttctgtaaagtgatatctttcatacttgaccaaagttcccaataacttcccaaccactgttcaaaactgtgaatttttgtctccccttcccaccctccaaccaaggaacaaccctgcccagggggntaattaaggagtggnataacgngggggga

SEQ ID NO: 259491 - DNA, 2567 bp, Homo sapiens
  misc_feature (2538)..(2538): n is a, c, g, or t
  misc_feature (2553)..(2553): n is a, c, g, or t
  misc_feature (2560)..(2560): n is a, c, g, or t
attctcaccagcctggacagccaaaggggtctgtgtgtggccggggaggatggcgggggagtgagccccatggaacagccaggaactgcagccagccccgtgtccggcagtatgttcagctgggtcagcaaggatgcccgccgcaagaaggagccggagctcttccagacggtggctgaggggctgcggcagctgtacgcgcagaagctgctacccctggaggagcactaccgcttccacgagttccactcgcccgcgctggaggacgctgacttcgacaacaagcctatggtgctcctcgtggggcagtacagcacgggcaagaccaccttcatccgacacctgatcgagcaggacttcccggggatgcgcatcgggcccgagcccaccaccgactccttcatcgccgtcatgcacggccccactgagggcgtggtgccgggcaacgcgctcgtggtggacccgcggcgccccttccgcaagctcaacgcgtttggcaacgctttcctcaacaggttcatgtgtgcccagctgcccaaccccgtcctggacagcatcagcatcatcgacacccccgggatcctgtctggagagaagcagcggatcagcagaggctatgactttgcagccgtcctggagtggttcgcggagcgtgtggaccgcatcatcctgctcttcgacgcccacaagctggacatctccgatgagttctcggaagtgatcaaggctctgaagaaccatgaggacaagatccgcgtggtgctgaacaaggcagaccagatcgagacgcagcagctgatgcgggtgtacggggccctcatgtggtccctgggcaagatcatcaacacccccgaggtggtcagggtctacatcggctccttctggtcccacccgctcctcatccccgacaaccgcaagctctttgaggccgaggagcaggacctcttcaaggacatccagtcactgccccgaaacgccgccctcaggaagctcaatgacctgatcaagcgggcacggctggccaaggttcacgcctacatcatcagctccctcaagaaagagatgcccaatgtctttggtaaagagagcaaaaagaaagagctggtgaacaacctgggagagatctaccagaagattgagcgcgagcaccagatctcccctggggacttcccgagcctccgcaagatgcaggaactcctgcagacccaggacttcagcaagttccaggcgctgaagcccaagctgctggacacggtggatgacatgctggccaacgacatcgcgcggctgatggtgatggtgcggcaggaggagtccctgatgccttcccaggtggtcaagggcggcgcctttgacggcaccatgaacgggccgttcgggcacggctacggcgagggggccggcgagggcatcgacgacgtggagtgggtggtgggcaaggacaagccctcctacgacgagatcttctacacgctgtcccctgtcaacggtaagattacgggtgccaatgttaagaaggagatggtgaagtccaagctccccaacaccgagctagggaagatctggaagctggccgacgtggacaaggacgggctgctggacgacgaggagttcgcgctggccaaccacctcatcaaggtcaagctggagggccacgagctgcccgccgacctgcccccgcacctggtgccgccctccaagcgcagacatgagtgatggcgcccggccccgcacctgccatttgcacgcccggccgggaggcagagacggggggaggggaagcctcaccatttctcaaggtccataaagactgagcggatgtttcctcgcctctcgaaaaggaaaaccaccatctttcttttaaggctgttcctgggcctggcgggggaggcaggggtgagaggatggaattgtgtgcacaagaactgtggctattttaatataacgttagaggctgcgttctttgtcgccgcctcccctgtgtgccagccctgtgtgcacggcctctgccccccggcctttgctgtggctggagctggacagtgcagcgactgcgaccgtgggggagccaggtcgcccttttggcagctgctaggctgaggctgcatggacaggaacaccaggcaccctccgtgtgcttctgagctgaggttgcttcacgggaccgtggcttccttcctcacctggctctgcctcccccgtgctctcgggcgaagtgggttcttgtgccttcccctcccgggcccaggctccccgtgcgcgggccctgccctttcctcccgcgccccaccggctccgacgcgcaaccccgctcagcagtcacagaagcagggcccagccaccttggtctttttttgggagttcaggggagtaggagaatgtcttccagaaaaatacataagctagtttctgttctgtaaagtgatatctttcatacttgaccaaagttcccaataacttcccaaccactgttcaaaactgtgaatttttgtctccccttcccaccctccaaccaaggaacaaccctgcccagggggntaattaaggagtggnataacgngggggga

SEQ ID NO: 259492 - DNA, 425 bp, Homo sapiens
gttgaacctgctgatatgtcagatgctgttaccaaggccagcaagtgcagatggggtactaattctctcacttcggaggaggatgactctggtttatgtagccctccagcagagagggaagaaaaacagggcattttaactggagaccagtcacgaattaaaagtttgtcttctactgaagatattcttgtaacagaccaatacagaccatttttttctgttaattccattagcgaacagaaaatcccactgctttcatgtcaaagtgcccaccctgatgaaaatttcaaaatgattttacatgatgtttctccactagaggaagcaaaacatgtaaatggtcaaagggaaatccacgatgaaaattgttgcctgcagaataatttgaaagagagccctgtgaagtgtgacccattaattatgcc

SEQ ID NO: 259493 - DNA, 433 bp, Homo sapiens
tttcattttttaacatttctttgaaacacttactacattcaatgttacagtatttctttttttttttaaactcctatttacttagaaattattctgaggctaaaagaaatcaagtgcgatttcttttaagggataatttattaataattggttatcccactagttttaaaggtcttcacatggctgtcttcaggaaagaggcagggcagtagaagtagaggtgcaggtactaaatttgtgaaggcatgtgaaggcaaattgttatttagcatagtggtattcattatccatggtcaaggtgtctgaaattgctcattaatcaatcattaacaaccacagaaaataggggaatttcatggaagcgtaaaggttcactggcagagaaatttctttatgacttgccaagtaaaaggaatgtgaagaataaggccaa

SEQ ID NO: 259494 - DNA, 279 bp, Homo sapiens
gtgtgggtgatctagaggatccctgatatgtgtcttcaggaaagaggcagggcagtagaagtagaggtgcaggtactaaatttgtgaaggcatgtgaaggcaaattgttatttagcatagtggtattcattatccatggtcaaggtgtctgaaattgctcattaatcaatcattaacaaccacagaaaataggggaatttcatggaagcgtaaaggttcactggcagagaaatttctttatgacttgccaagtaaaaggaatgtgaagaataaggccaa

SEQ ID NO: 259495 - DNA, 298 bp, Homo sapiens
ccaaagacttcttggtcatctgataaatttaagattcttaacataaactttgctccctctggaaacctcacagctaaaggtaaaagtgaagataccagcctggacaacatagggagacccaatccctaaaaaaatgttaaaaaattagccaggcatggtggtgcatgcaggtagtcccagctactctggaggctgaggtgggaggattgtttgagcccaggagtttgagattacagtgagctatgacgacgtcactgtactccagcctgggaaacagagcaagtgagaattcatctaa

SEQ ID NO: 259496 - DNA, 481 bp, Homo sapiens
aaactcttggaaaaccagagctatgaagatatttcatatttccccaatatgacaaaagtatatgaagtgtgtgtgtgtatgtgtgtgtgtgtgtgtgtgtgtgtgagtgagagagagatagagagacagagagagagagatggatatctatctttccctcaatgtgggcctctcttagggttctgccttcgttttccacataaacatacttttactgtagttcattctatttccatttctttcaatactatttatattgttgggaaaagaatgattcccaaattagtcatcgtattaaaactcatctctgacatccagataccagtatggaactattaactttatagctgagattggatgctttctatttatgttcaaaactaaatggctgaatctttcactcccattttcatcctactgtttttctcacgtcagtaagttattgccacatctgttcagttgtggacattcttgataaaat

SEQ ID NO: 259497 - DNA, 209 bp, Homo sapiens
tgaggaaggtcactttatatcttagaatgtgccaagaggtagttagttgagattttatccccaggacagcttaattcatatcctgaatcatctacaatcagctcacctttataggtgagtggacaggtggtaagagggtgagtagggttaggaggtgggaagggtcatgagaaagaagggtgcatgggtggaaggtgagagggtatggg

SEQ ID NO: 259498 - DNA, 360 bp, Homo sapiens
cggagaggccaagaagaatctgaacagacagactgggtctgttctcagtctattaccattggatcttacccttttgtccaaccacatctacatggctgcccactcttcattgaacctaagcacaaaaatggacagagcgagactctctcaaaaaaataaacaggctgggcatggtggctcatgcctgcaaccccagcattttggtaggcagagccaggaggaccccatctgtattaaaccagagagaccccatctctattaaaaaaaaatagacaggtttccctgggtttttccgtcttcatttctgaaggttcccatgtcacctaaaactttgattaaacaaatgtgttgtgcttttct

SEQ ID NO: 259499 - DNA, 758 bp, Homo sapiens
gttgggtcacccaagaaggcgaccagttcaggtagctctgcataaagagaagatgttccaccctgcagtccttaccttaaatctaggcagctaccttaagaattgacctagacagcagtgtgtgcatggctcagtgcaaatctttagcatcacctggtagaagacaacactgagcacacagtcgcagaactagtgcagttcgaggtacgtggaaatgtctctgcaaagtaatatttctggtttcttgtttttttgtctacccttttcccctttactgcactatatggtgaaaaacgaaaacaagaactgctaactacctgatttccgaaacaagaagtgtgatctcaaatatttctgttgatctcaggtttttcatctgaaaaatgaggatgctggtctcaatttctaaggccccttcctgcccaaacttaccaggaggaaagaagctggaagtagaaagcaggagaggttcaaaaagaaaatgggatgcatctcctttagtaagctctactctggagaaggacgttgtccttcaagtacaaaccttttcaccgacttggggagtttccccccattgtatcccaccccatctttttctgccatcgtgcactgtgtcgtttgaatgtgctgctttgtcagggctgggggcttccttggtgctccagcttggccacatccgacacacagaccaccccgtcctccttctgcctctagaggaccaagaacaacccttgttctgaaagcaccctgtccctgag

SEQ ID NO: 259500 - DNA, 421 bp, Homo sapiens
tggaaagggcgtctttcagggtgggggaggtggtggggaggagcctgggtgaactcctgactgctcagcaccaacattgccatgggtcaagactgctcccgacacctccatcctggggcacaggctgtgcatccagaaactcaacccaagctgctgagacgccatcacccccactcacttccccagactgcccttctggctgctctgtggcactcagagccgcgactgttctcaaactgctgtctcccgcttcccttggttttattgtgatcactcctctctctgcagtcctactcttattagcaatcaactcaggactgccatgaaaaaatgtttcctgttacctcacacatacagcacttatgttaaaaacacttacataagatgaattctgtaaataaatgttcgaggcatgtttgta

SEQ ID NO: 259501 - DNA, 565 bp, Homo sapiens
caagcagttaatacagactcataacgtataaggaaatcaaatgtaccatgagctaattactataaacaagaatgaaggctgggtgggtagctcatgcctgtaatcccagcactttgggaggatgaggcgggcagatcacttgaggtcaggagttcaagaccagcctgaccaacatgatgaaaccctgtctctattaaaaatacaaaaattactcagatgtagtggtgttcacctgtaaccccagctacttgggagactgaggcaaaataattccttgaacccaggaggtggaggttgcagtgagtctgtattaactgcttgcaagcagttaagacagactcaaacaaatcaacagggatatactagtggaaaacacaatataaaactaaaatgccattggcttctttaatgggttaaaagcaaaaatgtaacaggcagaaagtctgtttcaaacaaattaaaaagctatgtgttttttaaattcttcccaaatcagatatatacacacccacaaaaatagtgtgtgaaggaaagctgtcatacacaagaagttgttcctgaattc

SEQ ID NO: 259502 - DNA, 475 bp, Homo sapiens
tcattgtaatgaagaataactatgagcataacagcttttctgagttctgtgagtccttctagcaaatcattgaacctaagacagtcaaattgccttaatagaacatttgcaaatctggcttttaaaaaattcatttcaagtgcccatcaaaattaactttatattttcattgctcttgatttacagaaaatgtatggggaatactaagaatcttcacaaaccagctttttttcttcccttgcagataaggacttaaagtgccaggcctttattaaattctctaggtttatgtccatattaatgtatccaggcctcataaagaccctaaagcactgatataattattgtttacattctacaacaagaaactgtaaagcggaaaaatgagtaactattaacccctttgaaatgcagtgtgaacatataactgaattttaaatttttttcacttttcctaagctaattaacacaggat

SEQ ID NO: 259503 - DNA, 347 bp, Homo sapiens
aatgcttgctcattgtccaagcagattagatgataaacccactggcacagagcttattaaataatctctgactagggatatctttaattttggattaggggtggggctgaatctacagatgaaaaataaatggctcaaaataagaagagtagtggaagggagccaagtgagtcattacaaatggaagactttgtgaatggttctagggaatagaagaatagattttgaaataaatgttagaacaccgagtttctattggttttacacctgttaactctaagacagaaatgatttggctttgacatggttgtgcttctttcttaaactgtagggtacttggtcatatg

SEQ ID NO: 259504 - DNA, 872 bp, Homo sapiens
tcacaccagcatcaccacgaatataagtaataagttgtgctgtgacataatgacggctatgatgtcactagacgataggaacttttcgctccattggtaatcttcctggaccactaatgtatatgtggttcctcattgaccaaacgttgttatgtggtgcataacagtatatttaaaatacataataatatataatattatagtggtgcatgaatgtggcaaaagccatgaaggtggtttgagaatgactaaagtttgagtaacagtgatctagtctaaatcatcctttttagatgaagaagtgagtttagcaatggtgactgtttctggggttttctaatttcaagttccctttgccttctaggaaaagcttataacatcagtatttcccacacgaatttacttggccacgtagatagttccagagtgttaagtgcccagtggaaatgaaaatacttagcactgccctccgggaccttatagatcaagcatagaactcataaaaatggtggctgggttgaaaattctcattaatacacagtcaaaggattattttggttttgcttttttaaggtgatggcttttttggtcaacgtgatgttttataaatgagtaatgttaggccaggtacaatggctcacgcttgtaatcccagcactttgcgatgccaaggtggtagatcacttgaactcaggagttcaagaccagcctaggcaacatagagaaacctcatctctactaaaactacaaaaattagccgggcgtggtgaggaggcgggaggattgcttgagccaaggaggtggaggttgcagtaagctgggatggtgccattgcactccagcctgggcaagacagcaaaactctgtctcaa

SEQ ID NO: 259505 - DNA, 301 bp, Homo sapiens
atgctctttgctgtatgttatactccagttgaaggcaggagggagaccgacctgccacagaaacctgcaagggtgtactgccacatcgttctgaaacccaagctgcaattgtacaaatggctcaaaatcccttttgactaaaggataaagattgaaagcaaaagacgtattttgaccaagtgtggagggaaaccaactttgaatgaaacacgaataacagataagatagtgaagaaagtgcttcactgtgattctcttaatagtactcaataaaagtatcttttaagttttagtatttctt

SEQ ID NO: 259506 - DNA, 827 bp, Homo sapiens
caaacagcattctcatgagttaagtgtaaatgagtcagaaacacatagatcaaatttcttttaaaatacacatgggtttgaaaattaaggccaaagtgcttggcaaaataagttttggttttatccaaacccaaatgttgaaaaaataattctaagatttgccaaaccaaaaatacatgcagatctcttcaatcctcccattaaataagatggcatcataaacatgggacttagtggctattttcataatccccaaggtttaggcaacatggaccttaaatattgattgaaagactatgaaaaatttttggtggaaaaacattataaccttgcaaatgaagatgagggctactggttcagggttctcatcctgattttgacagcacttctcactgtccgatcaggtgatcaacttgtcctttgtcttagctctgggtgtgtgtgtgtgcatgtgtgtgtgtggcctatgcatagcaataataacttttaaaatcctatttttggattttataaatcctaaatgtatacttaattcatatattacaatctgcgaaacttaataactcctcatcatatccaaacagagggaagcagtccccttttgctcattcatagttcagagatagtcttcatttatttccctagagggtaaaacatatccattttgcactaacaatatctaatgctgactttgctcaggtctgtgttattaaaagatgagagagagagagggaaagagagaaaagaaaaaaagtaggggagggtgtgtggcaggagtccttgacttgatttgaagaactaataacctactgagagacaaaaaaaaa

SEQ ID NO: 259507 - DNA, 130 bp, Homo sapiens
gaatttggacatacattttaacaataagtacattgattaatacatttaagtttataagtaattattgaggatccagtattttcaagaccttggcctagtttcttttcaattcaaagatgagttgcaaaag

SEQ ID NO: 259508 - DNA, 499 bp, Homo sapiens
ggaagatggggaaggtagttgacctcctcagtctcactttttccagtgtagaaaccatgagttgggggagggccattgcagatgtggaaatcagatgctcttaccatctgctcagagttttttcatctctctgtggccccaggaactgtctcattgtcatatttgagttctgggttgttgctgatgaaaatctcagcactgtatatttgttttgggttttctgtggaggggagtgaagccagcttgcttctataccactgttttgaaactgaaagtattccttctttcccttttttcctgtggtggtacccttattttgaggagtatgaacatagaattcatccattcatttgacaaatatttattgagtacctcctttgtactagactttgtttaaggctctggagatacagcggtgactaaaacagataaggcccctgtctgaaggagctcatatttgttctaaaatggcaactcctaaagtggcaggtccctgaaa

SEQ ID NO: 259509 - DNA, 297 bp, Homo sapiens
gtaagattttccacatctgcagacaaaaggaaagttggggtagtttaaaataactgctgcatgtggttctttctgtataatttttagttttttttcttctaaaagggtgttagaaaatattaatctttttgttgctttgaggtcttatttacactaactttacctcttcttcatagattaatttttcattctaaatgttgcattcttcaccgggaagttaaataaccaaacccagaatcactgcaacttacctgtgatttagaaatagagttctggaaatcatttaacaatctaaaa

SEQ ID NO: 259510 - DNA, 367 bp, Homo sapiens
ctattaatccattgtacatgattaatagtaatagtcttgaagggtcttcagcattggtattatgttgtccattaaaggcaaactgaataaaaatcaacccagagatgatagttggcattcatttacgacaggtgagtatccccaagtaaagattttgagctgccagaatggccatcctatcacaatgctgggtctggggagtatgatatttaaaggcagggccaaggtttccaaattagacaattgttcatttcttctatacaaataaatataaaatttggggatctttagcaaacatatctacaaagtgtggttcagatttttaaagaaaaagttatgagtgatacttctgaaccatagatggaaa

SEQ ID NO: 259511 - DNA, 452 bp, Homo sapiens
gcaaaggaccccatcataaatgctgtgtaaaaactcttaataatttcatgataaagagaaaaataaccaaggaatattctcattagcaattattcgtatcttattaagcatgggttttttattctcattttgacagttcatgtgctatttttgcatatgtgtgtgtatatccacgcacatgtacacatgtatgcacacacgtagactcactgcagggtcctgttattaaatcactgttggcagatggcaagtcatcaatagatgcttgttgaattgaaaatgataccacatgtaattgaccttctgtaacaatttttttctcattttattctaattgtaattggtggagggatttttaataaaattaacatggtcccttacactaagctggagaacttttctaatctattggcagtaagtgatggatttgaaatttattgcagaaggattgg

SEQ ID NO: 259512 - DNA, 431 bp, Homo sapiens
tgaggcgggagaatggcgtgaacctgggaggcagagcttgcagtgagctgagatagtgcctctgcactccagcctgggtgacagagctagactccatctcgaaaaaaataaaagaacttcccgtgtccgtttttgctttttggatgctgggagtgtcacaactcagctatccaatcaaggcagagctggcctccaggatgccagagccagagctttgtggttcatctctagaggttcaacaggaccctgtggatggcccaagttcgtttctctgcacttacctcttcggggttgtcctcaaaacgttgccgtgtcagctctcacttttcacagcaactctggcctcctaccttggactgcgccacttctgtctccttagataacctccattcgcatagctaaatgctgcaccctccgacactgccacaata

SEQ ID NO: 259513 - DNA, 226 bp, Homo sapiens
tattgttgttaaatacagctgctttattcttacatgtgatgcaaaatacaatgaacagttaatagtttatacgaagtgacttacagagtgacaaggagaccagttcacattcagtggcaaaataagaggaaatcaaataaatatcaagacaatagaaaattatttattgaaactagaaaaaaaataccctaacagtcactattcagcaacccatagagttgagaca

SEQ ID NO: 259514 - DNA, 370 bp, Homo sapiens
ggcttccagatgcgtccgccacctgccctccgtgccacgcgcttccccctacctaggggagcctccaccagacagggaacccacgccttgccacccttctctctccctcccacttcacctgtccgcgtcatttctggagccctttctttctggcacgagatgctccagggccctgttgtattctccctgccccagcctgaacccagctatttctgctgcagcctggttcattgtgggagaatgtcatgcagagcccgggatctggctccggatgtgctcattgctactggggtgtcattgcagctggcggagcaagggaacacatctatgtacatgcccacacgcatatgtatacacacagtttcatggg

SEQ ID NO: 259515 - DNA, 133 bp, Homo sapiens
cagcagaggcggatgctttaggagggacccccgtgtcgtgcccaccctctaacaatgcaagtggacgccagatgttccatgcagaccgcagctgcggggcaggcccccatctatctgcaatcccagggtaatt

SEQ ID NO: 259516 - DNA, 348 bp, Homo sapiens
tttcttctttttaagagattatacaatttagttttgtatttttgtaatgatttttttcaattgacaaatgttagctacatgtttttcaataatcatcctcttatctgagttcatcactaagagagaaaaattgcttcacgttatcttgagtaacatttggatgagctatcagtcatcaactgaaattaacctgaacatgtctccaatgacatgaagaacatttaagcatgccagctggaaggcatttacagtttcatttttccagcttccacagaaaatctttcccatgcacatctgtgaaggttttataacgattagactgatgtgagctttgtttggcattagggc

SEQ ID NO: 259517 - DNA, 449 bp, Homo sapiens
ccgcctcagcctcttgagtagctgggactacaggcgtgcactaccatgcctggctatgtgttttgtttgtttgtttgtttgtttttttagtagagatgaggtctcactatgtgccgaggctgatcttgaactcttgagcacaagtgattctcccatctctgttgggaatataggtgtgagtcactgctcccggcctcttcacatattcttgatctgtgtggatttattcttttttttttttaatacggagtttcactcttgttgcccaggctggagtacagtggtgcgatctcggctcactgcaaccaccgcctcctgggttcaagcgattctcctgcctcaccctcctgagtagttgggattacaggcacccaccaccacacccagctaattttttgtatttttagtagagacagggtttcactgtgttggccagggaggtctcgaac

SEQ ID NO: 259518 - DNA, 446 bp, Homo sapiens
tttttcatctagacaagtttgttcaggagaaagctggagggggagaagtggtatgcttgttcactcagcaactgtttactgggtgaggatcccttggttcttgtaaggatgaacctgaagaaggttttgggcatgggagtgagccccaggccatgggtgttttgctctgacccttaagaagtacagggtgcaggctgggcacagtggctcacacctataatcccagcactttgggaagccaaggcaggcggattacctgaggtcgggagttcaagaccagcctaaccaacatggagaaaccccatctctactaaaaatacaaaattagctgagtgtggtggtgcatacctgtaatcacagctacttgggaggctgaggcaggagaatcacttgaacccaggaggtggaggttgcagtgagccgagatcacgccatcgcactccagc

SEQ ID NO: 259519 - DNA, 660 bp, Homo sapiens
gaggctcagagagaagtttactcattgtgatagttcatcttatgtgtccagttggctaggatacagtgcccagttgtttggtcaaacaccagtctggatgctgctgtgaaagtatttttcagatgagcttaccttttaaactagtgaactttgagtaaagcagattaccctccaaaatatgggagtcatccagtcagttgagtatcttaagagaaaagacaggtcccctgaagaagaaggaattctgcctcctgactgcctgtgaattcaagacttcagcatcaactcctgctggaatttccatcctgttgacctgccctgcagatttcagacttgctaggcccacgcaactgcatgggtcaattccctcaaataaatctctctctccttacctctctctatgtatatattgagatgcagattatagataggttatagatctaggtacacatacacggtactctctattggttctgtttctctgaataatccttactgatacattcatcctttccctcatgaagcaaataattattaggcacctactgtgggctctgttaggtaaagcaaataagacagggtctctgccctcaggcagggaatagacaagtgacttcccacatacaatgtagcgcgaccagtgctctgagtggggtgtgc

SEQ ID NO: 259520 - DNA, 662 bp, Homo sapiens
gtagttctcaactggggaaacgtttgctctccagggtacatttggccttgtctggagacattttttggttctctcaactaaggacagtgctaccggaatttagtgggtagaggccagggttactgctaaactcataatgcacaagacatcctcctgtatcaaagaattgtctagaccaaaatatcaataatgctaatgctcagaaatcctatcacaggacgatttattcctcaggaaccctattgtctctcctgatttggcctctatggaaaccattcttgtctataaagcaaatttctttatgtctaaacaccaaggtagagagaacttaagtcttagtcccagtccttgacccttatgtaacacagcagataaaaataatcatgtattaaggacctttcctaattcttttatctgaagtttctaagctttagcccctgctcatttgagctattacatggaaagtaactcacagcatattctttcattcaacaaatatttaatgagcacctactatgtagtagacatggtactagacattagatacacaatgattaaccaaacagactattcccctgccctcatggagcttacagtatgaaaaagaacaaacagtaaacaaataaatctataattacaaatgctaatgcatgccatgaagg

SEQ ID NO: 259521 - DNA, 440 bp, Homo sapiens
ctctctctccttgggcagcgtctaaatcccttgcatggcatttcacacttactaatttatgttactgtaaatacattgtgctcttgtttgatctccttgcaaaaatgtaaactccttgaggtcagcactgtggctatggtttctctgtggccctcaagagagaaaagaccaaattagggcagtagtctgagtcctctggaagtgggcctttgggtttgtctttgctttggactggatggatctccatggggcccgactacttctgaactgtggagtttgagttcctgggtgaaaattccaactctactgcttgctaaactggactgtcacttaagcctctctgggtcttggtttcctcatttgcaaaatgggggtaatagtagcccctacctctcagaggtatcatgaggatgaaatgaattagtgtatttgttttgaat

SEQ ID NO: 259522 - DNA, 411 bp, Homo sapiens
caaaatagataattaagggaagcttacactgtagttgggggaaacagtccataaataagtaattgaacaataagcaagatactgtcagaatgaaaccaggatcatgaagaaaaggaatcagaatgatttcaaaaagcatttgagggcaggggaacctgggactcttttaatgggtgcacctaaaagagggaagacctcacgaacatgtaaagtctgagcggagtcctagaagataagataaagcaaccatgagaagattttctctgagagcatgagaaacaggctgcagagaacatcaagtacctgccttcttcagacatctgtttccccacaaatagccatctattttacctgcagagaattttgcagttattctccttccctccccctctgcctttccctctccctctt

SEQ ID NO: 259523 - DNA, 681 bp, Homo sapiens
atttgaaattttcctgatggagatcatcattacaaaccttaggtatcactttacagcatgtggtaagcctgcctggaaccacagtgtacctcaacatgtaatattgattcaatgacccattgatagattgaagcctatagtgtcttatggtccctttaatgacctttaaaatatgtgatatagtagtatttttatagtttgtcaaattttgagcccattatgtcaacattctacctaaatagaaggatgagctaatcatacataaatttattctagatgaaacaacgtttttttttttttgactcagctgtgacttttggaaaagaaactagaattctagagaagttattattatacatttttttcctataaaatttatcctaacatatcaggcaatattttaaggtctaatcaatttatatatttagttgtaatttcacaattacaaaacaattgaaagcaaaaatatgaaaatcatcagtttgaattgatttgaagctatagtttcctatgtctatgagtggaacaaaaaaagtaacaaatattacttttatgtgttctactgccaaatcagatcctttgaaaggcacccacttagtaacttggaaatgaaacatttatacattcatccctgctaaattgctgcaaaatgtgatggttgggaaatatatattaaagagt

SEQ ID NO: 259524 - DNA, 163 bp, Homo sapiens
ttttttttgttaaacccagggaaaatgtgccaacttcattatttaagaagcttttaagggctatatattttaattatgctgaagaatgaataccttcatactattgactgctctttcaaaagccaagctaaaaaatgaaaactcacggatctcatttaatggc

SEQ ID NO: 259525 - DNA, 289 bp, Homo sapiens
tgatcccattctgccacccttgaaaagactatctggttatctaaacaagttgactctagaaagaccataggcatattttccctgaattgtataagaaggttttcaatagtgtactatacaaggggtaacctatcaagtgattattaaacttggaaagcgaacacagaccttggcccattaagtacagccccatgggctgcatcagacagaaggagccagccaaatgccactgagcaatccatttgaggaacaatttgattctctcatggattaatgaggtagggaaaaa

SEQ ID NO: 259526 - DNA, 275 bp, Homo sapiens
gccaggcatggtagcttacacctgtaattccagcacttagggaggccaaggcgggaggatcacttgagcccaggagttcaagaacagcctcatgagcaaagggaaactctctgcaaaaatagaaaaaattaacctgacaaggtggtgcatgcctgtagtccaagctactcaggaggctgagctgggaggattgcttctgcccaggaggtcaagactgcagtaagccgtgattgcaccacaacagtccagcctgggtgtcagcaaaatcttgtctc

SEQ ID NO: 259527 - DNA, 647 bp, Homo sapiens
taaaatggagtttctccaagttttatcctgtgattgatacttaagaaatttcaaaactcttcaacagcatccctgggtcaaattccaccccagagaatgtgtgcatgtatgttacatgtggcagtggcctatgtgtgtgagtgtatatgtgtgtgtgtgtgtgcgcgcgcccctacatccccaggctcattccacccactctcactgctccctcctcccactctcccctatagcgattcacttctcacatcactgctctctcttatcctccccactgccataccactgccgcttccaccttactatgccttccccccatccccttctcccctacgtgcctccttcccatcctctccccccctgcttcccctcttctcctctgctccatatgcactgcactcgccaagctgctcacctactcacggcactattactcctcctcttcctctctcaccctcacccatcctccccctgctccgcctcgtccctcctcctctgcacttcttactcactctccctacccctccctccactacgcttctcgcgctcctacctcccctcactcgcccctatctctcgctctctcactcctcttcccactcactcctctactcttcgtctcctacatcacctccccgctcctctcc

SEQ ID NO: 259528 - DNA, 412 bp, Homo sapiens
gcccagaagtcgcggttttcaccctgagaggttggagcgctagaaagcgagccgaaaggtttctctaatgttagtaatgtacgaaataataaaataattaccagtatttgagatctcgacttcatcgcggggccatgaactttctaatcagtttggaaatatttaccgaggaagcagcttcctcggagttccccccctccccccactctatcttttccacaccttactggacttcatccaggtcattaacatgtaaaccaaaccaacttcccaaatgcattaggctaccctagccgatagctgatgacttcacttatcctgaagagtttcagctgcacaggaagcagaaatagagactgataagggaggatacttatgttaaggttaaagcatgataaacacttttccttac

SEQ ID NO: 259529 - DNA, 497 bp, Homo sapiens
aggggttaggacttcaatgtgtcttctgaagggacacagttcaacacataataattattctggatgattttattaagaggtatctatgagcctccataaaataagcccatgtggttgctgggaagcagactgggttcatgaagagtatgtcatgtgatatctgctttaacatatcacactgacactgtaaatgtaactcctccctatcttcactagccttcaaagtctcatataagaatcaaagaaatataaacaaaaggagtaaaaatctatactagcctttgaaattcgggaaggattttatgcattccagtagacacaagagtggattgaaataactgatcagttgaggtgtcaacaaaggaaaagctcattaggagaaaaaatcaaaaggatctcactctaattctgtggaacaccaaaatactgctaagttcagagcaacggctcagagcaacagcaaagatgtaggacatccattgtagaacacatctcca

SEQ ID NO: 259530 - DNA, 455 bp, Homo sapiens
gcagatcatttgagagttggatgaatccattccttatacaccaaatttatgtaagttccagagttaagcaataattcataattattactaacaataattgtattaagaataacctgctgctttaaaaatgagatttaaggtcaatttaccttactcttggtgcttgtatttaataagtggtgactacaatgaagtcggcctctacaaaatcgttgggatttaaccagtccatcagaatggctgacttttatgcctagcaaattgtgttattttaaaatagtctgatacaacatattgatacaattttactttatgtacaaagttttatatgatttaaattcttcactgacaccacattcctaaaataattataatgctccctataatttcaaagaagcctggctgtgtaaatggtaaactatgtgtacactgatgccatggttaaaatcatttta

SEQ ID NO: 259531 - DNA, 310 bp, Homo sapiens
ttgaagtagctctgtggacttacaccagagagatgaaaagctgaaatccagctgccgttcattcctgctttgagattaggaaaggtagagctgaatttgggctatgttactcagaagcttttccccagctgatggaggcctgccctggaggtgctcagctccatctctgctgtccaggctgtgagcaagaacacctaaggaaagccagcagcctccttcactctccctccccatccattcaggtacaggccacaagtctgcagcatctcactacaaaatcagcacagaggcagtgatcacaccacgatga

SEQ ID NO: 259532 - DNA, 1016 bp, Homo sapiens
ggatgcgaaacgccgcgcttgccggagatagcattgagggcccttccgcggcccggcgtttcgtctcttgggacgattttgtgcgttccctcggtccccgtggggcccatagtcctcacttctgccaccccagagtcgtcgcgcttcactagacccgctccctccactgtcccggaggcccacagacattcccgcattctgaggctcgctcccgtcccgtgccgctgttaccggcctccggccccggctcatacaagcaggagcacatcgctcttttatgaaagcccttcaacatttaacgtttaaatgcgagggccgacctgtgacagacctggttgggagtgcacgtcgactaggatcttcctcgcctcgggcttcctatggagaggccgccgctggtctgagatttgggtccattaaagtaaatccagtcaacgcgagtgtgtcattccccagctatgcctgtctgcctggaatgcaagcctcgcggtggacagtgggctgatgtttttgccgtggaagcgcacggacgggagaaggagtgataatgatgtcaactaataacaggctaactgaaaatgatatttattgggaataaggcgttggcgaatatgcggtgccatagtaaaacgatttgcgcatcagaaagtaatggttttaaagaaaaatgaagaggaagataatggtttggaaataattaaccttggctacaaagaacagtagcaagtgtactcccggccgggcgcggtggctcacgcctgtaatcccagcactttgggaggccgaggcgggcggatcacgaggtcgggagatccagaccgtcctgcctaacccggtgaaaccccgtctctactaaaaatacaaaaaattagccgggcgtggtggcgggcgcctgtagtcccagctactcgggaggctgaggcaggagaatggcgtgaacccgggaggcggagcttgtagtgagccgagatcgcgccactgccctccagcctgggccacagagccagactccgtct

SEQ ID NO: 259533 - DNA, 424 bp, Homo sapiens
agtgcggaagcttgggatcttctgagcggggagaaaatggacggtggggaacagtagacaaagttagctgttctactcaaagaagtacctttaaaaagtcagagtaatgaggtaccagaaggaaatggattaaaaagttaagattatcactccagcctttgtcgctagagtcactttcaggacaggacacaagactgggttttcctggaagctgtccttacagagccccgtctttccccattgctgatcaaattgttaaattatcttttcattagtgtctccactactagaagatttcatcgttttactaaaaatctcctgcctaagccttcccagtagctgggactacagggacaagccaccgtgcctttactcagttttatgaccaccaacctttaacatacgcacaagtttgtagattgga

SEQ ID NO: 259534 - DNA, 393 bp, Homo sapiens
tactggttaacagaaaaaatttgggcagcatttcatagaagacaactgcaactctgaacatctatccaatcagttcaataataatttccaaatgtacttaatggcctattaaatcagtaattagaaatcaaattttgctaggctgcaaaagatgtcagaattatgtatgctcagactaagatattttaaaattaaaattgtatttaattagcattcctcggagaaatatattttaaaattaaaattttatttaattagtgttcccataatctatattaaaaatttatttgtatcctgctgacttacaaaaatatatgcagggcagggtaaagatacaaaaagagcttgtggtggttaaaaaaattcaatgacataaaacagttaacaaccaca

SEQ ID NO: 259535 - DNA, 741 bp, Homo sapiens
ttaggggcctctcttttagatttagagattaagacatccaaaaaaagtggatactcagaacattccacacatagaaaagtaaaaccttttaaagttgaaagaaacaacagttgtagtgttttttgttttgttttgtttattaatgtgggagagtgatttaatggtctgtatggtcttttggacattctaaaaatcctgctaaaatgggagtaagagttctaagttaagcaaaaaggacaactttttgctcatgcatgctttaatacaaattgggatatactgataaagggaattaaaaaatattttaaagtggtgaacacatctggtaacgtttatttttaatttttgtctgaaggtagaggggatgtgaattagataataggtcctttcctattctgtgaggtacaatcgtctctctgggtgataaagtacatatcctattaatattatacttaggattttgttcctcttcttcccttccaaattcatttttccattttgtaaataataaagatttctgtttacccatttgctccttttctcctccgtcttcccttcaatggaagctgacattttactgatggtttaccagtctaggtatcctgctgagaagtagattgagatttaagaaaagcaacttaccattggaatgaatgagatttactgaggaattctaattttttaaagtgcttaatttgacagtggtttacctactgttcagctgactcaaagtgaattatt

SEQ ID NO: 259536 - DNA, 434 bp, Homo sapiens
caagtgtttgctaaggcataacacatgtgacttttgctgtagttccaaataagtttctcatttccatctgagacttcatcagcctgtccttcactgtccatatcactattagcattttggtcacagccatttaaccagtctctaagaggttccaaactttccttcatcttcctctcttcttgtgagcctttcaagatcttccaacttctgcctgtaacccagttgcaaagttgcttccacattttcagatatctttatagaaatatctttctccctggtaccaagtttctgtattaggccattcttgcactcctgtaaaaaaatacctggggccaggcatggtggctataatcccagcactttgaggggccaaggcaggtggatcacctgaggtcaggagtttgagacaagcctggccagcatggagaaaccct

SEQ ID NO: 259537 - DNA, 409 bp, Homo sapiens
gaagtaatgtcaatctgtccctatcctacagacctcagtaggtgcttagtgagtttgggagatttagaaaagcactgctggattaagggcaagcagagcattttcttggatgttcctcatgggtgaggaaaaggatactggattcttattatgcaagctggccatagcccctaggagtcctagaaggcttcaggaaaggacataggaccagactggaccactctgttctctctgggagaactcaacatcttgcactcaggacttaagccatgtaggaaagacacacaagaataggcctctggatcagaggtacccggtggcccagaatggtcaggggcaagagagggaccaaattcatacagctcctggtgggctttcttcagataaaaagtaaaaggcagagtgctga

SEQ ID NO: 259538 - DNA, 1551 bp, Homo sapiens
  misc_feature (1068)..(1068): n is a, c, g, or t
aaaacatgttgatcccaatgatgtgatcacttttgaacctttccattacaaagcattgtatagataactttttaattcagtaggaggagaaagttcattcttggcctgttggctttgattattatgggtactttaaagtcagtatttatcaagaaagggaacttgaccaccattggcacatgtgacatttaagctcttcagccttttcctttttagttgtaggtgtttacatttcatttctaagccaactctgtatttatgagagaagtttaagccttacatcatttgatactaaagggttatttgtggtaaatgaaaaatgaccccaaaattacagaggaatatgccagtttaagaaatggctacttaaagttgcttctctctttccttcttactcatgaaattaattggtcttcttcaagtttctttagattccattaaatgattaaatcactattaagagccattcatcaacgtgatttgtgtgttagccaatgaatctgtctcagcttttgaccaaatgggttttagacaaatgcaaagatctgcctctagtccatatggctctttttgagtgctagtattttgcatttcacataatgtagttattttgagcttttaaagagagcatttagacaaagaagcaaagagaggaagggaccaatcaactcatcagttccatgcatcaacaaagcatagctagtagaggaatataaatgacagattgacaaactgtaggaaacactgttactctctttctgaagttttcaagcaccatcctatgtgaaagttccctcctgtccaaacaagctcaaggcccatcttctccctatacaaggcaaacctgtaaggccttccttccaaagagtacattgctttggttttcttcctaaattcctattggaattagaactctcagaatccctgggagacagagcaaagatgacttaattcattgagcagcagagctccctataagtgaacatcaccttccccatctttcctactgccacacccatacgagagaggatctagaaagagcgatggcagcctgaacacagaaaacanccccacttggcagacctctcctcagcaatccccccagcctcatgcttcacttgcaaagtgtgacataaccacgggacgagtgccttgcttgaaccaaagcaacgatttagccagtctggacctctctgtgctttttttaattcttcctgtgaatacctcagcttcaactgggcctccatacagtcagttggtgggcttattgtactgtggtgctttgcaatgcaaccctgcaaagaacaagatttgtactaataccaaaggttctttctctatgtctcctcctctgcctccctcgttcttcccttttttctagttcttcacggttccaaagctttactatgaacctgggcatgttggcaatgcagaccgcgcaattccttaccgaattttctcagatatacctcatagacaatagtgtttagagtaatgttattatagcgtatgtaataaattattcactgtttcttttggtaactgtgattt

SEQ ID NO: 259539 - DNA, 763 bp, Homo sapiens
ggctgtacgccccggatgttacgggaccgagcatggcacagcacggggcgatgggcgcgtttcgggccctgtgcggcctggcgctgctgtgcgcgctcagcctgggtcagcgccccaccgggggtcccgggtgcggccctgggcgcctcctgcttgggacgggaacggacgcgcgctgctgccgggttcacacgacgcgctgctgccgcgattacccgggtaagtaaaccgcgtttacttaacgcggaccggccaaggcgtcccgcggaagccgggatgggtgggcgccccccttcccgtgctcagaccggcgttgctgaggtctaaggagggtgggcacagagccgccagcagcgggagccttccggagggaggcaggatcccagagggaggcggaggtgtgccagctccagccagtggccccggccgggagcaggggtgagccaggtgggagcgccctcaagaggggtctggggtctggaggtggaggacggctgttccaggtcctgctgggcgggtcgtgagcccttggccatcgcccagccccctcctgcccagttgagggcccccctgcaccaccgtctggcctgctgcctgcctctgacctgcacctggggatgagggttcagctgacacggctggtctggagaggaagctggcagggaagtcaccccagagcttcttcctccagggcctgtgggttgggaagggaggctctgtccggaggcccagtgtggctggtggtggggacagcagcgcccag

SEQ ID NO: 259540 - DNA, 1093 bp, Homo sapiens
ggctgtacgccccggatgttacgggaccgagcatggcacagcacggggcgatgggcgcgtttcgggccctgtgcggcctggcgctgctgtgcgcgctcagcctgggtcagcgccccaccgggggtcccgggtgcggccctgggcgcctcctgcttgggacgggaacggacgcgcgctgctgccgggttcacacgacgcgctgctgccgcgattacccgggcgaggagtgctgttccgagtgggactgcatgtgtgtccagcctgaattccactgcggagacccttgctgcacgacctgccggcaccacccttgtcccccaggccagggggtacagtcccaggggaaattcagttttggcttccagtgtatcgactgtgcctcggggaccttctccgggggccacgaaggccactgcaaaccttggacagactgcacccagttcgggtttctcactgtgttccctgggaacaagacccacaacgctgtgtgcgtcccagggtccccgccggcagagccgcttgggtggctgaccgtcgtcctcctggccgtggccgcctgcgtcctcctcctgacctcggcccagcttggactgcacatctggcagctgaggagtcagtgcatgtggccccgagagacccagctgctgctggaggtgccgccgtcgaccgaagacgccagaagctgccagttccccgaggaagagcggggcgagcgatcggcagaggagaaggggcggctgggagacctgtgggtgtgagcctggccgtcctccggggccaccgaccgcagccagcccctccccaggagctccccaggccgcaggggctctgcgttctgctctgggccgggccctgctcccctggcagcagaagtgggtgcaggaaggtggcagtgaccagcgccctggaccatgcagttcggcggccgcggctgggccctgcaggagggagagagagacacagtcatggcccccttcctcccttgctggccctgatggggtggggtcttaggacgggaggctgtgtccgtgggtgtgcagtgcccagcacgggacccggctgcaggggaccttcaataaacacttgtccagtg

SEQ ID NO: 259541 - DNA, 890 bp, Homo sapiens
ggctgtacgccccggatgttacgggaccgagcatggcacagcacggggcgatgggcgcgtttcgggccctgtgcggcctggcgctgctgtgcgcgctcagcctgggtcagcgccccaccgggggtcccgggtgcggccctgggcgcctcctgcttgggacgggaacggacgcgcgctgctgccgggttcacacgacgcgctgctgccgcgattacccgggcgaggagtgctgttccgagtgggactgcatgtgtgtccagcctgaattccactgcggagacccttgctgcacgacctgccggcaccacccttgtcccccaggccagggggtacagtcccaggggaaattcagttttggcttccagtgtatcgactgtgcctcggggaccttctccgggggccacgaaggccactgcaaaccttggacagaagacccagctgctgctggaggtgccgccgtcgaccgaagacgccagaagctgccagttccccgaggaagagcggggcgagcgatcggcagaggagaaggggcggctgggagacctgtgggtgtgagcctggccgtcctccggggccaccgaccgcagccagcccctccccaggagctccccaggccgcaggggctctgcgttctgctctgggccgggccctgctcccctggcagcagaagtgggtgcaggaaggtggcagtgaccagcgccctggaccatgcagttcggcggccgcggctgggccctgcaggagggagagagagacacagtcatggcccccttcctcccttgctggccctgatggggtggggtcttaggacgggaggctgtgtccgtgggtgtgcagtgcccagcacgggacccggctgcaggggaccttcaataaacacttgtccagtg

SEQ ID NO: 259542 - DNA, 1072 bp, Homo sapiens
ggctgtacgccccggatgttacgggaccgagcatggcacagcacggggcgatgggcgcgtttcgggccctgtgcggcctggcgctgctgtgcgcgctcagcctgggtcagcgccccaccgggggtcccgggtgcggccctgggcgcctcctgcttgggacgggaacggacgcgcgctgctgccgggttcacacgacgcgctgctgccgcgattacccgggcgaggagtgctgttccgagtgggactgcatgtgtgtccagcctgaattccactgcggagacccttgctgcacgacctgccggcaccacccttgtcccccaggccagggggtacagtcccaggggaaattcagttttggcttccagtgtatcgactgtgcctcggggaccttctccgggggccacgaaggccactgcaaaccttggacagactgcacccagttcgggtttctcactgtgttccctgggaacaagacccacaacgctgtgtgcgtcccagggtccccgccggcagagccgcttgggtggctgaccgtcgtcctcctggccgtggccgcctgcgtcctcctcctgacctcggcccagcttggactgcacatctggcagctgaggaagacccagctgctgctggaggtgccgccgtcgaccgaagacgccagaagctgccagttccccgaggaagagcggggcgagcgatcggcagaggagaaggggcggctgggagacctgtgggtgtgagcctggccgtcctccggggccaccgaccgcagccagcccctccccaggagctccccaggccgcaggggctctgcgttctgctctgggccgggccctgctcccctggcagcagaagtgggtgcaggaaggtggcagtgaccagcgccctggaccatgcagttcggcggccgcggctgggccctgcaggagggagagagagacacagtcatggcccccttcctcccttgctggccctgatggggtggggtcttaggacgggaggctgtgtccgtgggtgtgcagtgcccagcacgggacccggctgcaggggaccttcaataaacacttgtccagtg

SEQ ID NO: 259543 - DNA, 371 bp, Homo sapiens
gtgtctacaccccctcctcacacgcacttcacctgggtcgggattctcaggtcatgaacggtcccagccacctccgggcagggcgggtgaggacggggacggggcgtgtccaactggctgtgggctcttgaaacccgagcatggcacagcacggggcgatgggcgcgtttcgggccctgtgcggcctggcgctgctgtgcgcgctcagcctgggtcagcgccccaccgggggtcccgggtgcggccctgggcgcctcctgcttgggacgggaacggacgcgcgctgctgccgggttcacacgacgcgctgctgccgcgattacccgggtaagtaaaccgcgtttacttaacgcggaccggccaaggcgtcc

SEQ ID NO: 259544 - DNA, 231 bp, Homo sapiens
ccttgactcaaaccaccaaatggctgaataattcaagcttgagttttttgaagaattttgaatcccaaaataagactcctaaggaaatagatatgatgtttctttcttcctccccttttaagcctaattagggtttgtacttaggtaatggagggtcagattcaggggaaagtcttgctagtatgagcttaaactatacaccagaatttctctatacccataagcttcatt

SEQ ID NO: 259545 - DNA, 1015 bp, Homo sapiens
cctcaagctcggttcagagtagccttgcttttctccttggcatggtcacggaatggatacctgtttgatcttcctgcactgctgagaaatcttccttttgggggagaggattaagtctgggttgaggtaggccacctgttgagacctggtgaaagatcaggtataataatgttctgcagtgaaaagaaattgcgtgaagtggaacggatagtgaaagccaatgaccgtgaatataatgaaaagttccagtatgcggataatcgtatccacacatcgaaatataatattctcaccttcttgccaattaatttatttgaacagttccaaagagtggcaaatgcctattttctttgccttctgattttacagctaattccagaaatttcctccttgacctggtttaccaccattgtgcctttggtcctggtgataactatgacagctgtcaaagatgccacagatgactattttcgccacaagagtgataatcaagtgaataatcggcagtctgaagtgctcatcaacagcaaactgcagaatgaaaaatggatgaatgtcaaagtgggagacatcattaaattagaaaataaccaatttgttgctctcattaaagattaggaataataccctggaaggtggtgtctgttagaacatactctgtgcgtggaatcaaggtagctccagtgtaagggcactagatggggaactgggagagaactgagactttgcttcattctttcagtgacagtaaagactttatcttctttgtctttggtttgtccatgtgtcaaataagatgctagaccactacaggatctcaaaaatccgttccatgctgtgattctcttttaagctgacactagactatacgattcttgcaggcaaagcacctattgatttgcctgttttccaacacttggtgccatgttccatcaacaggggcatttggtaaatgttagctgaataattaagtgttgatctttgtaagaaagaagacagaaaaaaaagaaaagta

SEQ ID NO: 259546 - DNA, 1170 bp, Homo sapiens
cctcaagctcggttcagagtagccttgcttttctccttggcatggtcacggaatggatacctgtttgatcttcctgcactgctgagaaatcttccttttgggggagaggattaagtctgggttgaggtaggccacctgttgagacctggtgaaagatcaggtataataatgttctgcagtgaaaagaaattgcgtgaagtggaacggatagtgaaagccaatgaccgtgaatataatgaaaagttccagtatgcggataatcgtatccacacatcgaaatataatattctcaccttcttgccaattaatttatttgaacagttccaaagagtggcaaatgcctattttctttgccttctgattttacagctaattccagaaatttcctccttgacctggtttaccaccattgtgcctttggtcctggtgataactatgacagctgtcaaagatgccacagatgactattttcgccacaagagtgataatcaagtgaataatcggcagtctgaagtgctcatcaacagcaaactgcagaatgaaaaatggatgaatgtcaaagtgggagacatcattaaattagaaaataaccaatttgttgctgctgatttacttctcctatcaagtagtgagccacatggtctctgttatgttgaaactgctgagcttgatggggaaacgaacctaaaagtccgccatgcactatcagttacttcagaacttggagcagatatcagcagacttgcagggtttgatgggattgttgtctgtgaggtgcctaacaacaagttagataaattcatgggaatcctttcttggaaagacagcaagcattccctcaacaatgagaagataatcctgagaggctgcatcctgagaaataccagctggtgttttggaatggttatttttgcaggtcctgacactaaactaatgcagaatagtggtaagacaaagtttaaaaggacaagcattgatagattgatgaatactctagtactatgggaaattcaatctgggagagtcaaactggggaccaattcagaactttcctcttttggaatgaaggagagaagagctctgtgttctccggattcttaacattctggtcatatattattattctcaatacagttgtacccatttccttatatgtgaggtaagatgaga

SEQ ID NO: 259547 - DNA, 575 bp, Homo sapiens
agctgagttcctgacgtaattcatatgattaatggtaagaagaggtttgcatacttgcttttcaaatgactatttcttggagttagatgcgtaattagatcatgttgatatgactaattttgagttcaagttaaccttaaccacacttctatcttatttcagatttttgggtttctgatatgcttgggaattattcttgcaataggaaattcaatctgggagagtcaaactggggaccaattcagaactttcctcttttggaatgaaggagagaagagctctgtgttctccggattcttaacattctggtcatatattattattctcaatacagttgtacccatttccttatatgtgaggtaagatgagagtttatattttaatgaaataatttcatcaaaacctttgtttccaatattatttgttttaaagtttcagcagtgcaatagatgtcttgctcttaactgcttatgatctgcaacatctgttacaaatgggacagcttagctgtttaatctgttaacttttatgttttcaaattacaataaatgcggttaattttcttcttgatttga

SEQ ID NO: 259548 - DNA, 413 bp, Homo sapiens
gctgattctgattgccatctagcagcttccggtggtggtaagtggtcaagagtgtttttccaggagttgatctcaggtttttgagaatgccccctagagacccagtttgttttctgtatcatccctcaagctcggttcagagtagccttgcttttctccttggcatggtcacggaatggatacctgtttgatcttcctgcactgctgagaaatcttccttttgggggagaggattaagtctgggttgaggtgagtagatgggtagcattcaatggttagtgagatgaagtggaaatttagctgtgggctggttggaacgatctgtttcttttctccagatccctattttgttttgctgttttcatcttggtgactaaggtttcacaaatattctttattattccccttttgct

SEQ ID NO: 259549 - DNA, 392 bp, Homo sapiens
tttttttttgcttatttcaattattttagccagtaattgtattttacttagaagaaaataagccaataatatttaaataacaaaaaggtgaattctatatatatatgggttatactaaaattttttgtgttttaatcatagcatattcttaaataaggcagggaaaatcaataaaatggaaatttatgtagtcaaggataaacaaataaatcataaatatttaatctaaccttcaattttgcatgtgttaaagtacagatgaagggaaataagaattaggaaattcctaaaggtatgcagagatgatgatgtagatgcctatttttgaaagctaaataaaacttactagttatcttaattttaaaacagttgctaatacttcctggattatc

SEQ ID NO: 259550 - DNA, 105 bp, Homo sapiens
cattacccacataaacagcacacacaccaaaaagcatcagcagcccctcatgcacccctccatagccgctctcacccccaaaagtaacccctcttgacttctatc

SEQ ID NO: 259551 - DNA, 240 bp, Homo sapiens
ataagccattgtgctggccaggtggtcccttttctgttctactctctcccaccctcatgcctccaggatgagcttctggccttctagaaggaatgaactggaggaggcccaaaatggcctctcctgaggctgatttgaaggaatgtggggtgtttttcttggagtggggaaaacttaggtatgcggtggttatctccagataccttttgttccctaaagcttttttaaaaaaatgattat

SEQ ID NO: 259552 - DNA, 735 bp, Homo sapiens
ctgcattctttgaacagtagtctccagaggttccagtagataacctcaaggagcacagcaccagggagtaattgccctcagcaaacctcctggtggcaggtgcagaagcgagtttgcccacattttgcaatcatgataaacagttggctgtttgatcatatagccttcagtggaatgctgagttggtcacgaccctcaggcctttggctccctacattaaaacacccatttcaccagattaaaaatattcaataaaatttctaaaaagcacttaacacttgccagcacttactaaggaagtgctcaataaatgctgttaacactcttactattatttctctgcttggcagttgtcctaatcccacaccagcccttccacatagcctaatcctgacttgtgtcagtgatgcatgactcaacagtgaatctgggacagctattgcaaaatgcaagacttaaaatccatcccagatgaattctcttctggaccgcaggcagcccttgaaaaggatgagagtagagccctcaatcatggaggcatttgtccctcaagataggcagatgttaccacctccatacaagaacaatcccattgcctattacagttcccatttcagagagatactcccacatatgtatgtatttccctgaaaggtttcttgttcctcttctttttttatttttttgagatggagtcgctccagcctgatgacagagcaagatgccatctcaaaa

SEQ ID NO: 259553 - DNA, 449 bp, Homo sapiens
ataatggtgagaaaatgagaaaaatgcatgcaagcttagcatattattagagtgataaatgctaacaattataaatcatgtcagggcctctacattattttagcatttactttcctctgactatctgtacattactggataaaaatattttattgatcaccagatattaaactcctgtgaatttctgtgtgttgatggtgaagttggtgggaggatggtgatgagacttacttgaagacaggaatgtatgtgagttgaccatgtcagtaagctgagatactgtcaatttctgaaggattcctctggctgagtctacacagttaagaagtattatatatttcttgatgtctttcctaatgtctaactgaaattctctaattgtctcatgttttattcctcatttatggagatgctggacagcattaaaaaatattgaaacgtgaatactt

SEQ ID NO: 259554 - DNA, 411 bp, Homo sapiens
ttattaaggtctcccatgtgtctggtttggttttcagtctgtttttctatgcatgttttttcatagtgtgactgtagcctttgttagatttgtggccttttccctcaccaaactgatgaatttttttcatgttgcatatttttcattactttctttgacttgttgcaaaaacactttggataattataccccaatttccctatttattcccctaatagtggacattaaggtcatttcctgtgttttgttatatgtatgttatgaatattttatgtatagatgtctgcaaatttttctcctttttagcattacaaatctttattttaaaatgattagacacatgctactgtagaaacttgaaattctatataagtatataaaataaagagttaaagttctctcattatcgtc

SEQ ID NO: 259555 - DNA, 400 bp, Homo sapiens
aatattatgtaaatatgtggatatgttttagaactaggatgttggggttatgttccaaagaattgctacattctggggagtgtcaaaagcgagggatcaaccaactcaacaaatagtggccaggagcagtggctcatgcctgtaatcccagcactttgggaggccaaggctggtgtatcacttgaggtcaggagtttgagaccagcctggccagcatgggggaaactctgtctctactaacaatacaaaaattagccgggcatggtggtgcacgcctgtaatcccagctactggggaggctgaggcacgagaatcgcgtgaacctgggaggtagaggttgcagtgagcaccactgcactccaacctgggtgatagagtgagactttgtctcaaaaaaaaa

SEQ ID NO: 259556 - DNA, 2064 bp, Homo sapiens
  misc_feature (971)..(971): n is a, c, g, or t
aggaggcgccgggaccatggtcaccctcggctgagtttccggcggcgactttgattattggcaaataaccaccataacaataccgagcccccgggcttgcaccgcacgcactgactccgcgagcccgcacacggccgcgtcgcccgccaccgggccctgagcgccagccccaaacgagccgatggaaaaatccaaaaatttccgcatcgacgccctgctggcggtggaccccccacgagccgcctctgcgcagagcgcgccgctggccttggtcacgtcgctcgccgccgccgcatctggcaccggaggtggcggcggcggcggcggggcgagcggcgggactagcggcagctgcagccccgcgtcctcggagccgccggctgcgcccgccgaccgcctgcgcgccgagagcccgtcgccgccgcgcctgctggccgcgcactgcgcgctgctgcccaagccgggcttcctgggcgcgggcggcggcggcggcggcacgggcggcgggcacggggggccccaccaccacgcgcatccgggcgcagcggccgctgccgccgccgccgccgccgccgccgccgccgccgctgggggcctggcgctggggctgcaccctgggggcgcgcagggcggcgcgggcctcccggcgcaggcggcgctctacggccacccggtctacggctactccgcggcggcggcggcggctgcgctggcgggccagcacccggcgctctcctactcgtacccgcaggtgcaaggcgcgcaccccgcgcaccccgccgaccccatcaagctgggcgccggcaccttccagctggaccagtggctgcgcgcgtccaccgcgggcatgatcctgcctaagatgcccgacttcaactcccaggcgcagtcgaacctcctggggaagtgccgccggccgcgcaccgccttcaccagccagcagctgctggagctggagcaccagttcaagntcaacaagtacctgtcgcggcccaagcgcttcgaggtggccacctcgctcatgctcaccgagacccaggtgaagatttggttccagaaccggcggatgaaatggaaacgcagcaaaaaggccaaagagcaggcggcgcaggaagcggagaaacagaagggcggcggcgggggcgcggggaagggcggcgcggaggagccgggagccgaggagctgctggggccgccagcgcccggagacaagggcagcggacgccgcctgcgggacttgagggacagtgaccccgaggaggacgaggacgaggacgacgaggaccatttcccctacagcaacggcgccagcgtccacgccgcctcctccgactgctcctcggaggacgactcgccgcccccgcggcccagccaccagcccgcgccccagtaggagccccgcggcccagcaggtgcggcgcgcacggagcgccccggccggcggcttctcccggaggccccggcgcccgcacccacccggcccggccccgagagcaggctcgaccgccgccccatggacccctcgcccaggccggggctggagggattcggccgcggcctccggtcctgggcgcttcccttttaagcaagggcgcctcacctgctcttcaagaaacagcgagagggagacccagggggctgaaacttgaactctggttcttttaaaattaattttggttggtgttgggggaggcgcgagtgcgtgtgagaagaaccgacccaccccgcgcaaggggaagcctcctgtctcccctttccccgcgtccgagaaggcggaaacccacagtgttacctgacttatgaaacttgaaaccgcctctggagccgccattctgcagagtatttggaaaaagaaaaaagggtttatgcttacgtctctggggtcggggggattatgtcacgagcgttcaaactgctggaaatctcaaaactgtactgtctttatttttgtatattgtatttatatataaaaagaaacgtctacgtatgcatgctaaattattatttagcttctcccatcgcccacgatggaatgtaaaataaattggttttgtactggaaaag

SEQ ID NO: 259557 - DNA, 348 bp, Homo sapiens
gagctgacccagaccctgagcagtgccccgagtggagccacccttccaagggaatcagcaagtatggctgagaccatgtcagcgtgactgccaatgacacctcattgatgatgacctctccctcccttccaggccacttctcttgggtatagaaacaactcttttgaacattcagcattcctacccctgtatgtgcttggatcaaaaacaaagatttaaatggaatttttagtctgtaaagtgttttatcctcatttttgctagtttgttatcaaggagtctcagagttgtattaagtgtatattgcatgactgattgaaaaaaaataaagaaaattcagtcaccaga

SEQ ID NO: 259558 - DNA, 557 bp, Homo sapiens
ctcagtccacaggaagtagaggtgagattttagctggcacatagcagaatcaacaatggtaagagaaaatgcaaagcagtggtatatattacatttcatgacttgaatataaatttaaactgttgttaggctatggtctctgtccctttgtgtacttcccatgagcactcatcagaactgcttttcattcagttaggtcttctgtgactagttgggtaatactgaggcatcagtttggtggaagctactgatactgtacttcctcatttagcccagttggttctcagagtttataagtccattggccccttaaggaagtcaatgaaagccatagattctgtctaggaaaaattgtatatacttgaccatgggacctgggattaaatatctctgccctgtcccaacaatatcggcttatcttaaccactctcaaaagtgttggagataaatggcagaaagctactttttatacctcagtagaaaaaaaaaaatgagcaagaacagatatttcacaagagaagatcaatgaccaagcctataaaaaactggtcagcctt

SEQ ID NO: 259559 - DNA, 415 bp, Homo sapiens
gaacttcaatacgccggatagaacaaatgacagaaggttactaaacagaggacttgaacaattcaatagaccagttgaacctaacagacataaagaacactccagtggctgggtgcgatggctcacgcctataatcccagcagtttgggaggatgaggcaggcagatcgcttgaggtcaggagttcaagaccagcctcgccaaaatggtgaaaccccgtctctactaggggtattgtactgtattttgtattgtaaaaataacaaaaaaaaattagctgggcatggtggcacatgtctgtagtcccatctccttgggaggctgagtcacaagaattgctggagcttgggaggtggagctaacagtgagccaagatcgtgccactgcactccagcctgggtgacacagtgagactc

SEQ ID NO: 259560 - DNA, 1832 bp, Homo sapiens
agtttccacaacgtgaccccagtccctaccctcaggtccccatgccagtgggggatacagacaataagcaaaagaagtgcatcctgtcacatcacgttagaaggtggtaggtgcagccgggtgcagtggctcacgcctgtaatcccagcactttgggaggccaaggcgggtggatcatgaggtcaggagttcaagaccagcctggccaagatggtgaatccccatctctactaaaattacaaaaattagcccggcatagtggcaggcgcctgtaatcccagctactcgggaggctgaggcaggagaatcgcttgaaccggggggcagaggttgcagtgagccgagatctgcactccagcctgggcaacagagcgagaatccgtctcaaaaaaaaaacaaaaaaaaaaaaaacaagaagaaggtggtaggtgccgtagagaaaaatgaagcaggctgaaagcagtgaggcatgtccacagattacaaaaggcacgtccaggaagtgggcgtgtaggcagtgagctgaaggcaaggtcattattaaagtcttattatgaggcagccactgaagggtttcaagttcatggttctaattgttttacattttaaggacaaacccaacatacgggccacttttcacacgagtccaaatcaaaagctattttattataacagaaaaaaactccccctttgatatagtcagtcagatacaagccaatgcacacatgttctcaagataaatgataacttgtctgcaagtaggaggacctggcaacaccgcttaccacagcagttctaaattccgtgggaattgggatggccatctgtgtgagccaactgtctttaaccaaaggaaaaatcaagcatgtgatacgtctagggcatacaacttggagccacgcagctaagctaaactcccatgagacagggatctccacggcagtgctctctcttttatgtttacatttcaaacaagtggcccttaaggaaaacattattgggttgtaaagaaagaactgatatattttctaaggaaaatgaactaagagaggggaagaggaaagtctctctttttgcaccaggaaaaacccaatattttctttttagcttttaatataaatcttaatttatattattgatatttattatgaaacaagtttatataaaaatttttagatgggtaaatgtttgcatgcgcggacccctctacagagggcgtgactcacatggatacctttgggaaggcattctggtggcgggaagggcaaagccaggggcctgagagggaaactgccggctgctggcagaacagcgaggaggccagagggtcgagggggagggtcacaggtcagagagacagtccgccctgagcccttgcccttgaccccaggccattgcttcagacaccatctgttgtgaggaccaatccattgtgacccagtgtttttgtaccatacaataaaaatgcactgctagaaaaacaaaattaaaaaccacagtccactgatgtcacttataagccagacacacagaacaaatgccgtctgattccacggatgtgggattacctagaggagtcaagtccacagggatggagagtatacggagggcgccaggggcttgggcgtgggaagaggaattactgtttaataagtacagagtttcagttttgaaagatgaagaaacttctggagatgggcgggggtgatggttgcacacgacatggtgaatgcacttaatgcccctgaactgtacacttaaaaatggttaagatgggaaaggttgttacgtatattttactacaataaaaagaacattttttaaaaatctga

SEQ ID NO: 259561 - DNA, 245 bp, Homo sapiens
gctactgtaagttatggcttggaagtactgctattagacacagcttttgttttcccaagctatgtcatcttgctttataacatttacataatgccatgaactatgtgtaatccataccctattcttctttcacatctttcgggtgtctgatgtatgtctccaaataatattttcatgaagaatacatgaatgctctatttcctgagcctttgaatatatgggattgttcatttgttgtcttcaca

SEQ ID NO: 259562 - DNA, 493 bp, Homo sapiens
gcccactcttgagacttgtagcatccccagttcaccctctcatttgtcactaggaaaactcctgtcagctggcattcatatttcaacttaaaagaagcagtcgataatcaatgcctacacctgagatcaagtaacatttagaagcactggagggaagcaaacaacatatattgtcaatgaagaaccagacatgaagctggatattttacttgccttatctcattcaatccataagacgaatattatggcctcccattttacatctgaagaaactggaggtcagaaaaaggctaagtccagagctggctttttgttgttattgtcagtttgtaacaaacaccatcctgcttagtatgcaccctacactgctctaagcaccttaataggaatgcatttaatcattgtaaaaatcctgggattctattgcaggcttaggtgactcaaaagccactctttccacgacaaccctattaaaacaagaaatgtgaataag

SEQ ID NO: 259563 - DNA, 455 bp, Homo sapiens
gaagtggtaacaagaaggcatggtttttcttttcttttttaatatttaggagaaaggatatttgaatatgtttacatatacaattgaattcagctgtctttcctggaattgctactatgttccatgcaatttgttaatgcatagcctacttacttacttaggcaatagagacctttgaagatcaaagtagaaagggactgattaatgaagcaagaatcaagggcaggcagacagtggaggggagggtgatgggactcagagtaagaacatagcaataaggaagaagtcagagaaatttagaaatgaagaaggctgctattctcctcctggatcttttagcaggctggaggcaaagttaactgatgaatgtccaagaagtggggattaggagctggaggagaatggaagtcattggaaaaattgctgttgggaacacagtaggcaaagcaaaaaaa

SEQ ID NO: 259564 - DNA, 419 bp, Homo sapiens
gtattcgatattaattttatcttcgttctttccttttgattgaggaattctttatctctcattgttccatcttttgaaaactgttttcaaatttctatttgttagtcttcattttgatctacctctttgcttccttctggctccctgtgataagtatgccagtaaggtatatttattcattgtggagaatttatttaatgatagctaccacttttatatgctttcaataaatgttccaggcactgtgctcaacattttacatgcattgtttctctatgtcttctttagacaataagttctttaatgtaaagaacttctcagtacctgtcatactttgcagtcaataaataactacatgaatgaaactactgattccatatagagacagggaagtttatagctgtaaatgcctacattta

SEQ ID NO: 259565 - DNA, 507 bp, Homo sapiens
atacctgggaggaggggggtgcactcacgttggaacactagccaccaaggtatgaccagtgctacatcccatcctccctcacaataggctaaaaaaatagatgtgacatacatctaaaaggacattgcctctgtaaagatgagtgacaaatcaagaatggatgaactttaaagaaggctaacatgaaagagagacaagaaactcaatagacgataaaacttccatctgagaaaatgaattaacacagcaagaagattaggtcttttcaataagtatgacttgtatcattaaagaaatgtgaaagggtaatatacatatgtataagaataaattagatattgtggaaatttgaatgattgttgaaataatttaatagaagggggttgggtgtgatggctcatgcccgtaatcccaaaactttgggaggccaaggaaggatagcttgaggctaggagtttgagaccagcctgggcaacatggcgagactacgtcactacaaaaaaataa

SEQ ID NO: 259566 - DNA, 516 bp, Homo sapiens
gagttttccttccctcttatttggtcctcaacatgggttttgcatcaatggagtagcatgtcctacttaacaaaatgccagaaagtaagtgccttggtgaggctttaagcagcttccagcagcattgccacaatatgtcccataatgatcaaccctgatgaattttgagaatatgcatagtaaagacatttagactgggcttgagcaagaaagaatttgtcaagtcattgaaaataagtaagaatgactgttctataagctataaatgtactttttacaaattattggctataacatatgtggaatataaatatttggaaaatatcatatgggcatcacatatttttttttatcagactcttgatttttttttttaaagagatagagtctcactctgtcacccaggctggcatgagattatgccattgtagctcattgcagcctcaaactcctgggcccaagtgatcctcctgtctcagcctcctaagtatctgaactacaaccatgtaccagtat

SEQ ID NO: 259567 - DNA, 351 bp, Homo sapiens
atgcttgatgaatctctaaattaagaatttaatagtaaatcttttgttgttgatttaaccatgttactatgacatcaagtctgtagaattattggatagacacaaagttacctaaaatacctcagctctttctcctcttgccatattattggttattaatgaatattagggtgagtcttctaacagtgggagtgataaatacctcagctctttctcctcttgccatattattggttgttaatgaatattagggttagtcttctaggagagggagtgataatgtagttggaagtcattctcaagagagtcttccctcaaatcggaagtgaaaatctcattaaacatcaagcg

SEQ ID NO: 259568 - DNA, 1246 bp, Homo sapiens
  misc_feature (6)..(6): n is a, c, g, or t
  misc_feature (12)..(12): n is a, c, g, or t
gaggcngtgcgnttacgggttgcgagaagacgacagaagggacacagtgtagacagaatcaggccctaagcaagtgctcactggtaatattcagacatcagagcaaattagaattttggataggggttaaaaaatcgaggcatataactcagataaccgaatgcttcaaatctccaccatgtcacacaagaccaggctacaactgcatatgatttgacgtggtttgttaactgctctctaacatcaacagaagaactcagcaaggaattgggaaacagaaatgcttatttagagacaaggagtggtcagcatccattaatagtttccaaagattgagatggtgaagtaaccaccccctccatttagagtttctcaccagcatcgttccttacttttgctgtgggccatactttttatatttgtatattttcctacagcccatgaggttttagtccctttttcaactgttttgaggttgattaggcagatctcttttttgtaacagaaactgtactgcttttattcgattgcaaaagcaacccacagcatcgtagaaaatgtagaaaatggagctgaaggaacagaagaaaacacgtcacacgttatttattcctcttaccactgctaagattttgtaaaatttccatttaattttttgattgtggctgagagcgtgagtttggagatttagacaaaattcttgctttgtgagctgtctgagttcatgcagtttacttaatctctctaaacctcagatttttaagccaaagagctgatcatgccttccttcaaagggccaagcgactaaataaaccaggagtacttcctcacagcaatactctcccatagcatcatttttaatggctctagagtactttccatcatatgaatatgacattatttatttacaatattctattactaaatatttcagtcgttttatgtattctttactattaaaatgcatagagtgacttataaataatctccagtctctccctttgtttcctatgtattatgcagcagagaaatttaattcaactaatttacatcaaatacgctgagcacaagtgtctgtggtgagaagtaagtggtaggccctgcccttacagagctgagcaggatggtaggttggaaacagcactgacctgggaaataagaaattggagtctcagctcctcctccgcaatcctcttctattaactgtaacttgggcaaaagatctaatttttcctttctcatctgt

SEQ ID NO: 259569 - DNA, 237 bp, Homo sapiens
ccccttccaaaaggtagaacacttgggtgtggttcttgacaggaacattatggctggtggtcattccaggatagtgattacgcactgaaattcctagaccattagaaggaaacaaagagtgggaatcacgttcaaacatcatgaaccactggagataaaaagtttggcctatgaggaaaaaaaatataaacgttatagatctggcctagaaatacaccaagaatgtacagttaaaga

SEQ ID NO: 259570 - DNA, 265 bp, Homo sapiens
attttgtttttatttttagtagagatgaggtttcaccatgttggccaggctggtgttgaactcctgaccttcaagtgatccgcctgccttggcctcccaaagtgctgggattacaggctatttttaattttttttaataaagaaagctttttatttagaaatcccatcctttttgataagcagcattttttttctttctctttttttttttttgagacaaggcctcactctgcagcccaggttggagtgcagtggtgcaatcttg

SEQ ID NO: 259571 - DNA, 453 bp, Homo sapiens
ttgatttttagtcaaaactaacagcaatggaggatttgaaatctctaatagacttgtaggaagatggaagttctattttattatcactcttggtttccaaatggtcagtctttcttttgttgcccacatcttccccaatacattcaaccccagtaaacaactagtaagagtttaaagaaaatgtaagatatagaaggtagaattgcaagagtgatgactttgagtagaagaaagaagatgagatctagtacccaaaaggaggcgatggtcttaggagcaaagtacatatcatctatagttaactgatggaaggcaggatcttgaggcaccggtgcaggtatgaggtgtttgggaatagatggagatcggagcctgtggaatttctcttctgatggcttctttttcttagcagatgaacaaaaagaagcggttgttcaagaaagtttgattttt

SEQ ID NO: 259572 - DNA, 471 bp, Homo sapiens
aatcatatgagcctctgctctgattccaacccagtatggctggaccataaggagacctccctgtgtgatcggatcaaagcccctatgcagtgtgtcttttcagagcagggtagagataaattaatcacacctatctaattttaagtaacatagtcaaagaaccattgggaaaaagtcacggcaggagcaacagaaagtcagcctctaaaaaggttcatgtcactaaagagacaagacgtcatgcctgacaatatatatttgcagttttctgctttgtaatttttctcatggctatttaaaattaaattagctcttttctgttttaatagcagatataaaaaggacactttggtcatgatgcatagcacgttaaatacaattatgtcaatatatctttctctgcctctttatgcagttttttttttttttcctagcctccttcagagagctctttgggagcaactttagcta

SEQ ID NO: 259573 - DNA, 701 bp, Homo sapiens
ggaggctgaggtgggtggatcatgaggtcaggagatcgagaccatcctggctaacacggtgaaaccccatctctactaaaaatacaaaaaattagccgggcgtggtggcgggcacctgtagtcccagctacttgggaggctgaggcaggagaatggtgtgaacccgggaggcggagcttgcagtgagctgagatcatgccactgcactccagcctgggtgacacagtgaagactccgtctcaaaataaaaataaaaataaaaataataaactaccatttacagtagacactctaaatatatcatttctaatatcaaaacactgttggttttattgccttttcttatgaatggggaaattaaggcttagagatgtgaattactttgcccagtgtcacacagcaagtaaatacctgaggtggggaggaaaacccatgtcaatgtgagtctcaagtctctgttctttcactatgctaggctgccataattttctaggtatgcatttgccttccttgacttttcacttgttgtaattttgggccagttaagtcagcatcattcagagatagggactccctgctgatggaatttgtcttccttaggtgtcatatccaagtaattacagagtgcagtagagctagattacaatactacacattgtcagtaggtgtcactatcttatctaatgtgattatttgttcaa

SEQ ID NO: 259574 - DNA, 1615 bp, Homo sapiens
  misc_feature (1009)..(1009): n is a, c, g, or t
  misc_feature (1211)..(1211): n is a, c, g, or t
  misc_feature (1216)..(1217): n is a, c, g, or t
ccgcctcctaggttcaagcaattctcctgcctcagcctcccaagtagctgggactacaggtgcccgccaccacacctggctaatttctgtatttttttttttagtaaagatggggttttcccatgttggacaggctggtctcaaactcctgacctcatgtaatccacccacctcagcctcccaaagtgctaggattacaggcatgagccactgtgcccagccaatataccttatttgttagccttatttttgttctgtgataagtatggttcattaataactccatatatttataacgttccaaaggacttatacatgtagttccaagtataagagctatgtataatgttaactgtgtattcaggtcaatggaatagatttggtaatctaacatgaaactcttttaaaactcttgccccttgcaatccatttatttcataattaaggacaatataatcaaatatgagcaaataagcattcaaatggacaaaaatgtactgtactagttatgttccatctgggatcttgtaatctaagatgaatgacctggtgctttattttgcttctcataatgacatgccttcagagaagtgtggataagataagaagttagaagggcaggggaagaaaccttccattgtttggatgttaatatgtgccagaaacaaacaaacatagtctatgcttttcatgtactttgtctcctgttattctttcaacaatctttttaggtgtcttttatgacttttactttgcacatgagttagttaactcagctcagagaagttaagttcatttgtctcaggttatgtaactattaagtaaaaagcttgagactgagacttcattctttcttattggtccttgctcttataaacagtaaaataagtactcatccgataaattcaaagtaattttagaacattttgaccaaacaagtgtcagtttttaaagttgtttttctattatgacagtaagtttataggccttagaaaattttaaacttctnaaaaatgattttgtcttttatagaaaagttgtaagaataatacaaagacctccagtacaagttgagtatcctttatctaagatgattgagaccagaagttttccagatttctgatttttctcagatcttggaataattgcatatatataatgtgatatcttggggatgcgaactaagtctgaacgtgaaattcatttatgtntcttnngtttttttttttttttttgagacagggtctcgttctgttgcccaggctggagtgcagcggcacagtcacggctccctgcaacctcgacctcctgggctcatacagttctcccacctcagcctcccaagtagctgggactacaggcatgcaccaccacacctggttaattttttgtagagacaggatcttgtcatgttgcccggagtggtcgcaaactcctgagctcaagtgatccacttgcttcggcctcccaaaatgctaggattacaggtgtgagccaccatgcccggtctcatttatgtttcatatataccttatacacatagcctagcattaattttatacaatgtttttaataattttgtgcaagaaacaaaggtttgaatgcattttaactc

SEQ ID NO: 259575 - DNA, 227 bp, Homo sapiens
tttcacaccttaagaaagcactccaacccccaagggcatcaacttcaacaggaaaactgacccttcaacttaccaaatctttgaagtgactagttgtatagtacaacaagcagaaaatttgctatggaggttgtgttaactgttgacatttatgtgagatttttgctgcatatttgttagaaaaggctcaacaaaattataataaacaatgattgtgttattaattt

SEQ ID NO: 259576 - DNA, 479 bp, Homo sapiens
agcgcacagcccgaggactgcgaggacggggaggacgcgccgcggccgggcagggaggtgaccggcacccagacaggtggcgacggcagaggagcgcagtggttcacacctgtaatcccagcactttggcaggtcgaggcttgcggatcacctaaggtcaggagttcgagaccagcctggccaacatggcggaactgtctctactaaaaatacagaaattagccaggtgtgatggcacacacctgtaatcccagctgcttgggaggctgaggcaggagaatcatttgaacctgggagacagagcttgcagtcagccgagatcgcaccactgcacgtcagccagcctgggtgacagagcgagactttcaaaaataaataaataaataaaatagaattctgaactttatttttaataattattttgtaaaaagaatgtcttgttttttggagttgttgaatttattgaattgaccaaaatt

SEQ ID NO: 259577 - DNA, 407 bp, Homo sapiens
atggcacatcatcttgattactgtagctgtataataaatcttgaaattatgtagtgttaagtcttctaactttgttgctcagaattgttttgactgttttaggttttttgcatttgcaaaccaattttagaatcagcttgtgaatttctacaaaaagggtcaactgagaatttgggattctgttgactgtagatcaatttgtgaaaacctgacataaaaatattgtaccttctaatacaagaacacagtatatctctgtttttgcaggtcttctttaatttctttttttttcttctccttttttgggacagggtcttactttgtcacccaggctagagttcagtgagccgagatcgtgccactgcactccagcctgggccacagagcaagactccgtctcaaaacat

SEQ ID NO: 259578 - DNA, 475 bp, Homo sapiens
ataagaggtaggtctctcagattcccagggtagttctatttccttttttccccccacttttgcttagcagttctgcaagtagagaccctactgccactctttcaggagaacatgaagagaaaatgtgattataatcacaaccggaacatcctgctcattgagggtatttagttaaaggatattgtgatttatcaaaacttctgtgaactcacctttctaccacctgattggtcaaaatgaatggaataagatgaagctgaattgcagtagggcaatccttttttcttggcatcttcattagccttcaacccacaactctttaatttaaccctgggataagcaaatctgtatttataccagatttttgcagcacaaaggatactgttggccctggggtgggtttgtgctatgatttccccactgtgtcttctgttttattccagataagaaaaagaataaaaatagagaaaattca

SEQ ID NO: 259579 - DNA, 488 bp, Homo sapiens
tgggaacagagtctcttctcccttcctcaccacagtgggcaagagggaggctccctaaagggggaaggggaggaattttgaaaaggaaagaagaaaagcaggagtggttggaagcagcccacatgccctcactgccgccagtaaggagccatggccacagactggtctggtctgccctgcagggataagaggggagggaatcaagtttggaatcaatctcaaaacaaataggactgagtcctagataccaagaagatcgttctagagagaaagtgactgagagtcatggagtccagaacaggagggtttagggctctctacccatcagagaagaagggttccacatagtagactcgggtggttatcccaaacatgcctggaaccccatcttagctggaaatactcaagtttcaccatcaagtatgatgctggcttcagagacggataaaaaacataacattaagttttccatctgtgtttcttaaaaa

SEQ ID NO: 259580 - DNA, 346 bp, Homo sapiens
gtagtcccagctacttgggaggccgaggcaggagaatggcttgaaccccggaggcagaggttgcttttaaaaaatttgtggggcagccagggacagtggctcacgcctgtaatgccagcactttgggaggctgaagcaggtggatcactgagcccaggaatttgaggccagcctgggcaacttagcgagacctcatctctacagaagttggcaggtgtggtgatgtgtgcctatagtcctagctacttgggttaaggcagaaggattgctcgaggctgcagtgagccgtcatcacaccactgcactgtaacctgggtggcagaacaagaccctatctatctttaaa

SEQ ID NO: 259581 - DNA, 429 bp, Homo sapiens
tttacaggacttttgttttcatctaggctttttatttccatgtttcctagattgtgcttatagattacactaaatctccaggtgaatgaaaaggactggtcatgatacttatttagaggagtagtttttcatataccacgttgaaagtgtcaggaagagaagatcccttgtcggtccaacaaagtcaaacaaatcaaaacctgttaacactagggattgggctgggaacaattcatcagagagtatcatagcactgtaggtctcaagagggcatttaatagcgcccgtggcaataacaaagagatgcagagaaattcactcaccagatcttttggcagaaaaaaataaattgatgaaggcaggttattgttgggcccatagggagaaatattcccacaggtaaggaaaagtaagcatcatactggagat

SEQ ID NO: 259582 - DNA, 498 bp, Homo sapiens
ccaccctcatgaagacttgggacccaatgcttggggggatcctgtctaggagaccctgaggaacgttccgccgccagcagcaggcatgtctcacactcccaaaccttttcagggggtgtagaaagcagtgggcttcctgcaccggatggaaggttcgcttatttgctcaattgtaactgggaccaagaagcctggtagaagatacgcactcactgttgccagcaagaaccaaagatccagaggccacgagacacaaatgtagaaggccaagccctagccccacccgatagaactgtggcccaatcagtgacagttctcactaatcaggaagcagtagtaaaagtgagggaacccgcattcctgctctttaactttctggctttggggagaggtaggcaactcttctttgcagaaatagaaaggccgaagagggggagatggcaagtgtctcccctaagagatgcaccattctccctttttataacccagacatgtgca

SEQ ID NO: 259583 - DNA, 534 bp, Homo sapiens
caccctgcacaccctccctgagggatctcatccatccccatggcgtcaaccaccacctgaggaccctctaggcctgaattgtctcctgagtgccacacccagctctccagcatcttcagtgttcctccccgggtggaatgctccacagcactgccaactcaacctgctcaccaaaacccagcttgtcatatctcctctgggccagccctggcttccaggctcctggacttggtcccccagatcaaagatccaggggtcactcatttggactgagcttgatggaaaagtgcttatgtttcaatgttaagtaaactggggagcctatcaaatgtatagacatgatgaactcattgatgttaagtacatagatggaaagagaaatgcttcagaatgtattagtggttgcctctaatggtaaaataatgattgacgttttctttttctgacacccttgtgctttccaaatctcctgcaaaaagtatttattacttttgtaaccagcaaaaatgcctaataaaaatgattgacaggtct

SEQ ID NO: 259584 - DNA, 310 bp, Homo sapiens
tttccgacattgacttgcagaggcaaaaacaaaaagacaaaacaacaacaaaaatacatcagagaataaactaataaccaaagaagaaactgaagacagtcatcccttagtaacttcaggatattggttccgggaccccagagataccaaaattcactgatgctcaaggccctgatataatatggcatagtatttgcatataacctatgcacatccttccgtatattttaaatcatctctagattactataatacctaatacaatgtaagtgctttgtaagtacctgttataaagtatttataacttttt

SEQ ID NO: 259585 - DNA, 226 bp, Homo sapiens
tttggcaaaataaaaggccaaggaaataatgaacatatgggaccacttgtttcacactttaaactcctaagcaagttcggtattgttttcatttgtgggaacataaaattctctggttctctgtgggtgtactggactgttccctacactaaaggaaaatgcactagaggttctgtcttgtcctagaactgtaagtactgagatttatctgacaatataactcagc

SEQ ID NO: 259586 - DNA, 536 bp, Homo sapiens
ccagcggtcgaattaactggttctgtctgtacgactgggagagcagctctcgctaaaaatagcgccctgcccagctcgacctgcgagccgccgttggattctgagccgggacggctcaaggaggccgggagccctgcacacccctcaccccgggcctggcccgggaccgaccacggaggcggaggccgcgggcaccgcgctggccccacaggtgccgcggagggtggcaggcccgctggccgaggcactgccgaggccgtccgagatgggagctggcggtgcctccttccgcgccctcgcctgggcctccctgcccctgctggggcctccagcctgcgcgctctgcgaggacacgctctgctgcggagagtcgcctcaagaaaggccgggctctcggcgcagcctgcctggcagcctttccgagaagagccccagcatggagccctcggccgccacgccgttccgggtcacggtaactatctctgcgtcaccaacaccgccactgccaccaccatcaccacctcgcccggggtgct

SEQ ID NO: 259587 - DNA, 384 bp, Homo sapiens
gaacgcgtgggcgcccgccgggctgtccggagcggccgatggggcccgtgtgagcgcgcccaggcccggcccggtgcccggcgggcggcagcatgtccgcgggcggcagcgccaggaagagcaccgggaggtcctcctactactaccggctgctgaggcggccccggctgcagcgacagaggagccgctcccgcagccggacccggcctgccagggagtcgcctcaagaaaggccgggctctcggcgcagcctgcctggcagcctttccgagaagagccccagcatggagccctcggccgccacgccgttccgggtcacggtaactatctctgcgtcaccaacaccgccactgccaccaccatcaccacctcgcccggggtgct

SEQ ID NO: 259588 - DNA, 517 bp, Homo sapiens
ccagcggtcgaattaactggttctgtctgtacgactgggagagcagctctcgctaaaaatagcgccctgcccagctcgacctgcgagccgccgttggattctgagccgggagccctgcacacccctcaccccgggcctggcccgggaccgaccacggaggcggaggccgcgggcaccgcgctggccccacaggtgccgcggagggtggcaggcccgctggccgaggcactgccgaggccgtccgagatgggagctggcggtgcctccttccgcgccctcgcctgggcctccctgcccctgctggggcctccagcctgcgcgctctgcgaggacacgctctgctgcggagagtcgcctcaagaaaggccgggctctcggcgcagcctgcctggcagcctttccgagaagagccccagcatggagccctcggccgccacgccgttccgggtcacggtaactatctctgcgtcaccaacaccgccactgccaccaccatcaccacctcgcccggggtgct

SEQ ID NO: 259589 - DNA, 356 bp, Homo sapiens
ggtcctcatcatggtgaaggctggtggggaggttcaaagatttgtccatgggtcaacacctccccaaggccaggtctccagggacacagactctgccctttgaaggctccaagccagaagaggaaacagaccctgaaacactatgagcaggagggccagagagcgacacactttggtatccaggagacccagccccactgcctgcaaccctgcaacctccctgtgccccactgagctgctcagtaaaatggaactaaggatggtgccaactgtcagtgatgctgagaggtacaacaaggaggtgaaatgtgagaccctgtgcattgtggacacccaataaacagtgattcttttta

SEQ ID NO: 259590 - DNA, 393 bp, Homo sapiens
ggggttggggggtccttttttctggaacaaatgccacctcctcagagattaccagaaactgctttgctgtcttcagaggtcctaaagtaccctggcctccatccatggaccgtcagggtgggtgcaccctcccctccccccagtgtcatttcattgccatgcgtgcttttctggggcagaggccataaaaactggcacacagtctgttttcaggaaattcttacagaatggattgaaacttcccatcaggcacacacttcctccagcctctgtccctggcgttctctctcaggagacagcggggtttggctcagacttctgaagtgtttctactgtgaccgtgggcctgggtattcccccaccccgctgtaacctgtggggtggaagccatga

SEQ ID NO: 259591 - DNA, 700 bp, Homo sapiens
tgtgaaaggaagcaggggtgaagccatacatggagagcatggcacttagaagaggcccatgcaacccaagccctgctgggtggacactgagagctggagaactctggatgcatgacaaccccttcccaaccccctgcactaagagacttaacgaaactccagcacagtttctagcagcataaggccctgtcccttggataacaccagcccctccctaaaatgcctgcctaagaaggctcaaccttgccagaaaattttactatttgttctatccaagacatccctgagaggtccctgacttccctttcctgaaatacttactaaaaaagaactttaaattgtaaatatatagctcttgcaatgcagaagcatttctctccaggatctgagagccattcctttggaactgaatcatcaaggatcagacctctgtttctctgtctctgtgggaagacagaatctggacttctttaattgccagctggcagacacagctggcccctctgcatggacactgatggacccttgtactttttcactaatctgacttactgagccatgctttcccctctccctggttttccttttaaaatgtttaaaacaccttcgcacaaatcagaatggagcttagctctttcccctactgtcagcagttactgaatcaaacctgttttcaccactttaactgatctctggctgt

SEQ ID NO: 259592 - DNA, 180 bp, Homo sapiens
tttttcttactattgctttgtctatgcatgctctttttgggatccatatgaattttaggattgttatttctagttctatgaagaatgatggtcatattttgatgggaattgtactgaatttgtagattgcttttggcattttcacaatgttaattcttcattaatgcaattttgtcgacg

SEQ ID NO: 259593 - DNA, 541 bp, Homo sapiens
tccagacacatgaaacgaacctcacagccccacaaggatgccggggagggcactcagtgcttgggatcagagccacgtggccactggtttccgatgcccctttgctagtatctggcttccgtgattcccttgccttcattttgtggctctctcctgacactgccggctgagtgtcttagttaaccagtaatctggcttttctccctccactttgatcttcctgtctctgcctgtctcctctttcctggcatggcatgtgctctcgggctgtacctctggtagtgaatctctggctgccctggactcctgctgtgcacactgccctgtgtgcaggtctggatgcctggtgttccttctcagtgcaccgcccgatcccctgggatctcttcaccattttcatgcatggtgccaccccacgtgcagggccagcttcatggcacgtcacctgtgtgcttgcataggacttggtgctcagaaggacttcttgatgggtttcatgctctgcggccaccgtattaaaattgtaataatttcctcttga

SEQ ID NO: 259594 - DNA, 407 bp, Homo sapiens
agaatatcaccagtgactttacagaattaaaaagtattgtatctatatttatatgaaatattggtctgcagttttcacatgatgtttttgtctggtttggtgtcaggttaatgtaggcttcgtggtgtgaactggcaaattttgctcctgttttattttttgacagtatttataaagtattggatttaattattctttaaatgttggtagaattcaccagtgaagtcacttttttctctgtggaatgttattaaattactaattcaacctctttatttgttatgttttttcgtaattatatttcttcttgagtcagttttgatagtttgtgtctttataggaatttgtcaattctatgtaggttatctaatgtgttggtgtacaattgttcatagcatttcccttgt

SEQ ID NO: 259595 - DNA, 410 bp, Homo sapiens
gggcattgagataccacttcacatctctattaagatggctagtatcaaaaacacagaaaatgacaagtgttggctaggatttggggaaagtggaaccttcaagtattgctaatgagaatgtaaaatggtgcacctgctgtgaaaatggcttggcaattcctcaacaaattaaacagagaatgatccagtaattccactttccagaattgaaagcagggacttgaacaggtatttttatatccatgttcacagtggcatcatatacaataaccaaaaggtgggaacaatatgcatatccatcagcagatgaaaggataaacaaaatatggtatatacatacaaagtgagtattatttggcctcaaaaaggaatgcaattctgacacatgctacaacataaaccttgaagac

SEQ ID NO: 259596 - DNA, 520 bp, Homo sapiens
gcaaatctgctcacaaaaagtatttttcttatagctgactttactgaaagttgggcgagactaaagtagtttacagaacagtaacacaattttcaatattggatatttctagacttaaaggtatgttggtgcccacatcacatggactagacttcctcttatcctttataagagaatctaactttctttcatggaatccaaactcagctctgcattgccaaggcacatttaaagcctcactaagtgcatttctaaatatctacttcaggacttcccaattgtctgtcttttgccagtctcttcaaggggtgtaaaaaaattttactgcactcttgagaaatatctgtgcttcagcacacacacgtgcacatacaccactgtctccacactcacaccccatagaaagtggaagtattgatagtcagtttagtcagtttgggttttaagcaaaaatgtctcttgaatacacttatattaaatatttaaaagtttatagttattataaatggatagtatctta

SEQ ID NO: 259597 - DNA, 603 bp, Homo sapiens
gcaacatggtgaaaccccatctctactgcatatgtacacaaaaattagccgagcatggtggtgcgtgcctgcagtcccacctacatgggaggctgaggtgggaggatcacttgagccccggggattgaggctgcagtaagccatgatcacgccatagcactgcagcctgggtgacagagcgagaccctatctcaaaaaaaaaaaagaaaagaaaggaaaaacaatatttctcttgttccaatctggctttgactgaaagtcgatccttcaggtggctgagttctgaattggagaccccccgcgtggaggccagtcccgggtagggagtagctccgaaatgcatcccaggacactgaaggggagtgccggatctactttgggttctcactgcgggttgagacactacatgggcttctttagctaacagccgaggaagggtctctactccttcgtccttacccacatcaaatgctaattctgatgtgcatccccatcagatttggaaagctgagtggcgttttgcggttttaaaaagaattcttctattccccttgattgttttttacatttttattttatgagtgttatactatttctttattc

SEQ ID NO: 259598 - DNA, 541 bp, Homo sapiens
  misc_feature (534)..(534): n is a, c, g, or t
agattagttgtttgtccccaaccagagaaagtactagatactgcttgtgccagtggccctgccctggatttcattatttttgaaagtgacaaggtttagttttctacccagagttacatgggagttcagagtcaagaaaattgggttcactagtaaaaatcaagtcgtcgtctttacctacatttgtttttttggttcatacctgtaaatatatatttgtgtcatattgttggctaagaagcttctgggtagcatgtatttttaatagaaacatgttttatatatgtggtgttgtaaaattggtttgttttattcaatagtgtgattcagatatcatttctaatacagatatatcattctttaatgactacagtattttatcagatgcatgtactgtagtttatttaaatagttcacaactaatggctgttgagcttctaatttactacttcttttgggggatgagacagagtctctttctgtcacccatgctgagatcgcgccacgcacccagctggtgacagagtgagaccngtgtctt

SEQ ID NO: 259599 - DNA, 653 bp, Homo sapiens
cgctacttcattgggtaccataattagtgttcaaataaatatgcccaaaccagatgaatgggacaaaagtaatgacatttcatgcaaatgtttgttgactctatgagagtaggaggctgcctgtctgtgtcgtttactctatctccacactcgatcttagccagaaggccgagaagcaatcacttactccatctttagtggacatgagaatgtcttgtctagaataggacttaggtaaacatttgttggatgagggggatgaatgaatgaaagaatgaaattataactgctgaagtatggtgtggaagagcttacttaactcttggatttaggatcttggagtacatgcagacaatggagaccactatgtgtctgaaacctaatcaaataaaaaacaggggaaaggaacagaaatctttacctggaagtttagaagccttagtgggggtgaaggatttgtttgtttagtttaattgttgcatatagcttggacactgatggagagagtttacagctttgtcaggtactctgttccttgacacttgtgttcatttagtggttggatgactcaactgtcaaaaatgccaaataagggaatcctgaaggagcaagtagttgaatttactgatctttaagatccatgttgagcccat

SEQ ID NO: 259600 - DNA, 369 bp, Homo sapiens
tccatgccactggctgcgcatccatcagtgacacagttcagctgccgacctctctgtgctctggttttcttacttataacagggggctatggttggaatgtttgtgtccccccaaattcctatgttgagatccgaactcccacagagatagtgttagcaggtggggcctttggaaggtgattaggcaataaaggtagagccctggtgaatgggattagtgccctaagaaaagaagccccagagagctgccttctgccatgggaggatacacaagaagatgccatctatggcccaggaagtgggccctcaccacccactgaggctgactgacagtgccttgatcttggactccccgcctcaagagctata

SEQ ID NO: 259601 - DNA, 324 bp, Homo sapiens
  misc_feature (307)..(307): n is a, c, g, or t
tccatgccactggctgcgcatccatcagtgacacagttcagctgccgacctctctgtgctctggttttcttacttataacagggggctatggttggaatgtttgtgtccccccaaattcctatgttgagatccgaactcccacagagatagtgttagcaggtggggcctttggaaggtgattaggcaataaaggtagagccctggtgaatgggattagtgccctaagaaaagaagccccagagagctgccttctgccatgggaggatacacaagaagatgccatctatggcccaggaagtgcctagngtggcagtcgatagaca

SEQ ID NO: 259602 - DNA, 308 bp, Homo sapiens
ggattacagcacagcaccagaatatcaatctgtgcctttgaggagacagcgggaacagtacaagaggattcaggagcctcagcctgaatcagagacccgacaaatcgcagaatgtatctaccacttggatgccactgatgttgacagctattcttttaaaatactgatattcaacatgacaatgcatgtgacttgccaaggaattgagaagctgaaagtacagtgacatggttatgacagggctgcaaaagacatgacttgtaatgtcatttcaaagctttctctaaaaataagttgaaaaacacaaa

SEQ ID NO: 259603 - DNA, 367 bp, Homo sapiens
tgccttaaaacttactataagactacagttagcaagatagtacagtattagcaaaaagatagtcatatagatcaatggaactgaattccaggattctaggaataaattcttacatttaaagttgttgattttctgtaaaggtatcagtgtaattcagcagggacagtggtggtagggaaattggatggctacatgcataaagattaatcctaaatgttaagagccaaaattatgaaactttgataagaaacataggagaaattgttagtggattgggttgggcaaaaattttttacatacaacaccaaaagcaagatctataaattttaaaatttgatacattaggcttcatcaaaattggaaactt

SEQ ID NO: 259604 - DNA, 437 bp, Homo sapiens
cagggtttcaccgtgttggccaggctggtcttgaactcctgacctcaggtgatccacccaccttggcttcccaaagtgctgggattacaggcatgagccaccgcacccggccctatctcaagcttcttaactgcacctgctaaatcccttttgccatgtaaggtaacgtaccaacggtttcagagattaggatgtggacattttggggggctgtttttctgcctgcaatacctgctctccagtgaatccatgtttagtggaggacaacatttgaggcacttacatggatgctaggggacatatatgtgaatgttaggcaaaagtgctgcctgaagccagaaaatacctttttaatattagtttttttcacccaatttgatgtgttattgtatccaacttaaaatacatgaactaataaaatcagatttttttcaaaa

SEQ ID NO: 259605 - DNA, 513 bp, Homo sapiens
agcgccgcgcctttcctctggcccgggcagcggctcgccccgacctcggccccagacggccttccctgcgcgtcgggacctggggctgcagaggaagtgggcccggcgaggggccagaaagctgtccagggctggaactggagctagtgggctgtgtggttaacgtggagacgtttgctgctcactggacttcgtttttggatatccagtaaaagcaagggtggccttcaccttatggccagctcactcgtccactatcactcagacctaaaaccattgattgattttagtgacgctagctacatttggcagtgggatttaggacatagttcatagtcaaaccccagtttatgtagttttacaaaatgtggctttaattacagtaaagggttatagtagtcgataaagaaacattttaagactggaaaaacgatgtggattgaactaccattaaagtggaaaatggattttaataaaatgtatctttttcaaataaatgctttataatcttca

SEQ ID NO: 259606 - DNA, 899 bp, Homo sapiens
agcgccgcgcctttcctctggcccgggcagcggctcgccccgacctcggccccagacggccttccctgcgcgtcgggacctggggctgcagaggaagtgggcccggcgaggggccagaaagctgtccagggctggaactggagctagtgggctgtgtggttaacgtggagacgtttgctgctcactggacttcgtttttggatatccagtaaaagcaagggtggccttcaccttatggccagctcactcgtccactatcactcagacctaaaaccattgattgattttagtgacgctagctacatttggcagtgggatttaggacatagttcatagtcaaaccccagtttatgtagttttacaaaatgtggctttaattacagtaaagggttatagtagtcgataaagaaacattttaagactggaaaaacgatgtggattgaactaccattaaagtggaaaatggattttaataaaatgtatctttttcaaataaatgctttataatcttcacgtcttggctatcattttctttttgatgtgtgtgtgcgcacttttatccacaagtttaaagcagacctcgataattcctaactatgattttactaccctgaactctgcagggaagtgtcctttaattgacagctactcaccaccttgtttgacagagtgccccatttaaaagtcctgtttgaaatagaatgtagccaggtggccttcagggagtcctgtggtgctggttctctactttctcaactcattgtttcatgttagcaccatgcatgtctaatttaggtgcagtataatttgcggttatctacaaagatgttttaagtctggaaaatagctcaagatagtgattcagcctgcaggtgttagattagagatgcgtgctgcgc

SEQ ID NO: 259607 - DNA, 263 bp, Homo sapiens
atgatgcagtggaaatttattttgtttcatttgtacagttttataaaatacctttcttaaaaactcaaattttcagtttctgtaaagattgatatcagtgatatctttaggaaatgtttggagaaagtttattacagaagttggcataatctgtatctagctcttgtgactttagagcagtattttgaaaatttgtactcatgatttccatttgtagaaattttccaaagtatgcttaatagattgttcatacaaatattgct

SEQ ID NO: 259608 - DNA, 290 bp, Homo sapiens
ggggccctgatttcttaatactcaccccaaaacagctgttcctcaaaacctggatcaaaatgcatatcaacagaggagcaaattatgtttcctgatttctgtgattctctccatttcctgaagggctctcccccgtgttcaatccaggatattagttctggttttggaagtccatcatctgcacagagaagtcagacagggtagtttggcttcctgaatttaaagcacactaagtttctaaatttctcaacattcactcctgggacaaagtatgagaacaacatgtcaaa

SEQ ID NO: 259609 - DNA, 603 bp, Homo sapiens
gggtacactactttatgaatgtatgggactttggttttatgacacataaaaaagacagtgcatatataactggttagtccagtatatgtacattttaaataattatgattctaacagtatggtctccgatgtttgaatatattgtttaagcaaaaatagtccttggaaaggttgcaacgtgatagaggaagagacacaggaaccctattttggagacaaatttccattcagggaagaacttttatagatactcactgaagagtatctaaaagcatcatgcttgcacctatttatctggttttttttccccagatctccattgccaaatgatgtcatcaacccatctttgtataaacagaaaatgaaagagacctataatttctatattttgtcttttgattccaacagcattattattttaggagagaggtctagatcaacagctctaaaatgacaccaacagaacagcagtgaagaaggcattctcggaggctgcacatttctggaagacagcatgaagatatgcctcaagtgcaaacaaatatttggtttggacttagcaattctatttcagagaatttggccctacacaataaaaaaaaa

SEQ ID NO: 259610 - DNA, 455 bp, Homo sapiens
gaataatcacattaattttatcatcttaattggaactttacaaaaaggaaattgagacagtaaaaactgtggttggtgacccccaggacctactcttgctctgcctcggtgaattttaattaatttaatattgtctgggtaaccaaagatttctcatttattaactcaatattatttcaagatcctaatgtcatttatgaacagtaggaattccattaaacattacataaaagacccagcaccatcacagttaacatgaaaaatttgacagcgggatgacatttaaaatttttgtgcaattaatacaagtgtaaagccaagtccaggtggcttgcagcattgcctgaagttcgaaagaactgactctttttttatcctctagagatcacttattaaaattcaacttagtcgacccaaatgtgtatatttttataatctcaaacattatttggaaa

SEQ ID NO: 259611 - DNA, 372 bp, Homo sapiens
gatcccttgagtctaggagttggaggctaatgtgagctatgactgaagccactgcataccagcctggatgacagagccagaccctgtctcagaaaaaaaaaaatgcctgcagtgatttaaacataagtttaacataaataattactgaggtatgacaaaggagtaactgtaagattttaaaaaataccgtaagtctccctaggcctgacggagaggaccaaaataaggaaaagcatggaaaggagctctatccacaaaaatacacttcacactttactggagaaggcatagaagcatcccaatggaaggcacagaagttttctgatttcccaaagacagaactgatctatagttactaggcaagcaggaagc

SEQ ID NO: 259612 - DNA, 406 bp, Homo sapiens
ctcagcagttcctgtcagtcaagggtgagtcccagacagacactaagccaggagcagccaacatgctctaatccacccccaaggagtgcccccatgaccttctcacatgtatactgcctggcccgtgctgcttcaataactgaacatttagcttctctgatcacaacttctgtgctccacaattatccttctacctcacagctaactcctgagcaacacaggggttaggggaactgacccctcgcttagttgaaagtccatgtataactttggattcccccaaaacttaactactaatagcctactgttgaccagaagcctaattgacagtcaattaacacgtattttgtatgtcatgtgtattatatgttgtattcttgaaataaagtgttgtattcttgaaact

SEQ ID NO: 259613 - DNA, 518 bp, Homo sapiens
gccgcattcgtgtcagaggtgaaagcagcagcctctcctcccttgcttcacgactgaccatcgaaatgttctaacccttctataagcattccgacacttcagtcggctttgacaggagttttcatgtcactggacaggtttcttattttaaaaacaagacaaggcaatgaaaccaccaattaacagcagactaacaccacagctaactccacttccttccaaaactctggcaaagcgacttttaaggaaggaacaagagcttctttataagaggctgcttgatcactgtgcataagacagctgtaaggaatcaagtggaagctgaaaacccaaggagattagaaagagaaggggtaaccactgacatcagaattaagaagaggctgggcgccatggctcatacctagaatcccagcactttgggaagccaaggcaggttgatcacatgagcccagaagttcaagattagcctgggcaacatagtgagaggctgtcgactgagagaacctcatctctac

SEQ ID NO: 259614 - DNA, 205 bp, Homo sapiens
aaatcaaaattatgacattgtacgatacattaataatgttcagaatgtagttgagatttttttaagtgtgtgaagaagacatgcagaaagttcagccctgttgagttttattaaagtgtcatttgtattttgtaatatgacagatttaagacacctaggtttgatgcagtgaattctcccatgatgagtacatctgggtggtaac

SEQ ID NO: 259615 - DNA, 398 bp, Homo sapiens
ctgtatagtgtatcattatatgcgtagatcacgttttttaatttattctttctcattgcactgttctgcaatgccaccttgccgtaaaccaggcatctgcatctgaggggctgtttctggacctgtcattctgtttcatcgatatatttatctatccttgtgccaaaaccctactgtcttacttatggctatatcattaacttagctaatgtttagagctatgtaatgtagataattgtagctgtataatagtaatgtatcgatatctggtagaataagttcttctactttgttattcttttaaaactaccttgactattcttggccctgtgtatttccatataacttttacaatcaagttgaaattactccctcccctccaaaaaaaaaaaaaaagc

SEQ ID NO: 259616 - DNA, 396 bp, Homo sapiens
tgttaagtaaactacacaaaagcagagttgctgtttacatacatcatgatgccgtctggacttgagcaccttggcggctcaggattaaggcacctcagtctagcctagcagagttacaatggagagaagtgaaaactcattagtagctcaaaacaagctaaaggatttcagatgctctttttcttgttcatctaaatcaagtcttcatctgtgtcaagaactaaattgttaaagacctttttaatttgcttagtgcaagaaaaataatagcaaccatatatctagttaacttgagtcttctgtgcctctaaaattttgtttagagaaagcctatttctattgaggttgaggaacacaattctaatacttagtaaaattattaacattcattgcatt

SEQ ID NO: 259617 - DNA, 510 bp, Homo sapiens
aaagggaagacagtggttgcccgtattcttcctttcctctccacagagcaagcagctgacattttcatgacaacagccagggacctccctttccttatcaagaaagatgcacaagatgaggtgctgccatgcttactgagtcccttctctctcctcctctatcatcttccaacagtgactatcaccagccttttgcaacagctaatgaacctacctcaaagtgcagctacaccagctccctccaatcctcacttcactgctgtgctccagaacaaattctgactggattccactgaatccctagatcaatttgagaaatgacttctaaacattgggtcttctcatctgtaattatggaagatgtttcaatttattaaggccttccctagcttctctcaacaaaattgtgtaatttttaggtagtagtcttgcatgtgttttgttaaatatattcctaagtattttatgttctttatcaatgaaaatttttttgatttcattttcaattgt

SEQ ID NO: 259618 - DNA, 747 bp, Homo sapiens
tgggggacacggactcgacgggaaggggaacttggcatttatggacagatcctcatccttcttgctgtagtcaattacacgcacgttaaccgtgcagccgccctgctgtattttaggcggttgttggcactcctagttgggcccttccctggcccctcacagcagggcctgcctcctgtggacgcttgtgtgctgccctggcaccggccactgtgttttgcataaaggagaggctccaaagatgttggccaaaggaatgaagccttgagagtccaggctttctatttctgagacactctactcaaggacttcccagatgcaaagcttcatctttgagcaaatacaaatatggagagggaacattaactttctgaagaaaagaaggaacatcttttcaaccttttatattgagttaacaccatggtcttagttttgtgaaagcactttaatacatccaactagcgggaggaatacaagatattcctacctttttattattattattaaaagagggctaaaccatgttgtaaactacttaagaactgaatgttcaagttgtacagtatattggccagattccttactgcccactaggcttgggagcatgttttcagctcagttttatgaatgttttaaatttgtattactgatctttgttatagccaattagcaattcaaaatggtaatttttttagcagtaataaatataccatcccccaaacagtacaataaactttatttgtaaaa

SEQ ID NO: 259619 - DNA, 606 bp, Homo sapiens
cttgtgagtttattttatcaacttaaaataaagggacagagaaagatctattaggcaaatgaaaaacaaaaaaattaggggttgctattttcatgtcagataaaacagactgtaaaccaataatgatcaaaaagaacaaatgagggcattacacaattataaaatattcaatccaacagaaagacttaactattctaaatatatatgcacccatcatccaagtacacgtatacataaaactggtttttcaagatctattaagagatttagaaaaccacacaataacattgggggacttgaaaaccccactgatggtattaggaagatcattgaagcagctaaccatgatattcaggacttaaatttgacacttgaccaattggacctaatagacgtctacagaacactccacacaatagaatatacattcttcatatatgcacacagcatatactataagattgaccaaatgctccaccataaagcaagtttcaacaaattcagagaaattgaaatcatataaactatattctcagtccacagtgcaataaaaatagaaatcaatgccaagaatatctatcaaaaccatacaattgcatggaaacc

SEQ ID NO: 259620 - DNA, 591 bp, Homo sapiens
ctcctcttggtctcccacattcagtacctccttcttcaccttggtctcttctaagcctccgtgggtgcatttcagggattaaatgagttaatagatgtatagtcagcctccaacatggttccagtaattctcacctcctggtattgtgtctttgtataggcccctcccacaatggatagggctgacctgtgtaaccaacaggatgttgcagaaatgacatagtgtgacttcaacactaagtcacataagacatcgcaacttctgccttgctcttttggagcacttgttgtagggaaaaccagctgccatgtcataaggacacttaagcaatgctctggagagatctacatggcaaagaactgaggcctcctgccaacccccagcacaaatgagccaggcatgcaagacatcatcttggaaagggatcctgcagcctcacttgagccttcagatgatgcagctccagctgacatcttggctgcaacctcatgagggaccctgggccagcaccacccagccaagctgctccagacacctgatccacaaaaactttgtgagataataaaataaaatacattttaacattttttg

SEQ ID NO: 259621 - DNA, 1003 bp, Homo sapiens
tccagtgctacagggtccttcctcttgttcctgtgttcttattccacagtgagaaacctagaaagaaagagaatgagaaacatgaagaaggagtaatttgttgtctaccccaacattccttccttgacaccagtacttatttcccaatagaaaggctggaaatggccaacactgcttttccaggcgtccctgcagaaaggcatgcatgtgtgacttaatcatggccagtgagacgagaacatatgtcttcagagagccttctgggacagattttcctcctggttctgggtatgaagcttgctcagttcagtgcctgtgggattcactgataagatgaaatacactgatccacagcttgtctgagatgaatgcatgtgctgtgtgatcctgaagttctttatgtctgttggcttttcatagtacatctgctggaaagaagagcctttttggacatttgtaagccctttgtgatgggaggggagtaagtctgtaagtatgtgtgaaaaggggctgctgtaatgtaaagccaactcaccaaacatgggctttgcagtaataaggatgggaagctaaagatcagacctcatggaaaagaatttccccctttctttgacttggcctataaatgtagcttttctgactcttttgaggccctgttgcttgtcttgtattcagcacctaataatgttgttgcaaatgtcaggactgcaacaagctcagttgtgttgtagcaagtaggagactgctacaaaatgggaagagtcactaatagttttggcaacaaaacatgacaatgtgcatattaccagaggcaattatgtgcatctcatggggattcaatagactctgggactgactttaatgacctgaaaatccacttgccctttttgttttctctgttatgtccaagtaatgaaaatattgagaaagttattgtaactataaaattgcagcatagttccttttttaaaaaaataaagcctgatctatcttttgacttgca

SEQ ID NO: 259622 - DNA, 460 bp, Homo sapiens
taaagaatacttgataatgtaaccatgtgggatattttagtaacaatggtagggttaatgatctgggtttaacagatcaggaaacagactcagaaagtaccactgctgaaggcttttcttctgtcttcatttctcccaagaactccagatacgaatatttgtttgtctgtttgacatgtctgttcacttgatcgtttaatagtcatttcgtactgcatgtgaaagtagagctctgggttttctcctcaccttgccattttgcatctactacagtcttcagctcagtgaatggtcatatgaaaaaatctgttattcatctttaattcctttttttactttactcccagaaccaacgctttagcaagtttatttttttatttttattttgtttgagacggagtcttgctctgttgccactgcactgcagcctggggacagagcgcgactccatctcaaaaaa

SEQ ID NO: 259623 - DNA, 542 bp, Homo sapiens
ttacaaaggagcatgagtagaacatgtgaaaaaacacaaatattagtttttccccttataccagtttgccaaattccttttagaggaaactaagctctgtagtgccttctctttgatacactgagctagcaagagacttattaacgttaagcctgtaaagtgggtgtttcttcattctaatacagaggtaagaggttccagtctgacaccactacggaataaaatgttgaggcaaactcagttacaaaatatatttggcatctgagaacacctcaagactctgtagaatcgctaagcatttgattaatactaaaagagttgtaatgttttgacttcatgcataattacaaaatgaagcagggtcatttttcaaggctttttgagggggaagaggaggtgcataaaactccctttttaaccacagtaagacatacacgcagagcttaaactatcaccatctgaacagatagataagtaagatactaaagtacaggtgctctcaaatacacaagtaaactgacttgattcttgactacccagca

SEQ ID NO: 259624 - DNA, 372 bp, Homo sapiens
atcacctccacatcattattcttcaatggtgttaaacatgtcctcaaactaaagcctacaacctccttgcatgagtcctggagaaattctcatccactgtctcatcccagtatcttttatctcccccagagagtggatgtttcagaagcatcccagcctcgtcttgagttttcttccctgagctgctgtctctgacctactttctttaccaccatctccccttctctccccgtcttggctcataagtgaatggggtattttctctgcactgggaaagaaactagatcagagtcttctaagcttgaatctgatatgtattgggagttaaggaaattcagactggtcttcaagattactgtcttgaccactaaa

SEQ ID NO: 259625 - DNA, 390 bp, Homo sapiens
cctttatagaaaaccctgaggttttccaaagaaggggtgattctgcttcaaaactgcaaccctgtctgagtttccagcctgcaaacaccagattcaaagctgcttcagaactgcaaccctacctgagtttccagcccgcaaacaccagattcaaagctgcagcatcaactcctccctgagtcttcagcctgacaggctgctctacagatttcagatttgccagcccctacaattctgtgaatcagttccttaaaataaacatttctctctatatttatgcaaatggataaatgatggatagctgtagatttcactacatagatatagatatatagatcaaggagatctcctattggttcaataaatctattggttttgtttctttgaaga

SEQ ID NO: 259626 - DNA, 670 bp, Homo sapiens
gagcatattacgtatgctactaactcaggacctttgcacctcctgacaactcttaggaagctcttgccacagatatccacatggctattcctttacctcattcaaaacttgtctcaaatgcaccatactaagggaggtctttgctaagccatcatatttaaaattgcaacgcacaccacttgacagacagacacacagacacacagacacacacacacacacacacacacacacacacacacatacacatatactccttagcccccttcccttgcatcattcttctccacagccctattaccatctcacatacttctagtttacttaggactgaaatgtaagctccatggaggtaggcattttcttctgttttgatccctggtatatcaccaggacctagaatggtgtctaacacatataacaatcaataattattttttattaagttggtggatccattaagaagcaagagagatgaattaaagtctctacataaaaaatcacccaaaatcaatcttcagtcatctccctggtcttctcaagggttgttattacccaccttctaatatctattgataatagctattaggtaagtgtatttgtaggggccaggagcagcccttgccttctcatcttcatcacggatgagataaaatatacacagaagccg

SEQ ID NO: 259627 - DNA, 200 bp, Homo sapiens
ggatgagtagaaggaaaaaatagaaggaaagaagggcaatgaaaatgagacgtcagagcaggatgaccctaaaatcctaagacggcctgtcctggagtggactgtttccctcgaacccttgtggtcttcttttaaccatcagcatacccctagtggtgagctctgacaaaaatattaaacctggaaattgttgctgtgat

SEQ ID NO: 259628 - DNA, 419 bp, Homo sapiens
caaggcagtaactacgagcccctggaagaatgagcacactgggactcgggaagggaccacttacaagaaaggtctgaatctggaagaagcaaaggatcaagtcagacgtgtgaagaataaggagcccgtggatctagagagaaagaacatttttctgtgaagagtttcccctccttatcctctctccctgctacatttaggtagacccagtgataaatagcacctgccagccatggtaggcatgaccagagtggcaggcggcctgtgcatagggtgctggatgagggcagaggcacccatggaggtgcaagcctgtttcgctgcccctcctgaccccagcatccctagccaccagtgtgatgtgagtgcctccagagggcaggggcagagaccctgcccgccccttctcctgtcctctg

SEQ ID NO: 259629 - DNA, 708 bp, Homo sapiens
gccaggtaaactcctgcctgcttttgtgtaactctctcagtaaaagatattaccagaccctcccctcacccgattccttccataggtttccttagtctgtccaactatcttcatacccagggctacccctctgctttaggctctcatcatctctgacttggattattagaacatcctttcagtgaactccctaataaccctgctttatttaaattttcataagttgttcatcatggtttttttgcattaatttgattttgtaaaatattgcattaaaatttcatttatcttgattcccaaatattttggtgcctccttaaggtgtgcacaaaaagcaagtgctgtcctcatttcactcttgtcctcgcccttctcctacctccagtcttgtctccctcaatctgttttccatttagccaggcagccagtcaactaaaatacgtaagtaatcatgccacattcctgcttaaaattcatcaaagtattcccctcaggttaattccacaagacctcaccagatcaatcttgttctggtccctgctttctatttcaacctctattctggatttcctctttttcctctatttgtcattgccatggctaacatcatgtactgacacagaatgaacacataatgttcttagagctttacatgtattactttattctatatgatgaggtgatacagatactattatattatttctg

SEQ ID NO: 259630 - DNA, 604 bp, Homo sapiens
ggtggggtcaaatgaaccagtgcaaggagagtgacatggacaaggagagtgtcctggcctgatcctgatggatgtcaatgacttccactgaagagtcttttatttgggcagagccttcagcctcagatgccaggtgctaatcacaagtgacagcataaccgtgtctatcaagatggccgtcttgagctggtgaagtcttgctattcttatggccccggagtcttctggtgaggactgaattgatagtaaagagtgtgcctggttatgtccttatctgattgattgctgtctctattgattaggcgaacatctgatcgctgttggtatgatgcctgttggtatgatgcattctgaaacataagatgagtctttttctaagatggagttacagatgtcaagggtgctctataaacagcaccattcagtccttcaacacttttcacaggtatatctataacctaccaatagaccttattgctaacaatctcctcccctgtccaatccatacctcagcctgaaagttctttctagaatactgattaatcatgccatttgtctgctttttggagaaagttagaacttctgagaatggatttcaaagctt

SEQ ID NO: 259631 - DNA, 668 bp, Homo sapiens
  misc_feature (559)..(559): n is a, c, g, or t
  misc_feature (587)..(587): n is a, c, g, or t
gtaaaggtgatgaagtagcagaaaagacataaaaaaaaaaatccagaaagtaagaggaaaatcaacagcattcccaaaagaggacatttaatagaattaactctctttcacacacacacatcccccacgtgatgttcaactctgttaaatgctgcaagctctttaaagaaaataaagtcaaataaattttccttggtttggcaacatgagggtaattggagacactgataaaaataggtggagtataggctgggtgtggcagctcatgcccataatcccagcactttcacttcagcccatgaatctgagatcagtctgggcaacatagtgcagccctgtcttgatagatagatagatagatagatagatagatagatagatagatagatagatagacatggtgtcatgtgtctgtggtcccaagtagttgggaggtggctgaactgggaggatcacttgagcccaggaggtagaggctgcagtgaaccataatcatgccagcgcattccaacctgggcaaaagagtgagaccctgaaaaaaaaaaaaaaataaaaaatncactggcccgtggttttacaaccgtcgngaactgggaaaaaccctggcggttccccaactttcgcctttgaggaacatcccccttttcgccaggttgccgtatgcgggg

SEQ ID NO: 259632 - DNA, 374 bp, Homo sapiens
cagtcccattactgctcagcacaggagttttgacctgctccatttccaacctgggctggtcactccctccttaggcaacctgttggtctcctgattccaggaggtcaccatattgatgctgaacttagtgtagacacccaactggcatagtgcactacagcccagaactcctgggctcaagccatcctcctgccttagcttcccaagtacctagactacagacgcacaccataggaacctcttagtacttgtctagtttatacccctcagttaaataaacaataagaaattaaatgacaaattcaagggcaaacacagatttacattcagagattactggcagattatgtaggctactgtgatttcactagaga

SEQ ID NO: 259633 - DNA, 937 bp, Homo sapiens
gaccttctgatccgagcgcttcagctcctcccaggccttagccgcctgctgctgcagctcccgtatcctctgggccttcttgagacgggtcagcaccagggccacaatctgctggtcctgggaggacaccaccacctcttccagcttgctcttcaggacctgggtgtgcgggctccgcatctctttgctggaggccaagggctgggagtcccggctggctaatgactcaacctggtcgctgctgtctctcttctgggcgcacacgcaggctgagtgcctcttgaacttttgcgagggcacagaagaccgctccgagggaactgaggaaggggaccagcgacctagatgtctgccgagtggcactgcccactggtctccaccctgtgccttttctaccctgaatgtgccactcaggggagtgccagctcctccggggcaaggcgggggcgagtctccctgggccagagggtaatgcgggcagggctgcggccgctggggtggcagctgggtctgcggctgccaagccgggcggggcttggttcctgtctctccccaggcatcttccaggcgcctgctgcggggccggtgcttcctggaacgttccaggggcctgcgggccacatcgctcaggcttcggctgccccgcagtgaatctgagcacccgcgcctgcgaggccgcggggtgaacgaacagtgcgggtgcagccagcacgccccagcttcgctctccgcacccggagtcccggcccgggagcacgcggtggagtcggctccggacctctgcccgcccagccgctgcgtggactctcgttctccgccgggccgcgggggttcccagagatcccggtagggcggctgggagaagtggctgaagcctgccatccctccctctgggcacgcgcagcgtctgcccaaggggcctgagacctcccgagga

SEQ ID NO: 259634 - DNA, 392 bp, Homo sapiens
gtaccggggagcagaggacgtcccggcccgggggaagtcgctggggacttgggacgggatcccaggaggtaccggggagagggggcgtcccggcctggttggggtcgctgagggactcgggcagcgggtcccagatcccgagacagagaagatgtcccagcccggggggcgtcgcagagggtcttggaagactcaaggcggagagggcctcctgggctgaggggcgtcgctgaggagcaccgggtcctgcagccgggggacagtaccgggcccgggggcgtcgatgacgggcctgggggtagcccgggtcccaggaagggaccatcccggcctgaggggcgtcgcctaggggcgaggggaaggggcccggaaggtcctgaagcgggagggag

SEQ ID NO: 259635 - DNA, 398 bp, Homo sapiens
ccaatttctgctgatgccatttccctgctagctctggggactccctttcctttgctgtttttgctgtcttctagccacatatgtctgctttcttgcctgttaataccccaagagttcttgcctctgagcctttgttcaggacggagcttgggtccctttgctaaaatgtgtttttaccttgtatatttctattgcagtccttctccaagctcactttctctaagatacttcacacatctttctgctatagttggtggcacttcattttagcttcattttagcacttctcataatctgaccttttattaagtcgggttcatagacatctctgtttctcactcaattgtgaatttctgaggggcaggtgctggcatgcaattactgtggtacccactcca

SEQ ID NO: 259636 - DNA, 443 bp, Homo sapiens
gtagagctctgtagttagactgctttagaatcccagctctaacacttacgaactctgaccttgaacaaatgacttacctaagagctttcttcatctttaagttggtgataataatagtacctatctcacacggctattgaggttaaatgatgtaatgcatgaaaaacatagcttggtacaaactaggtacttactcagtaaacagctgttaataattattttctccctgcctccaggattttgattttctaagcttgatgtttttggaagtcttcttgattagaaagatgttactatatttgaaaagggaatagagtcaactagagtcatattgcaaattttatgtgtctgagagtgtaatgagaatttgcagcatatgtaaacaagtagatttatttttctgaggtaggtccatggattgttaacagtggtttagggaaggt

SEQ ID NO: 259637 - DNA, 379 bp, Homo sapiens
acttagtctctgtcctcaaggagtccccaatgtctatgtactcagttcactcccactttaaatcagatggatgttggtcaaagggtacaaagtttcagttaggcaggaggaataagtcttcaagatccattgcacagcatgttgatcctagttaataataatgtattgcatatttcaaaattactaaaagagttttaaatgttctcactacaaaaaaataagtatgcaaggtgataaatatgttagttagcttgatataatcattccatggtgtatacatatatgaaaacatcacattgtatccataaatatatacaattagtatttgtcaattaataataaaattaaaaataaattaaatggagcagtcaatgtatta

SEQ ID NO: 259638 - DNA, 584 bp, Homo sapiens
cgtgaaccctggaggcagagcttgcagtgagccgagatcgcgccacggcactccagcctgggtgacagagcgagactccgtctcgaaaaaaaaaaaaaagaaagttttaattttttccctgaaatatctcatattaactccacagtagtgtgattatgaggcctgtccccattgagtgagagtatttgctcctgtggtcagaaagcatcattatgtatagcttgattaatggttagagaagttgaatatataatattagatatacatggatacatgctgagtattggttataatttagggctttttcccaagttgatgactgtgtttgttactttaaagtatctcccaggaagtaccaggaggtgtcttcttggacacataacttcatggacagctccttgtttagcttcactggctcatatactagaaaattaacctttgaaatgaatgaacgtagcacaagagttatattctggtcctgagaagcgcaatgttgatttaatattattagtgagtccggtcatttcctggatttatttcaaatagaatcagtcagtctcaatcccccctccctctctggtccc

SEQ ID NO: 259639 - DNA, 483 bp, Homo sapiens
gctcatttttctgtgagctgagtgaagaggcctcttgtaggcagctgtcagagctaatgaatgttttccaagcgccaaacctctggggaaggcagccccacccagaaaacccagactcaactgatgggagctgtcatctcaaggtgtgcggcaccctgttgacgctgtgctacatgatataaatggtgacatgtggccgggtgccgtggctcacccctgtaatcccaacactttgggaggcctaggcgggcagatcacctgaggtcaggagtttgagaccagcctggccatcatggtgaaaccctgtctctactaaaaatacaaaaattacctgggcatggtggcgggcacctgtaatcccagctactcaggaggctgaggcaggagaatctcttgaacccaggaggtggaggttgcagtgagccgagattgtgccactgcactccagcctggacgacaagagtgagactctgtcaaaaaaaa

SEQ ID NO: 259640 - DNA, 314 bp, Homo sapiens
ctaacttaatatcttactacaagtgactatagaatgagaaaagacttagctaattttaaaaacagtatattttagtagtgtgaaacccacctgtcgtcatcaatgtaatatgccctcccatttaaatccctaaaagctaaggaattaatgcccttaattagctgggtgtggtggtgtgcacctgcagttccagctccctgggaggctgaggtgggaggattgcttgagcccaggagtttgaggctgcagtgagctgtgatcatgccactgcactccagcccgggtgacagagtgagaccctgtctcaaaacaga

SEQ ID NO: 259641 - DNA, 1022 bp, Homo sapiens
  misc_feature (111)..(111): n is a, c, g, or t
  misc_feature (114)..(114): n is a, c, g, or t
  misc_feature (122)..(122): n is a, c, g, or t
  misc_feature (262)..(262): n is a, c, g, or t
  misc_feature (270)..(270): n is a, c, g, or t
  misc_feature (274)..(274): n is a, c, g, or t
  misc_feature (280)..(280): n is a, c, g, or t
  misc_feature (287)..(287): n is a, c, g, or t
  misc_feature (296)..(296): n is a, c, g, or t
  misc_feature (302)..(302): n is a, c, g, or t
  misc_feature (304)..(304): n is a, c, g, or t
  misc_feature (306)..(306): n is a, c, g, or t
  misc_feature (309)..(309): n is a, c, g, or t
  misc_feature (313)..(313): n is a, c, g, or t
  misc_feature (315)..(315): n is a, c, g, or t
  misc_feature (318)..(318): n is a, c, g, or t
gccaaagacctttccatccctccacataacccgggggatttatatcccaaaaatccctgtgtctgggttgcaagggggatgttatttcctcatggtgggccataaaaatgnacntgcccggngatttcctcagcaaacccacaaccacttgagaaaaccttatggacctgcatggatagcctatggacattcatttgcggtggagagtgagcacgaacaagcgatggctgcttacttcacagcagcacagctgatgaaaggntggaaacngccngaaaantgtttcntgatgcttnggaaanantnaanccantnggnaacgaggtaacagttgacaaatgggaacctttgttgaacaacttggggcatgtctgcagaaaacttaaaaagtatgctgaggccttggattaccaccgtcaggcactggtgttgattcctcagaacgcatccacctactctgctattggatatatccacagtctgatgggcaactttgaaaatgctgtggactacttccacacagcccttggtcttaggcgagatgatacattttctgttacaatgcttggtcattgcatcgaaatgtacattggtgattctgaagcttatatcggagcagacattaaagacaaattaaaatgttatgactttgatgtgcatacaatgaagacactaaaaaacattatttcacctccgtgggatttcagggaatttgaagtagaaaaacagactgcagaagaaacggggttacgccattggaaacctcaaggaaaactccagattccagaccttccttggaagaaacctttgaaattgaaatgaatgaaagtgacatgatgttagagacatctatgtcagaccacagcacgtgactccagtcagtggtcctggtcccactgtcccagtgtaggaacagagacccgccttaagagactggatcgcacacctttgcaacagatgtgttctgattctctgaacctacaaaatagttatacatagtggaataaagaaggtaaaccatc

SEQ ID NO: 259642 - DNA, 1192 bp, Homo sapiens
  misc_feature (111)..(111): n is a, c, g, or t
  misc_feature (114)..(114): n is a, c, g, or t
  misc_feature (122)..(122): n is a, c, g, or t
gccaaagacctttccatccctccacataacccgggggatttatatcccaaaaatccctgtgtctgggttgcaagggggatgttatttcctcatggtgggccataaaaatgnacntgcccggngatttcctcagcaaacccacaaccacttgagaaaaccttatggacctgcatggatagcctatggacattcatttgcggtggagagtgagcacgaacaagcgatggctgcttacttcacagcagcacagctgatgaatagggtgtcatttgcctatgctgtatattggattatgaatatggtttgaccaataactctaataagctagacctgaaaggttcttcagccaagctctgagcattgcaccggaagacccttctctgttatgcatgtaggtcggcagtggattgtcgaatttcacgaatggagaatggaaaacagccgaaaaatggtttcttgatgctttggaaaaaattaaagcaattgggaacgaggtaacagttgacaaatgggaacctttgttgaacaacttggggcatgtctgcagaaaacttaaaaagtatgctgaggccttggattaccaccgtcaggcactggtgttgattcctcagaacgcatccacctactctgctattggatatatccacagtctgatgggcaactttgaaaatgctgtggactacttccacacagcccttggtcttaggcgagatgatacattttctgttacaatgcttggtcattgcatcgaaatgtacattggtgattctgaagcttatatcggagcagacattaaagacaaattaaaatgttatgactttgatgtgcatacaatgaagacactaaaaaacattatttcacctccgtgggatttcagggaatttgaagtagaaaaacagactgcagaagaaacggggttacgccattggaaacctcaaggaaaactccagattccagaccttccttggaagaaacctttgaaattgaaatgaatgaaagtgacatgatgttagagacatctatgtcagaccacagcacgtgactccagtcagtggtcctggtcccactgtcccagtgtaggaacagagacccgccttaagagactggatcgcacacctttgcaacagatgtgttctgattctctgaacctacaaaatagttatacatagtggaataaagaaggtaaaccatc

SEQ ID NO: 259643 - DNA, 498 bp, Homo sapiens
gctcctaactccaccgcctatcccaaaacctataagaactaatgataattcccgccctttgctgactccttttttggactcagcccactagcacccaggtgaaataaacagccttgttgctcacacaaagcctgtttgggggggtctcttcacatgcacacgtgaaacatttagtgccaaagaccagggtcagcgggactccttcgggagaccagtcccctgtcctcatcctcacttcgtgaagagatctacctacaacctcaggtcctcagaccaaccagcccaaggaacatctcaccgattttaaatcgggtaagcggcctctttttactcttttctccaacctctctcactatccctcaacctctttctcctttcaatcttggcgccacccttcaatctctcccttctcttaatttcaattcctttcattttctgatagagacaaaggagacacattttatccgtggacccaaaactccggtgccggtcacggac

SEQ ID NO: 259644 - DNA, 617 bp, Homo sapiens
attgacagcatctcactctgccacccaggatggagtgcagtggtgtgatcatggcttactgcagcctctacctttcaggcttaagtgatcctccggcctcagcctcccaggaagctgggaccacagcacaataagagattaacataagataacataagattaatacaataaatatttactgatttattgtagagatgggattcactacattgcccaggtgaaataaacagccttgttgctcacacaaagcctgtttgggggggtctcttcacatgcacacgtgaaacatttagtgccaaagaccagggtcagcgggactccttcgggagaccagtcccctgtcctcatcctcacttcgtgaagagatctacctacaacctcaggtcctcagaccaaccagcccaaggaacatctcaccgattttaaatcgggtaagcggcctctttttactcttttctccaacctctctcactatccctcaacctctttctcctttcaatcttggcgccacccttcaatctctcccttctcttaatttcaattcctttcattttctgatagagacaaaggagacacattttatccgtggacccaaaactccggtgccggtcacggac

SEQ ID NO: 259645 - DNA, 300 bp, Homo sapiens
aaagaacactttagtacagaatccagaatgactcaggatactatccattttgtcagagatgaagatatagagctgtaacttaaaattttttccaatgtcaagttaattgtagagacatagtttttacaacaatgctgcatatttttcatggcatcgttgtgtatcacaatatggagagatcaggattgtagaaaacacagctaaagacttatggctttagagttctgatgaaaaaagttcttagtatggctaaacaaaaatttttaaagttctagggaaatattttgtttgtttttatgt

SEQ ID NO: 259646 - DNA, 679 bp, Homo sapiens
gcatgtcatcatgcccagctaattttttgtgtatgtgtgaagactaggtactatgttgcccaggctggtctcaaacttctggtctcaattgacctgccacctcggcctcccagtgtgctgagattatagacatgagccactatgcctagctgaagcttctgtttaaatgtggcattctcctacacaaaaattataggccagtcatcaagatacacattctgccatctaggaatcttaagaaagaaagagataagagtgagagcaagagagagagaaattacacacacaggctacgccataccctacaaacaaagaaacttggtctaaactgctccaaaagacaagggaacaaatgtttgtagaaaatataagaatatgcatttcagataaacataagaaaagtttttctaatgttaactaccccaaaaatgacgcaggcttcctcactaatgagtgagtttcacatctcatcatgcaaggaacagttaagctagcacagcacgttgaggacaaacagcagaaatggctggggtggaggtgggagcacacagagcaacttggaccagagcagcagggagatgggtgcagggaggcctgagggaagtcgctgaggccatagcaacagaaaatcccaaactgattcacggaggcagataggcattccagattaactcacctg

SEQ ID NO: 259647 - DNA, 689 bp, Homo sapiens
ccacactccagcctggcaacagagtgagactctgtctcaaaaaaaaaaaaaaaaaaaaaaattaggtccagtcaaccgttgtacttgtcagtattaattatttttgctctatctgtcctgatggtttgatttttctttttattgaattattatttatacacagtaagatgtacagtcttaagtgtacagttcagttttgatccaggctttttttttttttttttgagactgagtcttgctgtgtcacccagactggagtgcaatgacacaatctccactcactgcaacctctgcctcctgggttcaagtgattctcctgactcagcctcccaagtagctgggactataggcatgtgccaccacacccagctaatttttgtatttttagtagagccaggatttcaccatgttggccaggctggtctcgaactcctgactcaagtgatccacccgccttggcctcccaaagtgctgggattacaggcatgggctgctgcgcctagtcccaggcataaattcttgtaacccataaaaacccttttcatttttattttaaaaatcttggaggctggacgtggtggctcacacctgttatcccagcactttgggaggctgaggtgggaggactgcttgagctgaggagtttgagaccaacctgggcaactgagtgagacttcatctctactaca

SEQ ID NO: 259648 - DNA, 102 bp, Homo sapiens
  misc_feature (62)..(62): n is a, c, g, or t
gaaggtagagaaggctacgtggtgggggagggtggggggagggtcgcggccgcactggcagnctccgggtgtccggccgtgtcccgaggaagtgcaagaccc

SEQ ID NO: 259649 - DNA, 489 bp, Homo sapiens
agtgtttggtcagagccccggaagggcgggaacggccatcgcagtgagatttcagcagggagtgcatctctaaggaggctgaattcccccatgctgaattctgctgagctgggctgcacgctgtcaccagacggttcttgaccacccagacttatctgggctagcaggacggttgaagaccacaaaaccacgagtgtgcacgctgctccctgaaatactagtttgaggcctcacatggctctcctgttcatagaataactgcagataactcacatttagaggtatttggtatctccagctaactcaactggattttctgtacattttcccatcatttgagcccaggcagggatggaattttttaaaagaagttttataagaagattcacttatctttccagttttacaagaaaaagtccattttctttgcatgttattttaaaatagcaaactaattcttttgtttgttttgtttttgagataggtctc

SEQ ID NO: 259650 - DNA, 443 bp, Homo sapiens
ctttgctacctggcccttcatatgcaaaaggatggccttatcttaatttcagatgatttctgctagactcttcctctattaggcctctgccaggcttctggtttgccaaaggcaggagccaatagctagtcaattgtgatcaaccccttgatttggaaaatctgactgccttgctatgtcccactgccattttccttagggagagagtatggccatttaccataatttacttttttgtgatattcaaaatacctcagttggctgagaaaagttggtaaaattttcctgaaaaacaatttagcaatatgtattgataaacctaagtatggttcatacatactagcttcagaacaagtaatgtgtcccaaggaaataaccagagatgtggacaaaagttttacccagaaatctttttcatggcgttatttataacaccaaaaaaa

SEQ ID NO: 259651 - DNA, 928 bp, Homo sapiens
ggttcataatgttttaaatcagtttccctcttctcttttcaacgtggggtatgttgcacatagcattttgaaagtacgcaaagttcttttggaaagagctttatgataccttattgtcaccgtggtggttacgcttaattgacattttatgggaagtcctggtattatttcctgggctctttctgtttccatcttttagtctttctctttccccttatatattctctcactgccccgctagcctctccatcctctctacagaagcctagtgggcttgggttcctttaagcgggtccagtgagcaggcgcctgacccttgattgaagctcaggaagggccagcctgctctcctccccttttggaggccagagaggagagagctgtgtttaaatattaggagctggcagcaggggacgctgcggagctcttttaaaaagcacactcttctcacccaccgctcgatgccttgggccctgaagactgagttctgggcccaccttcagattgttcagttgatgttttatttgggcagcgtgactttctgcagttaaattgcgcattgtatggaaaactcttctgttcttgtccttaaataaaaagactgaaataagcaaatactcagatcggcacaacccccatcattaccaccaccacgcacacctctctgatgtgtaatgaaacctgcaggcataattggttatgtaatatgctgataatacaagtttcggttttcgatggaaaccagatgtggagggactctctttaattgatccagcaaggggaagactaatagatgaactagtccttgcaaaccccagtggtgttttgatttaactttaggggagaatcccgagctcagggctttggagaggtttttaccctcagcttctgctttgctgcagctgtcctttttgtcagactcttcctc

SEQ ID NO: 259652 - DNA, 270 bp, Homo sapiens
caaagacaatattatctcacagatctacctaactttatcagattagagctttatgtcacaacaaaactctgtcttcttcactccttcgttttttcaccattgtcttacaggctatagtgtggggcgacccacctaagaaatgcgtaacaatgattcaatttttgggccacctataaattattgcctatataaagacagggctgaaactctgaatggtacacgtttccatgctttaggttaaatcaaatcctcaaggtagagagtccctct

SEQ ID NO: 259653 - DNA, 477 bp, Homo sapiens
gggataaagaataccaaggtctttatactattaggccttggaggtatatggtttaaagtttaaggatgaccactggaggcatagcaccagaagatttaacttcaacttccaaagtaggggccctggtgggggaggggaggggcatgcgtgcgggtgtgggatgtgttgcagaggagttaaagcttgacgggcttagaaggtggaaagggtcgagatgcagcagagaacaagtcaatggaaagcacaaaataggatggtagaactaaaagcacagtagatgtaaataaacttaagagttaaaactcttaaggctcaaattctagctataaacgattgccaaactaaacacttaagagtgtaaacaattactataggaaaaagactttaaagcaaaaagcccattagagatagaagttattggcctaaagaatgattgttcctctgggaaaacacgatggtgataactgcaccaagcaa

SEQ ID NO: 259654 - DNA, 480 bp, Homo sapiens
caggatttatgggtcccctttacgctgagctgtctacccctgttgcctaaatgcctttcctacctaacagtagctgttcagtgggtgcattggccctacagactctcccaagcttctttctccaccagtagaagtagctatgtggccttgtgaggtctcccttctagaaagaacaggtagcatgcctctgacaaccacgttgaccaggtgacctgcaagcatccccaggatcaactagcaacctaagatttgctgcccaaactaatgcttctccctgtccagtggacacttctcaactaggctgcccttctgtgtcactgctgctacttagtcactcgttgactttggaagaagaggcccttcagaggctccaatgaccaagaacattcccttccctactcctcagtgtcacgccccgcctcctcccaagcatcaccatcaccaaaaataaaactgccttggtatccttgctgtagtcca

SEQ ID NO: 259655 - DNA, 287 bp, Homo sapiens
accacggaagctgtaaaggaaatgaggtggggtggtcactgtgttccatcccacctcatgtgacatccagtgtgacatgaggcttccacaaccatggatcatgagtccctgatgccaccctttgactctctcaggaggggaagagaggctgctgccacactgagcttctcgatcctttgctttcttggttctcatttttctcctccaccttcattcaagtcacccccctttcttcaccccatctccccaggtacccaagaaacaattaaataactgtttaagcatgt

SEQ ID NO: 259656 - DNA, 442 bp, Homo sapiens
  misc_feature (259)..(259): n is a, c, g, or t
aggcctcacggagatgctaggcctcacatcccccttctcatgatcctcactgtgcacttgacataggattaggcatactggagatgagaaaaggctgccacccaaacccaaggcacctgaccacatctgtaaatatttctgaatagtccacaaaatttcacataggtagtctgattagatcttgcctttgagagaagctgaagtcacagatactgttgagagatttctgccctagagatggcctttgtatatggggggntggtggggggacacaaacacatcagacatccgtcctcacactggcaggacggtgttcatcgcattctcttctgtgaccacctctaggctagcggctgcattcgtggtctgtgcaaacattcgtggttctatatatcagcagcaagtgtgcaaaataaaggacctgttaactcagaaaaaaaaa

SEQ ID NO: 259657 - DNA, 382 bp, Homo sapiens
ctattgacagttgccctccacaaagaccacctgaaaaagctgttgattaagcaaatttaagttgattagacttactgcaataaggagggaatatcaacttgaagtagtattagtagtgtctcagtatgaacaaattggaggatagttacagagtctgatgacctgatttgtgtaatattaaggtaggagttgtaatctgtgtaaacgcctaagattaggaacaatttatgataaagtggctttgaattgattggcaatgtgaattaagggtcttgaaataagtcttgagcaatctgttagtcttgataagaaagctattttaggatgggtgcgctagctcacgcctgtaatcccagcactctgggatcgagaccatcctagc

SEQ ID NO: 259658 - DNA, 984 bp, Homo sapiens
  misc_feature (17)..(17): n is a, c, g, or t
  misc_feature (905)..(905): n is a, c, g, or t
gctgcgcctactactancgggtgctgcgcctactactaccgggggcgtgtctggagggcaatggtaagttttagatccgtgtcatactagatcctgtatcaaaaagcctcaaaaggcctgggcattctgttttcttagtacgttactctagtgaacagccacaggtcctttggggaaatatttattgcataatactcgtggtacagttggaaggtcttcaaagaaacccagactccccttaacttgatggattccagatctcagaactggctcagatctggaaagcagcagcaggattgcaatttcccattgtaacagccggtatcagccttctcatcaactcttgggattttttgtttatacaaatcaaagccttatcctgttggctgaaagtttttgttaagaacaccaagggttattagtcaatgccacagttctctgtgggtcaagacaccctagtgggctgtgcacagtggctcatgcctataatcccagcactctgggaggctgatgcagaaggatcgcctgagcccaggagcccgagaccagcctgggcaacatagtgagacccagtctctacaaaaataaaaattagctgggcgtggtggcacacatctgtggtcccagctactcaggaagctgagatgggaggactgcttgagcccaggagttggaaactagcctaggcaatataatgagacccctgtctctctgaaaagaaaaaaatcctatacttggcgaggaatgatggcctacagtaaatgaggtagagctgctaaaatgatgagcagagaaagggtgtcagcagactcagcgtgtgttaaaatgaatttcttacacgagatctgagaaccaaacacctatgttatctcggaaggcccaatagcttcccgttcactcagacnataaaggatgaagtgaggggagcaccgggattgttcagtgacagctgcctcagcaggttacagtagtagtagcggcagc

SEQ ID NO: 259659 - DNA, 488 bp, Homo sapiens
gacatggccatagggtgagtctgttcccactgggcccactgagatggatttgggccaggactccatttatcagctgaccgtgtctggagggcaatggttcatcactctgctatcttctcctggagtttacacaagcccttcagagtgtaaacaccgatgtggattcaatcccacttccggagagaggatcaaaccaggaatctaatacaactgaaaacggagcctgagccaggtgtatcacgcgatgcactgggctccagcaggattacccctggaatcggcgtctgcacccactcccagccctcgtgctaactgcgtacgcttagcagaatttctctgatccttggacccagctgcgtaaaaataaacttcctctcctgccacgggcgcgaataactgtgttaacatcaaatagaaacgtctgggagaaataaaaactgatgcggccgtattttttttggtgcattatatatatggttgaaaacaat

SEQ ID NO: 259660 - DNA, 1008 bp, Homo sapiens
  misc_feature (929)..(929): n is a, c, g, or t
ttccctcctttacctcaacgccagacagcacccctcgacagccagctgccgctactactaccggcggggcgtgtctggagggcaatggtaagttttagatccgtgtcatactagatcctgtatcaaaaagcctcaaaaggcctgggcattctgttttcttagtacgttactctagtgaacagccacaggtcctttggggaaatatttattgcataatactcgtggtacagttggaaggtcttcaaagaaacccagactccccttaacttgatggattccagatctcagaactggctcagatctggaaagcagcagcaggattgcaatttcccattgtaacagccggtatcagccttctcatcaactcttgggattttttgtttatacaaatcaaagccttatcctgttggctgaaagtttttgttaagaacaccaagggttattagtcaatgccacagttctctgtgggtcaagacaccctagtgggctgtgcacagtggctcatgcctataatcccagcactctgggaggctgatgcagaaggatcgcctgagcccaggagcccgagaccagcctgggcaacatagtgagacccagtctctacaaaaataaaaattagctgggcgtggtggcacacatctgtggtcccagctactcaggaagctgagatgggaggactgcttgagcccaggagttggaaactagcctaggcaatataatgagacccctgtctctctgaaaagaaaaaaatcctatacttggcgaggaatgatggcctacagtaaatgaggtagagctgctaaaatgatgagcagagaaagggtgtcagcagactcagcgtgtgttaaaatgaatttcttacacgagatctgagaaccaaacacctatgttatctcggaaggcccaatagcttcccgttcactcagacnataaaggatgaagtgaggggagcaccgggattgttcagtgacagctgcctcagcaggttacagtagtagtagcggcagc

SEQ ID NO: 259661 - DNA, 251 bp, Homo sapiens
tctccacagatgtcttttctggagaaaataatacgctcgttcctctaattagcccatcggtttcaggttcatcactctgctatcttctcctggagtttacacaagcccttcagagtgtaaacaccgatgtggattcaatcccacttccggagagaggatcaaaccaggaatctaatacaactgaaaacggagcctgagccaggtgtatcacgcgatgcactgggctccagcaggattacccctggaatcgg

SEQ ID NO: 259662 - DNA, 1582 bp, Homo sapiens
cacagacaagtgcaagtgtcaataaaactgggctgggggtaggggtggaactgaagtaggaggagtaaacataatagtgaaagtgtcaacctcctgtagtgatgccaaatgccggccctacagtcagaccctcgggagggccgcccccatcactagtcgtgcgacacaagtgatgtggcatttccaagcctgtgtccccatctgtaaagtggggacagccaccatattgacttccgagggttggtgcaaggattgaagtagccagtccaccaagcatggctctcaggatggagcctggcaaacagcaagcgcccattccacagccacagggatccaggctggcaccgtgcaccgaggcacgcatgcaaagcctctccctcagagcttctctctcaacacggccccacagagcagaccaccagcagcaccgctgtggcgcgggccgggtgggggagaaaccaatcagaggctgctcgaaaaaggtacaaagtcagcacttaggagcaacaggtgacagcgagggaacacacagaagcaacactgacaggacatggccacgtgggaaccaacaacccaatctcaacaatctctgaagacgacaccatcagaaagtaaagcatacggccaccatgatggttccttcccctcaagaaaatgcacttttatttttatctttgagataggggctcgctctgttgcccaggctggagtgcagtggcacaaccacagctcagtgccatctcccacctcagcctcctgagcagctgcgactacaggcgtgtaccacagcgcccggctaattgtttttattttttgtacagatgggggtctccctatgttgcccaggctggtcttgcactactggccttaagagatcctcccaactcagcctcccaaaagtggtgagtgggattacaggcatgaaccactgcacccagtgtaagaaaaaatttaaatgatgtgacactcgtaatgttagaaacagtgagctgcaacagcttcaggggcagaggctgcagccagcaccctctccattgcaggcatagatgcaatctaactccactgatgccacatccaagaggatggcagatgagacattccctgaggttatctttatctacaggacttttttttttttttggagatggagtttcgctctttttccccaggctggagtgcaacggtacgatctcagctcactgcaacctccgcctcctgggttcaagcgattctcctgtctcagcctcctgagtagctgggataacaggcaggcgccaccacacccagctaatttttgtattattaccagagacagggttccaccatgttggccaggctggtctcaaactcctgaccttaggtgatccacctgccttggcctcccaaagtgctgggattacaggcgtgagccaccgtgcccggcccatcttcaggacttttgacgttaagtacataatacacacaatattgttattgtgaatatttggccaggaatatgcttaaatactggggttttcttagagaagctggctaaatgtctaatcacaataactaaactgcgttatcatgaccattttggttc

SEQ ID NO: 259663 - DNA, 408 bp, Homo sapiens
acagtgatcttccctttttgcccacaacaagcagaaacgaggccagtgtgtttaaatcagtgtttattgaagtctcagggattacgcaaagtaaatacatctggagagcaacatgaatcctgataattcttaagatacagctcactctctgaagatcacaaggcccatctcatccttgtgggccctcggaaagaagtgagaacactctatattttccatccatggtgccacatttctttcacttggtagaagccatccctaaatctcaccaccccagagtcacagcattccgtgtgaataatttgtgttctggatttgttttattcctagctgtcctttgtccccgagaaccctgagatatttgtaaagatttgaagtaataaaacaatcttaaagaaggtttaaaaa

SEQ ID NO: 259664 - DNA, 514 bp, Homo sapiens
ctaaaagagtataattgcattgtttgtaacaaaaaggataaatacttgaggtgatggatacttcatttaccctgacgtaattattacacattgtatgcccgtatcaaagatcccatatgccttataaatatatatacctactatgtacccacagaattttttaaatgaataaaaattagagttaaaaggctcttaggtgcatacattataaaagctttatcaagggaaattttgtagtaaatagcaaaaaccttaaaagtttgtgtaccatttgatcaaacaattccatttctggaactgtattttatggaaatatttagggacatgtgtaaaaagttattaagaatgatttcatcaatgttaaaatgtttaacataaaaaatcggaaatgattgggaatatttatgtacgttatgccccaactctgtgattaaatattatgcatgttttaaagaaatatttagcaatatagcaaaatgttataacgaaaaataaatttataaaatcgatggac

SEQ ID NO: 259665 - DNA, 1137 bp, Homo sapiens
  misc_feature (1135)..(1136): n is a, c, g, or t
gagtttcactcttgttgcccaggctggagtgcaatggcacgatctcggctcactgcaacctccacctcccaggctcaagcaattctcctgtttcaacctcccaagtagctgggattacaggtgcccaccaccacgcctggccaatttttgtatttttaatagagacgggtttcaccatgttggccaggctggtctcaaactcctgacctcaagtgatccacccacctcggcctcccaaagtgctaggactacaggcatgagccaccacacccggcctagtatttttttttttaagagatggggtcttaccatgttaccaaggttggtctcaaactcctgagctcaagcgatccacctgcctcagcctcccaaagtgctgagattacaggcccgagccaccatgccggcccaacataacttttatatgcactgcaaaacaaaaaaatccctgtgactcactttattatgatattggctttattgtagtggtctggaacccaacccacagtatcttccaagtttgcctgtacattttagctatctattattaaacaacttagtggcttaaaactacaataattttatttatttgcttgtaattttgcaatgtgggctcaaatagcctttctttgctccacacgcagtcacctgaggtggctccagtgggctggagaatccactttttaaatggccttcttcacgtggctggcaaaagttggtgttgactgctggctgggagttcaactgaggctgttggcccaaacctcagttcttcttcacatggttggttgggcttttcacaggcagtaagtctgagaagtcaaacttctaacacagcagctggcttcccccgaatgcaaaaacagaagctatcaggccttcttaaggcatagtcccaaactggcataacatcacttccaacgcattctactattgattaaagcaagttacaggcccaatcagactcaagagaagagaactcctaaaggtgcaaatattgggaagcctggttcatttggggccaccaaagtagcagtgtactgtaagatagtcaccctgccaagtgttctgtagctgtatatttgtaattacttctaattgtattgagttttaaaagtaatctctaaaaaaaaanna

SEQ ID NO: 259666 - DNA, 922 bp, Homo sapiens
gagtttcactcttgttgcccaggctggagtgcaatggcacgatctcggctcactgcaacctccacctcccaggctcaagcaattctcctgtttcaacctcccaagtagctgggattacaggtgcccaccaccacgcctggccaatttttgtatttttaatagagacgggtttcaccatgttggccaggctggtctcaaactcctgacctcaagtgatccacccacctcggcctcccaaagtgctaggactacaggcatgagccaccacacccggcctagtatttttttttttaagagatggggtcttaccatgttaccaaggttggtctcaaactcctgagctcaagcgatccacctgcctcagcctcccaaagtgctgagattacaggcccgagccaccatgccggcccaacataacttttatatgcactgcaaaacaaaaaaatccctgtgactcactttattatgatattggctttattgtagtggtctggaacccaacccacagtatcttccaagtttgcctgtacattttagctatctattattaaacaacttagtggcttaaaactacaataattttatttatttgcttgtaattttgcaatgtgggctcaaatagcctttctttgctccacacgcagtcacctgaggtggctccagtgggctggagaatccactttttaaatggccttcttcacgtggctggcaaaagttggtgttgactgctggctgggagttcaactgaggctgttggcccaaacctcagttcttcttcacatggttggttgggcttttcacaggcagtaagtctgagaagtcaaacttctaacacagcagccaggtttacgccatcactaacgatgatagcttacgatgatagctaacccagctcttcaacttcctttcaatctccagaaaa

SEQ ID NO: 259667 - DNA, 256 bp, Homo sapiens
tttttccattcatcttcaagcacaactcatcttgtcacaggtcagttataaacagttgacacaccaacctgtccgcaggtttcacgctgaggagcactccctcccttccaacatgaaatggaggctcaacactttcatagcctcacctcctactatgcttctctattctgaagccttctactaagacctgtagatcttcttccatttgaggtaaactctcctttatcctccacctttttctctcatcttctctctt

SEQ ID NO: 259668 - DNA, 503 bp, Homo sapiens
cgatgttggtatcttcataggaattgcattgaatctgtagattgctttgggtagtgtggtcactttcacaatattgattcttccaatccatgatcatgggatgtatttccgttggtttgtgtcatatacaatttctttcagcagtgtttgctaggtctccttgtagagatatttcacctcttggtcaagttatttctagttattttattttactttttgcagctattgtaaaagagctcgggttcttgatttgattctcagcttggtcattgttggtgtatagtggtgctactgatttgtgtacattgattttgtaacctgagacttcactgaattcatttatcagcaattcattcatttttagaggatacttggtccatgcacatgtcagagattgttgtaatgtttctttcttgcaatgatctcatcacattttaatcacaaagtcaggctagtcttttaaataaagttgcaaagcattaatcattttttctcttctctgg

SEQ ID NO: 259669 - DNA, 512 bp, Homo sapiens
agatcaaatgtgccagttactcaggaagtgaaatacagaggtgccaagactcttgccctctgctactgaaagagcagccactgattgctatgtgtgatacaaaagaaatttaagaactcaagagagcacttctgacacagcttattattgccatacatgacatcataattcaacaagtcattatataggggtttcagataacacttattttgtatatctgtcttaaacacatttctaacatcacaaaacataaatcaggaagatatctgctgctgctgctatcaacagatgctgacctgtaccataatgatactcaataaattggttctaatttctttagattattaattccatagataattattctgcatatgtcaaccaagattatgatttcctattactgtttcctttctggacagcctcaatgagctttaataatagcagttcattttaagccagttaggtctgacaaaacttggcaagatatattgcaattgagagttattcataat

SEQ ID NO: 259670 - DNA, 392 bp, Homo sapiens
  misc_feature (1)..(2): n is a, c, g, or t
  misc_feature (13)..(13): n is a, c, g, or t
  misc_feature (29)..(29): n is a, c, g, or t
  misc_feature (170)..(170): n is a, c, g, or t
  misc_feature (304)..(304): n is a, c, g, or t
  misc_feature (379)..(379): n is a, c, g, or t
  misc_feature (384)..(385): n is a, c, g, or t
nnttctcgtcttncacccatcctaattanacccatccttcaggactaagctccaaacaattctactttttctgaatcaggaccaagggaaatttagaatgtagcaattactctattgttatttaatttttaattgcttaagtcttatctgcccaacaagattatcaactncttcaagtcagacttgtcgtacacagatctatacaaataataaatactaaaagtatttaatttgaaaaaagaaaaagcttattcaaaggtggtaaccactccattttccactaagctccagaaagggaagattncaaataataatttaagacatgagaaaagggtcactataacttcatttttccaacaagggaagggacttatgcggnagtcnngagaatt

SEQ ID NO: 259671 - DNA, 191 bp, Homo sapiens
gttagtgatgtgtcatattgaaaacacttttttctctatatttttataataatttttagttggcttactttcccatcaaattccaagtaaatcccagttctgtggtctatgtgcttgctaactccttatcataagctcatgggttcacttgaagtatgtggaaagttgattttaatcagccttcctaataa

SEQ ID NO: 259672 - DNA, 285 bp, Homo sapiens
actgaagctgctgctgggacagaacatcctgagccaccaacgtacagagttttgcctgctgtgaagctcagctctggtgtctttttccccaagtgttgaagtgtcctggaattctcatgtataaacagaggattaaagaatgcaagtttcttagctatttaggaggctgaagcagaaggatcacttcagtctaggagttcgaggttaccgtgagctatgattgcaccactgcactccagactgggtgacacagcaagaccctgtctcttgagaaaagaaaaaaat

SEQ ID NO: 259673 - DNA, 2616 bp, Homo sapiens
ccaattctctgtattgtttattttcacactgctaaaagatatcacctgagactgggtaatttataaacaaaagaggtctaaatgactcacagttcctcatggctggggaggcctcaggaaacttacaattatggtggaaggtgaaggggaagcaggtaccttcttcacaaggcagcaggagagagagagagcatgtgcgcaggggtaaccaccacttttaaaccatcagatctcatgagaacaccctcactatcatgagaacataatgggggaaaacacctcgtgatccaatcatctcccaacaggtccctcctttgacacctggggattgcaattcgagatgagatttgggtggaagttcaggaacaaatcatatcaccagacaaataaaagctgtgggatttcaacaccattaaacctgccttacaaaaaatgctaaagggaattctcaagtttaaacaaaaggacactaactaacatgaaaacaaatgaaagaataaaactctattaaaggtattcttatacagtcaaatacagaatactccaatactgttattgtgcaacagtcacttttaactctagtataaaagttaaaaaacaaaagtattaacaaataactataactacaacaatttgctaatgaatacacaacatacaaaagatataaactatggcatgaataataaaatgtgggaggaggagaagttaaaatacagtatttttaaatgcagtcaaagttgttaccagattaaaatggatggttataactatgaaatattttatgtaaacctcatgataaccacaaagaaaaagtctgtagtagatatacaaaacataaagagaaaggaaccaaagcaaattgctccaaaaaagttattaagtcacaaaggaagacagtgagacaaaaagaagcaacaaaggaactacaaaacaatcagaaaacaattaacaacatgatagtagtaagcctttacctaccaataattactttagatgtaaatgtattaaattatccaatcaaaagagagagtggatgagtgaataaaaaacaagatctaactatatgctgcctgtaagagactaactttagctttaaggacagacataagctggaagtgaagggatgaaaaagagattgcattcacatgataaccaaacgaaagcagaggtggctatccttataacagatgagatagagtttaagtcaaatactgtcacaagagacagagaaggtcattatataatggtaaaagggtgaattcattaagaggatataacaattgtaaatacacatgtacccaaaatcagtgcatctaaatctataaagcaaatattaacataactaaaggagaaataaatagcaacatgcagttcagcacctttgacagggatgcagaccagtgggaagagaactgtgcagaagtctatgggggaggctggtggtataataactgccaagcagccaatctcaatggaatctactaccctgggggctcctatgacccaaggaataacagtccttatgagattgagaatggagtggtctgggtttcctttagaggggcagattattccctcagggctgttcgcatgaaaattaggccccttgtgacccaataggctgaagaagtgggaatgggagcactctgtcttctttgctagagaagtggagagaaaatacaaaaggtaaagcagttgagattctctacaacctaaaaaattcctaggtgctattttcttatcctttgtactgtagctaaatgtacctgagacatattagtctttgaaaaataaagttatgtaaggttttttttatctttaaatagctctgtgggttttaacatttttataaagatataccaagggccattcagtacatcaggaaagtggcagacagaagcttctctctgcaaccttgaagactattggtttgagaacttctcttcccataccacccaaaatcataatgccattggaaagcaaaaagttgttttatccatttgatttgaattgttttaagccaatattttaaggtaaaactcactgaatctaaccatagctgacctttgtagtagaatttacaacttataattacaatgcacaatttataattacaatatgtatttatgtcttttgctatggagcaaatccaggaaggcaagagaaacattctttcctaaatataaatgaaaatctatcctttaaactcttccactagacgttgtaatgcacacttatttttttcccaaggagtaaccaatttctttctaaaacacatttaaaattttaaaactatttatgaatattaaaaaaagacataattcacacattaataaacaatctcccaagtattgatttaacttcatttttctaataatcataaactatattctgtgacatgctaattattattaaatgtaagtcgttagttcgaaagcctctcactaagtatgatctatgctatattcaaaattcaacccatttactttggtcaatatttgatctaagttgcatctttaatcctggtggtcttgccttctgatttttaatttgtatccttttctattaagatatatttgtcattttctcttgaatatgtattaaaatatcccaagc

SEQ ID NO: 259674 - DNA, 255 bp, Homo sapiens
agcagccagggctggtggggttggagagggtggtgtcgtgttatttcatcttctgtgtatttatgggagttgagatttttcatggagcaagatggggttacaaatcattgtgtttgttgtttccaccctgatgttctccttcctggagctcctctaccctgtgaagtggtcaggtgccaccagctcttcttagactcttggattctaaatgtggagagggcggtcctcaccccaggcacacaggctctttctctt

SEQ ID NO: 259675 - DNA, 222 bp, Homo sapiens
gaatgaagagacatactaagtgcctagagccatgaatgaaaatacaccacactgaggataaagtaaaaattctataaactttcagaaagaaaaacattacatcagaggatcagaaatcagatggtttcatccttctaaatggcaacgatatatgctggaagaaggacaatggaaaagtgccttcaagattctgaagaataatgatttctaacctggcatggg

SEQ ID NO: 259676 - DNA, 422 bp, Homo sapiens
gccctgctagacaatttcctatgcatggacacatgctcaggtctatcccatcttgaaaccaatgcctgccctggctccccttagtgcccccttccgagcaaaaacttaggagcagtctacattcaccatctcccaattcagtacacccagcatccactaccatcatccccatcctcacagaaaatacaatttactcccgtgtcagtgaatccagtaaatgcacttcagtcttagagtctcacgaaaatgtggtgtctattttctttgagaatcattctctattctcggctcctctacaactgtctcctggttctttccctgcttctctggatcatctggaccatccagaggtcctctttcaccactaaaggctgattctgctcaagagccattctttacccattccttcgcatgcctcatgc

SEQ ID NO: 259677 - DNA, 345 bp, Homo sapiens
tcccttcttctgaatcccataatgccccacttatcactaggctgacactttttactttcagtctcataacatcattacctccacataggcttgtgtgcttccagatcctggcatacagtaaatgtgtgttggatttaatggacgaaatgcttttatctggatacttggcattcttcagtttcgtgtaatttcacacttttagtttgagtggctacgatgtgtgaagctccatgattgggctttgggatgcagctgtgtgagcagacactctgggctccatagtttatcagttgctaggctccaagcagaggtaataattgctcagaaagaccaggagtgtgaaaa

SEQ ID NO: 259678 - DNA, 436 bp, Homo sapiens
taaggcaggagtcttcttggcatgggtctgtcaacctcttctctcccccgggtctgtgcttccaaatgctggtgctgtttgcacacttgtgtctttggccttcactggttctgcttagaatctcccttccatgggtatctacctgaccatctgctcctcttctttcctgtctgaaaaaaaaaagaaaaaaagaaattaaaaagcaaatatatatagagaaaaacttttaatggtaaaatgttcatttttaaaatctagatgcagggcagaaaagtcttgtcatgtttaaactcctctgggtttgaagtttctggaaatgaaaggtgtgggaacaggtctctggagcagcagtgtggaagacggggtactggggctgaagtgagccgagatcgcgccactgccctccagctgacatgagagaacaaggccctgtctg

SEQ ID NO: 259679 - DNA, 122 bp, Homo sapiens
aactgcatctgctgtgcaccatggactcaccagtaaccagtccagtgtgatgtgcatttgaagttagttgtgtagagacaggaaaatctacaagatgttgctatagtggtttgcattattgg

SEQ ID NO: 259680 - DNA, 156 bp, Homo sapiens
cacagaaacgaaaagtttttaaataaaacatgtcatccaaaattgtaaagtgagaaagattgttttcatctcatgtctttgaattgtattgtgagaggtattggtcttcttccaccaatccaaagttaaggacaaataaatttcattgtatcggaa

SEQ ID NO: 259681 - DNA, 413 bp, Homo sapiens
taatccttattactgcacataattactcccattttacagatgaataaatgggattcaagttaactaacttgcccaagactactgaattcagtaagtggcaaagcaaggattaaaacctaagcctctttggctttaaagctctgcttctaatcacttttttactactgattaaacagatgtgtcccaaaattaaggaagtcatcgttgttttttttgctttgtttttgcttagtcaaagagcacaggccatcatttgttgtagtgtcacccgtaaagcttaataagtttaaagttcagggtgttaatcattacaagcataaagtatgaatatgctttaaaggtttatttaagaaaagaattgggattagatttgcccaccagaatatacatttttcacttgaagtcctgagaga

SEQ ID NO: 259682 - DNA, 247 bp, Homo sapiens
gtatcttcttaaaaggatgaggaagctctgtttacctaaatgaaaagctttctaggaggaagtcctaagtgaacaatgatgcatgaggatgcaatcttacaggcaaggagcccagtgataacaaatggctgtagatgcttttcctccatcaagcttccaggaggagatgagatggagcccatcgctgagccaaggtcaccagccccatttcacaaatgtaaatagcaggtgtcccccacacagtctg

SEQ ID NO: 259683 - DNA, 805 bp, Homo sapiens
ggatcctgttgatctatgaccttaaccccaaccctgtgctctctgaaacatgtgctgtgtccactcagggttaaatggattaagggcggtgcaagatgtgctttgttaaacagatgcttgaaggcagcatgctcgttgagagtcatcaccactccccaatctcaagtacccagggacacaaacactctgcctaggaaaaccagagacctttgttcacttgtttgtttgctgaccttccctccgctgttgtcctatgaccctgccaaatccccctctgcgagaaacacccaagaatgatcaataaaaaataaataaataaaaataaaagaatgatgcacattttaataaaaaaaaatcaacaacaaactggaaaatatagaggcacagtttttgtattcaattgaagttgtcatgagattaaaatatattgctttaactgtaagatgtatgtaatctacagttttcaagatgattgcaaagattctgtttaaagaaagtatctaaaataaaacaaaaaataatcaaagcatgccagtacaaaattaaagagagtaaaaaaggaaatgagaaaaatatactactagaaacacatgaaacaataacaatatatctggaaataacaacttcatttctttaaggaatcattttaaatttaaacgtattaaactacttaataaaatgaaatataatctcaggactttggaaggccaagataggctgatcacttgatcccaggagttcaagaccagaatcggcaacatggcaataatctgtctcgacaaagaatacaaaaaaaaaagttggc

SEQ ID NO: 259684 - DNA, 353 bp, Homo sapiens
atgcttgatgccacggcctatatacaattatcatatccccttaattggaaaagtttgaacaatcaaagggcatttttctaaatggcctcctcaactgttttctgtgttttggtcatatccaaacatattttgatattttgtatgtttgtcttcaggcttactcattaaacctctacctgacttctttattggagactttcgcaagctgctctgaaaattcctttttgattcccttagatgagccctgaaatgtctctttggatcttctggactccacaaatcacaattttaaaacaattagactcataatgctactgatataagagtctctgaatctaacagtaacatcaagg

SEQ ID NO: 259685 - DNA, 1359 bp, Homo sapiens
agggttctaaaaatcattgtgccagagaatttaaatcttcatatcatggtaagcacatgcgtatgtctgtgactcagtttcttagccagacttccaggtgttagttaattccttctcatttagttctactgtaatccattctgggaaaatgcataccacaaaactgtgtatcttgcagcttctttcgttatgcatcttaattccctcagaaggtcccagaactttatgttaaagatctgggtttttaaagacaatttgggggccttctaaagaaacaatagtagatctaattacaagtagtggattgcttacttcaaatttctcttttacaatttagaaagtttagtaccagtttatagactgagggagtagtagctactatttagatgctgagaataatattatcatgcttgggtggggaagaaaggcccttactcaaatctccattttcatttttaatgcttcctggacttcagttattttcttgcttttgcctcaagaataataaatatttttggttaaaattttttttgttcaaccctgttgttgttactgttattttcatagcacagtagtctacagctctctatagtagcttaatagctatttgctgaatgaatggaacatggagtgttacatctgaaactattctattagaaggtgaaaagtgttgattgaagaatggtaggattttatcttccctacccatgatagatttattaagattgtctttggagctatgtcttccattccaactatacagaaataaacttttttaaagtttagtttgcccatctgataaaggaacattcctgtatgctattctaaggttcattttcaacaaaagttacagacatttatggttgatagtttgagatctatgacagttttagggagctccatattcaaaaggctattgctggtgatagtacaatgaaacactgacttcagtatatttttatcttggctttcattttacggttatttctactactgttaatatggactaatacttgattttgtgaacctgttttaattttagggttatatttatgttggaataatatattttaaaagtgtcctatactatgaatttatttgccatatataagacaatcagaattatctggtagtttattctaatcctggttaataatcattaggactaaactatttacattaaagaaggaaaaaacaatgagatgataattttttttttctttgagacggagtcttgctctgtcggccaggctggagtgcaatggcgcgatctcggctcactgcaacttccgcttcctgggttcaagcaattctcctgcctcagcctttccagtagctgggactacgggcgccctccac

SEQ ID NO: 259686 - DNA, 294 bp, Homo sapiens
ttttttttcccctaagtaacattgtccttagccatgatccttatttgctaaacaaaatcacaactttataggtaagaaaaataaggcctagagtggttacatgacaaagttcacattctaagagttaagaccacaacttgaacactgcctatgtgaagactcactgccaagaagcaaacctgcaaagccagtcatttaacccataactcctgtaagcctgagactcaaaggcaaaccaagcctactgtgagtgactttaaacttgctgacctacaatcccctataaattcataa

SEQ ID NO: 259687 - DNA, 261 bp, Homo sapiens
ttagttacagtaatacctatcctggtccagccagcctgcagtacttctctggggaagacctagacagggacacacggctgagaatgcagcaggggcagttcaggtacaacttggaaaggcaacagcaggagcaacagcaagccaaggttgatgagaattatacagcctactgaagatgaaccatctctttcatgtctacccatctcccagttgcatagtacagtgtctgacaggtcttaggaacagcaaggagctcagtgt

SEQ ID NO: 259688 - DNA, 503 bp, Homo sapiens
ctgagtattaggatccgcatttcctggtggtgtattaagccagaaggccagctcaaaggcttcatttgtaactttcatttttaggtcaccctggcttatgaacattagtacattgctttttgggaaaaggacacctaaataggaagcttttatcaaaaaacttaaaagcacatttttctcatcctccattcacactgagaacaactaggagtagtacgtcaggtcctctctctgtgggtccggggaagcccattgatgagcagcttttggcttggcttgctcatttcaggtcagtcgatcaagcagccttaaaatatccactggtgttcaaggagtcatttgatcctcactcccttcctgttcttctctctggaaagctcagaactacctgtcctacttttcttcaattcagaggctctcttcccagaaagctgcagtctacttactggatttcatgaacagacacttctcaaaagacgacacacaagcagccaataaacata

SEQ ID NO: 259689 - DNA, 366 bp, Homo sapiens
gaagttgacatttatattataagaggggagtttaagtatatctgctatttgttatgattagtgtgcttgagtttctctacttaccaggtcactttttcaaacatacttctataagatgagctgcaaagctagaactgggataagaaaaatagagagtacaaagcgatcctctgtcagaccccacctctcctatcagtcccaatttgctatttgccactcatatccccagtgcgcttatttcccagttaagtgttactggtaagaactttctgaatttagggacatatgtatcagcatttgacatctaactttaatttagttcaaatattatcaatgatggcagtggcaggccatccggagcggccg

SEQ ID NO: 259690 - DNA, 478 bp, Homo sapiens
catcttaaatttttaaaaatgctacagtttgtgtattgttgataatacagatgatatgtaagcatggtaatatgtgaatggcctttataaattaacagatacatctattggggagggttttaaaatcatttattgatggggtgatgatcagaagagtttggagaccaagtaactgccagcataaagtccaaaccccttagcttgaccagcaaggtcctgtctaaccctgtcttcctgcctacatccccagcctcatggacctccagatgtcttatacctgctctaaacatactaaggactttagtcattctgacatctgcgccaatgactcttatatctgcactgcctcgcccttcctaacccgaacctcttctctgcctggcccaaagagcacatcctttgagagtctttccgtttctcccttaccaccactccatctgcatcttttttttttctcttttgagatgagtttcactct

SEQ ID NO: 259691 - DNA, 412 bp, Homo sapiens
aaatcctgttctcctatttgtttgcaagttttctctctagtgaaaaatacttcatcattttgtccttggggaattcattaaacagaatgtggaaaaatgtaatctttagggagttttgctgtgagtactctcagtaaatacagcacaagccaagagactctacagagacctgacctagagtagacgaagcctgggccattgtcagataatcatttccttgagctttgaggcagtcacttaattgttttgtcacctctgatttttgtaatattgggcctaattgcatctccctgatttgtggggagtgtttataaaatatgtacaataattattatcattaataaactggattattaatcccctccaaaaataatgtgccaacatgtcaataaaatttacaccttatccttta

SEQ ID NO: 259692 - DNA, 644 bp, Homo sapiens
tgcccaggccgagatgtgaaccctgagtttgtgcaactcgagtttcagagtggcggcctctgctcctcacaagacattgccctgcgagggggtcagccctgaagccggatggcccggcccccgctaccacgtggaggctccctgtaggtgcttgtgtagatgcccccgtgcggggacttgtttggctgatggatcagggggaaggttctccccacggtgtgaggcagcaccgagggctccgtgcccagcaggctcactgtcggcagttgggtctggtttgataaccgtggaccggggtgacaggccctgactctgcagagcaggactgtggaaaatggacactgatgctgcccggtggatccaggcagggccgggatgtttgcaggacccacgggacaattagaacgactgggcctgactggcacagggatgtggactacggtgcttgccatcagcagatacaagctgtacgcagtgggccgcaggcgctccctgggccggaacacatggacgtccaggtgtggaatggcccggacagcagataacaagccttcgtcgtggtcacccctgggtgtgggctgtgggttttaatcttttcatttttgctcatctgaattttctaattaaaaatatattgcttttta

SEQ ID NO: 259693 - DNA, 662 bp, Homo sapiens
gttacatatcacaaaaacatgcgttgtgaagaccagccaagcatacaacaaatcagtcccattcagtttgggattacaagccggacgaacaatagagcaggcttcaaaataaacttccgtttccaggatgagaaggaaacatagggacataagctcttaggagacacctgcagtgagcagggacctgcgccagagaaagggtataaagcggagcctgaaaagaggggactccgaggaagacaccgcattcattcttccatcccacaaactttcgccaagtgagtcctttgtgcccggctttgtgcttggctttgtgctacgcagcaggcacaggctgatgaatcagttagaggcgcctgcccccttgggcctcacaatctgatagaagggacaaacaagtaaatatagaacctgcattcctctcattcaagtgaaaaggacatcctgattaaaatatctatggcagctctgagaacattcgtgcccaatcacagtaagggcctgaactgattgtcatttcctttgtttaaccaattctcttacacctggagtagaatccctggggccagcccggctgggtacccaacgtgatccctccagatctctggagcagctcgccttcctcataatcattttaccctgggatgtttcagcctttgagg

SEQ ID NO: 259694 - DNA, 241 bp, Homo sapiens
aattcttattgagggagttttctcagaagcttgaaagatgcaaatgtagggcttgaaaaggaaggactttctaccctgaacattaaacttaggaaatgcatggcctgaaaaagtacaacaagaagaaaatacaaagtgaagtctaccacctctggaaataatagagaataagaagaaataaaaacagctagtatcttcatagccctcctacatttgttttttcactgattcctcgtcgacg

SEQ ID NO: 259695 - DNA, 563 bp, Homo sapiens
cgtcggtggtgtgcacaggaacacgagttgctctaagttgaaattcttggaaacataccatgtggctgcaaatagaggagccctgggagacagcagggaggtggcagggtttctcgtggactgcctgtgcctcgttccagagtctgattcccagatttgtaggctaagaaatgtgattcatcatcatgttagtcaggctctgattcactcatcttaagcatgagtgttccaggttagccatcaggagactgaggcatgggggttggagctgcccatagtcagtcagcctcccaagaagtggggggctggaaggtccaacctcagtggcttgactgctctgcagcccagagtaggcaatgagactttccttgttaatggggtgaggagaaaatggaagatttcgagaatttctcactactccatgcagtaagcaaaggaggggcagaaaagggactacttttactcttcgggaactttagaccttttaatcgcttcaaatatagtggcattgaaatgcaaagtattttcaaattgcattgtaatcttcatctctttcagaaatt

SEQ ID NO: 259696 - DNA, 549 bp, Homo sapiens
agctacaggtagtcagatttcaccttgagaaggaggaagggcttttgaataatccaagttgttaaggtagaattgcctccctcaggaggaatgagattccttatcagtgaccagaaaaaggatggtcagatatttctcagacttattaataagaattttaaacataggaataatggttcagactaagagggttttaattttgatattctattgtgattcattcaacaaataatttttgggatacatagtacttgctagatactgttccaaactgtaggaatgtagcagtaaacaatctataaggtcctgctctcattgtagtttacagtgtagtaaggagaaataatgagcaacttaactttctgtaaagaaaatatagtgaaagtgaggtgagagcaagtgactggggaagctacctttactttagatggtctttgaatgaggatgaggagggactggtagtgagaagattcagagaaagggcatttcagacagaaggaataactagcattaaaaattcaaaagcagacctgggcttgaaatactcag

SEQ ID NO: 259697 - DNA, 682 bp, Homo sapiens
ctaaatactgagctgggatggaatctctgtgctggaggctagtggtgcaaacattttttccgcatgaggttcagaaaggttaggcggcggtttctcatctgcaggcacaggtgactgactgccttcagcatgggcccatctgtccatctctcctcctgaccctggtctcattacaggagagggaactgggtgctagagggtggggaatccaggatgtcagaggtgtcacacctggataaagcgttttgaaaacacaagtcccagggctgattattgattttaccacatgcagcctgtttttatttatgaagtttcttttcttttcccttaacttccaatgatacactataatgtacatcaatgtccttaaaatgtatgtagtcctcttcatctagtgactatactgatcctcaagtatccattctctagtcaagggttatacctgtttctcctaccccacggcagtgctgggtctggtgtacccctcccgcagtatcgcctccccctaaataagcacgtttccctataatttcttactttttctctatgccttcccatcatgtttgcactcactgtgaagtaaggaaacgcttcctaattctgttattccttcctactcttaggagatttctccctctgcgctgaggatctcactgtgcacctccagccctgggtcctggtg

SEQ ID NO: 259698 - DNA, 414 bp, Homo sapiens
gcctgggcaaaaagagtgaaactcggtctcaaaaaaaaactggttcagtcatgggcctggacatttatttctgaaaaaatatttaatttaaaaagaacaagtccttccatttttatttttttcattcttcttataatattcttatattttatttttcattcttcttataagattttacgtgtgacattaaaaaggacaaggaaacagatgcatctttaatctgctattttaaacccaaaggtccaaagcacaattttgatagtactgaaaatgtaagagccttgtctttcacttcctcaatagttttttttagaaaagatgtaatcattactcctatgcaaatataaaatgggcatatatcaaatgctttatttaattcataaaaaatgaattcaaagagaattatttgaatta

SEQ ID NO: 259699 - DNA, 659 bp, Homo sapiens
ctttgcttcagtgtaaagcaatatgcttggcagtcatatcatcactatattttccttcctcttaaaaatacaatgtgctatccatgagcagatcacaaacttggagccaatcaaaacacaccttgtatagtattcattaaccataatttattatgtgtgtgctgatatgccattatgatttttcagctttggtactgaaatatttagctatggttgctgaatataatcagcaagttaagaggttttgaatatgattatttgaagcttttttaacagtgagaaactaggttgaaaagagcattgacagctaaaaacaatggagctttttctgtactcaatactataggtaatggtatatttttctaagtatttataatttattctaaggataagtacatatctgatgactgaaacatcatttgtaataggtacattatttaacttctcaagacatgtgttactatcttggctgagggattctgggtaaattttaaacaataaattgaaattctattgtttctagtgtgtagttttaaagattatgatctcaacattcaaatttaggtttctcttttctttataaaatgactgcattagattcatagacagaaatttaaatgatgcatttgtactttcaggagctactatgtatttggcat

SEQ ID NO: 259700 - DNA, 1973 bp, Homo sapiens
atgggaaacagggtgaagcagagaagcaggacccggcagtggcaagcactcttccctttcctgctgcctttgttctgcggggcaccctcggagcagatccgctactctattccagaagaaacggtccagggctccgtggtggggaaccttgcggaggacatgcggctgcatgttcaggatttattgacctgaaaccttagagttagtgcagagaaacaatactttaccgtgaacacggagaatgggaacatacttgtgagtgacagaatagatcgagagtcactgtcttcaaaatcctctgtgtcatacccttagagattgtagcagagaatcctctaaatgtttttcacataaatgtgatgatagaagatataaatgataacccacctcattttccccaaaatagcattgttttacaaatcaatgaactagcaattccaggcattcggtttggcctggaatctgctatagatgcagatgtagggcctcactctctccagagttaccagctcagttctaatgaacatttctctctgatgatggacaagactaaaggcaagaacgctccagaattagtgctggagaagcccctgggccaggagcaacagagctctcatctcctggtcctggaagcaatggacatgggtgacccagtcccaactggcactgctgcaattcaaattgaggtcactgatgccaacgataatgccccagtttttagccaggatgtatacaaagtcagccttagagagaatgtgcccccaggcacctctgtactaaaggtgacagccactgaccaggatgagggtgtcaatgcggagatcacctactctttcaaatccctacgagatgatattggaaatatgtttgtgctagaccatcaaaatggggaaattaaatccaaagacttaatagacttcgaatttcgtagcagttataccatgagagtagaagctaaggatggtggaggcatgaccagcgaatgtaaaattatactagaaatcctagatgagaatgacaatgccccagacgtggtttttacttcagtgtccagttctgtaactgaggacgcagaaccctggacggtgatcactctgttcaaaacacatgataaagattcgagagaaaatggggaggttacatgcctcataaacgaaagagttccttttagaatcgaatcttccgccaataatgactataagcttgtaacagatgggaccctggattgggagcggatcccggagtacaacgtcaccatcactgccactgacaagggcaagcctccgctctcatccagcacaagcctcaccctacgcattggtgaagtcaacgacaatgctccggttttccaccaagtctcctacgtggtccacgtggccgaaaacaaccttcccggagcctccatcccacaagtcagcgcctctgacctggacctagggctgaatggccaagtctcctactccatcgttaccactgacttggagctgcgggcactgtcgtcctacgtgtccgtgagcgcacagagcggggtggtggtcgcgcagcgtgccttcgaccacgagcagctgtgcgccttcgagctcacgatgcaggcccacgaccagggctcgcccgcgctcagcgccaacatgagccggcgcatgttggtgggcgacctcaatgacaatgtgccgcgggtgctgtaccccgcgctggggcccgatggctccgcactcttcgatatagtgccacgcgccgcagagtccggctacctggtgaccaaggtggtggcggtggacgcagattcgggacacaacgcttggctgtcctaccacgtgctgcaggccatcgagcccgggcttttcagcctggggctgcacacgggaacctgctggttgctgtgcgtgacggaggacagccgccgctctctgcgccgctacgcttcacctagtcttcgcagacagcctgcaggaggcactgccagacttcagtga

SEQ ID NO: 259701 - DNA, 2061 bp, Homo sapiens
aagcttgatatcgaattcgcggccgcgtcgacgggaggcgccaggatcagtcggggcacccgcagcgcaggctgccacccacctgggcgacctccgcggcggcggcggcggcggctgggtagagtcagggccgggggcgcacgccggaacacctgggccgccgggcaccgagcgtcggggggctgcgcggcgcgaccctggagagggcgcagccgatgcgggcggcggcggcggcggggggcgtgcggacggccgcgctggcgctgctgctgggggcgctgcactgggcgccggcgcgctgcgaggagtacgactactatggctggcaggccgagccgctgcacggccgctcctactccaagccgccgcagtgccttgacatccctgccgacctgccgctctgccacacggtgggctacaagcgcatgcggctgcccaacctgctggagcacgagagcctggccgaagtgaagcagcaggcgagcagctggctgccgctgctggccaagcgctgccactcggatacgcaggtcttcctgtgctcgctctttgcgcccgtctgtctcgaccggcccatctacccgtgccgctcgctgtgcgaggccgtgcgcgccggctgcgcgccgctcatggaggcctacggcttcccctggcctgagatgctgcactgccacaagttccccctggacaacgacctctgcatcgccgtgcagttcgggcacctgcccgccaccgcgcctccagtgaccaagatctgcgcccagtgtgagatggagcacagtgctgacggcctcatggagcagatgtgctccagtgactttgtggtcaaaatgcgcatcaaggagatcaagatagagaatggggaccggaagctgattggagcccagaaaaagaagaagctgctcaagccgggccccctgaagcgcaaggacaccaagcggctggtgctgcacatgaagaatggcgcgggctgcccctgcccacagctggacagcctggcgggcagcttcctggtcatgggccgcaaagtggatggacagctgctgctcatggccgtctaccgctgggacaagaagaataaggagatgaagtttgcagtcaaattcatgttctcctacccctgctccctctactaccctttcttctacggggcggcagagccccactgaagggcactcctccttgccctgccagctgtgccttgcttgccctctggccccgccccaacttccaggctgacccggccctactggagggtgttttcacgaatgttgttactggcacaaggcctaagggatgggcacggagcccaggctgtcctttttgacccaggggtcctggggtccctgggatgttgggcttcctctctcaggagcagggcttcttcatctgggtgaagacctcagggtctcagaaagtaggcaggggaggagagggtaagggaaaggtggaggggctcagggcaccctgaggcggaggtttcagagtagaaggtgatgtcagctccagctcccctctgtcggtggtggggcctcaccttgaagagggaagtctcaatattaggctaagctatttgggaaagttctccccaccgcccctgtacgcgtcatcctagccccccttaggaaaggagttagggtctcagtgcctccagccacaccccctgccttccccagcttgcccatttccctgccccaaggcccagagctccccccagactggagagcaagcccagcccagcctcggcatagacccccttctggtccgcccgtggctcgattcccgggattcattcctcagcctctgcttctcccttttatcccaataagttattgctactgctgtgaggccataggtactagacaaccaatacatgcagggttgggttttctaatttttttaactttttaattaaatcaaagaaaacaataactggtttggaccaggtggtttctttgtcagctggttcccaagaggtggggggagagggaggtttagaatggagcttcaaaaagaagcccttatcttaacccatggcctggccacatagacctccttgga

SEQ ID NO: 259702 - DNA, 1000 bp, Homo sapiens
tatggaaaagaatcttccttccaatccagaaggagatggagagaatctatctgtagcggtttccttctttgataagtcaagtctgactttgaagtttaaacatgatgaagttctctgcttttcaagtggaagaaaacagaacagggttggcaaatactttactgaaaacaaaaggctcaagaatatcagcactaagaaaaaacacatgaagagttttttttaaagcagatgactttaacatgattattctcctgattactttataataatggcattacagagaaacctttaaaagatgaactattttaggatagataggcaatatcctactaaactaacttggtaattcactaatgactactccaaaagtagaaaaattaattgtgtatcatggatgtattcctctctctctctcttacacacacacacgcacacacacacatacacttactcgaaagtatttttgctgctttattcaacaaaacatatcacaaaatgtgagaaaaagaaaattcagatatatttatttctattccagatttcaaagtgcatagaaatttcaggctgagaaaccgttttttcagctttcactcttactagcaaatctaaaggcttttataaaacatgagaacaaagtgcagtttgaaacaccaaggttttcattactgtttcttaagtttttcaaaaagaacaagggtgggaaggaggtagaagagacagggttcaggcgtggggagggatatggcgccacatttattaatcacattaaaaactaagcatgccaacatctggagctaaacaaccagcaaaatcaccacgttcagactcgtattggctaactctatctatcccagcattctcttgggacagcggtttgccctaggctctaccacaagctcggtgaagtacacagcctcaattactagagcgtgcagccacaacgacctggtattacggaaacagtcagtcaccacttgagttaacattccataccctaacg

SEQ ID NO: 259703 - DNA, 369 bp, Homo sapiens
aggtgatctcccaccaggtcctttttattcccatgtatttacagatgcagatcctctacaggatccttgtcaatcgcactgccgttccaaataattaaaggaggaaaaaagaatgtttattgagggcttactatgtgcctgaagtgttttaagggtttgctcgcgtgaactctgggtggtcggcttcccacgtcgtctcccaccctccgctctgggtccagccttgccctcttgccccacactccccattcttcacaaggcatctggcgaggtcgttaatttttaaaggtaaatcagatcaaatcatgttcccttccgcggcttccaccgtgcctcgaatcaaatcccaattcttagcgaccctatcat

SEQ ID NO: 259704 - DNA, 573 bp, Homo sapiens
ctccaacatggggctttcaatccgctgtgagtccccagcttctgtgcatgcccaatgtccacggcacacagctgtgccagaccctgctgtcgggataactggcaccagccacgggcaatagatgacctcaatctaccagcctgagagctccaccttgatcgccactggtcctcctctttgatctctttctctctttctgctcattgtttctctttttccctccaaatggactttgtccactctggttcccatccttgtgccagcccctccctttcctgtcatcttgactctgtgcagttggctccacactacgctcgttcaggtggcctttgcctgcctcataattctctgctgaaacagagtaataataaaaaacccaagaaaagaaaatatttaccagttctgaaatggcttgaattaatgaaataatgttttggggcatttagattgaacccgtgtaattgtaggttgcaaagtataatagtagctcatgcagggatatcattttgtgctattttactttcaggtttttgttaatccagtgggtttggtggaattagagggctgctgtga

SEQ ID NO: 259705 - DNA, 762 bp, Homo sapiens
cagtagaggcgaggtctcgctgtgttgtccaggctggtcttgaactcctgggctcaagcagtccttgcatcttggccccacaaagtgctgggattacaggcatgagccactgcatcctgccaggaaacactaacatttaacaagttttctaatcttttaaaataaatagacctgactcaggtaactgctacttaaggaagtgtgtgtaatttttttctctatttataaagaggatcccctgttggcactttgatatctgtgcttttaaaatttgatttttctccttttcctctttaccttccttttccttgcacacagttaagtaaaccatcacatatttaatgtgtatattaaagattgctttcattctctgaatgtttttgaatcactctctaaaagttaatttgaagaaaaaagttgaaaaattaagaatgcattaacatatttgtttcttaattcacgtaagattaatatggctgggcacagtggctgacgcctgtaatcccagcactttgggaggctgaggaggatggatcacctgaggtcaggagtttaagaccagcctggccaacatggtgaaaccctgtctctactaaaaatacaaaaaaaattagccggatgtggtggttgcatgcctgtaatcctaggtactctggaggctgaggcaggagaatcgcttgaacccgggaggcggaggtttcagtgagccgagatcttgccattgcactccagcctgggcaacagagcgagacttcgtctcaa

SEQ ID NO: 259706 - DNA, 838 bp, Homo sapiens
atataaggtaatgatgatccatacacttgctcttttagagatgattgaattttattatttttccccaaatcttttccagataactacatttagctctaatgaccacagtgaactactttgaccttaaaacacaagtgggacaataaagccttttggattgttgaataaataaaagtaaaaatgtgttatctaatttctgtgaagcacctctaaagccaatactggccaatgcttcaccagttagtcatgctccaaggattgaggtcatgaccatgggaataaagttatttcaatagttgactcttttgaaaagtttgttactcacatgacttcccagtatcaacagtgtaattcagattttcttatatctaccgtacagactaagtaatgattaggaatttaaatttttaaatatgtaatagaaactggcttgtaaattcttaagtcatatcatataaaattgatagcaaatatttacttatatttctgaaatttatcctcagatgaattctaaaaatttatgccagtaacctgtggatgcctaaagaattggccctgacatttgttaatcaagttaactgcaactattaacattatatcattgtgcattacttggccctctgcccatagcctaccaattcatttttaaatgataaaaccaatgaaaatgttcagtataaatcaattctttatctatatttagtccttactatatattcttttgtaccctaacattagctgcttactcaatattcattagcttataacttttatgtatagaaggcacatgaatttgtttcttctgtaatacacatcacataatgtttaggagagacca

SEQ ID NO: 259707 - DNA, 4452 bp, Homo sapiens
tgaacccgccctctgcgcgtgagcgtgggcgtgggagtgggcgcgggcgcaggcgaacggctgccggtcaggtgtccttgtccccttgagttgcgcgggtcgtgttcgagggcatggacgacaggtaccctgcgcttcagcgggcccagctgcgtctggatttcatccacgccaactccaccactcacagtttcctttttggagcactggctgaattgctggacaatgcaagagatgcaggggctgaaagacttgatgtcttttcagtggataatgaaaaactgcaggggggattcatgttgtgtttcctggatgatggatgtggcatgagccctgaggaagcttcagacatcatttactttggacgatccaaaaaacggctgtcaaccttgaagttcatagggcaatacggcaatggtcttaaaagtgggtccatgagaattggaaaagactttattctttttacgaagaaggaagaaacgatgacctgtgtgtttttttctcagacattctgtgaagaagaaagtcttagtgaggttgtagttccaatgccctcatggttaataagaaccagagaatctgtcacagatgatccccagaaatttgcaatggaattatctataatttataaatactccccatttaaaactgaagcagaattgatgcagcagtttgatgtgatctatggaaaatgtggtactttgctggttatttataacttgaagcttctgcttaatggagaaccagagttggatgttaaaactgacaaagaagatatactgatggctggagctctggaggatttcccagcgaggtggtcattcagagcctacacatctgttctgtattttaacccatggatgagaatattcattcaagccaagagagttaaaactaaacatctttgctattgcctctacagacccagaaagtatctttatgtcacatcttcttttaaaggagcatttaaagatgaagttaaaaaggcagaagaagcagtaaagattgctgaatccatattgaaagaagcacaaatcaaagtaaaccagtgtgacagaacctctttatcttctgccaaggatgtattacagagagctttggaagatgtagaagcaaagcaaaagaatcttaaagagaaacaaagagaattaaaaacagcaagaacgctctccctgttctatggagtgaacgtagaaaaccgaagccaagctggaatgttcatttacagtaataaccgtttgatcaaaatgcatgaaaaagtgggctcacagttgaaactgaagtccttacttggcgcaggcgtggttggaattgttaatatacccttggaggtcatggaaccatcccataataaacaggaatttctcaatgtccaagagtataatcatctactaaaagtcatgggacagtacttggtccagtactgtaaggacaccggcatcaataatagaaatttaacattgttttgcaatgaatttggataccagaatgacatcgacgtggagaaacctttaaattctattcaatatcaaagaagacaagccatgggtatcccattcatcatacaatgtgatctttgtcttaaatggagagtcttgccttcctctactaattatcaggaaaaagaattttttgacatttggatttgtgctaataatcccaaccgcttggaaaacagttgtcatcaggtagaatgtctaccttccatcccactgggcaccatgagcacaatatcaccatcaaaaaatgagaaagagaagcaacttagagagtcggtcataaagtatcaaaatagactggcagaacagcagccacagcctcaatttataccagtggacgaaatcactgtcacttccacctgcctaacttcagcacataaggaaaataccaaaacccagaaaatcaggcttttgggcgatgacttgaagcatgaatctctttcatcctttgagctttcagcgagccgtagaggacagaaaagaaacatagaagagacagactctgatgtagagtatatttcagaaacaaaaattatgaaaaagtctatggaggagaaaatgaactctcaacagcagagaattccagtagctctgccagaaaatgtcaaactagctgagagatcccagagaagtcagattgctaatattaccactgtctggagagctcaaccaactgaagggtgcctgaagaatgcccaggccgcttcttgggaaatgaaaaggaagcagagtctcaactttgtagaggaatgtaaggtattgactgaagatgagaacacgagtgattcagatataatcctggtttcagataaaagcaacactgatgtttcattgaaacaagaaaaaaaggaaattcctcttttaaaccaagaaaaacaggagctgtgcaatgatgttctagcaatgaaaagaagctcttcattacctagctggaaaagcttgctcaatgtgccgatggaagatgtgaatctaagttctggacacatagccagagtttctgtgagtggcagttgtaaagttgcttcttcgccagcgtcttctcaaagcacacctgtcaaggaaacagtgagaaaactgaagtctaagttaagggagattcttctgtatttttttcctgagcatcagctaccatcagaattggaagaacctgcattaagttgtgagctggagcagtgcccagagcagatgaacaaaaagctgaaaatgtgtttcaaccagatacagaatacttacatggtccaatatgaaaaaaaaataaagaggaaattgcagtccattatctatgattcaaatacaagaggaatacataatgaaatctctctggggcaatgtgaaaataaaagaaaaatctctgaggataagctgaagaatcttcgtataaaactggcactattgttgcagaaactccaactgggtggtccagaaggtgacctggagcagactgacacttatttagaagctttgcttaaagaagataatcttctcttccagaacaatttaaataaagtaactatagatgcaagacatagactccctttagaaaaaaatgaaaagacttcggaaaattaagtcagagatggtattaccttttaaaaaatgctaataagaaaattggaagattcttttaaaaatttttcttttttgttgttgttactgtaaagtctattctgtttaacaataagaaataagaaataatttttttcaaataagaaaattgtgtactctagaaatggagaccgatttacaatttatgtattccctaatccaattatctaaatcttccttttctttcagaaatattaataatatctagagttctctaattttcatgtgagctactgaaaaaaatgaaaatgtcactcaagcttaacttttgttattccttaaaagattgttattgtaattttgttattccttaaaaacatttaaaagcagattttttcaaaatcgatatgtgaaggactacagaatcacctcctcttgaagatattgaaaaagaaagacattatgccctttctccactatagccaacactcagtcaagcagaaaatacaaatccccccaaaactttgagacatagcttatataattttattatttagtcatagtaaaagaataaatctcctaagcataatatgtatacatattacacatatgtaaaaattgttgttttacatttacatatacgtaaagaagtatgtttttacacttttcttgataagtgtttttttttgtttagaaatgtctgaaactttagacaaaaacaataaaacatttaatattcatttgtgaaactgtataattttaatttatgtatatgcacatagcaaaagcctggaacatgggaaatggaatatggtaaactatttcatttttgtctttagccacttaggtactcttctcaagaggcatgtttttaccagttcctcgtaaatctgtccccaatcaatatctgtaaaaccatatatatcatgatatagctatagatatggatgtaatagcatccaaaagatgctgctgttgcttttttccactcaatataccttcaagatcattccatattgagaccagtacatgtaataatacatatgtatagagagctaatgagataacctctcgttatcttcaactgctccttattattttattcaatggaaatactaaatctgtttaaccatttccttatcaatgcatgtttaggtttttattgttcttttggatttacatatgcacaacatttgaatatccttataaatttgttcatttcacacatgtacaattatgtctgtcaaatgtctcagcaaacaaattgctggatcaaagggtatatacatttattatgaatagatattgcctaatagcactttgaaaaaatttttttagtctacactcctacagcagtgtatgagtttttttcctcacaccttcacctacctggtggattaccagactt

SEQ ID NO: 259708 - DNA, 3783 bp, Homo sapiens
tgaacccgccctctgcgcgtgagcgtgggcgtgggagtgggcgcgggcgcaggcgaacggctgccggtcaggtgtccttgtccccttgagttgcgcgggtcgtgttcgagggcatggacgacaggtaccctgcgcttcagcgggcccagctgcgtctggatttcatccacgccaactccaccactcacagtttcctttttggagcactggctgaattgctggacaatgcaagagatgcaggggctgaaagacttgatgtcttttcagtggataatgaaaaactgcaggggggattcatgttgtgtttcctggatgatggatgtggcatgagccctgaggaagcttcagacatcatttactttggacgatccaaaaaacggctgtcaaccttgaagttcatagggcaatacggcaatggtcttaaaagtgggtccatgagaattggaaaagactttattctttttacgaagaaggaagaaacgatgacctgtgtgtttttttctcagacattctgtgaagaagaaagtcttagtgaggttgtagttccaatgccctcatggttaataagaaccagagaatctgtcacagatgatccccagaaatttgcaatggaattatctataatttataaatactccccatttaaaactgaagcagaattgatgcagcagtttgatgtgatctatggaaaatgtggtactttgctggttatttataacttgaagcttctgcttaatggagaaccagagttggatgttaaaactgacaaagaagatatactgatggctggagctctggaggatttcccagcgaggtggtcattcagagcctacacatctgttctgtattttaacccatggatgagaatattcattcaagccaagagagttaaaactaaacatctttgctattgcctctacagacccagaaagtatctttatgtcacatcttcttttaaaggagcatttaaagatgaagttaaaaaggcagaagaagcagtaaagattgctgaatccatattgaaagaagcacaaatcaaagtaaaccagtgtgacagaacctctttatcttctgccaaggatgtattacagagagctttggaagatgtagaagcaaagcaaaagaatcttaaagagaaacaaagagaattaaaaacagcaagaacgctctccctgttctatggagtgaacgtagaaaaccgaagccaagctggaatgttcatttacagtaataaccgtttgatcaaaatgcatgaaaaagtgggctcacagttgaaactgaagtccttacttggcgcaggcgtggttggaattgttaatatacccttggaggtcatggaaccatcccataataaacaggaatttctcaatgtccaagagtataatcatctactaaaagtcatgggacagtacttggtccagtactgtaaggacaccggcatcaataatagaaatttaacattgttttgcaatgaatttggataccagaatgacatcgacgtggagaaacctttaaattctattcaatatcaaagaagacaagccatgggtatcccattcatcatacaatgtgatctttgtcttaaatggagagtcttgccttcctctactaattatcaggaaaaagaattttttgacatttggatttgtgctaataatcccaaccgcttggaaaacagttgtcatcaggtagaatgtctaccttccatcccactgggcaccatgagcacaatatcaccatcaaaaaatgagaaagagaagcaacttagagagtcggtcataaagtatcaaaatagactggcagaacagcagccacagcctcaatttataccagtggacgaaatcactgtcacttccacctgcctaacttcagcacataaggaaaataccaaaacccagaaaatcaggcttttgggcgatgacttgaagcatgaatctctttcatcctttgagctttcagcgagccgtagaggacagaaaagaaacatagaagagacagactctgatgtagagtatatttcagaaacaaaaattatgaaaaagtctatggaggagaaaatgaactctcaacagcagagaattccagtagctctgccagaaaatgtcaaactagctgagagatcccagagaagtcagattgctaatattaccactgtctggagagctcaaccaactgaagggtgcctgaagaatgcccaggccgcttcttgggaaatgaaaaggaagcagagtctcaactttgtagaggaatgtaaggtattgactgaagatgagaacacgagtgattcagatataatcctggtttcagataaaagcaacactgatgtttcattgaaacaagaaaaaaaggaaattcctcttttaaaccaagaaaaacaggagctgtgcaatgatgttctagcaatgaaaagaagctcttcattacctagctggaaaagcttgctcaatgtgccgatggaagatgtgaatctaagttctggacacatagccagagtttctgtgagtggcagttgtaaagttgcttcttcgccagcgtcttctcaaagcacacctgtcaaggaaacagtgagaaaactgaagtctaagttaagggagattcttctgtatttttttcctgagcatcagctaccatcagaattggaagaacctgcattaagttgtgagctggagcagtgcccagagcagatgaacaaaaagctgaaaatgtgtttcaaccagatacagaatacttacatggtccaatatgaaaaaaaaataaagaggaaattgcagtccattatctatgattcaaatacaagaggaatacataatgaaatctctctggggcaatgtgaaaataaaagaaaaatctctgaggataagctgaagaatcttcgtataaaactggcactattgttgcagaaactccaactgggtggtccagaaggtgacctggagcagactgacacttatttagaagctttgcttaaagaagataatcttctcttccagaacaatttaaataaagtaactatagatgcaagacatagactccctttagaaaaaaatgaaaagacttcggaaaattaagtcagagatggtattaccttttaaaaaatgctaataagaaaattggaagattcttttaaaaatttttcttttttgttgttgttactgtaaagtctattctgtttaacaataagaaataagaaataatttttttcaaataagaaaattgtgtactctagaaatggagaccgatttacaatttatgtattccctaatccaattatctaaatcttccttttctttcagaaatattaataatatctagagttctctaattttcatgtgagctactgaaaaaaatgaaaatgtcactcaagcttaacttttgttattccttaaaagattgttattgtaattttgttattccttaaaaacatttaaaagcagattttttcaaaatcgatatgtgaaggactacagaatcacctcctcttgaagatattgaaaaagaaagacattatgccctttctccactatagccaacactcagtcaagcagaaaatacaaatccccccaaaactttgagacatagcttatataattttattatttagtcatagtaaaagaataaatctcctaagcataatatgtatacatattacacatatgtaaaaattgttgttttacatttacatatacgtaaagaagtatgtttttacacttttcttgataagtgtttttttttgtttagaaatgtctgaaactttagacaaaaacaataaaacatttaatattc

SEQ ID NO: 259709 - DNA, 333 bp, Homo sapiens
catggtgactcttggagagggaagggcaaattcccataccctgcagtggtaaggggctgggactgagagagtggcagcgagacactacaggtcacaggaggacttggccatcactgtgagacagcaggcacaagaagtgttcaagcagaggaaccacatatttattattattattattttttgagacagtgccttgctttgtcacccagacttgagtgcagtggtaccatcatagctcattgcggcctccaccttgtgggctcaagtgatcctccctcctcagcctcccaagtattggggaccacgggtgtgcaccaccacacctggctaatt

SEQ ID NO: 259710 - DNA, 442 bp, Homo sapiens
tatttcaatgtttatgtcgtatctcttccgtaagcgattggtgggtctgaaatccactttcactgagatacttggttgacgtcaatacaaatgagaacagtgcggaccgttctgcccttcccctgaaaacacaaagtggagctttaaaacaggctctcacactggattttaggtggatttggattttaactccagttgtctatgagcaattaaaaaaaaacccacagcaggacgatttccaaggatattagaggatttaatgaacaaggatcgcatttaagggaagaggggtaacgaggagtaaaacgaaattttcctgctttttcctgtgagaagtatcattgtaattacccatgtatctaaattaaaattgcatattcatgttttgcattttcaattggccttgtataattaaaactgcatcacatttgatgaatttaaa

SEQ ID NO: 259711 - DNA, 608 bp, Homo sapiens
ttagccgggcgtggtggtgtgtgtctgtaatcccagctactcaggaggctgaggcaagacaatcgcttgaacccgggaggcagcagctgcagtgagcagcgattgtgccattgcaccccagcctgagcaagagagagagattccatctcaaaaaacaggaaaccaaatactgcatagctccttcaaaatagtgttttttaaaaaaaaaatgttgggccaggtgcagtggctcggctcacacctgtaataccatgagttgaagaccagcctgggcaatatattaaaaaagccagcgtggtggtgcatgcctggaggcctagctactcgggaggccaacgcgacagggtcacttgagcccaaggcgttttgaagctgcagcgagctacaatcccgccactgcactacagcctgggcgacagagtaagaatctgtctcaaaaaaaaaaaaaaaaaaaaaacagaaaactttcaggacagtaaacctgtgccactgaaggagaggcattcctgtcactgctgtgtgacactgcagaaagtcttctcagtgaaacagctggtaatgtggtagtgtttactgacttgctcatattttaaatttcagtttgggaa

SEQ ID NO: 259712 - DNA, 409 bp, Homo sapiens
gggtgttaatgttcattccaattagcctattatggccaagatggcattagcccttgtgactctaagataaaagggatttttcccacaaatggccgacaagtttgggccaagttgtaaacattatttccatccatcttggactgcagcagagtctgtggtcagcgtgccagggaatatatgagaaaatcaggcagccttaatctctgcagcatgtggaaggaaataaagaccaccttgactgatggttgacttgatatgtctgaaggggattaagtctggctgtgacagaaatggctgcggagtcacagtgaagagaactcgatgaggtatggccttccaagtttaaacttctaatctcaaaggaccagagtgacttcataaggaattcaagaagaacgcaattcactca

SEQ ID NO: 259713 - DNA, 460 bp, Homo sapiens
cacactcagggagtgcaccatgtgaagactggacttaaacagctacaccaccagaagccgagagagaggctggaacatagccttccctttggaggtagcctggcccagtgggcactgtgatctcagacttccagccttcagaactgtgagacaatattttattgtttaagccacttattttttggtactttcttacggcagccctagcagatgctaatccagcgtgcgtcctggcagaggttgaagggggctcctcaagtcccaggtccagcttggtgtggttcagctactcgagagacatctgctgctaatggatgagcagtcaacctggacgcaggaaatcattttttatttgggtgaatacaatattctccttttgttttcacttttcctaaaagttaaatcaaggttcaaaagaaaatcgaggttcaaaagaaaaatttggtctttacatgtgcta

SEQ ID NO: 259714 - DNA, 1306 bp, Homo sapiens
ctatctcagaattgggcacatttctgagatattctgctgcaattgtgtaagatttgtctgcaagccttaattttctcattacctactttttataagtcaggcacaaataattggaactgcttatatagggaaaattgttgaggctttaaaatgtctcaacgccaaatgagaagaaagagaatacatattctttagtcttaatttggttccccaggagcaaacttgaatcctgaaacaagaattcaaactcacagagtttattttgtagggaggaagggaatgaagagaacacaggtaggggagaagagaaataagacaaggaagaggagaaaattaataaagataggcttctcaagccaattaccacagtaggcaactgaaacttaatcccgcatgagcacgctaggggcccgtgaaaaacacatgcttcagggtcccccgagggttaaaggagctgatgtatttatacaacaacatcatcatgcactactgccgggatcccaacagagccatccatcactgcttagatggactctctttggctcaaagcacttcacctagtatttacttttctcttactatttcatctttttttgtggatgacaggaaatcactggctaaccaataatcagataagcagagcatttgtggaaggaattcctcactctacatcttctcacgagcatggctaatttatttcagatctgatagcaattccacttacttagaatttggatgtcattcagtacacaccaggccacaactgaactggacagccccttttaaatttcaacaatactaacatctctcacaatagtttctagctcccagaaaacataatttctattctgaaagaggatgggattaattcacttaatttcaattcaacaaaatgtacctatgtatttatgtatgctatagctaaaataccattagtgtgtgtagatgatagatagataagatagacagacagatagatagatagatagatagatagatagatagatagatagatattccctgccttaacaaatttataatcaagagttgaagtagaaatgtataaaaatactataaaacaaggcatattacaattactcaaagcataaataaacaaggtgctatgcaccattaaggagatagcaataaattccaaccaggtgaaaaagaaggaaatttcatttccttcagaaatgaaatgaatttgagttatgtctaagtaaagttggctcctgtccctaactgcaagctccctacctgtggtcacgttcatggcttcagctgtccgcatttctgtgtccatgtt

SEQ ID NO: 259715 - DNA, 275 bp, Homo sapiens
acaaattttctctcatctctttatacataatggttcttggacttggaaaaaaggcagggagacctcactgttttactggttcatctgacatcaaaatcttgatagcacctattttaaacaagctcatctatggagtctctaaagaaaacttttctatacctgtttcaaatgatgtcccaaagcagcctagatcctggaatttttattaacatctacaataatttttagatagcacatcccctgctaataaaactcctctccaaacttggccccag

SEQ ID NO: 259716 - DNA, 428 bp, Homo sapiens
ttgaaagaaataatcagcagagtaaacacaccacccacagagtgggaaaaaatatttgcaagctacgcatctgacataggattaatacacagaatctacaaggaattcaaatcagccataagaaaaaaaaaaataataatcccttcaaaaagtgggctaaggacatgaatagacaattctcaaaagaagatatacaaatgaccaacaaacatatgaaaaaatgatcaacattgctaattatgagggaagtgcaaattaaaaccacaatgagataccaccttacttctgtaagaatggccataattgaaatccaaaaataataaatgttggcatggatctggtgaaaagggagaacttctatactgctgacgggaatgtaaactagtacaaccactataaaaaacagtatggagattcctaaaaaaaaa

SEQ ID NO: 259717 - DNA, 308 bp, Homo sapiens
accagagctgagcagatgggaaaacaagccgcagagaggagctaccctctctgctgagagtttcagagacctgcagagaccttgggactaccggttgcagagaggagcaacccactccagggcctcttctctgctaggagctgggcagacactgggacaatccccctgcagagaggagtcaccagggcttcctttctgctgagagatgaacactcaacaggacgacttgcttacagagaggagctacccgctgcggggctccttcaggctgttctaacagtcaataaagctcctctttgtcgtgctca

SEQ ID NO: 259718 - DNA, 364 bp, Homo sapiens
ggatgttgattagttgaggaaaaggattaagaataccagccacaatcatgagaccgactacataaatgaagactatagtagttataagcatttcttcttactttaatatgaatacttcatgtatatttcatccaatttttttctttccttcctccaccccgttaccctactactgaatgagatgctaataagttaactttatgtttcattattcaagttacagaatatccacaagggatcagctagaagaggaaggaacattacctaaacatgagtaaaatgatatgcagctttgtattctctattggaaagatggttagtgtattttcagtgatataaaagataattgtatcctgtaaggtga

SEQ ID NO: 259719 - DNA, 466 bp, Homo sapiens
  misc_feature (1)..(1): n is a, c, g, or t
  misc_feature (13)..(13): n is a, c, g, or t
nagaagacgacanaagggtcagttctgggaccagcactgcattcttagaagcctgggtccggccggggcccctgatgttgtggctgggggtccacagacctgggttctcagccccgctttgccacttcctcgccctgaagcctcagccaagttgcttccccgtctggacctgttcctcgtctgttaaatggggtgatcacccaccacccgccgcctcagagggacagtgaaaatggggagtcctgaaagccagagctggaaagtccccgaagagtccttacagaggaggcaggtgggaaaggagggagattgtccccggtcccacagccagtgggtagcagggccgtgaggttctggaaagagcactgcattgggaggtagcacttggcccaagcctcactcagctccttcctagctatgggaccttggccaagtcaaccaaggcccctgggccttttcctacaag

SEQ ID NO: 259720 - DNA, 571 bp, Homo sapiens
acatgcccgtcccaacccccaggcgacataccaaagtacttcacagaccctgtcctccctgccaccccacgttcacggactccacatgcctttcataattctgcaccagcgaagagcctctgaaggaatctttgaatcctgccttccaggtccccgccctgcacggtcacattcctttccagacgccatccagccgtgcagggcagcttgccctagagccaagctggtggccaggcctactccaggcacagagctgaccttcagcagggtctgttcacttccaggcatttcagcccgccctcctgttttacggctgttgatgtttgtctgtcaaggccaggttgagtgcagccctttgggctaagggtcctgaagaggcggagtcctcttcactttccttgtgagggcacaccttttttgaaaggagagacatggcacaggaccagttttctgaatttggaagcctagagtttcagagctggaaggatcttagacatcatcttggcagcccccacctgactggttcaggaaaccgaggttcagagggtctggctgatgtgtggaagtcacc

SEQ ID NO: 259721 - DNA, 477 bp, Homo sapiens
ctgcagagggtttcttcagagtgtttggctggagtactgatcaacacacgcgtatgtggaaactacccaagcctgggcaaataactagctgacagcattacaaggaatagcatccagtgctcacacagggccaggaagagtgcctgttcccaccagccaggcttgaaaacctcaagcatctgagaacattgcatagaggacaaggaagtgccttagttcaacaccaggaaaaaaatcctttactgagcattttgctagttccacctaacaaacattaaaaactagaactgaaataatcaaactgcttccaagtaacttaactgtgttcatgaaaaaaagctcaggagtatttatcaaaatacagaatcatacagcacccagtaaggtaaaattgacaatgtctagcacccaataaaaaacaatcaaacatggaaagaataaaaacatacaacccataaagagaagataaatcattca

SEQ ID NO: 259722 - DNA, 286 bp, Homo sapiens
aaattccagtaagtgctataattgccaggaaaatctctggttttgcctcattatcatagattcattaatttcacctttttatccatcttccatatctgatgatttttagtcctttaattctgccaaattttcagtcttctctttagctccggtcctttcttgacctcctctgtttttctgtgctctttttttgtatgaacttttcctgttttctgttctgaatttattcagagtagacctgcacacttcagcttcacaatagggaattccaataaaatgatgatgc

SEQ ID NO: 259723 - DNA, 336 bp, Homo sapiens
gagactttcacgggggtaccacgttctcccagcccagaagttaaatccatttgctctgcctgagcacctcccaacttccccttggggagatcccaccctccagcagttttgcagggaagctgtgctcttcccacaaaggcaggtgcacctgaacccgaggcatacacacacagcagcactggatgacccgccctccagcagttatgcagggaagctgtgctctccccacaaaagcaggtgctctccccacaaaggcaggtgcacctgaacccgcggcccatacacacagcagcactcgatgacccgccctccagcagttatgcagggaagctgtgc

SEQ ID NO: 259724 - DNA, 673 bp, Homo sapiens
atataagtttatgagctattaacattttcttatgaaagtaggaaactgactggctattctatgattcctgaggttcctctgggggaaaaaaaagcaaaaaaccttactcttcatgtcaataattgtttctactctagaccttactgaaagctgcctgttatgtataccacatgctctttcttgtctgacctgtcctaggttcagttttctttattgggttctcaattgttcaacacttatgaaatggacatatctcagctggtagcaaagagagtgagaaacatttagagaggggcaaataattgacaaacatgaagatactgagcccttccttccatgttgccaccaaccgttagcaagttggcttgccagaaaattaagagtaagctttgcagacagtttctgactcgcctgtaatgccagcactttgggagtccaaggcaagcagatcccttgagcccaggagttcaaggccagcctggacaacatagtgaaaccccgtctttactaaaaatataaaaattggctgggtgtggtggtgtgtgcctgttgtcccagctactcgggaggctgaggcaggagaatcgcttgaacctgggaggtggaagttgtggcgagtcaagatctcaccactgcactccagcctgggtaacagagtgagactctgccaaaa

SEQ ID NO: 259725 - DNA, 565 bp, Homo sapiens
atataagtttatgagctattaacattttcttatgaaagtaggaaactgactggctattctatgattcctgaggttcctctgggggaaaaaaaagcaaaaaaccttactcttcatgtcaataattgtttctactctagaccttactgaaagctgcctgttatgtataccacatgctctttcttgtctgacctgtcctaggttcagttttctttattgggttctcaattgttcaacacttatgaaatggacatatctcagctggtagcaaagagagtgagaaacatttagagaggggcaaataattgacaaacatgaagatactgagcccttccttccatgttgccaccaaccgttagcaagttggcttgccagaaaattaagagtaagctttgcagacagtttctgactcgcctgtaatgccagctaatttttgcatttttagtagagatgagggtttaccatgttgcccaggttggtctcaaactcctgagctcaagctatctgcccgtctcagcctcccagaatgctgggattacaggcatgagccactgccttcaactatgtg

SEQ ID NO: 259726 - DNA, 451 bp, Homo sapiens
ttttttttttttgagagaggggtcttgctctgtttcccaagctggagtgcagtggcgtgacctcggctcactacagcctccacctcccaggttcaagcaattctcccacctcagcctcccaagtagctaggattacaggggtgcaccaccactcctggctaattttgcattttttaagtagagacagggtttcaccatgtcgaccaggctggtctcgaactctcgacctcaggtgatccacccgcctcagcctcccaaagtgctggggattacaggcgtgagccaccgcacctggcccaagacatattcttgacacagacagtatggcaataaaaggaagacataaatttcttttaccataattaagattttgaatagtacacttgggacaagtaaccagcacatgaaaagttttggtttgagatttttaattactttgataaatcagaat

SEQ ID NO: 259727 - DNA, 422 bp, Homo sapiens
cactcaatgttgtcttatccaaacaacatctatgattcagccttcttgccctcaagtccagcatgttcccctctggctccaagcccctttccctccagccttttacaaccacatcactccatgtaagtcacttgtcctttgaaccagctgatctgtgggctgaggaaagggtgctgggagctgagctgtagatgttctctttgctgtctgtcattctaggggcttgccaacattgggcagagtctcctgctggctgaaactctctcaccacaaaggatttcattttatgtcagcagtttcataggctgagggagtgatagagataagagaaacatgaagagaatatgccacaatgactaaactcaagatagatttggggcagagatgtagagatttggtaaaagtccagaaatctaaaaaaa

SEQ ID NO: 259728 - DNA, 596 bp, Homo sapiens
gttctcagaacctccaatcatacattagtacttgctgctatggcaatctgtgggcatgtttttccactcctctgagcacttcattgactttttttctattatcatctacatcaaattcatgtttacccaacctaaattgtgtgggcattatctttctttcctctggttttcatgattcagccagcagaatttcactgaagacacctttccctcactgcagttccttcaccttttattggctgctccattttctccacaataattattgagcacctactatgtgccagatgttcttccttccaagcctcaggcaactcttcaggcattattaatctttttatatcaatgaggaaactgaggaataaaggaagcaagttattggctgaaggcaaacaaataccaagttgaaagagcagaattctaatctagatctgcttcacagctcctttccattccctgcctggccttttctgccaaacggcaccttattctcagaatatcctttttcatatatccataggctgcctccatttgttttttctagatctctagactcaaatctgccaaagagtctagcctatctcagccatatttgt

SEQ ID NO: 259729 - DNA, 372 bp, Homo sapiens
catcaacaggggcccattcccttccactcctgccatttttgtaccaacttgtctacctagttctaatcaatgcaaagagccaaccaattacaacagaagaaacgcctctaagtttcatctatcactaaataaacagtacgtgtttgtaagcctttacttctaactaaccttagtaaaatcaatgtaaaacaatttactggtgttttaatctttcttatttggggctaaaaaaatctaatttcctttctgtgattcacactctgtctcagggggtgctcttggaggatgtttcctagattggagctggctctttagcattctgtttttcagtacagtcccaacttctgcacctcatcaagtaaaaacaaacaa

SEQ ID NO: 259730 - DNA, 259 bp, Homo sapiens
gaaggaaggaaaaaaaagaaaggaaaggaaagtaagaaggaaggaaaaggaaagaaaggaaggaaaggaaggaaagaaaggaaagaaaaaagaaaagataggaaaggaaaagaaaagaaaggaaaggaaagggaaggaaagggaagggtaggaagaaagaaaagaaaaaataaaatgaaatgataaattacttactgggagaaagtttttgtaacctcaataacaaataaaaggtttgtattcttagcctgtaaagaaa

SEQ ID NO: 259731 - DNA, 407 bp, Homo sapiens
tctccacacagtaaaatggtgcccaatgggagaataaagtctccttgctccatagaaggcctgcactttacatgtatatatgagaaaaagctggtttctgttagtctataatgtattaagatgtggttagtgaaaaactgccttccaaaattcagttaatatagaaaattaagtatttttaaaaatttttcagactgcttattgtagaatgaaattggcccttgtcttatctcagccactttacccccaatctggacattttattataaatacagttctgctttcagaccatcatatttttggaaaagaaaattgtgtaaggtaaaagtgattacattcaacacatttaaggcaaatcatctgaaagttaaaaagaagtaaagacaatctgaattcctaccatatta

SEQ ID NO: 259732 - DNA, 349 bp, Homo sapiens
cagtgagaatgctttgtttttataggagctaggttaattttaaaaaaacttattagtaacttttgaaagtggaattcttatttacttaattccttgcagattattctttttcttggataggaagccaaaatactcttcagagatgcattgcctagttgagcaacttcaccatagcagtttctgtctgttgctgagaggctacctggtaacttcctacagccaaccatcctatgtgaactgtaacttccccttaagaaaaaaatatctatctttgacattattgtggcagatcctccagagagtctgaagacacgggctcttcctatatccttgtaactgaatttctagg

SEQ ID NO: 259733 - DNA, 2454 bp, Homo sapiens
gcaggagcacgtggagaggccgggtagccacagcggcagctccagcccggcccggcagcgacatggaagatatacaaacaaatgcggaactgaaaagcactcaggagcagtctgtgcccgcagaaagtgcagcggttttgaatgactacagtttaaccaaatctcatgaaatggaaaatgtggacagtggagaaggcccagccaatgaagatgaagacataggagatgattcaatgaaagtgaaagatgaatacagtgaaagagatgagaatgttttaaagtcagaacccatgggaaatgcagaagagcctgaaatcccttacagctattcaagagaatataatgaatatgaaaacattaagttggagagacatgttgtctcattcgatagtagcaggccaaccagtggaaagatgaactgcgatgtgtgtggattatcctgcatcagcttcaatgtcttaatggttcataagcgaagccatactggtgaacgcccattccagtgtaatcagtgtggggcatcttttactcagaaaggtaacctcctccgccacattaaactgcacacaggggaaaaaccttttaagtgtcacctctgcaactatgcatgccaaagaagagatgcgctcacggggcatcttaggacacattctgtggagaaaccctacaaatgtgagttttgtggaaggagttacaagcagagaagttcccttgaggagcacaaggagcgctgccgtacatttcttcagagcactgacccaggggacactgcaagtgcggaggcaagacacatcaaagcagagatgggaagtgaaagagctctcgtactggacagattagcaagcaatgtggcaaaacgaaaaagctcaatgcctcagaaattcattggtgagaagcgccactgctttgatgtcaactataattcaagttacatgtatgagaaagagagtgagctcatacagacccgcatgatggaccaagccatcaataacgccatcagctatcttggcgccgaagccctgtgccccttggtccagacaccgcctgctcccacctcggagatggttccagttatcagcagcatgtatcccatagccctcacccgggctgagatgtcaaacggtgcccctcaagagctggaaaggaaaagcatcctccttccagagaagagcgtgccttctgagagaggcctctctcccaacaatagtggccacgactccacggacactgacagcaaccatgaagaacgccagaatcacatctatcagcaaaatcacatggtcctgtctcgggcccgcaatgggatgccacttctgaaggaggttccccgctcttacgaactcctcaagcccccgcccatctgcccaagagactctgtcaaagtgatcgacaaggaaggggaggtgatggatgtgtatcggtgtgaccactgccgcgtcctcttcctggactatgtgatgttcacgattcacatgggctgccacggcttccgtgaccctttcgagtgtaacatgtgtggagatcgaagccatgatcggtatgaattctcgtctcacatagccagaggagaacacagaagcctgctgaagtgaatatctggtctcagggattgctcctatgtattcagcatcgtttctaaaaacagttgacctcgcctaacagattgctctcaaaacatactcagttccaaacttcttttcataccatttttagctgtgttcacaggggtagccagagaaacactgtcttccttcagaaattattcgcaggtctagcatattattacttttgtgaaacctttgttttcccatcagggacttgaattttatggaatttaaaagccaaaaaggtatttggtcattatcttctacagcagtggaatgagtggtcccggagatgtgctatatgaaacattctttctgagatatatcaaccacacgtggaaaagcctttcagtcatacatgcaaatccacaaagaggaagagctgaccagctgaccttgctgggaagcctcacccttctgcccttcacaggctgaagggttaagatctaatctccctaatctaaatgacagtctaagagtaagtaaaagaacagccataaaataagtatctgttacgagtaactgaagaccccattctccaagcatcagatccatttcctatcacaacatttttaaaaaatgtcatctgatggcacttctgcttctgtcctttaccttcccatctccagtgaaaagctgagctgctttgggctaaaccagttgtctatagaagaaaatctatgccagaagaactcatggttttaaatatagaccatcatcgaaactccagaaatttatccactgtggatgatgacatcgctttcctttggtcaaggttggcagagcaagggtataaagggggaaattgtttggcagcaccaacagaaaacaaacaaacaaaaaacagcta

SEQ ID NO: 259734 - DNA, 335 bp, Homo sapiens
ggcccagccaatgaagatgaagacataggaggtgagccgtagtgtgcagactaaacactgatgcctgtagatattgcttaggcttagtgtagagaagaaatcagctctccaaggaaaacttgcaattgtaggtttagttaggagtgattctgttttgttaatttcacaaatatttgcatttcatagttgtaggttatcagcaaattttgagaatttaaggtgcttatccagtgttccaattatattaacttcacttaaaacatgatgtttgactattttccattataaaagtaatacatgtttattgtagaaagtttgtctggggtgttttctga

SEQ ID NO: 259735 - DNA, 963 bp, Homo sapiens
agaggcactgagagtggaggtctcagactcttggaaggggctatactagacacacaaagacagccccaagaaggacggtggagtagtgtcctcgctaaaagacagtagatatgcaacgcctcttgctcctgccctttctcctgctgggaacagtttctgctcttcatctggagaatgatgccccccatctggagagcctagagacacaggcagacctaggccaggatctggatagttcaaaggagcaggagagagacttggctctgacggaggaggtgattcaggcagagggagaggaggtcaaggcttctgcctgtcaagacaactttgaggatgaggaagccatggagtcggacccagctgccttagacaaggacttccagtgccccagggaagaagacattgttgaagtgcagggaagtccaaggtgcaagacctgccgctacctattggtgcggactcctaaaacttttgcagaagctcagaatgtctgcagcagatgctacggaggcaaccttgtctctatccatgacttcaacttcaactatcgcattcagtgctgcactagcacagtcaaccaagcccaggtctggattggaggcaacctcaggggctggttcctgtggaagcggttttgctggactgatgggagccactggaattttgcttactggtccccagggcaacctgggaatgggcaaggctcctgtgtggccctatgcaccaaaggaggttattggcgacgagctcaatgcgacaagcaactgcccttcgtctgctccttctaagccagcggcacggagaccctgccagcagctccctcccgtcccccaacctctcctgctcataaatccagacttcccacagcaaaaaagccagcggcacggagaccctgccagcagctccctcccgtcccccaacctctccttctcataaatccagacttcccacagcaaaaaagcc

SEQ ID NO: 259736 - DNA, 684 bp, Homo sapiens
ttttctcactttcagagctcctggcagctaagcaaaccctttgcaatatcctggcttttatactctcctctcctcctttccccttccctagcccaggcaactccccatctacactttgtctcctttaacaccctctgcctgcatgccaattctaatttttggaaccgcttcacaattaacctgcagcaactttccccatccccaactccccttagagagtctcttgagggaaaaaatgctctgtaaatcattccaggcccaacagcattgcactgcagcccttcttttatactggtttatgctgttaggctgaaatgatcaaggaggcatgaataattctttttcttgggtgtcctagaaacacttaaggtgccgtgtaattcatgcaaaattaccatgggagaattctctctcctgagctgttttgttctgtaaccctgtggacatgtcagttccaagaatggccctgtgtctcacaagttcaccatcagtttttcctctggaagtacctgctttattgacttttctaaaaccagcagcctcttattatttttcccctcaagtaaaatatccagacacaaaggttactggtagaagctcatagttgattgcatagggcttgtcgctgagatacatacacaagcagagtccacgggtattaatgagatgactgcaggcccgggc

SEQ ID NO: 259737 - DNA, 154 bp, Homo sapiens
gatcatagagtatggtcatagagaagagtggcctcactgttccagaaagggaacaaacctatggctttggaaggcaaagaaagttgacatttactgtgaatctagattctgtactaagtgtcatcacctgcgttgttttattctcacagcgacc

SEQ ID NO: 259738 - DNA, 427 bp, Homo sapiens
gcaccaggaatagtgcccattcttactagcctacatggtaaacataatccataggacatcaagtaaaatactcgtaagggtttttgcctgagtagcagggaaacaatgcctcacagtaaacactgctttggccctacctaaccatgcttgaaaccaagatccaaacagatcaaactgttccctaataatcagatctcagaacaatgctcaagaatatgtagagaaatacgaacatttcccacagccagagaaaaatttagtgtctgtcaagtaataaaaagctaccagacatgcaaagatgcaggaaaatatgactgatgaggaggaagattaatcaatcaaaactgttttgtaaataatggaagacaaaaatagcacatatactcaaatatctcttgtaactgtactccacatgttcaagaaacac

SEQ ID NO: 259739 - DNA, 703 bp, Homo sapiens
aaagaacaaacagttatctctcattctttcattctctcaataaatatttattatgtactctctaaaggaaatatgcattgttaagccaatatgctataaatcaaccacacctacaaattgtttttaaaatttaaatgaaatgaagttaacatgttcaaaagaaacaaaagtctactcaggttaaagagtcataggcaaaccaacatactcaatctgaagttaccgtttctaggaataatgcaattaaaatggacttctgctaaatactacatggttgataaacaacagtgtcaagttaaatttacttataatctacaaatgtattagataactgctgccttttatttttgattagttatattctagcgaaattatgactaattgataaagttgtcctttcttccaaagtaaaaaatcgcatgacaatataggagatctatcaccatgaattaatttatcttcagaaaatctttcactgtttttcttttttgctgtcaatatttgacaaagtaagctttgagaaggaaaggaactaaggcattatttccaaaattatttgattatgaaaactagttattcaaaattaattttgaaattattaaaggatttataatttttagaagtctggatagtttcacaatcaaaaataaaactaatcttaagattcttatgtgaacttcaacacaatatgaaagtctatttt

SEQ ID NO: 259740 - DNA, 670 bp, Homo sapiens
gagagggtgcaaaactttcctaaccattacaaagcacagcacttcagtctgtggggcacagctgggcacagctggaagacagtagttaggcagaatctgcagcaaaggtgctgttgacttatgcgtttgagaacaaagagtctggactgatctaaagtgtttatgtgccataaatctgagagagcagcagacatggggagcaccagctactgaccacgtcaaaagcatctgttccctttctacagtatggcaaagggctgtccactcatagtggcctcttcagcctaagctaccacccaggtggtaaatgccatctgcagggtcatctttggatgaccaaaggcaggaccccaatttctgtgattctgtggggaaaatctggttgttctgttttcttatctgcctcccttcaggatgggaaagaaaataggcagggaaagcagagatagagaggtgcttcccaatagtgtccacaactcttcaggttccagagtagtgtttctcaaactttattgtgtatgagaatcacctgcaggtgatggttaaaattaaattttaaaatatattgttaaaactaaattttttttttttttgacggggtcttgctctgcaaccaggctggagtgtagtagtgtgatctcggctcactgcaacctcagcctcctaggct

SEQ ID NO: 259741 - DNA, 111 bp, Homo sapiens
gagccgtgctccccccgatagagcctgcaacgtaaaactttagatttagtctgtggtcaaggcacacaggattatattctagtaaaaagtttatgacagaaggtaaaaaaa

SEQ ID NO: 259742 - DNA, 182 bp, Homo sapiens
tgattgcaccactgcgctctagcctgggtgacagagtgagaccctgtctcttaaaaaaaataaaagaagaagaaaaagaaatgagtagagagggtattccagattccaggtacagggaacagcataagccatgatatcgagatggaaaagaccctaaatttgacttttccaataactgatcc

SEQ ID NO: 259743 - DNA, 4736 bp, Homo sapiens
ggcgccgagcgagccgaggcgaggtcccggggagggcgcggcggcgcggggcgcaggggcggcgcggcggggccgcgggccgggcgggtgggaggagagcgcgaaggggcgaggcccgtttgcaggggccgctcggcccggggaagcccgcgccccgctcagccttgcagccccgcgcccggagcatctccctggaggaacggagacaaaggaggattcatgtccaaagggctcccagagaccaggacggacgcagccatgtcagagctggtgcctgagcccaggcctaagccagcggtgcccatgaagcccatgagcatcaactccaacctgctgggctacatcggcatcgacaccatcatcgagcagatgcgcaagaagaccatgaagaccggtttcgacttcaacatcatggtcgttggccagagtggactgggcaaatcaacgctggtcaacacgctcttcaaatcccaagtgagccgcaaggcctccagctggaaccgggaggagaagatccccaagacagtggagatcaaagctatcgggcatgtgatagaggaaggcggtgtcaaaatgaagctgaccgtcatcgacaccccaggctttggagaccaaatcaacaatgaaaactgctgggagcccattgagaagtacatcaatgagcagtacgagaagttcctgaaggaggaggtcaacatcgccaggaagaaacgcatccctgacactcgtgtccactgctgcctttacttcatctctcccacaggacactccttgcgacctctggatcttgagttcatgaaacacctcagcaaggttgtgaacatcatccctgtcattgctaaggctgacaccatgaccctggaggagaagtctgaattcaagcaaagggttcgcaaggagcttgaagtaaatggcattgaattctacccccagaaggaatttgatgaggatttggaggataagacggagaatgacaaaatcaggcaggagagcatgccttttgctgtggtgggaagtgacaaggagtaccaagtgaatggcaagagggtcctcggccgaaaaactccatgggggatcatcgaagtggaaaacctcaaccactgtgagtttgccctgcttcgagactttgtcatcaggacccacctccaggacctcaaggaagtgacacacaacatccactatgagacttacagggccaagcggctcaatgacaatggaggcctccctccggtgagcgtggacacagaggaaagccacgacagtaacccatgacgaccacttctctgtgtcatcacacatacccacttcacacacacacatcccaaataccaccaccaaccaccttcttcctctcaactctgtcccacaggcctgtctggtatttgtggagcatcttgtctgtgtgtgtgtgtgtgtgtgtgtgtgtgtgtgtgtgtgtgacagagagagagcgagagagcctgtgtgtgtgcatgcaggggtgaggtattttcactgccctccctggagagtcccttgtaagtttggctcctccatgcctgtccattatctgtctcctttccttgtgtcccaaaacaaagctgtttgcctcactcaggagatctgggggaggtttcatttaaaagtgctgggagcaggtgagccacaggcaactcttctctcggaacctgcacacaaactggggctatagagattctccaaggacagatggcagtggagctagacctgagtagggggcagggagttcaggacaaccctcctgtaagttgggggtggtctgggggtaaggctggggcttcctgggaaaaggaaggccatgagaaggcagagaagtaggccagagctgggttcttgcagaaagcatcagtgcctacaaatggagctccacccttcagtctgtgtcgtgttcagtgtcacaaagctaccacctgtcaccagagcctactgctgctctccactcaactggcctctgctgccaggccactgcctgtctctgcttccgactttgtcttctttctccctttccctccttccctcatacattgctttctctccctctcctgcgtgtctctgacatctctcacttccttttagatgaatctactttaggttcattcctatatttagcatttatgcccagtctacttccagaaatgactttagactgcctttcacataaaatcacaaaactacaggacagtacaaacagattgccagagaaatctgggtcaaagaaaggaataggaaagaaagtttctgtagtcaagcacctgaacaggccctgagctcacaggcagccaatgtaaagagggaaacacagtgagttatgcagttcccagtgtccagttaaaggaagcacacatgctagtcatgtgagacaaccttttattgggacatcaggttctagaactaattctaaagaagtatcagaaacaatatacataatttgtctttcttagtaatttggcttcaaagacaaatttttgaccacacctccgttttctccgtcagacttctctcccttctaagcaggcttctctgttgctccatttgcttcatacatacttgacctctcttttctattccccatcacttttgtgctgaagctaatcatatttatgtctgtctttctctacttttccctaattccctctcctcctgactcctgtagacattcccaatgatacccaccgtcatacatttaggcttttcttgcctttccctgaagccctgtatttattaatgcatatatttcccctgcttgttgtacaagtaagttactcttttcctttaatctgtaagattcatgaaattcggggccagggaaacagtttagccttagggaagggaaaacactaagtgaaactgtttacaataacctcatacaaccttctgtcccatctcctggttcagcctaggtgtttcactggtcctctatgaatcccagcacttataatcccagtcttttatcactcaggtgctaggaaaaaaaacatagactcaagacccaagattcaatggaccaggagaaaggggggcggtgatcaggtcaccagtgaccccaacctatggtctcggtctttcctggaggctgccaacccagccctcatcctcccttgctcacaaagttacagggtaggcacctgtcaggacagaacagcagcagcgctacagcccagaggttatacatttcaacagaacagggatccttggctactgtagaagcagtcctgtatggagaccttggaccagcaggggaagatctatgggcatgggaggtgggcgttggaaaggctgagtaggaatggtgcctggcacccctgaaccatgatctgagcctccctggagaaggtattttatatgtctgctgccagctgctggtctccacaccctcaaccgttctcaacccccctgcagggagaaggcctcctgggcactgtccttccacctgtgccagccaccccctgccccactgctgaatgaaggccatttcaagcgctgcttctcactccattcctctcagctgttattgctgcagggccaagccctttttagtgctgtgctcgtccagctcaccaccacagcccctctcagccctcagtaggtgggaggggccagctgcctctttaggccagttgcatcctccatttatccaaaccactcctctcctcccagtggagtggggttctgccagtacagccctactgcatcatctgcgtcagccggtcctagcccatctgcagggtgaaagaactcatcaagagctccttctgcccttgtaagcccatcccagctacttgtaaccatctctaagggcaatggcattgctccctacccattcatctgcatgagctactcttggcttccttaaagggtcaagaaagcaatttttctgcttactagattcattgagatcagctgtgtgagccccaaagtgggacaagggtgtctccttcattacttaaagatattcatgagggtgggtcactacagatgttggggagcaagggctaggatcactttttaaaaaatcaccacttgtggctgtcccagagtgcggttgtacatcctccccacctcataacgcagccactgaggaagagtggttttcctaagaagacattgctggagttgactttcttctgtccaaacaaacaaacaaaaactaaacacacacacaaacccccagaaacccacaatatgtacacgctaaggaaaaactagcacccttctgtccactcagcaataagagggatctcttcccacctaccctacctactcctacccccaacccccttccccattaatgtgagtaatgaattagcctgaccacaggtggtcactgtaggctaatggaaaatacccaagggagggcaaagccccccatcagatgcatgaatgtttgcgaatgttgactgccactgccccacacactgtgtctttatagaattcccctttgcccaccctcttcctgtctccacctggacacaacttgctcaaaggctggtgacttgtgggccattcatctacaaccaagtcctgatggagcaagaggcccacgcctaggggatgcaagaacaacccgtttcttaaatgttaccagtcccagccaatcttacggtgacattacagttaaatttcccaattgaaaacaagcaaacagacactcaaactggtcctgtaattgttgctagactttatgtgttgtacaactaaacattgctgtttgaacagta

SEQ ID NO: 259744 - DNA, 5069 bp, Homo sapiens
ggcgccgagcgagccgaggcgaggtcccggggagggcgcggcggcgcggggcgcaggggcggcgcggcggggccgcgggccgggcgggtgggaggagagcgcgaaggggcgaggcccgtttgcaggggccgctcggcccggggaagcccgcgccccgctcagccttgcagccccgcgcccggagcatctccctggaggaacggagacaaaggaggattcatgtccaaagggctcccagagaccaggacggacgcagccatgtcagagctggtgcctgagcccaggcctaagccagcggtgcccatgaagcccatgagcatcaactccaacctgctgggctacatcggcatcgacaccatcatcgagcagatgcgcaagaagaccatgaagaccggtttcgacttcaacatcatggtcgttggccagagtggactgggcaaatcaacgctggtcaacacgctcttcaaatcccaagtgagccgcaaggcctccagctggaaccgggaggagaagatccccaagacagtggagatcaaagctatcgggcatgtgatagaggaaggcggtgtcaaaatgaagctgaccgtcatcgacaccccaggctttggagaccaaatcaacaatgaaaactgctgggagcccattgagaagtacatcaatgagcagtacgagaagttcctgaaggaggaggtcaacatcgccaggaagaaacgcatccctgacactcgtgtccactgctgcctttacttcatctctcccacaggacactccttgcgacctctggatcttgagttcatgaaacacctcagcaaggttgtgaacatcatccctgtcattgctaaggctgacaccatgaccctggaggagaagtctgaattcaagcaaagggttcgcaaggagcttgaagtaaatggcattgaattctacccccagaaggaatttgatgaggatttggaggataagacggagaatgacaaaatcaggcaggagagcatgccttttgctgtggtgggaagtgacaaggagtaccaagtgaatggcaagagggtcctcggccgaaaaactccatgggggatcatcgaagtggaaaacctcaaccactgtgagtttgccctgcttcgagactttgtcatcaggacccacctccaggacctcaaggaagtgacacacaacatccactatgagacttacagggccaagcggctcaatgacaatggaggcctccctccggtgagcgtggacacagaggaaagccacgacagtaacccatgacgaccacttctctgtgtcatcacacatacccacttcacacacacacatcccaaataccaccaccaaccaccttcttcctctcaactctgtcccacaggcctgtctggtatttgtggagcatcttgtctgtgtgtgtgtgtgtgtgtgtgtgtgtgtgtgtgtgtgtgacagagagagagcgagagagcctgtgtgtgtgcatgcaggggtgaggtattttcactgccctccctggagagtcccttgtaagtttggctcctccatgcctgtccattatctgtctcctttccttgtgtcccaaaacaaagctgtttgcctcactcaggagatctgggggaggtttcatttaaaagtgctgggagcaggtgagccacaggcaactcttctctcggaacctgcacacaaactggggctatagagattctccaaggacagatggcagtggagctagacctgagtagggggcagggagttcaggacaaccctcctgtaagttgggggtggtctgggggtaaggctggggcttcctgggaaaaggaaggccatgagaaggcagagaagtaggccagagctgggttcttgcagaaagcatcagtgcctacaaatggagctccacccttcagtctgtgtcgtgttcagtgtcacaaagctaccacctgtcaccagagcctactgctgctctccactcaactggcctctgctgccaggccactgcctgtctctgcttccgactttgtcttctttctccctttccctccttccctcatacattgctttctctccctctcctgcgtgtctctgacatctctcacttccttttagatgaatctactttaggttcattcctatatttagcatttatgcccagtctacttccagaaatgactttagactgcctttcacataaaatcacaaaactacaggacagtacaaacagattgccagagaaatctgggtcaaagaaaggaataggaaagaaagtttctgtagtcaagcacctgaacaggccctgagctcacaggcagccaatgtaaagagggaaacacagtgagttatgcagttcccagtgtccagttaaaggaagcacacatgctagtcatgtgagacaaccttttattgggacatcaggttctagaactaattctaaagaagtatcagaaacaatatacataatttgtctttcttagtaatttggcttcaaagacaaatttttgaccacacctccgttttctccgtcagacttctctcccttctaagcaggcttctctgttgctccatttgcttcatacatacttgacctctcttttctattccccatcacttttgtgctgaagctaatcatatttatgtctgtctttctctacttttccctaattccctctcctcctgactcctgtagacattcccaatgatacccaccgtcatacatttaggcttttcttgcctttccctgaagccctgtatttattaatgcatatatttcccctgcttgttgtacaagtaagttactcttttcctttaatctgtaagattcatgaaattcggggccagggaaacagtttagccttagggaagggaaaacactaagtgaaactgtttacaataacctcatacaaccttctgtcccatctcctggttcagcctaggtgtttcactggtcctctatgaatcccagcacttataatcccagtcttttatcactcaggtgctaggaaaaaaaacatagactcaagacccaagattcaatggaccaggagaaaggggggcggtgatcaggtcaccagtgaccccaacctatggtctcggtctttcctggaggctgccaacccagccctcatcctcccttgctcacaaagttacagggtaggcacctgtcaggacagaacagcagcagcgctacagcccagaggttatacatttcaacagaacagggatccttggctactgtagaagcagtcctgtatggagaccttggaccagcaggggaagatctatgggcatgggaggtgggcgttggaaaggctgagtaggaatggtgcctggcacccctgaaccatgatctgagcctccctggagaaggtattttatatgtctgctgccagctgctggtctccacaccctcaaccgttctcaacccccctgcagggagaaggcctcctgggcactgtccttccacctgtgccagccaccccctgccccactgctgaatgaaggccatttcaagcgctgcttctcactccattcctctcagctgttattgctgcagggccaagccctttttagtgctgtgctcgtccagctcaccaccacagcccctctcagccctcagtaggtgggaggggccagctgcctctttaggccagttgcatcctccatttatccaaaccactcctctcctcccagtggagtggggttctgccagtacagccctactgcatcatctgcgtcagccggtcctagcccatctgcagggtgaaagaactcatcaagagctccttctgcccttgtaagcccatcccagctacttgtaaccatctctaagggcaatggcattgctccctacccattcatctgcatgagctactcttggcttccttaaagggtcaagaaagcaatttttctgcttactagattcattgagatcagctgtgtgagccccaaagtgggacaagggtgtctccttcattacttaaagatattcatgagggtgggtcactacagatgttggggagcaagggctaggatcactttttaaaaaatcaccacttgtggctgtcccagagtgcggttgtacatcctccccacctcataacgcagccactgaggaagagtggttttcctaagaagacattgctggagttgactttcttctgtccaaacaaacaaacaaaaactaaacacacacacaaacccccagaaacccacaatatgtacacgctaaggaaaaactagcacccttctgtccactcagcaataagagggatctcttcccacctaccctacctactcctacccccaacccccttccccattaatgtgagtaatgaattagcctgaccacaggtggtcactgtaggctaatggaaaatacccaagggagggcaaagccccccatcagatgcatgaatgtttgcgaatgttgactgccactgccccacacactgtgtctttatagaattcccctttgcccaccctcttcctgtctccacctggacacaacttgctcaaaggctggtgacttgtgggccattcatctacaaccaagtcctgatggagcaagaggcccacgcctaggggatgcaagaacaacccgtttcttaaatgttaccagtcccagccaatcttacggtgacattacagttaaatttcccaattgaaaacaagcaaacagacactcaaactggtcctgtaattgttgctagactttatgtgttgtacaactaaacattgctgtttgaacagtaactgcctggcctgtcttatttgtgctccttgaccaaatcagccattatgtcatctcacccatgtgtggagggtgagactctcttggtaagaaatagccacagatattagagatgaaaacactttgtgaggtcagttcatcttcagttggcgtcaggtcgggcctcagtcattattttctagtgtttcataaccaaagtgagtaatggatgggaggttgaggtgggaagatggcttgagcatgggaggttggaggtgcagtgagctgagatcattcctgacaggaccaacccaagtccatacctaaaggcagggggctaagggggcaggtgagg

SEQ ID NO: 259745 - DNA, 4361 bp, Homo sapiens
tttggttgttgttgtttgttttttgtttttgagacagacaaaaaaggaaaaaagacacacacgcacaaggacatatgagtagagacagtagtccacagatgctcccaggagaaagaaatccctgagtcagaaaagatgtcctgaagtggtggtttgaggggggcttaaagagaggcagaatctgcaaggggactgaaaaagaaaaaggcaggtgttgaggctgctctacagacggcaaggcagtggggctgtgtcggagacgagaggtagcagcctcttggcctcagccagatgcccagcccagtcctcttctcctgtgggtgtcctggagtggtggtggtggctgagttggggagggcaaggtggctctgatgattctgccttttctgtgcccccttgcgacctctggatcttgagttcatgaaacacctcagcaaggttgtgaacatcatccctgtcattgctaaggctgacaccatgaccctggaggagaagtctgaattcaagcaaagggttcgcaaggagcttgaagtaaatggcattgaattctacccccagaaggaatttgatgaggatttggaggataagacggagaatgacaaaatcaggcaggagagcatgccttttgctgtggtgggaagtgacaaggagtaccaagtgaatggcaagagggtcctcggccgaaaaactccatgggggatcatcgaagtggaaaacctcaaccactgtgagtttgccctgcttcgagactttgtcatcaggacccacctccaggacctcaaggaagtgacacacaacatccactatgagacttacagggccaagcggctcaatgacaatggaggcctccctccggtgagcgtggacacagaggaaagccacgacagtaacccatgacgaccacttctctgtgtcatcacacatacccacttcacacacacacatcccaaataccaccaccaaccaccttcttcctctcaactctgtcccacaggcctgtctggtatttgtggagcatcttgtctgtgtgtgtgtgtgtgtgtgtgtgtgtgtgtgtgtgtgtgacagagagagagcgagagagcctgtgtgtgtgcatgcaggggtgaggtattttcactgccctccctggagagtcccttgtaagtttggctcctccatgcctgtccattatctgtctcctttccttgtgtcccaaaacaaagctgtttgcctcactcaggagatctgggggaggtttcatttaaaagtgctgggagcaggtgagccacaggcaactcttctctcggaacctgcacacaaactggggctatagagattctccaaggacagatggcagtggagctagacctgagtagggggcagggagttcaggacaaccctcctgtaagttgggggtggtctgggggtaaggctggggcttcctgggaaaaggaaggccatgagaaggcagagaagtaggccagagctgggttcttgcagaaagcatcagtgcctacaaatggagctccacccttcagtctgtgtcgtgttcagtgtcacaaagctaccacctgtcaccagagcctactgctgctctccactcaactggcctctgctgccaggccactgcctgtctctgcttccgactttgtcttctttctccctttccctccttccctcatacattgctttctctccctctcctgcgtgtctctgacatctctcacttccttttagatgaatctactttaggttcattcctatatttagcatttatgcccagtctacttccagaaatgactttagactgcctttcacataaaatcacaaaactacaggacagtacaaacagattgccagagaaatctgggtcaaagaaaggaataggaaagaaagtttctgtagtcaagcacctgaacaggccctgagctcacaggcagccaatgtaaagagggaaacacagtgagttatgcagttcccagtgtccagttaaaggaagcacacatgctagtcatgtgagacaaccttttattgggacatcaggttctagaactaattctaaagaagtatcagaaacaatatacataatttgtctttcttagtaatttggcttcaaagacaaatttttgaccacacctccgttttctccgtcagacttctctcccttctaagcaggcttctctgttgctccatttgcttcatacatacttgacctctcttttctattccccatcacttttgtgctgaagctaatcatatttatgtctgtctttctctacttttccctaattccctctcctcctgactcctgtagacattcccaatgatacccaccgtcatacatttaggcttttcttgcctttccctgaagccctgtatttattaatgcatatatttcccctgcttgttgtacaagtaagttactcttttcctttaatctgtaagattcatgaaattcggggccagggaaacagtttagccttagggaagggaaaacactaagtgaaactgtttacaataacctcatacaaccttctgtcccatctcctggttcagcctaggtgtttcactggtcctctatgaatcccagcacttataatcccagtcttttatcactcaggtgctaggaaaaaaaacatagactcaagacccaagattcaatggaccaggagaaaggggggcggtgatcaggtcaccagtgaccccaacctatggtctcggtctttcctggaggctgccaacccagccctcatcctcccttgctcacaaagttacagggtaggcacctgtcaggacagaacagcagcagcgctacagcccagaggttatacatttcaacagaacagggatccttggctactgtagaagcagtcctgtatggagaccttggaccagcaggggaagatctatgggcatgggaggtgggcgttggaaaggctgagtaggaatggtgcctggcacccctgaaccatgatctgagcctccctggagaaggtattttatatgtctgctgccagctgctggtctccacaccctcaaccgttctcaacccccctgcagggagaaggcctcctgggcactgtccttccacctgtgccagccaccccctgccccactgctgaatgaaggccatttcaagcgctgcttctcactccattcctctcagctgttattgctgcagggccaagccctttttagtgctgtgctcgtccagctcaccaccacagcccctctcagccctcagtaggtgggaggggccagctgcctctttaggccagttgcatcctccatttatccaaaccactcctctcctcccagtggagtggggttctgccagtacagccctactgcatcatctgcgtcagccggtcctagcccatctgcagggtgaaagaactcatcaagagctccttctgcccttgtaagcccatcccagctacttgtaaccatctctaagggcaatggcattgctccctacccattcatctgcatgagctactcttggcttccttaaagggtcaagaaagcaatttttctgcttactagattcattgagatcagctgtgtgagccccaaagtgggacaagggtgtctccttcattacttaaagatattcatgagggtgggtcactacagatgttggggagcaagggctaggatcactttttaaaaaatcaccacttgtggctgtcccagagtgcggttgtacatcctccccacctcataacgcagccactgaggaagagtggttttcctaagaagacattgctggagttgactttcttctgtccaaacaaacaaacaaaaactaaacacacacacaaacccccagaaacccacaatatgtacacgctaaggaaaaactagcacccttctgtccactcagcaataagagggatctcttcccacctaccctacctactcctacccccaacccccttccccattaatgtgagtaatgaattagcctgaccacaggtggtcactgtaggctaatggaaaatacccaagggagggcaaagccccccatcagatgcatgaatgtttgcgaatgttgactgccactgccccacacactgtgtctttatagaattcccctttgcccaccctcttcctgtctccacctggacacaacttgctcaaaggctggtgacttgtgggccattcatctacaaccaagtcctgatggagcaagaggcccacgcctaggggatgcaagaacaacccgtttcttaaatgttaccagtcccagccaatcttacggtgacattacagttaaatttcccaattgaaaacaagcaaacagacactcaaactggtcctgtaattgttgctagactttatgtgttgtacaactaaacattgctgtttgaacagta

SEQ ID NO: 259746 - DNA, 4387 bp, Homo sapiens
ggcgccgagcgagccgaggcgaggtcccggggagggcgcggcggcgcggggcgcaggggcggcgcggcggggccgcgggccgggcgggtgggaggagagcgcgaaggggcgaggcccgtttgcaggggccgctcggcccggggaagcccgcgccccgctcagccttgcagccccgcgcccggagcatctccctggaggaacggagacaaaggaggattcatgtccaaagggctcccagagaccaggacggacgcagccatgtcagagctggtgcctgagcccaggcctaagccagcggtgcccatgaagcccatgagcatcaactccaacctgctgggctacatcggcatcgacaccatcatcgagcagatgcgcaagaagaccatgaagaccggtttcgacttcaacatcatggtcgttgcttgcgacctctggatcttgagttcatgaaacacctcagcaaggttgtgaacatcatccctgtcattgctaaggctgacaccatgaccctggaggagaagtctgaattcaagcaaagggttcgcaaggagcttgaagtaaatggcattgaattctacccccagaaggaatttgatgaggatttggaggataagacggagaatgacaaaatcaggcaggagagcatgccttttgctgtggtgggaagtgacaaggagtaccaagtgaatggcaagagggtcctcggccgaaaaactccatgggggatcatcgaagtggaaaacctcaaccactgtgagtttgccctgcttcgagactttgtcatcaggacccacctccaggacctcaaggaagtgacacacaacatccactatgagacttacagggccaagcggctcaatgacaatggaggcctccctccggtgagcgtggacacagaggaaagccacgacagtaacccatgacgaccacttctctgtgtcatcacacatacccacttcacacacacacatcccaaataccaccaccaaccaccttcttcctctcaactctgtcccacaggcctgtctggtatttgtggagcatcttgtctgtgtgtgtgtgtgtgtgtgtgtgtgtgtgtgtgtgtgtgacagagagagagcgagagagcctgtgtgtgtgcatgcaggggtgaggtattttcactgccctccctggagagtcccttgtaagtttggctcctccatgcctgtccattatctgtctcctttccttgtgtcccaaaacaaagctgtttgcctcactcaggagatctgggggaggtttcatttaaaagtgctgggagcaggtgagccacaggcaactcttctctcggaacctgcacacaaactggggctatagagattctccaaggacagatggcagtggagctagacctgagtagggggcagggagttcaggacaaccctcctgtaagttgggggtggtctgggggtaaggctggggcttcctgggaaaaggaaggccatgagaaggcagagaagtaggccagagctgggttcttgcagaaagcatcagtgcctacaaatggagctccacccttcagtctgtgtcgtgttcagtgtcacaaagctaccacctgtcaccagagcctactgctgctctccactcaactggcctctgctgccaggccactgcctgtctctgcttccgactttgtcttctttctccctttccctccttccctcatacattgctttctctccctctcctgcgtgtctctgacatctctcacttccttttagatgaatctactttaggttcattcctatatttagcatttatgcccagtctacttccagaaatgactttagactgcctttcacataaaatcacaaaactacaggacagtacaaacagattgccagagaaatctgggtcaaagaaaggaataggaaagaaagtttctgtagtcaagcacctgaacaggccctgagctcacaggcagccaatgtaaagagggaaacacagtgagttatgcagttcccagtgtccagttaaaggaagcacacatgctagtcatgtgagacaaccttttattgggacatcaggttctagaactaattctaaagaagtatcagaaacaatatacataatttgtctttcttagtaatttggcttcaaagacaaatttttgaccacacctccgttttctccgtcagacttctctcccttctaagcaggcttctctgttgctccatttgcttcatacatacttgacctctcttttctattccccatcacttttgtgctgaagctaatcatatttatgtctgtctttctctacttttccctaattccctctcctcctgactcctgtagacattcccaatgatacccaccgtcatacatttaggcttttcttgcctttccctgaagccctgtatttattaatgcatatatttcccctgcttgttgtacaagtaagttactcttttcctttaatctgtaagattcatgaaattcggggccagggaaacagtttagccttagggaagggaaaacactaagtgaaactgtttacaataacctcatacaaccttctgtcccatctcctggttcagcctaggtgtttcactggtcctctatgaatcccagcacttataatcccagtcttttatcactcaggtgctaggaaaaaaaacatagactcaagacccaagattcaatggaccaggagaaaggggggcggtgatcaggtcaccagtgaccccaacctatggtctcggtctttcctggaggctgccaacccagccctcatcctcccttgctcacaaagttacagggtaggcacctgtcaggacagaacagcagcagcgctacagcccagaggttatacatttcaacagaacagggatccttggctactgtagaagcagtcctgtatggagaccttggaccagcaggggaagatctatgggcatgggaggtgggcgttggaaaggctgagtaggaatggtgcctggcacccctgaaccatgatctgagcctccctggagaaggtattttatatgtctgctgccagctgctggtctccacaccctcaaccgttctcaacccccctgcagggagaaggcctcctgggcactgtccttccacctgtgccagccaccccctgccccactgctgaatgaaggccatttcaagcgctgcttctcactccattcctctcagctgttattgctgcagggccaagccctttttagtgctgtgctcgtccagctcaccaccacagcccctctcagccctcagtaggtgggaggggccagctgcctctttaggccagttgcatcctccatttatccaaaccactcctctcctcccagtggagtggggttctgccagtacagccctactgcatcatctgcgtcagccggtcctagcccatctgcagggtgaaagaactcatcaagagctccttctgcccttgtaagcccatcccagctacttgtaaccatctctaagggcaatggcattgctccctacccattcatctgcatgagctactcttggcttccttaaagggtcaagaaagcaatttttctgcttactagattcattgagatcagctgtgtgagccccaaagtgggacaagggtgtctccttcattacttaaagatattcatgagggtgggtcactacagatgttggggagcaagggctaggatcactttttaaaaaatcaccacttgtggctgtcccagagtgcggttgtacatcctccccacctcataacgcagccactgaggaagagtggttttcctaagaagacattgctggagttgactttcttctgtccaaacaaacaaacaaaaactaaacacacacacaaacccccagaaacccacaatatgtacacgctaaggaaaaactagcacccttctgtccactcagcaataagagggatctcttcccacctaccctacctactcctacccccaacccccttccccattaatgtgagtaatgaattagcctgaccacaggtggtcactgtaggctaatggaaaatacccaagggagggcaaagccccccatcagatgcatgaatgtttgcgaatgttgactgccactgccccacacactgtgtctttatagaattcccctttgcccaccctcttcctgtctccacctggacacaacttgctcaaaggctggtgacttgtgggccattcatctacaaccaagtcctgatggagcaagaggcccacgcctaggggatgcaagaacaacccgtttcttaaatgttaccagtcccagccaatcttacggtgacattacagttaaatttcccaattgaaaacaagcaaacagacactcaaactggtcctgtaattgttgctagactttatgtgttgtacaactaaacattgctgtttgaacagta

SEQ ID NO: 259747 - DNA, 2549 bp, Homo sapiens
ggcgccgagcgagccgaggcgaggtcccggggagggcgcggcggcgcggggcgcaggggcggcgcggcggggccgcgggccgggcgggtgggaggagagcgcgaaggggcgaggcccgtttgcaggggccgctcggcccggggaagcccgcgccccgctcagccttgcagccccgcgcccggagcatctccctggaggaacggagacaaaggaggattcatgtccaaagggctcccagagaccaggacggacgcagccatgtcagagctggtgcctgagcccaggcctaagccagcggtgcccatgaagcccatgagcatcaactccaacctgctgggctacatcggcatcgacaccatcatcgagcagatgcgcaagaagaccatgaagaccggtttcgacttcaacatcatggtcgttggccagagtggactgggcaaatcaacgctggtcaacacgctcttcaaatcccaagtgagccgcaaggcctccagctggaaccgggaggagaagatccccaagacagtggagatcaaagctatcgggcatgtgatagaggaaggcggtgtcaaaatgaagctgaccgtcatcgacaccccaggctttggagaccaaatcaacaatgaaaactgctgggagcccattgagaagtacatcaatgagcagtacgagaagttcctgaaggaggaggtcaacatcgccaggaagaaacgcatccctgacactcgtgtccactgctgcctttacttcatctctcccacaggacactccttgcgacctctggatcttgagttcatgaaacacctcagcaaggttgtgaacatcatccctgtcattgctaaggctgacaccatgaccctggaggagaagtctgaattcaagcaaagggttcgcaaggagcttgaagtaaatggcattgaattctacccccagaaggaatttgatgaggatttggaggataagacggagaatgacaaaatcaggcaggagagcatgccttttgctgtggtgggaagtgacaaggagtaccaagtgaatggcaagagggtcctcggccgaaaaactccatgggggatcatcgaagtggaaaacctcaaccactgtgagtttgccctgcttcgagactttgtcatcaggacccacctccaggacctcaaggaagtgacacacaacatccactatgagacttacagggccaagcggctcaatgacaatggaggcctccctccgggagaaggcctcctgggcactgtccttccacctgtgccagccaccccctgccccactgctgaatgaaggccatttcaagcgctgcttctcactccattcctctcagctgttattgctgcagggccaagccctttttagtgctgtgctcgtccagctcaccaccacagcccctctcagccctcagtaggtgggaggggccagctgcctctttaggccagttgcatcctccatttatccaaaccactcctctcctcccagtggagtggggttctgccagtacagccctactgcatcatctgcgtcagccggtcctagcccatctgcagggtgaaagaactcatcaagagctccttctgcccttgtaagcccatcccagctacttgtaaccatctctaagggcaatggcattgctccctacccattcatctgcatgagctactcttggcttccttaaagggtcaagaaagcaatttttctgcttactagattcattgagatcagctgtgtgagccccaaagtgggacaagggtgtctccttcattacttaaagatattcatgagggtgggtcactacagatgttggggagcaagggctaggatcactttttaaaaaatcaccacttgtggctgtcccagagtgcggttgtacatcctccccacctcataacgcagccactgaggaagagtggttttcctaagaagacattgctggagttgactttcttctgtccaaacaaacaaacaaaaactaaacacacacacaaacccccagaaacccacaatatgtacacgctaaggaaaaactagcacccttctgtccactcagcaataagagggatctcttcccacctaccctacctactcctacccccaacccccttccccattaatgtgagtaatgaattagcctgaccacaggtggtcactgtaggctaatggaaaatacccaagggagggcaaagccccccatcagatgcatgaatgtttgcgaatgttgactgccactgccccacacactgtgtctttatagaattcccctttgcccaccctcttcctgtctccacctggacacaacttgctcaaaggctggtgacttgtgggccattcatctacaaccaagtcctgatggagcaagaggcccacgcctaggggatgcaagaacaacccgtttcttaaatgttaccagtcccagccaatcttacggtgacattacagttaaatttcccaattgaaaacaagcaaacagacactcaaactggtcctgtaattgttgctagactttatgtgttgtacaactaaacattgctgtttgaacagta

SEQ ID NO: 259748 - DNA, 2263 bp, Homo sapiens
ggcgccgagcgagccgaggcgaggtcccggggagggcgcggcggcgcggggcgcaggggcggcgcggcggggccgcgggccgggcgggtgggaggagagcgcgaaggggcgaggcccgtttgcaggggccgctcggcccggggaagcccgcgccccgctcagccttgcagccccgcgcccggagcatctccctggaggaacggagacaaaggaggattcatgtccaaagggctcccagagaccaggacggacgcagccatgtcagagctggtgcctgagcccaggcctaagccagcggtgcccatgaagcccatgagcatcaactccaacctgctgggctacatcggcatcgacaccatcatcgagcagatgcgcaagaagaccatgaagaccggtttcgacttcaacatcatggtcgttgctgggagcccattgagaagtacatcaatgagcagtacgagaagttcctgaaggaggaggtcaacatcgccaggaagaaacgcatccctgacactcgtgtccactgctgcctttacttcatctctcccacaggacactccttgcgacctctggatcttgagttcatgaaacacctcagcaaggttcgcaaggagcttgaagtaaatggcattgaattctacccccagaaggaatttgatgaggatttggaggataagacggagaatgacaaaatcaggcaggagagcatgccttttgctgtggtgggaagtgacaaggagtaccaagtgaatggcaagagggtcctcggccgaaaaactccatgggggatcatcgaagtggaaaacctcaaccactgtgagtttgccctgcttcgagactttgtcatcaggacccacctccaggacctcaaggaagtgacacacaacatccactatgagacttacagggccaagcggctcaatgacaatggaggcctccctccgggagaaggcctcctgggcactgtccttccacctgtgccagccaccccctgccccactgctgaatgaaggccatttcaagcgctgcttctcactccattcctctcagctgttattgctgcagggccaagccctttttagtgctgtgctcgtccagctcaccaccacagcccctctcagccctcagtaggtgggaggggccagctgcctctttaggccagttgcatcctccatttatccaaaccactcctctcctcccagtggagtggggttctgccagtacagccctactgcatcatctgcgtcagccggtcctagcccatctgcagggtgaaagaactcatcaagagctccttctgcccttgtaagcccatcccagctacttgtaaccatctctaagggcaatggcattgctccctacccattcatctgcatgagctactcttggcttccttaaagggtcaagaaagcaatttttctgcttactagattcattgagatcagctgtgtgagccccaaagtgggacaagggtgtctccttcattacttaaagatattcatgagggtgggtcactacagatgttggggagcaagggctaggatcactttttaaaaaatcaccacttgtggctgtcccagagtgcggttgtacatcctccccacctcataacgcagccactgaggaagagtggttttcctaagaagacattgctggagttgactttcttctgtccaaacaaacaaacaaaaactaaacacacacacaaacccccagaaacccacaatatgtacacgctaaggaaaaactagcacccttctgtccactcagcaataagagggatctcttcccacctaccctacctactcctacccccaacccccttccccattaatgtgagtaatgaattagcctgaccacaggtggtcactgtaggctaatggaaaatacccaagggagggcaaagccccccatcagatgcatgaatgtttgcgaatgttgactgccactgccccacacactgtgtctttatagaattcccctttgcccaccctcttcctgtctccacctggacacaacttgctcaaaggctggtgacttgtgggccattcatctacaaccaagtcctgatggagcaagaggcccacgcctaggggatgcaagaacaacccgtttcttaaatgttaccagtcccagccaatcttacggtgacattacagttaaatttcccaattgaaaacaagcaaacagacactcaaactggtcctgtaattgttgctagactttatgtgttgtacaactaaacattgctgtttgaacagta

SEQ ID NO: 259749 - DNA, 4314 bp, Homo sapiens
ggcgccgagcgagccgaggcgaggtcccggggagggcgcggcggcgcggggcgcaggggcggcgcggcggggccgcgggccgggcgggtgggaggagagcgcgaaggggcgaggcccgtttgcaggggccgctcggcccggggaagcccgcgccccgctcagccttgcagccccgcgcccggagcatctccctggaggaacggagacaaaggaggattcatgtccaaagggctcccagagaccaggacggacgcagccatgtcagagctggtgcctgagcccaggcctaagccagcggtgcccatgaagcccatgagcatcaactccaacctgctgggctacatcggcatcgacaccatcatcgagcagatgcgcaagaagaccatgaagaccggtttcgacttcaacatcatggtcgttggccagagtggactgggcaaatcaacgctggtcaacacgctcttcaaatcccaagtgagccgcaaggcctccagctggaaccgggaggagaagatccccaagacagtggagatcaaagctatcgggcatgtgatagaggaaggcggtgtcaaaatgaagctgaccgtcatcgacaccccaggctttggagaccaaatcaacaatgaaaactgctgggagcccattgagaagtacatcaatgagcagtacgagaagttcctgaaggaggaggtcaacatcgccaggaagaaacgcatccctgacactcgtgtccactgctgcctttacttcatctctcccacaggacactccttgcgacctctggatcttgagttcatgaaacacctcagcaaggttgtgaacatcatccctgtcattgctaaggctgacaccatgaccctggaggagaagtctgaattcaagcaaagggttcgcaaggagcttgaagtaaatggcattgaattctacccccagaaggaatttgatgaggatttggaggataagacggagaatgacaaaatcaggcaggagagcatgccttttgctgtggtgggaagtgacaaggagtaccaagtgaatggcaagagggtcctcggccgaaaaactccatgggggatcatcgaagtggaaaacctcaaccactgtgagtttgccctgcttcgagactttgtcatcaggacccacctccaggacctcaaggaagtgacacacaacatccactatgagacttacagggccaagcggctcaatgacaatggaggcctccctccggtgagcgtggacacagaggaaagccacgacagtaacccatgacgaccacttctctgtgtcatcacacatacccacttcacacacacacatcccaaataccaccaccaaccaccttcttcctctcaactctgtcccacaggcctgtctggtatttgtggagcatcttgtctgtgtgtgtgtgtgtgtgtgtgtgtgtgtgtgtgtgtgtgacagagagagagcgagagagcctgtgtgtgtgcatgcaggggtgaggtattttcactgccctccctggagagtcccttgtaagtttggctcctccatgcctgtccattatctgtctcctttccttgtgtcccaaaacaaagctgtttgcctcactcaggagatctgggggaggtttcatttaaaagtgctgggagcaggtgagccacaggcaactcttctctcggaacctgcacacaaactggggctatagagattctccaaggacagatggcagtggagctagacctgagtagggggcagggagttcaggacaaccctcctgtaagttgggggtggtctgggggtaaggctggggcttcctgggaaaaggaaggccatgagaaggcagagaagtaggccagagctgggttcttgcagaaagcatcagtgcctacaaatggagctccacccttcagtctgtgtcgtgttcagtgtcacaaagctaccacctgtcaccagagcctactgctgctctccactcaactggcctctgctgccaggccactgcctgtctctgcttccgactttgtcttctttctccctttccctccttccctcatacattgctttctctccctctcctgcgtgtctctgacatctctcacttccttttagatgaatctactttaggttcattcctatatttagcatttatgcccagtctacttccagaaatgactttagactgcctttcacataaaatcacaaaactacaggacagtacaaacagattgccagagaaatctgggtcaaagaaaggaataggaaagaaagtttctgtagtcaagcacctgaacaggccctgagctcacaggcagccaatgtaaagagggaaacacagtgagttatgcagttcccagtgtccagttaaaggaagcacacatgctagtcatgtgagacaaccttttattgggacatcaggttctagaactaattctaaagaagtatcagaaacaatatacataatttgtctttcttagtaatttggcttcaaagacaaatttttgaccacacctccgttttctccgtcagacttctctcccttctaagcaggcttctctgttgctccatttgcttcatacatacttgacctctcttttctattccccatcacttttgtgctgaagctaatcatatttatgtctgtctttctctacttttccctaattccctctcctcctgactcctgtagacattcccaatgatacccaccgtcatacatttaggcttttcttgcctttccctgaagccctgtatttattaatgcatatatttcccctgcttgttgtacaagtaagttactcttttcctttaatctgtaagattcatgaaattcggggccagggaaacagtttagccttagggaagggaaaacactaagtgaaactgtttacaataacctcatacaaccttctgtcccatctcctggttcagcctaggtgtttcactggtcctctatgaatcccagcacttataatcccagtcttttatcactcaggtgctaggaaaaaaaacatagactcaagacccaagattcaatggaccaggagaaaggggggcggtgatcaggtcaccagtgaccccaacctatggtctcggtctttcctggaggctgccaacccagccctcatcctcccttgctcacaaagttacagggtaggcacctgtcaggacagaacagcagcagcgctacagcccagaggttatacatttcaacagaacagggatccttggctactgtagaagcagtcctgtatggagaccttggaccagcaggggaagatctatgggcatgggaggtgggcgttggaaaggctgagtaggaatggtgcctggcacccctgaaccatgatctgagcctccctggagaaggtattttatatgtctgctgccagctgctggtctccacaccctcaaccgttctcaacccccctgcagggagaaggcctcctgggcactgtccttccacctgtgccagccaccccctgccccactgctgaatgaaggccatttcaagcgctgcttctcactccattcctctcagctgttattgctgcagggccaagccctttttagtgctgtgctcgtccagctcaccaccacagcccctctcagccctcagtaggtgggaggggccagctgcctctttaggccagttgcatcctccatttatccaaaccactcctctcctcccagtggagtggggttctgccagtacagccctactgcatcatctgcgtcagccggtcctagcccatctgcagggtgaaagaactcatcaagagctccttctgcccttgtaagcccatcccagctacttgtaaccatctctaagggcaatggcattgctccctacccattcatctgcatgagctactcttggcttccttaaagggtcaagaaagcaatttttctgcttactagattcattgagatcagctgtgtgagccccaaagtgggacaagggtgtctccttcattacttaaagatattcatgagggtgggtcactacagatgttggggagcaagggctaggatcactttttaaaaaatcaccacttgtggctgtcccagagtgcggttgtacatcctccccacctcataacgcagccactgaggaagagtggttttcctaagaagacattgctggagttgactttcttctgtccaaacaaacaaacaaaaaatgagccgggcatggtggtgggtgcctgtaatcccagctactcgggagactgaggcaggagaatcacttgaacccgggaggtggagggtgcagtgagctgagatgggccactgcattccagcctgggtgacagagtgagactgtgtctc

SEQ ID NO: 259750 - DNA, 1445 bp, Homo sapiens
gagaaaatatttgcaaactatgcatccgacaaaggacgaatatccagaatctacgagaaggtattttatatgtctgctgccagctgctggtctccacaccctcaaccgttctcaacccccctgcagggagaaggcctcctgggcactgtccttccacctgtgccagccaccccctgccccactgctgaatgaaggccatttcaagcgctgcttctcactccattcctctcagctgttattgctgcagggccaagccctttttagtgctgtgctcgtccagctcaccaccacagcccctctcagccctcagtaggtgggaggggccagctgcctctttaggccagttgcatcctccatttatccaaaccactcctctcctcccagtggagtggggttctgccagtacagccctactgcatcatctgcgtcagccggtcctagcccatctgcagggtgaaagaactcatcaagagctccttctgcccttgtaagcccatcccagctacttgtaaccatctctaagggcaatggcattgctccctacccattcatctgcatgagctactcttggcttccttaaagggtcaagaaagcaatttttctgcttactagattcattgagatcagctgtgtgagccccaaagtgggacaagggtgtctccttcattacttaaagatattcatgagggtgggtcactacagatgttggggagcaagggctaggatcactttttaaaaaatcaccacttgtggctgtcccagagtgcggttgtacatcctccccacctcataacgcagccactgaggaagagtggttttcctaagaagacattgctggagttgactttcttctgtccaaacaaacaaacaaaaactaaacacacacacaaacccccagaaacccacaatatgtacacgctaaggaaaaactagcacccttctgtccactcagcaataagagggatctcttcccacctaccctacctactcctacccccaacccccttccccattaatgtgagtaatgaattagcctgaccacaggtggtcactgtaggctaatggaaaatacccaagggagggcaaagccccccatcagatgcatgaatgtttgcgaatgttgactgccactgccccacacactgtgtctttatagaattcccctttgcccaccctcttcctgtctccacctggacacaacttgctcaaaggctggtgacttgtgggccattcatctacaaccaagtcctgatggagcaagaggcccacgcctaggggatgcaagaacaacccgtttcttaaatgttaccagtcccagccaatcttacggtgacattacagttaaatttcccaattgaaaacaagcaaacagacactcaaactggtcctgtaattgttgctagactttatgtgttgtacaactaaacattgctgtttgaacagta

SEQ ID NO: 259751 - DNA, 3779 bp, Homo sapiens
ggcgccgagcgagccgaggcgaggtcccggggagggcgcggcggcgcggggcgcaggggcggcgcggcggggccgcgggccgggcgggtgggaggagagcgcgaaggggcgaggcccgtttgcaggggccgctcggcccggggaagcccgcgccccgctcagccttgcagccccgcgcccggagcatctccctggaggaacggagacaaaggaggattcatgtccaaagggctcccagagaccaggacggacgcagccatgtcagagctggtgcctgagcccaggcctaagccagcggtgcccatgaagcccatgagcatcaactccaacctgctgggctacatcggcatcgacaccatcatcgagcagatgcgcaagaagaccatgaagaccggtttcgacttcaacatcatggtcgttggccagagtggactgggcaaatcaacgctggtcaacacgctcttcaaatcccaagtgagccgcaaggcctccagctggaaccgggaggagaagatccccaagacagtggagatcaaagctatcgggcatgtgatagaggaaggcggtgtcaaaatgaagctgaccgtcatcgacaccccaggctttggagaccaaatcaacaatgaaaactgctgggagcccattgagaagtacatcaatgagcagtacgagaagttcctgaaggaggaggtcaacatcgccaggaagaaacgcatccctgacactcgtgtccactgctgcctttacttcatctctcccacaggacactccttgcgacctctggatcttgagttcatgaaacacctcagcaaggttgtgaacatcatccctgtcattgctaaggctgacaccatgaccctggaggagaagtctgaattcaagcaaagggttcgcaaggagcttgaagtaaatggcattgaattctacccccagaaggaatttgatgaggatttggaggataagacggagaatgacaaaatcaggcaggagagcatgccttttgctgtggtgggaagtgacaaggagtaccaagtgaatggcaagagggtcctcggccgaaaaactccatgggggatcatcgaagtggaaaacctcaaccactgtgagtttgccctgcttcgagactttgtcatcaggacccacctccaggacctcaaggaagtgacacacaacatccactatgagacttacagggccaagcggctcaatgacaatggaggcctccctccggtgagcgtggacacagaggaaagccacgacagtaacccatgacgaccacttctctgtgtcatcacacatacccacttcacacacacacatcccaaataccaccaccaaccaccttcttcctctcaactctgtcccacaggcctgtctggtatttgtggagcatcttgtctgtgtgtgtgtgtgtgtgtgtgtgtgtgtgtgtgtgtgtgacagagagagagcgagagagcctgtgtgtgtgcatgcaggggtgaggtattttcactgccctccctggagagtcccttgtaagtttggctcctccatgcctgtccattatctgtctcctttccttgtgtcccaaaacaaagctgtttgcctcactcaggagatctgggggaggtttcatttaaaagtgctgggagcaggtgagccacaggcaactcttctctcggaacctgcacacaaactggggctatagagattctccaaggacagatggcagtggagctagacctgagtagggggcagggagttcaggacaaccctcctgtaagttgggggtggtctgggggtaaggctggggcttcctgggaaaaggaaggccatgagaaggcagagaagtaggccagagctgggttcttgcagaaagcatcagtgcctacaaatggagctccacccttcagtctgtgtcgtgttcagtgtcacaaagctaccacctgtcaccagagcctactgctgctctccactcaactggcctctgctgccaggccactgcctgtctctgcttccgactttgtcttctttctccctttccctccttccctcatacattgctttctctccctctcctgcgtgtctctgacatctctcacttccttttagatgaatctactttaggttcattcctatatttagcatttatgcccagtctacttccagaaatgactttagactgcctttcacataaaatcacaaaactacaggacagtacaaacagattgccagagaaatctgggtcaaagaaaggaataggaaagaaagtttctgtagtcaagcacctgaacaggccctgagctcacaggcagccaatgtaaagagggaaacacagtgagttatgcagttcccagtgtccagttaaaggaagcacacatgctagtcatgtgagacaaccttttattgggacatcaggttctagaactaattctaaagaagtatcagaaacaatatacataatttgtctttcttagtaatttggcttcaaagacaaatttttgaccacacctccgttttctccgtcagacttctctcccttctaagcaggcttctctgttgctccatttgcttcatacatacttgacctctcttttctattccccatcacttttgtgctgaagctaatcatatttatgtctgtctttctctacttttccctaattccctctcctcctgactcctgtagacattcccaatgatacccaccgtcatacatttaggcttttcttgcctttccctgaagccctgtatttattaatgcatatatttcccctgcttgttgtacaagtaagttactcttttcctttaatctgtaagattcatgaaattcggggccagggaaacagtttagccttagggaagggaaaacactaagtgaaactgtttacaataacctcatacaaccttctgtcccatctcctggttcagcctaggtgtttcactggtcctctatgaatcccagcacttataatcccagtcttttatcactcaggtgctaggaaaaaaaacatagactcaagacccaagattcaatggaccaggagaaaggggggcggtgatcaggtcactgtaggctaatggaaaatacccaagggagggcaaagccccccatcagatgcatgaatgtttgcgaatgttgactgccactgccccacacactgtgtctttatagaattcccctttgcccaccctcttcctgtctccacctggacacaacttgctcaaaggctggtgacttgtgggccattcatctacaaccaagtcctgatggagcaagaggcccacgcctaggggatgcaagaacaacccgtttcttaaatgttaccagtcccagccaatcttacggtgacattacagttaaatttcccaattgaaaacaagcaaacagacactcaaactggtcctgtaattgttgctagactttatgtgttgtacaactaaacattgctgtttgaacagtaactgcctggcctgtcttatttgtgctccttgaccaaatcagccattatgtcatctcacccatgtgtggagggtgagactctcttggtaagaaatagccacagatattagagatgaaaacactttgtgaggtcagttcatcttcagttggcgtcaggtcgggcctcagtcattattttctagtgtttcataaccaaagtgagtaatggatgggaggttgaggtgggaagatggcttgagcatgggaggttggaggtgcagtgagctgagatcattcctgacaggaccaacccaagtccatacctaaaggcagggggctaagggggcaggtgagg

SEQ ID NO: 259752 - DNA, 574 bp, Homo sapiens
gattgcaccactgcgctctagcctgggtgacagagtgagaccctgtctcttaaaaaaaataaaagaagaagaaaaagaaatgagtagagagggtattccagattccaggtacagggaacagcataagccatgatatcgagatggaaaagaccctaaatttgacttttccaataactgatcctgaagacaaggcctgggtctccctggctagtaggctgccaggtacctggggtcagctgtaggactgacctctctggtacattttcttttcacccccagtgatagaggaaggcggtgtcaaaatgaagctgaccgtcatcgacaccccaggctttggagaccaaatcaacaatgaaaactggtatctgtctgcctctgagatctttgccctaaagactctgctgggaagatacttactatggtgcagattcattcacgttgagaaccatctgcaccctccatgctctgtagttcccgacagcccaggccagggcccctggggagctccacccctgctaactaaccatccaggaaagccatcggtgcgggggctgagggggaatctggcagcagg

SEQ ID NO: 259753 - DNA, 6016 bp, Homo sapiens
atccttcctcaaaattcttgaagtagttgtctgctttgagcctgccaccttcttcatctgataatacaagaggtatacctagtccagcactgccatcaataacctgcagccatgagttctgactctgagatggccatttttggggaggctgctcctttcctccgaaagtctgaaaaggagcgaattgaagctcagaacaagccttttgatgccaagacatcagtctttgtggtggaccctaaggagtcctacgtgaaagcaatagtgcagagcagggaaggggggaaggtgacagccaagaccgaagctggagctactgtaactgtgaaagaagaccaagtcttctccatgaaccctcccaaatatgacaagatcgaggacatggccatgatgactcacctgcatgagcctgctgtgctgtataacctcaaagagcgttacgcagcctggatgatctacacctactcgggcctcttctgtgtcaccgtcaacccctacaagtggctgccggtgtacaaccctgaggtggtgacagcctaccgaggcaaaaagcgccaggaggccccaccccatatcttctccatctctgacaatgcctatcagttcatgctaactgatcgtgaaaaccagtcaatcttgattactggagaatctggtgcagggaagactgtgaacacgaagcgtgtcatccagtactttgcaacaattgcagttactggagagaagaaaaaagaggaacctgcctctggcaaaatgcaggggacccttgaagatcaaatcatcagtgctaaccccctactggaagccttcggcaatgccaagaccgtgaggaatgacaactcctctcgctttggtaaattcatcaggatccattttggtgccacaggcaaactggcttctgcagatattgaaacatatctgctagagaagtcccgagttacttttcagctaaaggctgaaagaagctaccacatattttatcaaatcctgtccaataagaaaccagagctcattgaaatgcttctgatcaccaccaacccatatgacttcgcatttgtcagccaaggggaaattactgtgcccagcattgatgaccaggaagagctgatggccacagatagtgctgtggacatcctgggtttcactgctgatgaaaaggtggccatttacaagctcactggagccgtgatgcattatgggaacatgaaattcaagcaaaagcaaagggaagagcaggcagagccagatggcacggaagttgctgacaaagctgcttatctgacaagtctgaactctgctgacctgctcaaatctctctgctatcccagagtcaaggtcggcaatgagttcgtaaccaaaggccagactgtgcagcaggtgtacaacgcagtgggtgctctggccaaagccatctacgagaagatgttcctgtggatggtcacccgcatcaaccagcagctggacaccaagcagcccaggcagtacttcatcggggtcttggacattgctggctttgagatctttgatttcaacagcctggagcagctgtgcatcaacttcaccaacgagaaactgcaacagtttttcaaccaccacatgttcgtgctggagcaggaagagtacaagaaggaaggcatcgagtgggagttcattgacttcgggatggacctggctgcctgcatcgagctcatcgagaagcctatgggcatcttctccatcctagaagaggagtgcatgttccccaaggcaacagacacctccttcaagaacaagctgtatgaacaacatcttggaaaatccaacaacttccagaagcccaagcctgccaaaggcaagcctgaggctcacttctcactggtgcactatgccggcaccgtggactacaacatcgccggctggctggacaaaaacaaggaccccctgaatgagactgtggtggggctgtaccagaagtctgcaatgaagactctggctttcctcttctctggggcacaaactgctgaagcagagggtggtggtggaaagaaaggtggcaaaaagaagggttcttctttccagacagtgtcagctcttttcagggagaatttgaataagctgatgaccaacttgaggagcactcacccccactttgtgcggtgcatcatccccaatgaaactaaaactcctggtgccatggagcatgagcttgtcctgcatcagctgaggtgtaacggtgtgctggaaggcatccgcatctgcaggaaaggcttcccaagcagaatcctttatgcagacttcaaacagagatacaaggttctaaatgcgagtgctatcccagagggtcagttcattgacagcaagaaggcttctgagaaacttctagggtctattgaaattgaccacacccagtacaaattcggtcataccaaggttttcttcaaagctggcctgctgggaactctagaagaaatgcgagatgaaaagctagctcaactcatcacgcgcactcaagccatatgcagggggttcctgatgagagtggagttcagaaagatgatggagaggagagagtccatcttctgcattcagtacaacatccgtgctttcatgaatgtgaagcactggccctggatgaagctgtatttcaagatcaagcccctcctcaagagtgcagagacagagaaggagatggccaacatgaaggaagaatttgagaaaaccaaagaagagctggctaagacagaggcaaaaaggaaagaactagaagaaaagatggtgacgctaatgcaagagaaaaatgacttacaactccaagttcaagctgaagcagatgccttggctgatgcagaggaaagatgtgatcagttgattaaaaccaaaatccaacttgaggccaaaatcaaagaggtaactgaaagagctgaggatgaggaagagatcaatgctgagctgacagccaagaagaggaaactggaggatgaatgttcagagctcaagaaagacattgatgaccttgagctgacactggccaaggttgagaaggagaaacatgccacagagaacaaggtgaaaaacctcacagaagagatggcaggtctggatgaaaccattgctaagctgaccaaggagaagaaggctctccaggaggcccaccagcagaccctggatgacctgcagatggaggaggacaaagtcaacaccctgaccaaagctaaaaccaagctagaacagcaagtggacgatcttgaaggatctctggaacaagaaaagaaactttgcatggacttagaaagagccaagagaaaactggagggtgacctaaaattggcccaagaatccacaatggatacagaaaatgacaaacagcaacttaatgagaaactcaaaaagaaagagtttgaaatgagcaatctgcaaggcaagattgaagatgaacaagcccttgcaatgcagctacaaaagaagatcaaagaattacaggcccgcattgaggagctggaggaggaaatcgaggcagagcgggcctcccgggccaaagcagaaaagcagcgctctgacctctcccgggagctggaggagatcagtgagaggctggaagaagccggtggggccacttcagcccagattgagttgaacaagaagcgggaggctgagttccagaaaatgcgcagggacctggaagagtccaccctgcagcacgaagccacggcagctgctcttcggaagaagcacgcagatagtgtggctgagcttgggaagcagatcgacagccttcagcgggtcaagcagaagctggagaaggaaaagagtgagctgaagatggagatcaatgaccttgctagtaacatggagactgtctccaaagccaaggcaaactttgagaaaatgtgccgcaccctagaggaccagcttagtgaaataaaaacaaaggaagaagagcagcaacgcttaataaatgagttgtcagcccagaaggcacgtttacacacagaatcaggtgagttttcacgacagctagatgaaaaagatgctatggtttctcagctatcccgaggcaaacaagcatttacacaacagattgaagaattaaagaggcagctagaagaggagactaaggccaagagcactctggcccatgccctgcagtcagcccgccatgactgtgacctgctgcgggaacagtatgaggaggagcaggaagccaaggctgagctgcagaggggaatgtccaaggccaacagtgaggttgcccagtggaggaccaagtacgagacggacgccatccagcgcacagaggagctggaggaggccaagaagaagctagcccagcgtctgcaggatgcagaagaacatgtagaagctgtgaattccaaatgtgcttctcttgaaaagacaaagcagaggctacagaatgaagtagaggacctcatgattgatgtggaacgatctaatgctgcctgcatagctctcgataagaagcaaagaaactttgacaaggttctggcagaatggaaacagaagtatgaggaaactcaggctgaacttgaggcctcccagaaggagtcgcgttctctcagcactgagctgttcaaggtgaagaatgcctacgaggaatccctggatcatcttgaaactctaaagcgagagaataagaacttacaacaggagatttctgacctgacagagcaaattgcagagggtggaaagcatatccatgaactggagaaagtaaagaaacaacttgatcatgagaagagtgaactacagacttccctagaggaagcagaggcatctcttgagcatgaagaaggcaaaattcttcgcattcaacttgagctaaatcaggtgaaatctgagattgaccgaaaaattgctgaaaaagatgaagaactcgatcagctaaagaggaaccatctcagagttgtggagtcaatgcagagtacactggatgctgagatcaggagcagaaatgatgctctgaggatcaagaagaagatggagggagatcttaatgaaatggaaatccagctgaaccatgccaaccgccaggctgctgaggcactaaggaatcttagaaacacacaaggaatactgaaggacactcagctacatttggatgatgccatcagaggccaagatgaccttaaggaacaattggcaatggttgagcgcagagctaacctgatgcaggctgaagttgaagagctcagggcatccctggaacggactgagagaggcaggaaaatggcagagcaagagcttctggatgccagtgaacgtgtgcaacttctgcacactcagaacaccagcctgatcaacaccaagaagaagctggaaacagacatttcccaaatccagggagagatggaggacatcgtccaggaagcccgcaatgcagaggagaaggccaagaaggccatcactgatgctgccatgatggctgaggagctgaagaaggaacaggacaccagcgcccacctggagcggatgaagaagaacatggagcagaccgtgaaggatctgcagctccgtctgggtgaggctgagcagctggcgctgaagggtgggaagaagcagatccagaaactggaggccagggtgagagagcttgaaagtgaggtggaaagtgaacagaagcacaatgttgaggctgtcaagggtcttcgcaaacatgagagaagagtgaaggaactcacttaccagactgaggaggaccgcaagaatattctcaggctgcaggacttggtggacaaattgcaaaccaaagtcaaagcttacaagagacaagctgaagaggctgaggaacaatccaatgtcaaccttgccaagttccgcaagctccagcacgagctggaggaggccgaggaacgggctgacattgctgagtcccaagtcaacaagctgagagtgaagagtcgggaggttcacacaaaagtcataagtgaagagtaattcattctaatgaaagaaaatgtgaccaaagaaatgcacgaaatgtgaagttctttgtcactgtcctgtatatcaaggaaataaa

SEQ ID NO: 259754 - DNA, 937 bp, Homo sapiens
  misc_feature (116)..(116): n is a, c, g, or t
aactttggcagaaaataaaaaaggaacactttgcagctcattttatgaagtcagaatacttgatcctaaacttgacagtgacattcaaggaaggaaaattactgagcaatctcacnaaagacagatataaaacctcaaccaaatcttagcaaatcaaactcagtgatatataaataacccaattacaattaaccaggttttattcttaaaaaccaaaagtaaacattggaaaatcgtaaatgtaattaccagtatccactcaccaaccaaaccaaaaattcttaccagccaggccaccagtggctcagccctgtaatcccggccctttgggagggccgagttgggtggatcacttgagttcaggagtttgagactagcctggagcggatgaagaagaacatggagcagaccgtgaaggatctgcagctccgtctgggtgaggctgagcagctggcgctgaagggtgggaagaagcagatccagaaactggaggccagggtgagagagcttgaaagtgaggtggaaagtgaacagaagcacaatgttgaggctgtcaagggtcttcgcaaacatgagagaagagtgaaggaactcacttaccagactgaggaggaccgcaagaatattctcaggctgcaggacttggtggacaaattgcaaaccaaagtcaaagcttacaagagacaagctgaagaggctgaggaacaatccaatgtcaaccttgccaagttccgcaagctccagcacgagctggaggaggccgaggaacgggctgacattgctgagtcccaagtcaacaagctgagagtgaagagtcgggaggttcacacaaaagtcataagtgaagagtaattcattctaatgaaagaaaatgtgaccaaagaaatgcacgaaatgtgaagttctttgtcactgtcctgtatatcaaggaaataaa

SEQ ID NO: 259755 - DNA, 568 bp, Homo sapiens
ccaagaggttgaggctgcagtgagtcatgtttgcgctaccacactccagcctgagctacagagcaagaccctgtcccccacctccccgcaacaaaaaggagttaaaaagaaaaacaatgaaaaacaataagaaaggggtgtacagaagcaaagaaacaagcattaaagggtaggtgggcaaaagtgtcaaatgtagaagcaaggtcaaataggagagaatggaaaagagctcatcgaatttaacagttaatgacatttgtgagagcatcactagtagagcaagcgctttgttcaatactctctcaaggaccttaccatactttattataattagttagaattgattcatctcccttaccccatccccaaatgaggaaggagactatcttgctcatttctgtatattctctaggagctaagtactttgcaaacagtaggaactaaacatgttaccaaaataaacttgttcattagtcttggtcattttaaaaaatattttcacagtaataagaaaatctagaaaactgtcttttaactacactccaaagataaaaatatatatattctg

SEQ ID NO: 259756 - DNA, 892 bp, Homo sapiens
agccaccgcacccgtcacttgatctcttttaaagggaggactgtactctggactcaccctcacccttgcacttttggaagcgttcctggacattagacccatcctctgaaaggaacttgtcctgttccttctcctcagtttctgtacacgtccttactgtgcagagtgcacacgggagcgcactcagggctgggtgaggaaacagacaaaccgtccttgagaaacgtgaggtctgcttaggaaggctgcaggaaggcacagaggagagccccggaagggagggagctggtgctcagggagggctgattttcagcagacgctcaatttggaaagcctttgggggaaaggtaattgctcagaattgcaaatccttttcttcatgtttagcgttaaagaataacagcccacgttttctctgaaagctttaaaatttctgaatcattagagtccagtcaatgtggttttaatacatgtagcaacagaatgaaggaacatccatcctgggtttgatcaaattacaacagccttaaattaccttagaaacatagttactttattctatttgtgtctacattaaatgtctcattaattcctcatattttctggagtcttgttggctggcaaatcacaagtaatctttcttcatttgcccttggagttgttgtcagggagatggattggagaataaaataggttagaatctattctgatgctgcgaactgggttcttttacgttttcaggacagaaaatagcagctccccaattccacagacttactttgcgtctcgtaagtgatggtggtggtgacgcaggggcagggcttctggcccgtgtcacgttcttctgctcacatggctggagtatggccccaaagtcaccttttctgcttcc

SEQ ID NO: 259757 - DNA, 980 bp, Homo sapiens
atatcatttcaggtagcaaccatctagatttgagaaatatcttgatatatctttaatggcatctagaacaatatgcaataaaacttagtctctgattataaacagaaagtggttaggaatttgaatataaaatgttcttggttaatgtaagaagcgtgctccttctgtcgtaccctaatgtgtgtatatatcgtgtatctattgggcagtttaaatgtaataacgactgtaatactgacataccttgatacaaatgtttaatcctttagtgaagatttcaaaaattgtgcagctttttttttaatcataaaatggtgttgaagtttgtatcaaggtaactacagttttacatatttaaatctatattacaggtttcttcatgggtctaattttgcctctcaacctgtctttattgccaataaattattgtagcaattattgtaaaaatatttgaaccttagaatatcatcttcattatttttatgttctatcatgattctccatgatagaatcatggaggcaagctgatgaaatccaacttcctcattttaccaatgagaaaacaaagacctagaggagtactgggaatagccataggtgatagaataggtaattaaatatatctgtcaagactaatatataaggaagcttgatgatgatttactacttattacaaactactgggccttctaaggtaagattgcttctaaggtaaaagacactaatactatctttgtaggtgaaaaatgatacaatgatgatgcatgttctgttacatttcagaaagaaacacctccctatcagctaccccgatgagaggggagggggcctcaagccatgtttatcccaacttttaaatcacgtgaccataacatattttaaaataaaataatttgtacttgatttaaatataagtgaaataatttgggagaataatttatgtatttataataaatgtaattatgaattgaaaaaaaaat

SEQ ID NO: 259758 - DNA, 691 bp, Homo sapiens
ggtggtgttctagaggtccctcacgccatttcacaagaaaaagagggggcagaaccctcgggagacccctgcaggactgcaagaactgggctgcatgaagccacccagatgccagggctgcgtgttacggcagctagcctgcctggggaacacacagccccttccatacccgtggctctccttccctgcagagcctcgcaccggtgtgtgtgttggtaaacagggtcacctagtccacacagggagccaacatgcgagggaggagagccaggcctgggtctgctcagactgtgtgctccaattttcagatatcctggacctctaaggaaactggcactggcccaggacacccagagaagctagcagcagtcccggtgtgatcttccttctccatatgaccccacctgagctggatgcagccagcccagcccaagggaagcacccagatggctgtttgattccatacactcaaatcctatatccaccagggaccagacgatccagaccacgtgcttccctccaaaaagagttcgcccagcacaatcagtttagtcgctccgtccaccctaccatttctgacagtagcttgaaagcagtagagccacgaacaaaggatgccatgggaagtgtgtcggcaaagacccttgcagctggctcagcagcccacctgggattcaaacccagactcctg

SEQ ID NO: 259759 - DNA, 896 bp, Homo sapiens
ggtggtgttctagaggtccctcacgccatttcacaagaaaaagagggggcagaaccctcgggagacccctgcaggactgcaagaactgggctgcatgaagccacccagatgccagggctgcgtgttacggcagctagcctgcctggggaacacacagccccttccatacccgtggctctccttccctgcagagcctcgcaccggtgtgtgtgttggtaaacagggtcacctagtccacacagggagccaacatgcgagggaggagagccaggcctgggtctgctcagactgtgtgctccaattttcagatatcctggacctctaaggaaactggcactggcccaggacacccagagaagctagcagcagtcccggtgtgatcttccttctccatatgaccccacctgagctggatgcagccagcccagcccaagggaagcacccagatggctgtttgattccatacactcaaatcctatatccaccagggaccagacgatccagaccacgtgcttccctccaaaaagagttcgcccagcacaatcagtttagtcgctccgtccaccctaccatttctgacagtagcttgaaagcagtagagccacgaacaaaggatgccatgggaaggcaggagtctgggtttgaatcccaggtgggctgctgagccagctgcaagggtctttgccgacacacttcccctcaccccttcctcgctggcaaaaccagaggtgaatcagagcactagtgtgttctagatcctaggatccttagagtgtagttatggacaaagggagttgcgttttcaaagttctgctgggctttgtcatttaagaatctcttaaggcactgctaccagggctattcttcactatttattgggaggcagccaggtttgc

SEQ ID NO: 259760 - DNA, 242 bp, Homo sapiens
tggtaaggacaagtgtccttctggtttgaatactccggttactataaaatttgtgttctgtgaggtatgtcttttctggtgaattcacttctggttctgcatgcctaatttagtattttgtttaatctgcatacctgggtttaaaattttttcttttttttttttttttttgaaaaggaattaaacctttgtccccaaggttgatttgcgtggcccccttttgggcccaggggaaggctctg

SEQ ID NO: 259761 - DNA, 530 bp, Homo sapiens
tggtaaggacaagtgtccttctggtttgaatactccggttactataaaatttgtgttctgtgaggtatgtcttttctggtgaattcacttctggttctgcatgcctaatttagtattttgtttaatctgcatacctgggtttaaaattttttctttttttttttttttttgagacggagtctcgctctgtcgcccaggctggagtgcagtggcgggatctcggctcactgcaagctccgcctcccgggttcacgccattatcctgcctcagcctcccaagtagctgggactacaggcgcccgccactacgcccggctaattttttgtatttttagtagagacggggtttcaccgttttagccgggatggtctcgatctcctgacctcgtgatccgcccgcctcggcctcccaaagtgctgggattacaggcgtgagccaccgcgcccggccgtaaaatttttgtgaatactcttatcttggtttcattttggtttggtaacacacatctgtaaataatttagcttttttc

SEQ ID NO: 259762 - DNA, 1173 bp, Homo sapiens
attagtgagttttttcataagacaaaattcaaaaagattaatggatctttactgaaatgaaattcaaatacgagtatttgtcagttgcataatatgcactgctattttaatgttccacaaaattttccatttttacaggccattactgagtcttataatttatttagacctgttctgttgtgtagagtgtcacatttgttttcattagtaagtataaacacactagttaaaagtgaaattgcttatacctgtactgataagtgccaccagtagagggcggcagtgaggcactagaaagaagaaccaactttactgtcagaaattgcagaaaaccgtcaagatgggggttgatgtgaatgacggcaaacatttgttggtgttggcatcctcattaacacccagactggcttattttatgggccagaagctttgacataaacattgtcacagaattttcagataatctgataatgtacttataaagcaaattttgtggaaatttctggtaagactgatgagaatcaacattaagagatattctaaaaattttacattatttcaaagagacaagagtatgaattaaaattaagcatgctgttcttgtcacttcaagagtgtaggcagagaatttaatactttagagatgacaaaaggcatcttaccttctttgaacactacagatatccctgaaataaaaagaaatatttccaacttatcaacagtaagcaatgcacaggattaatcaacaagataggttacccagatttagcttgcatctgcttttataaacatttaacaacaacaaatattttttgagcacctactatgtgctaggagttattcaaggtactgaggttatagaagggaacaaaacaaactcatttcctgccttcttggagtttaaattatagtgaggaagacagatattaaacaaagctgcataattaattcattagttacaatggagaaaaacaaaaaataggaaacaatctaccacagggccccagatcaatgagtttggcctcaaatcaaaaaggggaaattaagtgaaattgaaataggactcaagaacgaattaagttcttaatacccatttatgtcatttatttcccttaaaaataaataaaatagataaggtaaaattaacagattcatggaaataacattactaaa

SEQ ID NO: 259763 - DNA, 206 bp, Homo sapiens
agtcgtccttccctctccctgggtgcctaagagaaaataccgtatagaaaggaattcctgaagtctaaacccctctagtgaggacaggagtgttactggaaagggaacaagcgagatgatacactcttcaaataagttttgccagtggtaagaaatggcatgtagttttaatttataactcttgtaaagatggcatattcttgcat

SEQ ID NO: 259764 - DNA, 776 bp, Homo sapiens
gttggttgaaaataaattgattgaaatgaaggtataggacatgtgagtgttattaggccattttagcaattagcttttaaatttttgcttggtcagttctttcttctttgccccagtgcctttgctccccaccctactcctcttttaacagtcttcccgtggtttctcattgctgcaagttccttactttagcacacattctaattatttgtgatctggcctgcagtattgccagcttctgctcttgtttctcatgtccttcccattttgtgccctagtcatactgaactgcctaggattgtgttgtcccacatcatagccattagtcacctagggctgttgagcactgaaatgggatttgttcaaattgagctgtgctgttgagtgtaaaatactgatgttgaagagttagtacagaaaaaggtaaaatcttttttttttaatggttacatactgaaatagtagtttgggtatattgggttgaatcaaatatattattaaaatgaattttacccatttctttttactttttaaatgtactgttggaaaatttaactttacatacggggctcacatttgaagctcacattgtatttgcgtggggcagcattgggctggagtatgctggagaagcatctgtttatcacccctctttgctttagtgtaagctcttcactgtgactggaaaggcccagaaccctgcccctcccgacacagcacatacacacattgacgttttgctactacagcatatagcctttgctgggaccctctcc

SEQ ID NO: 259765 - DNA, 454 bp, Homo sapiens
tttttcctatgatctttccctgccgtgtctcttagaagacaaggtatccaggtatgaaaaccaattttgcagacattgtttaggatactaatggggaaagtcttcagtaacttttgttgaaagaatggatttcctgagtccttacagcatttagttaaataagtgtagatttctagaatcagagctaatattcctagacacttggtttagctgttactaactcatgaaccacagaaagaagaaataccttagaccatgcaagtttgacgatgtctgtgaactttaccaactttagtttcagaattccatctttctaccttcccaaaaggttgaaagtgatatggacagtgaagtctgattaattgacagaacttttccatgttaataaaaattccggtaaaatggtttccttgttactagagatatagtttgggattccccaggctgaaaaaaa

SEQ ID NO: 259766 - DNA, 815 bp, Homo sapiens
agagattcctgtgccaacatcatactgttctagaattactggatctcttatgctagggctgctggtcaaacctgagttcctgaaacctttaaccctactcagccaatacaaccgataacattcctgaagagacagagtcttgttctgtcgtgcatgctggcgtacagtgccacaatcacagctcaccgcagcttccaacttctggactcacatgatccttctgcctcagacttccaagtacttgggactacagtcacgaatcaccacagccagcttggagtgactttctaagggattccatccaagttaccacattatatttgttaatcacgtgttctttggcttctcttgtttgtgacagtttctcagacttctgttttgctttgttctcaataaccttgacagttttgaggagtagtgataagaaagttactatgcgcagaccactcttagggagtgaagaattatgatgcccctccttgagaatggagtacttacataaattacttgggactcttctgcataggagggtcttgctcaggctggagtacactggtgcaatcatggctccctgcagcctcaacctcctgggatcaagcaatcctcccacctcagcctcccaagtagctgggactacaggtgcatgctattatacccagctaattttttaaattttttgtagagacaaggtctcactatgtttcccaggctggtcttgaacgcctgggctcaaacaattcccctaccttggtttcccaaagtgctggcatgagccactgtgcccagactcattatttattaaactattttgtggc

SEQ ID NO: 259767 - DNA, 374 bp, Homo sapiens
tgagcttgaacctgataagcctggcagaagcctgatgaacccagaatgagtgagatgtgagacagagtcttgttctgtcgtgcatgctggcgtacagtgccacaatcacagctcaccgcagcttccaacttctggactcacatgatccttctgcctcagacttccaagtacttgggactacagtcacgaatcaccacagccagcttggagtgactttctaagggtaaataacgagtcaattgagactgtaattatatgacttggggcaaaattaactgtggtcagctgacttgttaccgtatttaattttaattttggagcttgtattcaaaagctattatatgaatataagaataaatgatttttttaacaaa

SEQ ID NO: 259768 - DNA, 425 bp, Homo sapiens
gtgcatgcgtgtgtgttttcaaatggttagttttttttctgtatttattgttaaatcctagatgtagtaaggtcaatgaaagtagataatatagcatttactttttaggacttactgaggttttctttatatacaatcaatttttgtactccatgggtacctgaaaagaactatattttcatttatagaaaaccaagcttgttattattattattattaggcagagtcctgctgtgttgcccaggctggagtgcagtggcccaatctcagctcactgcaacctccgcctcctgggttcaagtgattctcctatttcagcctcccgagtagctgggattacaggcgcccaccaccacacgtgactaattctgtgtttttggtagagattggctttcaccgtgttagccgagctggttttgaactcc

SEQ ID NO: 259769 - DNA, 509 bp, Homo sapiens
tcagagagcacgttggccctacaaatgcaaatccaacattcagccacgacctcccatgtgccaagtgtcatgggattcatgctttcaaaccatcggttccacctcttgttcctggtcaatatcctctgcgcttctctttggggatttaggacaccacgacattctcttcattgtccaaggaaaccattctcctcatctagaaacatcatcgatttctgaagttaaattgagaccagagtggattctgcacatcagtctctcccctttccctctgtgactgtggactctgggagggttgaagggaggtggtgccaatggcaaagacatgctctgatggtgcggcttttccacaggcctttcttaagctgtgactgggtctcagatctttcttcagacctgagggatgtttagagtggaggatgtttgcaaccatcagtcttccgtcatgttacactggagtttcgtggcagtgacgtgaattaaagagtaatattttagatttgaaaatt

SEQ ID NO: 259770 - DNA, 725 bp, Homo sapiens
tcagagagcacgttggccctacaaatgcaaatccaacattcagccacgacctcccatgtgccaagtgtcatgggattcatgctttcaaaccatcggttccagttaagactcatataatgaaacagatgggttcacatgattttagtttatatgggaagaagctttagactaaagcagagggaggtaaacttacaggcaagcaggaaggcttgaaggcttgagtgttcttggaggctcacggctgggtgcaggctgaccttgggtgagagccctcgttcattgccccgtgacactgtccttcctgtgttttcaaacggcctcttgttcctggtcaatatcctctgcgcttctctttggggatttaggacaccacgacattctcttcattgtccaaggaaaccattctcctcatctagaaacatcatcgatttctgaagttaaattgagaccagagtggattctgcacatcagtctctcccctttccctctgtgactgtggactctgggagggttgaagggaggtggtgccaatggcaaagacatgctctgatggtgcggcttttccacaggcctttcttaagctgtgactgggtctcagatctttcttcagacctgagggatgtttagagtggaggatgtttgcaaccatcagtcttccgtcatgttacactggagtttcgtggcagtgacgtgaattaaagagtaatattttagatttgaaaatt

SEQ ID NO: 259771 - DNA, 427 bp, Homo sapiens
tccaagtacatgaaacagaacctgcaaataagagtgaatgacgaatagaaagaccacctcaacctgtccacttccctacggccgcagaagttatgattcaaggaataatgagactctaaatcctttaaaattctacaagagcagcctttgccaaacccagcggggagtggctgctcggtgccagcgcgaggagcacgtagactgccgatgccagagaagcccggtgcgggttccgtgctttctctccgttccaggaagaccccagctcgtggccaaatcttcttgccgcttcccggtctgcgcgcctacgctgccggtttcccgacaaaagcgacggcgccctggtgaaaagcagacgcccctcatcggtttgcgccttgcagctcaactatgccccagcctcccacaagccacctgcccgcgtcct

SEQ ID NO: 259772 - DNA, 387 bp, Homo sapiens
actaagatagtaaccttcaagccacacaaacatctcatggtagagagtaaacatgtatctagtgaaatggggcttaagtgtaatctttgtgaagtaagtgccttataattacacaggggtgaccccccagatagtcaggttgaaagacaaaaatagagagaaaaataactcagaggctacacgctgagtgggaaatagacttacaggaatagttcacccaagacattaaacaaactagcaagtgaaaaaccagcaaagatcacagccacttctggagtgggtcagtacccaaagttgcaataataaaatatctaaaatgtcaaattctcaacaaaaaaaatacgacacatgcaaagaaacggtaaagtgtgatgcatacacaggggg

SEQ ID NO: 259773 - DNA, 447 bp, Homo sapiens
tacttgtaagaattgtcttttttctttttctttttctttttttcaatagagatggggatctccctatgttgcccagactggtctcaaactcctgggctcaagcgatcctttttgattttgggagccctcctctgcctcccaaagtgctgggattacagtcatgaaccactgcacctggcccacttctaagaatttaaatgttatttatttgtgtttttatatgtttgtgtaaagaaactggaaggatctgcagactaataaaatgaatacgtattatagagggagtgggggctggcaaattagggggcaagggcaagaagtcgattcttcactgcctagcattctttcatttttttatggatccatgtgaatgcattgcttattcataagattttaaatgagttaaaatatttaaacattaagtgtacaaagtggagataaaaaaaa

SEQ ID NO: 259774 - DNA, 705 bp, Homo sapiens
gggagaaatttgattgcaagaacttcatcctgaagcatataggtcctggcatcctgtccatggcaaatgctggacccaacacaagtggttcccagttttcatgtgccctgccaagactgagtggttggatggcaagcatgtggcctttggcatggtgaaggcatgaatattgtggaggccatggagcgctttgggtccaggaatggcaagaccagcaagaagatcaccattgctaactgtggacagctctactaagtttgacttgtgttttatcttaaccaccagaccatttcttctgtagctcaggggagcacccctccaccccatttgctcgcagtatcctagaatctttgagctttcactgcagttccctttgggttccatgttctccttattcctttcatgcctagctggattgcagagttaagcttatgattatgaaataaaaactaacagcaacaacaaaaaaggatacacctaatccacagtttcttatgaaaccctggaggccagatgtattttggaattgcaatgtatttacatttttgaaaggttaatatggtgaatgtaacacttcatagtaaaatgcaaaatttccagtgaaccatgtgaatattcaactaagtggaataagtaaaggctataaataactatgtcagttcaggtcagagttttctgcaaaatgagtttttataccaaaccaaa

SEQ ID NO: 259775 - DNA, 256 bp, Homo sapiens
cacttcttggactttgaagccacctttggccacaaggggaatgcaaagagaactactgtcaagaacctggatacccacagagctattaaaaggccttggaacccccagctccagccttcttgttaagcaaacaatggatgtctctatagtttaagcttctgagggttgtgtgttctgtaatgggaaaatctgtggagttattgctaggaatggtaatggtgaaatcattaaaacacagaccccaattcagagtcaa

SEQ ID NO: 259776 - DNA, 371 bp, Homo sapiens
cggcgcctaataataataaattcggggccggtcgaaaaagggctctcactctgtctcctaggctggagtgcagtggcacaatcacagttaactgtgacctcgaactcctgggctcaagagatccttccacctcagcctcctgagtagctgggacaagtgtgtgccaccatgcccagctatttttaagtgtttttgtagagatgggggtctcactatgttgaccaggctgatctcaaactccagggctcaagtgatcctcctgctttggcctcccaaagtgctgggattacaggcgtgcaccactgcgcccagccctaggcactgactttatagacatggttttattgatacttcagcgcaaccctatcact

SEQ ID NO: 259777 - DNA, 847 bp, Homo sapiens
ctctgaataaaatatacaagttataacaatgtagcaattgacccagcaaatgaggacacaaacgtgttggagggtgtctacagagaaatagacaagcgatgcacgacagatacatgtgtcagtctggtccctgcagttgtatttgtaataatacacattggagcaatttcatggccatcagttagagaatgtttgaggaatgatccattcatatcaagaaggacatttcaaagatcaaagcctgatggaaatgctggagaccatggcgctgataggagctcatgcgtgttgaccaattactacatgacaggcattggctccaggcttttcctgcactgctcatttaaacactggacaacctaagtgttctgatttagcccattggacagatagaaatggaggcacagaagattcatgtgtttaacttcaaaccctggcagattaggtttttcatccagagcctgtgcttcaccatagctgtgattcacgttctgtcattttccactttaggaatttccagtattccaaatatgagaagctgagaaaacaaacaacaaactcaaaaccctaaaaaccaggatacgtaagggtagatgtttgttgggtgtggatttaaaatggactttttttgccccaagcaacaaagaggcaccttagaaaatagacaagagacaagaagaagagaagctttaagagatatttggtccaaggaagagactccttcagatggaaggtcacatcagctagaaacattaatatgactggatgggctcaaaccactgactttttcagtcaacatccgacagcactaacccagtgttccagagacactgcttgttaaacagtg

SEQ ID NO: 259778 - DNA, 747 bp, Homo sapiens
ctctgaataaaatatacaagttataacaatgtagcaattgacccagcaaatgaggacacaaacgtgttggagggtgtctacagagaaatagacaagcgatgcacgacagatacatgtgtcagtctggtccctgcagttgtatttgtaataatacacattggagcaatttcatggccatcagttagagaatgtttgaggaatgatccattcatatcaagaaggacatttcaaagatcaaagcctgatggaaatgctggagaccatggcgctgataggagctcatgcgtgttgaccaattactacatgacaggcattggctccaggcttttcctgcactgctcatttaaacactggacaacctaagtgttctgatttagcccattggacagatagaaatggaggcacagaagattcatgtgtttaacttcaaaccctggcagattaggtttttcatccagagcctgtgcttcaccatagctgtgattcacgttctgtcattttccactttaggaatttccagtattccaaatatgagaagctgagaaaacaaacaacaaactcaaaaccctaaaaaccaggatacgtaagggtagatgtttgttgggtgtggatttaaaatggactttttttgccccaagcaacaaagaggcaccttagaaaatagaacagaaaccggcaagtagaccggacatagcttagagtactgtggccaagcgtaggcactcagtctgatcgaagactcacatg

SEQ ID NO: 259779 - DNA, 389 bp, Homo sapiens
gctttgttagaatttaagtttgagtatgctgggaccaggtcttggagctgatacaggactgaagagttttaactttacatcataaatcttattctaagttttcatttgaacctggttttagtttcttaactttgtaagcgtcttttggatatttcagtgtttcatttgttgctctcaaattttggtattcaacagactcgtttctttttcttttcagttaacattagagtctaatttacaatttttagttcatgtcaaaaaaaagttcaggccgggtgtggtggctcacacctgtcatcccaactctttgggagtccaaggcgggcagatcataaggtcaggagatcgagaccatcctggccaacatggtgaaacccagtctctaattt

SEQ ID NO: 259780 - DNA, 698 bp, Homo sapiens
ggttgaagcctccatttccctgtctaggagcttctgtttacactccaccccactctagattgcaagccccttgaataatttttgtttcctagtaccaagaataatggtgacaaatattaggggatgactcctaaaaatggattaagaagctatttagggggaaaatgcccattttgtggttttaaaagatgctacaattgccataaaatgcccaagtttcattgcagaaatcaaatactggagttgtgttttgcttggtcaagaggaaagaatgtacatttagagacaaagaatcgctgtggcagttaactttggtgttacattctgttttcttcctaagcaattctttagtcctctacctcaacggtgcctctgaagaaaggacttacgtggccaatgggatcaccgtgtatttatttcccttccctatcagccatagccctcagggctggaagggcctcattttagtctattcccagactgggtcacccacagtgttgacacacagcatcaaccgacagtgagcttatctggaaaataatgcctttctattttctttgtttcttagcatatattaaatgtttctttccttctctaataatcttttagataaagaaatcatttgctgagctgataataacaaaagtatcctacctacatttttaaatgtcagcagtgaaagacgttttaagggcttt

SEQ ID NO: 259781 - DNA, 358 bp, Homo sapiens
agggggaaattatcacagaattgtcaacagatgagtatcaataagtccatggcccaaaccagccccaaggatgacaagtttcaggtcttgctaggctggtggccttcagaagatgagctttaccttgggtcaccatctgaaaatgttacaaactctattttcccttcatcctgactttgttttcctgagagttaatttgggagacagaatctccaaaaactcattttgctgagaacagcaggtgaaggtagccaacctctcttgttgggagcccaagacaggaggtacagaagaaacacacttggctgttaccaacttgcatggggtcatctcagtccaagtccacccctccacagtc

SEQ ID NO: 259782 - DNA, 403 bp, Homo sapiens
ccactccctgggggactaagcagagattattagactctaacttccagaaaaagggctaagtcttaaacatatctaagattattactatagaaatgttattgcttaattttaatgagtatgttgaccatttaagttgacagtccttgtcacaatttatcaaagacaaattagcatagttagagtcaccaaaaggaaactattaaaacctaagtgttttcacttcttctgatctggcacttttcctatagaactatatatcactttagtgcttcttaattaaaagtgatgtcttcctccaacttagatctgtactgcaaacattccctgtcccatgttgcttttgatttacaaagtacaatataaaactggattatattatcttcaaataaaatcaacaccagtg

SEQ ID NO: 259783 - DNA, 250 bp, Homo sapiens
gagtgaggccagagtagagacaggaatactttttatctggcttctgctgtgagtctcagctgtcttcattttttcccaaaaggttagaaccttcagaaattggcaccttctaggccctggcactgtctcttccttggctattttagaggttacaaaccagtctttaggcataatttagcacagaattttccaaacagcattgtgaagaacactgtatactgcaatatgatgatggttctgtggatttaaa

SEQ ID NO: 259784 - DNA, 415 bp, Homo sapiens
gcaggaccttgaaggctgtggaaggagtttggatttatggtctagcactggggaggtggagaaggtcttgacgtgctctgacttgtcccagttctcatcctccactctttggctggttaagagaaaaactttaggcaaattaaacttagcagagtctatttgagcaaagaaacaattcatgaattgggcagcacacggaaccaggaaaggttcagagagctccacccagcaatgtgatcaggcactatttatccatagggaaaggaactgaggtacagaaacagcctgattggttacagctctgtgtttgccttatctgagcatgtctgggcagcttgtagcctgtgactggctgaagcttggctgccctgattgtccaaggttacttgttacaagaatatactctcaagttaca

SEQ ID NO: 259785 - DNA, 495 bp, Homo sapiens
gggtggggagttgatcaaatttctcaatcttttcttttctggcttaaagattttgtgtcagaattaaaaaggtcctttctgaatcagagattatttaataattctcccagttttttctgttacttttaaggtttcatttttttcatgtgtaaattttccatccatacgaaatttactttgtaaatgtgagtggttggaatccagctttctctttcagatgataatacacttctcccactgatttcaaatgccactttattacgtaataatatggcatctattttctggacttcctaggtagttccatccctctattcatgaactaatgccacattataatatgttttaatacatgggaaactttattgttttatttttcagtattttcctgggttttcttgattgcttaatatctatactactattttaaataattttctattttcaaaaattatatactcacatagttcaaaataaaaataaatcaaaatgaga

SEQ ID NO: 259786 - DNA, 653 bp, Homo sapiens
tcctaaaaaaaaaaaaaaaggaaagaaaaggcacgaataaccaatatgagtttttagagaagttatattgctacaaattatataatattaaatggatcataaaaaaacagtgtaaacaattttatgcccacaattttgacaatttaaataaaatagaaaagttcccttcataattaattctggaagaaacagataactctaacagatctatctatctgtctgtcggtctgtctatctatctacataaatttgaaaaatcaatgtgtacctttttaccaaacaaatgaacaagcaaaaaacttcaaattttattgttgagtttattttaataatttgagattggtttattaaatacataattaaactaaagaaccaaaatatcactccatgaagagaacaaaatttggctcatatagttgattagtggtaaaatatcttcaaattggtttggaattttttagtagaaacacatatggatattttacacaaataattttggatacgtttgcttattttgccactgtttacacgtaaacagtacataaaatgctcttttgatttaggaaattctaatattagataccacagaatttaaatttctcttttttttctattgattatttttccaccagacttctttgtttgaacttgtg

SEQ ID NO: 259787 - DNA, 382 bp, Homo sapiens
acttcccagcaaaatgtcctcttcttcctacaaacaggctgtttctatatgtgcatgtttcatgctaagcacttctttcttgggtggagatggccagaccaactctgttgaaattcttgcatagagcaaacctgtgctcatttttaagtggcatgggagaggccccaagcctagtaaagcctagtctgtgtcttcacagtgctggtagaatgtgtttgtgtgtataaatatatgatatagatttatatatgttgctaacgccacatattgaaggccaacataactggtggacagcgtgggtgacagaaaatgaaagtctttttggtgattgtttaagcaagatgtgtataaagaaataaatagtttttctttcactgaaaag

SEQ ID NO: 259788 - DNA, 1297 bp, Homo sapiens
gccaggagcaattgtggctgcagagggaggggaggacagggggtggatagaaggagactccaagctgaatagccagaaagaaataaatgctttagaattctcacgctaagcaagtagggttaatttctgctggtggtttctactctgtggtgctcttttgttgtttcagtaaccagaacacatgatgttttaaagaaggcaaggactaacttagaggtgaaatccctaagggctctgccgtgtactccagccttgtgacccttgccttccaggaaccatgcaagaagcgcagccaccagaagtccttaaaacagcaggaaaggtgagcctgtcccccttttgtgcagctacctatctgctgaggagcatctgggcctcattcctccaagtccactggagggtccagaagagggagtcagagatgtatcctggtggagctgggagaaaggcagaaagcctttctgacagctatggaataccgttagccaaggtccacttggcccagcactaagcaaaagatgcgtagtttgcacagaaggttttgtgatactgcctctcaacagccccagcagcttgggaactagcaagagcacatttcttgcctcatcagctgtcctgagatggaaaactcagtggatataggaccctgattccgatgaaaggggcacgtggtcccaatgctggagctcctctggcaggttctaaaagcacactacggagcagcggtgccctgccggacactgctggcgggggctcagtgagcactactcacagatccacacctgaccctgttgggtcgagtcaggctgggctttggtctgcactgtagcacctgtgttctttgagttcacatcatgaatgtggtgatttcccagataccatctcaggcttaacctagcacatcctatttcttttcttctatgatatccaaattggactgacctcacttcaaagttgctgtcccattttgtcaccctatcttatctcggggaaattgcagactgatggccagaccaactctgttgaaattcttgcatagagcaaacctgtgctcatttttaagtggcatgggagaggccccaagcctagtaaagcctagtctgtgtcttcacagtgctggtagaatgtgtttgtgtgtataaatatatgatatagatttatatatgttgctaacgccacatattgaaggccaacataactggtggacagcgtgggtgacagaaaatgaaagtctttttggtgattgtttaagcaagatgtgtataaagaaataaatagtttttctttcactgaaaag

SEQ ID NO: 259789 - DNA, 575 bp, Homo sapiens
aagaggaaagagcaagtaccagactggtgacttcatctttgaggagatgacccaaaagttgcacaaaagcactttcactcttatcatattatactgaaatcacatggccatacctagctgtaaaaaaggctgagaaataaagtctccagttgagtgtccaagtggctggctaactaaatatcaaggatgggagatatatggggttgattcctttactaaaaggtaaaagggatgactgaattcagggagaaaattactagattctgttatataatatgaacaaaatcctaggaagaaccaaataggcggtagtccattgggtcaggaaaagcttgaccaagtatctgagctatgttttgagagatgaataaaattccactgcaaaatgaagggcaataagtataacagtagttggaaaggtgcctggcagagcaggagccatagattcatctctatatgcctaatactttgcatagtaatgggcaaaataataagcattcaacaaacatttgctgaagtaatgaatgaaactggcttttgcttaagtgaataatcacattatttgtaaactaagg

SEQ ID NO: 259790 - DNA, 464 bp, Homo sapiens
aatcctgcactgaatcaaacagattttgtattaccagatctaggctgactcactgtgtggtcaggaccttgggtcaatcacttcacctggtgactcactccctacctgtaaggtgtggaggacagctggagtcactgtggcacctgtgtgtttagcagtgtgtttgcttgttcctgcttttatgtctctggctggtctaagatggaatgataaaaaaataacggaatgcactttgtaaacgagagcatcctagacacatgtaaagattggaaaattagaaagctgtctctactgtagttacttctcagatatgaccaaccattattaagaattcattggctaatagggctacattttctcatgatcattcttctgttttagaagtgggcaactgcagttttaagaataaatgtgtaaatgtgtgttttcatgagagacaataaagctgttttcattaagaatga

SEQ ID NO: 259791 - DNA, 578 bp, Homo sapiens
cccccagaaggaatgcagcccctctgacaccttgactttagccttaatagacctagttgggcttctggcccccagaactgtaagatggtagatttgtggtgtttgaagccactaaatgtagggtactttgttgtagcaacaacaaaaaatgaacatgaaactgggacctcatgttacagttgctcacgcctgtaatcccagaactttaggaggctgaggtaggaggatcgcttaagcccaggagtttaagaccagcctgggcaacataatgagacctcatgtctaaaaaaaattttttttaaaggccaggtgcagtggctcacattcgtaatcccagcactttgggaggccgaggagggtggatcacgaggtcagaagttcaagaccagcctagccaagatggtgaaactccatctctactaaaaatacaaacattagccaggtgtggtggtgggtacctgtaatcccagctactcgggaggctgaggcagagaatcacttgaacccaaaaggcagacattgcagtgagccaagatcacacccttacacttcagcctgggtgaccaagactccgtctc

SEQ ID NO: 259792 - DNA, 423 bp, Homo sapiens
ataatatatgtgggaagtacttttcctagtgtctgtcacatagtaggtgctcaaaatacattatagctttaattattcaagttttctggggcagtttccatttcaaatattctgttgtgtttttagactatttgttctcatttgaaattctaaaatgtcatcactgtatttttcttcagcatttgaaggaggagggtttgttttttcaggtataaagacacaaaactgcctccactttctacacttgatttgaaaatctcaatcctagtcagagacatcttattaagacccaaagcataggatggctactataaataaacagaaaataaagagtattggtgaggatgtagagaaaattgaactcttgtatacagttggtgggaatgtaaaacggttcaaccactgtgggaaacagtatggcag

SEQ ID NO: 259793 - DNA, 169 bp, Homo sapiens
gtctattaggaagaaaaatgtgtttaaagttttacaggaacgtggagctcatgttcttctgatatgtagactttgataaagaagcatactgtaatgttttatgaactgaaattttaatcaaaagaggtcattttagaataacaagtattattcttttttagtagaggga

SEQ ID NO: 259794 - DNA, 307 bp, Homo sapiens
cacagcaatggaaacagtcaacagagtaaagagataacctatggaataagagaaatatttgcaacccatatatctgataaggggctaatattcaaaatatataaggaactcaaacacttattagtaagtaaagaaataacctgattaaaaaatgaacaaaggacatgaaaggatatttcttaaaagatgacataaaaatggccaacaattatatttctgaatgcctaaatcactaatcatcaggaaaatgcaagtgaaaattgcaatgagatatcacctcacatctgttagaatgtgtattaccaaa

SEQ ID NO: 259795 - DNA, 481 bp, Homo sapiens
agcattccttgacttgcagacatcttcccagtctcccttccatcttcacatgggcttctcagctgtgtggtccctgtatgtcctgtctctttattaggccaccctcagtgaatttagaattcactctaacaaagtatgatctcacgttgatccttaacgcatgacatctgcaaagatctatttccacgtgacagtgagtggcctccctgagagcaggactgtgccatcctcatgctgtgtccccagtgactagctcagtcctccgcagacaggaagctccaagcaaacgtctagtaaataagtgaatgaatgagtgatcagaatgcactcttctttgttggtgccatcccttaagcccttctaagtgtgacttgttttgactcaatggcaagtccattgacttaaataccttgaccagttctctcatcctaaagtgtctgggagtgtacaaaagcaaaaagagaacaccaagttgcttagt

SEQ ID NO: 259796 - DNA, 743 bp, Homo sapiens
atttgttgtatttaaaaaatcagcatctttggttttctactttaatcttacataattttctagttacttcttgttaacattatcaagcacaatttgacactcaaaattttttgatgcctaactacctttgtgttccaggacttacctaccccctaccttgtgttgggaatagagcttttcatcgtttttttattctcccactgttaaaaattgtcatgatacacacatgacagtttacatggtacatacaccctcaattggtctatatctcctaagctttttcatcgtttcgcattccttcatgaagctattaactgctgttggcaaggattcagaaatgagcaaagtcagcaacattaattaatataccattaatatagagggttaacctgaagttattgagagtttttaaaaatgaataaagaaaagggagcttaaaaatctgactggtggccgggtgcagtggctcacacctgtaatcttagcactttgggaggctgaggcgggtggatcatgaggtcaggagatcgagaccatcctggctaacatggtgaaaccctgtctctactaaaaatacaaaaaaaaaaaaaaattagccaggcatggtggcaggctcctgtagtcccagctactcgggaggctgaggcaggagaatggcatgaacccaggaggcggaggttgcagtgagcccagtgagccactgcactccagcctgggcaacagagtgagactccatctcaaaa

SEQ ID NO: 259797 - DNA, 539 bp, Homo sapiens
cacctctgattaaaatcaatagctgaaacaccatttgtagtgggaatatagtaatatataaccaccaaactctataaacagcaatcttttatttgccccaaattctatttggatttaataaactaatgacttcacaaacatacatgaaatgacctaaccaatatcatcttcatatttctttatctaaaccctggaatcttaaaacagaaggctcccattatgttaatacagagattcaatagtcttttattgaagactattagagactaaatgtttgtgtcccccaaaactcatatgttgaaacctgatccccattgtgagtatatttggaggttgggcctttgaaagattattagattatgggggcagatacgccattaatgacattagtccctttataaaagaaaccccacagagctcttttgccatctatgaaccaggaagcaggacctcaccagacactgaataggctgatgccttgatcttggactttccagccttcagaactgtaggaaataaatttctgatgtttataaaat

SEQ ID NO: 259798 - DNA, 322 bp, Homo sapiens
ttttatagagttgcagtaagtggattatcttcgcttataaatgggttgttagccatgaaactattcttttaagatgtggtaacacagtgtggtaaatagaagattgcatggttctgtaaatgctgaaaactgctcataagtggggtgcaagcacagccccatatggacttgttagaagggagtacttccagtaggaaaagctttgcaggtgacaatcagaataaatggtacaggattttgttactgtaagccatccaacctagtatactcatatctcacctcagtatacctcactcagttctccccaagtgccagatcttta

SEQ ID NO: 259799 - DNA, 284 bp, Homo sapiens
tgcgctccagcctgggcgacagaacgagactccgtatcagaaaaaaaaaaaaaaaaaaaagttatgttctctcaggggaaagagatctggcttcagctaaggagagatagccaggttggcctactacatggagaaggtcttattcataataatcaaaaaaataaatccactcgccatgcacgctgtttcatagctgtaatcccagcactttgtgaggctgaggcaggcggatcacctgaggtcaggagttcaagaccagcctgaccaacatggcgaaatgtcat

SEQ ID NO: 259800 - DNA, 548 bp, Homo sapiens
ccatactgcatttcagcttggagtgcgcagcatgaggcatttgtggttcagaaaagaggtcttcctttttcctcctcctgttttcttttccttccttctccccaactccccaaaggcttactgcctttcttctcaggccacgtgtgtagataacctttgaggaaaagatggtttccgtgctgggatatttggatattacctaaagggacaagatgagccctttctttgccttgttttctttctctggcctcatcagagtgaattatatctgactgtgtgacagttaattgtaccatccatcccgtgtcctaagctgataagcccctctctgtctgcctccatcaagcttctttgtttgagaagttcctaatgcagtaggagaacaaagtgacagttttcttatttactgaagtctctaaagcacattcataatgctcttcattgtatctttcttataacttcattccttcaacttaggtaattaaattgttccatagtaccagtgattgataagttaaaacttcctcagaaacatcagtgagttcagg

SEQ ID NO: 259801 - DNA, 736 bp, Homo sapiens
attccaggagaagagattgttaatattgataggggttgtggggtagagcaaatacgtgggtctgtatatggtcaattgtatatggtattttctaaattgggtactgaatatattctgttgactaccatgaagttgttgcataataaggctgactagtggcacttcaggttagaaagtatagttatattattaatcggaagctagaccaattttaatgaatgctttctgtgatgcttctgtgctttcatagtgtagattgctgctaaaatagtttcatatcagtgaaattcttctatcgtaagttttcatgagatcacaggaaaagaattgccacatctaatgacagtagccactaggtacatgtggatattgagcacttgcaatggggttagttggaattgaactatcttttcagtgtaaaacacatactgagttttgaagacttcataccaaaaaaaagaaagctaaaatatttaactgaaagtttttatattaactgcatattgaaataatatttttgatatatttggataaataagatactatcattgaaattaacttcacctgttttttacctttttaatgttattagaaaagtataaattacatatgtggcttgcattacagttctgtttgacatagttgctctaaagcttccatttacttttttaatagtaattaaattttctatcatacacatagatttaagaaaaatcttaccccttcctcccaaagt

SEQ ID NO: 259802 - DNA, 834 bp, Homo sapiens
caaacacctgcatcctgtttaattcttcagtttaaatttaccaacaaacataaaaggtaggagattgggctgctttcagggcattgagctcaaaagacagaaagaggcaatttatgtgtcacttaatgtttatcttacgcttgcctaccgggaagagtgaaaagatgttaaagaaaaagagggaatcttttcattccttgaactgttgtgttgaataaattttaaagaaaaagaagcaaaatgaaataacttgagaacaagaacctaaccgcatatgaacataatttacatgccataaaataccattttcaatgtacaattaaatgatttttataaaatttacataagccatattttttaaagtattaaaagacagttatgagctaagcttttaagtacagtgatgattgagagtgtgataaaaatactgcaggtagcatttaattagggaaattcctgccagttgaaagatgtggatggggattggcagagattgaaggaacagccattttgtgccagacactctgctggaagaggagcagataaacgggcgagtctgggagcattttaagcagcatttaaaggataataaggtcctgtcttcactaagccattgacatgaatgtgatacttttatatttgtttctgttttctgactttagccctaggaaaataaagggtcatactagcattgcagttattttctcacataaaaaattatatttggctgcttctaattggaagtatctattttaagctcaactaaccctaacatctcaggtaactgtggacagaacttcacatattataagcgtcttactctgtaaaaaaaaa

SEQ ID NO: 259803 - DNA, 994 bp, Homo sapiens
agtttattactttgcctttaacactgttgcagtttacatttatttccttgtttctctcaccatatagaagggatgaagttggggagaacctggtatttagttcagtcctggatgagtgccagcagaagtttgaaaggatgtcatgcatgtgtgagatttagctttccagatattcattgcattgttggctcacctctgccggtggtattgctagcattgcacattggaactgcagcttgggaaagtgatagaaaccaaacacatggtgggtacaaagcaagtttgttgtattttatccacattagtattttggatgtttcaatatttaaacatttcaaaaagcaaaatcaatgataatacttcttgaatgtgttgtgaacaatgcaagccttttattaaaaattatggaatattcgaaagaaatgtttttcttacaagagagcagagaataattactcagggttcctgtgtcaaagcctctagggcccctttactgtccagaattcttagtaagggaccagtttcatgggtcttgttgccaaagcttacttttttgatcctactgctaaattctgacccttcctccaattgatctgctttccaaaaagagcataccaacacctgcacaaaccatttgatgtggtgcagtaagctgtttcatccaagtgttccaaagccataggatgagcaagggggaaaaacttagacctgtataggatcttcccccaggtagttactctttcacagggggtgcatgggagacaggctgctgttgtgccatcctttccattacataatgataacaactgttacttggaatgctttaatgcttgatgttatttatgtttaaatatttgctgtattcctggctctgtgctaaatgctatgcctgcatcttaaaaaatccttaaaataactcaaggtaggtaccattgttgcttccattctccagatgggacactaagactttaagaagttaaatagctcacctgaa

SEQ ID NO: 259804 - DNA, 329 bp, Homo sapiens
ccctgtctcaaaaaaaaaaaaaaaaaatccacattcctggagacttgcagctaaggccttccacaataagatgctgcatttacgtttcccacccataatcaactgctatcccaaacatattgaatatctgtggagaagtatgggtgggtgcaatatgtcactcctagcagaatcactgaggaaactgaccacactcatgatggaaaattgacggtaatgagtccttccctcaggttccccaaccccacaatatgccctaaccatggtggacatgtattcctgtctgtcactggctcacttctcccaccaggctaccgcaaactccacct

SEQ ID NO: 259805 - DNA, 638 bp, Homo sapiens
ctccagcctgggcaacagagcaagaccctgtctcaaaaaatgaaacagaacaacaacaaaaatcgatgcagagcatgtattacatttgtaatcagagagaagggatatctgttatttcttaaaatatagaagagtatactaggagaccagcaagggaaatgttttaatatttagatacggaagcttcgccagacccgtaattttttaaaaatagtgaatcctttttcctgggttgaattatgatgtatggccctgcaaggaaagctgctggaggaattcaaagatgatgatgatgatgatatgcagggctctatatagcttaacacattagttccataaggtcagttctgttcatcaagtgacaaattgtccatggatacaccaggtggtaatgcagcagcagtgggcacaagctatcctgtaaatgacccattaccagaaagtttaaaatttctgcttggaacccaggaacacagatggaacacgaagtggctttcaccagagtcttgggaatatgcttgatcctttaaccccagcttcaggtgttgtgtacatacttaatgcctgaacagttctcatctgtacatctgctggttagatgaaaagatgcagttgcagacaagtaatttaaaacttta

SEQ ID NO: 259806 - DNA, 490 bp, Homo sapiens
tgatctttaaaaacaaacactttccaattgctttggttactgagccccatgcactgagttgtctaacacgattgtgaaaaattcctgggtatgtgtcttagggctgtggtagaaagagacaacaggtcacctgccaggttgtaggtccctgcttggagaggagtcatttttcaccccaggatggtacttctagcccaagcattccatcttacagtggaagagatcaagtccctctccatttatgtatgggctccataaaaggcaatgtaacttgttaccacgctgtattggtaggaaaacaaactcttgactctcagttttgattggaagagtgctggatgaaatctttcccaaggctacttgacttgacctcatgtaattgtcttcattgttagcaacagaaatgtggatagaactacctagaattgcttttggttttgttttgttttgttttgttttttacaataaactcaatgtgatctaacaatta

SEQ ID NO: 259807 - DNA, 611 bp, Homo sapiens
aaaatatgcaaataacttctagaagctgagaataactccctgctgacaacaagcaagaaaaaagacagaacagaccttcagctttaagaactcgattttgccaacaaatggagtgagattggaagtagattcgttctcagattctttagataggaaacctacccagtgaatacttcgatttgaccttgtaaggtcttaaaacagaactcaatcaagtcctccagacagacgtttgacttacagatctgtgagctaatacatgagtgtgttttaagctgcttatgtatagtaatttattacatagcaatagcactaaaaaaactaatacagaacccttgcacatccagttattctctgtgtttctgctgttccactccatgcaaaagtggtgttatgacatccagttggtgctcataatataaatatggtgagtgtcccttcatcatgtccatacacactggccagagccctcttttatacagtcaaagtttggacagctttcttgggtacccaaaatctgagcaagagaacctaaaaaattctttcattttatggtaaacacatatatattggcccagaaatttcacaggtcaaacaagctgttcttgtct

SEQ ID NO: 259808 - DNA, 676 bp, Homo sapiens
ttccagtcagcgcggaggcggtattgagttcagccgctccccacagccccggagcccctgggcggtggcggtggccgcggcagcaccggctcgacagccgatagggtcctgggcccgctccgctcggggtggtcggtgggcggagcgtcgggctcggtcagaagtcgttggcttcgtaagagcagggtctatgggaagcctcctcagcgtgggttcttggaagaggtggagtttggagaggcttatgcggtacctgattcatccagcaaattaagacctgccaactttttgataatctcgtcaataaattacagaacaattgttcctttcaagatttattcaaaacgtgtcaactctgcttaattaagcactttgatgatttaagaaatcttggaaatccttttgtactattgctcattcatacttgttcatcaaagcctggagtccttaaggacagaatttacctctaaacagaaagatggaaactaaagtacatttattctgccagatgcctccacctttttttgctagtattgtgtcaaataagacaagttttttcaaataaaaacaaatctggacttagtaagcagagactttattcaaaataattattgcaagagaaaaaagggactattgaaattggaagaggaggaggactattgcaatggaaagaatg

SEQ ID NO: 259809 - DNA, 564 bp, Homo sapiens
tggatttctcaaaccacaaaaggtaaagttaaggaattggatgatctgtgatttatagtctactaactgctttttctagtgtttgcccacatatctgtgttggtgaaatgttgtgtatcataccccaagtcagtgttacattgaagagataacttcaggtaggtaaatataattgcttaagtgttctaaacaagcgtatgatttcttctttctctttttttggcaggaaatccttttgtactattgctcattcatacttgttcatcaaagcctggagtccttaaggacagaatttacctctaaacagaaagatggaaactaaagtacatttattctgccaggcagaggaaaatattgacttattagatgatggctctaattcttttgcaactgacttgtcatcaggaactattaaccacaagaaatacatcaagttttctaaaacaatagagaaggaaatttcaccggaaattaggagtttgagcccagaatataaaaaaatatggagtcttgctgtgtcacccaggctggagtgcagtggctcaatctcagctcacttcccag

SEQ ID NO: 259810 - DNA, 451 bp, Homo sapiens
aatacacatctcatcaaggcagcaaatcaaattgcctttttgaaacaacttaaaggcagaggaaaatattgacttattagatgatggctctaattcttttgcaactgacttgtcatcaggaactattaaccacaagaaatacatcaagttttctaaaacaatagagaaggaaatttcaccggaaattaggagtttgagcccagaatataaaaaaatgctgtttagagaaatgctgattgcatgtctgtgaaaggaaatgtaaagtaagcctggaacatcttgtcttccggagataaggaaactattaataaaaaagactactatcagggattcatcagaaggactcaagagcctactggaagagtctcccaccttttcctataaaagatgagaaaattagagcatcaataagtataataatttcagggaattaaactgcatcaaatatatt

SEQ ID NO: 259811 - DNA, 671 bp, Homo sapiens
aggctgcagagctagagcagcgccgcccgaggggcggcaggggctgaccacagagagcgcgggggcctccagccgagaggaagggagggcagctcgggccgaagtcgttggcttcgtaagagcagggtctatgggaagcctcctcagcgtgggttcttggaagaggtggagtttggagaggcttatgcggtacctgattcatccagcaaattaagacctgccaactttttgataatctcgtcaataaattacagaacaattgttcctttcaagatttattcaaaacgtgtcaactctgcttaattaagcactttgatgatttaagaaatcttggaaatccttttgtactattgctcattcatacttgttcatcaaagcctggagtccttaaggacagaatttacctctaaacagaaagatggaaactaaagtacatttattctgccaggcagaggaaaatattgacttattagatgatggctctaattcttttgcaactgacttgtcatcaggaactattaaccacaagaaatacatcaagttttctaaaacaatagagaaggaaatttcaccggaaattaggagtttgagcccagaatataaaaaaatatggagtcttgctgtgtcacccaggctggagtgcagtggctcaatctcagctcacttcccag

SEQ ID NO: 259812 - DNA, 586 bp, Homo sapiens
ggcctgccaatggagcagcgttcacagactgcaggttaagggaggcacccagggtgctatgcctgtgagcacacatagtctgtcatggactctgcccccaagcatgtcttggagctacttatggataaatccaagtgactcctctcctgtatttaatattccttactataaataaatgtttgtctaaaaataaagttaatacagatatcaattgttaagaagcagtgccatctctggagtggagtgggacaggagaggtactggctcagtccacgtgtttgtcacacatatcagaataatttggcctcagaaaggcctattaaggccattcattagatggactcagcccaaatgttgtcccagtgtgagattagacgttggattttaagtaccttaaaaagaatgataaatggctgggcgcagtggctcatgcctgtaactccagcactttgggaggctgaggcaggatggtcgattgagcccaggagtttgagaccagcgtaggcaacatagtgagaccttgtctctacaaagtgtaccctacactcacaggctggaccctgccttactctcacgtggtgtcaca

SEQ ID NO: 259813 - DNA, 293 bp, Homo sapiens
agtgggcaaaggacatgaacagacacttctcatattttctacttaccttatctgatcttctccattgactggcctttaatcactaaaatttaaaacaaacaaaaatcatagtttcttctttatttcatgttggcttctcagatacatcacttcctactcaaagtatctgttgaatgtttattatgagctaatgcgttatccattgagttggcaatctggaacaaaatggggaagatctgtgccctcactgaatttatgaatgcagaagagaccataagccaatacatataaat

SEQ ID NO: 259814 - DNA, 575 bp, Homo sapiens
cagggccccatgcagggagaggaagttgtggggaaaggcagaataacaagcagagaaactaattttttaaaaaggtttttaaaatgttgtgggtgaaataaaacacgagctatcagttaatctgtataaccaatgccaagtttcattacctctcttgtccaacttcctcatcaagaaaatgagcatagccacatctttttttgccttaaggggagaggcagaattctaacaatcataagacatgattcctgatgtgtgcgtgatccccactgaatctgagagtcaagcactgttgcctcggtcatacaacatgtatgtgttgatcctgactttgcaccaggtcctattctcaccccagtggagaagttaaggctcagagagttaaggagtttgcctaaggtcacacagcacagaagagtcagtaaattcatttgctggcgggacacggtggctcactcctgtaatcccagtactttgggaggccaaggtgggaggatggcttgagcccaggggttcaagaccagcatgggcaaaatagcaagaccctatctctacacaaataattttttttactt

SEQ ID NO: 259815 - DNA, 480 bp, Homo sapiens
tagggtgtgagtttccctaagattttcagggttttatatattatgacttcattttattgcaaattattttagggtggtatgacataaaaatatattgattgattgattgattgattgattgattgtgggtatatagtttactcagtatcaagttcaaaaagaccatacattctgcattattattattgggatcctcattaaagattagttggtcttatatacattaatttattctgagactctttattctgtgccattaattttgtgtcagtttttatgcacatttttatataacttagccttgaaatatagttttgaattggaaactatgatgctctagtcttagctttttcttaaaatttcattggttatttaaagtcttttgtagtttttatacaaattttagaattgtgttttctattactgtaaaaatatcattgaaatatttatagatggtgcattaaatctataaatcattca

SEQ ID NO: 259816 - DNA, 416 bp, Homo sapiens
cggcacgaggaccattctgatgttgggatcacaggggtgtgattcttagtgtgttccttatttttatgactagaggctggtgtgcagagcagcactgtgaccagctctggctgtgcgatgagggcttggccattcctcggagtgctttcaggtgcctgctgcttgagctacctgaatggccaggaacctgagctcagcactctccgagatgttgcacatgtaactctcctggaagctaaggtgttctctgaaataaaactaaaacgataaaatacacattgcccacacatgcacaccctggtcagcagaatttacggctgtcttgtgtccaaataacataaggcagctccagaagttggaaacagaattctctgctgagactgaaactagaaagagctggcacccaaaaaaaaaaa

SEQ ID NO: 259817 - DNA, 355 bp, Homo sapiens
gtagagattcattaaagcgcctctggtttgaggggcgtttggagatagcttggtacctcccctccttgtcctgctcccttcagaattttttaagtccaatttccagatcttacctagtctctactcctaggactgtttgcagtgagttagaagggtatttatgctcttactgatagtaggttattttcaaaatccatggctttatgattttttaggcactagtcattgccgcagattgcagctgaggaccgactattcagtatctgttttcgtaactgttggcactttatatcgtagggaagggagttgttaatatggtttgtcttttcttataaaaaataaaattctatatcca

SEQ ID NO: 259818 - DNA, 446 bp, Homo sapiens
aattatataaaaatacatcaaggagtgccctgcatctatgttctcctagtctttgaaggcaaattctctatgaatagaacttatagagattctaattggtcttacaattgagtttccggtaattgaacataccttttagtcttctttacttcatatcatcatttcacatcttcttcatttcaattactggtgctagaaaataaaacgcaatacactgtgattcgtgtgtagaatgctggttagttcagctccaaagagcaagtaagatgttctatgctcagctctctcctgggtctgctcataataggtattcagtaaatagttgttgaatgattaaataaatgaatgagcaaatggatacaaggatgctgctatgtagcattatgtaacttgcttagattgtatgtattttttactgtctgtctcccctcaatgggatgacggcc

SEQ ID NO: 259819 - DNA, 685 bp, Homo sapiens
ctgccaggctgcctgtctgcctgtaaatctcatgttctgagagccaggaggccccttctcctgggaggcagcactcctgggtcccttttagtgctctgggctgggacttgtctaagaggatgggttggagatttttagggagatgggatgcaaaaccccaagtggcatgagacccagcttacaggtgcaatatcagcgatctgtggccttaacactgtcacctcttggagccttaattacttcctctgtaaaaggaaagttaagttgcctttgctgctcaaaggactggatgattttagaatcccctttattataggatccaatgtgacagtgagttcatctttaaggatagatgaagccatctggagtggttgttaaaaatgtgggcttggtggccaggcgtggtggttcacgcctgtaatcccagcactttgggaggccgagacccacggatcacgaggtcaggagatcgagaccatcctggctaacacagtgaaaccctgtctctactaaaaatacaaaaaaaattagccgggcttggtggtgggcgcctgtagtctcagctactcgggaggctgaggcaggcaggagaatggcatgaacctgggaggtggagcttgcagtgagatgagattgcgccactgcactccagcctgggcgacagagaaagactccatctcaaaaa

SEQ ID NO: 259820 - DNA, 897 bp, Homo sapiens
ctgggattacaggcgtgagccactgtgcctggcctcttatacatatttttatgcactagtaagtattaaaaataattaggatatatgacattactcattgatgagtgacacttcccttaaaatatatcacattttcccatgtcattaaatactaactatagtattccatagtataaatgcaccatagtttgtctaacaagttctctaacactatgtatttggtaattgctaatttttcctttttttgagactccatctctgaagaaaaaaaggaaaatcttcctcacaaaaggttagataaatattcacttttattattttttattgacttctttatttttttattcagacaggatcttggctctatcgcccaggctgcagtgcagtgggacgatcatggctcactggagcctcaacctcttgggctcaagtgatcctccagccccagccttcagaggagctgggactacaggcacgcatgaccacctgctaaaatatctcacttttgttttctcctacatatttgatgattttttttggttttcattttatgcatttagtgctttaatatgtctgcaatttattttggtttatcatgtgaggagaggattggattcttgtttttcagcttgtccctgcaagtttattgaataatatagttttttcctactgattttaagatttttgaatttagctgaaaggttttatcttctagagacctctcttgagattaatttccactccactgatttctctatttttctacctttatcacaatatttaaataatacagtcttatatctagtattgcaagtccttcagtagttttcctttccaaaattttctttgtcattcttgactattcgttcatattattctgaattacattattaagtt

SEQ ID NO: 259821 - DNA, 403 bp, Homo sapiens
  misc_feature (387)..(387): n is a, c, g, or t
  misc_feature (394)..(394): n is a, c, g, or t
  misc_feature (396)..(397): n is a, c, g, or t
  misc_feature (400)..(400): n is a, c, g, or t
aatgttcagttcgagtcatcagctgtccctttgggtcttttatcactgcttttgtcaagctatctatttaattgaaagaagttaattgaatgaaaatgatcaactaagcttgtattaatattgctaatggaactttcttcttggccatgtttggagaaagatgtcaagctagactttaggaagggcccattaatgcttgcacttaacctgatgggctaattaaggaatgcttattcatcctccaagtccacgaagtctctctccagcccgttctgcctggttttacaacacatttctcttaggagcatgagcattagcagcacagccgtaactgataatgttttgattgcactgaatacagtcctaatgcatcgttatttataattnggcaatntnnaanatt

SEQ ID NO: 259822 - DNA, 535 bp, Homo sapiens
actgatagaaccaaaattctgccctgacaagatagtcctacaagtgaatagaatgtcctaatacccttcacccttgtgcatgttgagcccaaactgtaggcagggagagatcagggaggctcagtacatctcaagactccttcctcactaagtgaggacgggtaggtgaggagatgtggactgcttcagaatggcacccggttaaaccaggccctgagtaattcattcataacaattcttcactggtcacctactgtgcacctaacatcattcttgtgtggagagggatacacactaaatacacacacagacaaatggcgaattataatacctatgaagaagagcagggcaggataacagggaggagagggatgggatactttggtggcccttccctataggctggtgaggtgacatctgaagaaagaacttcgtgaaacgaagtgaactgtatctggggcgcttatggaaaacaaaccctctagcagactcactggttgtttttataaataaaatgtagaagctgggccagcaa

SEQ ID NO: 259823 - DNA, 307 bp, Homo sapiens
cctcagtgaattctttctggtctgtttttaggcccagcctttcacccaagttttctaactttcttcaggtcagttctgcttaatccaggagttcttaactttttctttctttccttgttgttgtttgagaggcagggtctccctctgtcatccaggctagagtgcagtcgcatggtcacagctctgtgcagcctcaacctcaggcttaaactattctcccaccttaacctcccagagtgctgggattacaggtgtgagccactgtgcccagcattcttaacctcttactaatacagtattagttggt

SEQ ID NO: 259824 - DNA, 289 bp, Homo sapiens
aggatcctctcacacgccgaaatccctagcaacaacttcgtccatcctgatctgtatgtatgggctctcggcgtgtgcatgcacacgccgaatatccacacacacgccgaatcaccatacccgagcgcccatactatattctaagtgggaccaaaagaagattaacttccaggtggagtgacagccatgtgaatcatccacgcctttttcccacaccactcccagcactcattctgcagaagagatggaattcagtatggtttctcggcgtgtgcagggtaccgagctc

SEQ ID NO: 259825 - DNA, 704 bp, Homo sapiens
aggatcctctcacacgccgaaatccctagcaacaacttcgtccatcctgatctgtatgtatgggctctcggcgtgtgcatgcacacgccgaatatccacacacacgccgaatcaccatacccgagcgcccatactatattctaagtgggaccaaaagaagattaacttccaggtggagtgacagccatgtgaatcatccacgcctttttcccacaccactcccagcactcattctgcagaagagatggaattcagtctccttccctagctcctttttcctcaaatgacttttaaatgttggtgacccttagcgttctaatctctttcatctgctcttctcacattacacggtgtcccttgatgattgtacttattccaatagattcagatttgatatatatgccattaactgccatactgacatctcctggtatgatctctctcctaagaatcatacccgtatttccatcttaagcacctcaaactcaccatgcccaagccaaatgcctaactacgtactaagcacccgccttctccttcaattcctttgtcaaaaacagcaccactatttattcagaatccaaaagtaggctgatttttgttatcacaaatcctttcctttcccctccatcacatatgtaggtaatcatctacagataacagtcactgctcagtaaaatcatcaataattctacttcttaaaa

SEQ ID NO: 259826 - DNA, 1272 bp, Homo sapiens
tatgtttccagaaatggattctttggagagaactcggatgactatcagttttggccctgtaagatcgtggagatctgtaagatagatacttatataacttacataaaatatatataatatattacttatataacttatataactagctattattttatataactaactataatatgacaaatcctttgctagtagtactaacaacgttttataggagcacaattaattttacttaggataagtgttgttattattgtttttattgttgttctgttagttactcaaaacttcattctaattgtgccctgagtttgttaaaataccatactgtatttttgtgtaacatgtaaataggcattaatttttgagaaatagaaatgtttatccttaatgtatttttaatttgctaacattgattttttattttctttcctgaaatagcttatttcctaaaatgaaagaatttattctcagatgaataatttttatatcagctattcttatcaggtaaaagtttaattattttttatttataatatatgtaagcaattctcaatgctgctctttaagaaaaataaatatgattatattaataataagctttaagagttgaaaatttaagacaagtcattttgtatactgaagtgaattctttgttatttagtgctgataattgaataatgagtagctcatattaaaaatgatgcaaaaacctggcactaaaattgttagtaattttttttaagtatctgaggctagttttcaagtgcagaaggaacattgacaattactttgttttaatttacattcagattttaaacataaactaggtatgtttatagatctttttgtcttgaatgtatttttttgtaaatagaaagcaatcactttaacttacacattatcacatataacaggttcagttactctcagatatttaacactacttacatatttatcactttccttagaatttttgaatgaattgattcatacaaacacttaggcaatattttaaacttaatgaacagattcttcccaagtgcctaaacaactcttgcaaattaaattaccgttttaaattaaaaaatcaagttctcaagaatttcaagcatcatttggtgtttctttcgtttttgagatagggtctcactttgctgcctaggctggagtacagtggcacaatcccggctcactgcagcctcaagctcccaggctcaggtgatcctcccacctcagcctcctgagtagctggtactacaggcatgcacc

SEQ ID NO: 259827 - DNA, 428 bp, Homo sapiens
cagcgaaagatgtctttaactgctaagctgctttttccaactggcagaagcccttgagaagagtttattaagaatgaaggaaaaaaataatccctgtgtagtttacacaactgttcctaaaattcatcccccacccatgcattaagcagtaccatgtgccgagagccgttctcagcctgggggtacagccctaaacaagtgcccaccgtcccggccctttggaagctgcattccacggggacatctgcagaccacagggaatgatgtacgccttgaaccgaaccagtcagaagaaaaaggaggtggttgactttgagttgagttattttccaacctcaagccttcaacatcacttaccctgtctcataagggaaacctggctgtcctcaaaaccagcattcaagatttaaaataaatgttaaaaacaa

SEQ ID NO: 259828 - DNA, 414 bp, Homo sapiens
cggcgcccgagctttggtgcagcattttggttggggagccggcttcagccacggccccacccctgccttcccctttggtttcggggaggcctgtgcacggcctcacccctggcaacaatgcctgtccccctcccaggagggcctgggcaagacagctccacagcacccctccaggcgggcctgccctcccctcgagaaaacggcctttggatcgagggagacaagctggactttatgacgctaacgggggcggcttgcggggcggggccaagccggggggcctccaggatcacactactcacttcagcaaagaaaccgaggggcaagaattgggtaaggccggccccctgttttttttcctctaacacctgtgtctagtcctcccctccaagagcattaactatttaaaacaag

SEQ ID NO: 259829 - DNA, 473 bp, Homo sapiens
tctctcagtgtagcttgccataccaagatgttcctagagttctttcctgctaccttttcggtcgagcctcccaccccaatcccagcaccatcactgggtgagtgatccaccaccaaaggcagctttggtaatcctagccacacatcaagcctcttaataatggccatcatactcatattccttcgaacctctaaggagacctaaggggaccttgtccttccttctccagttacttgggttaaggcaggcactagtctccctggaacgcctgacctcttaaggagccatggcagaacagcatagctcaaggttgtgcttgctccactcaataggttaaatatgagtaaaagatttgggtcacccccttccctctggaaatttctggctgaagtgaccaaagaatgattttaaggcaaaatgataaacatgaacaaagggcaataaaacagcacaaagaaaatattacaaaattc

SEQ ID NO: 259830 - DNA, 376 bp, Homo sapiens
gctattattagttccaatccgcacaaatctaccagtgctaaagggaagcttctgcgaactttggaaggtggattaactgtttcagagcagcagctgcgggcccagatagttgtcggagccgctagacacagccaagcgcttccctgaaagccaaggccggcggcgagctggtggtcccgccggccggaggcccctccccgccaggccgcagaacccgggtcggagagcagccagtctcaacctgcgtccccaaggccgaggatgtgtcctggttttttaaaaagctgtttgcgcacttccagggcctcacccctttcatttggggctccagtattactgtattgacctaattaattcatttttttctcagtccaaa

SEQ ID NO: 259831 - DNA, 480 bp, Homo sapiens
ttacagttggaaaactaataaatgcagaaggaataacaaatttaaaatatcaccatttggcaactatcacaattaaaattgattcagaaagaatcatcaattctattctaaagttagttggcaaaagcttcatgaggaaatatcttccaaaaattacttattaattacaaagagaaaaacagtaattatacagtggagatacctggcagacaccaacttaatgatcaaggttaatcccacaaggattgggacaaacagacatgatatgtatcatgatttgattaactgaaaagaaacagcatgacttctgtgatattcctgccaaaaatgcatgcccaaaatgcaaaaatgcatctaatcaaggtattcaaggaaatgaggaaaaaattcacatacttaaatctaatcacaaggaaacatcagacaacccaaattgaaagacattctacaaagtaactagctggtataatttgccaaaaa

SEQ ID NO: 259832 - DNA, 671 bp, Homo sapiens
ggggtccatgtaccctgccctttaatggcacaggctctgtgactgctctgaccaatagaatgtggtagaagtgtgctgtgccagtttctgggcccaagcattaagagattggaagcttctatgtcctatagacattcaccttactgtgagaaggctaagccacatagaaagttgtttttaaatgtgggttttattattatttaggtataatgaggctgacagatcaagagatgactaccattcaaagtagtttgtcactcacagatcccaagaggagaggcatgcacgcggggaatcaccagggtcattcaggagagacaagtggggagggggaaacatgggcaggagactttcttgtggttttcgtgagaaaggcaaggcaggattagcaggctgaggattgactagtttgaataacttcagcaggctctgtggtctagggcttatcactgcttgcctggtaattggctttaagatgattaggaaataggaatattgtctactgggacgtaagagccagctagaggaagtagttcagagtatgggctctgaattgcttaattcgcatattaaggcaccctgctggccatgttgtttgctatatctaataattggctagcctacgaggggcgttatctccccaggcaacaaaacaccagattccagtgcat

SEQ ID NO: 259833 - DNA, 434 bp, Homo sapiens
ctctacctcgagtagatgccccagttgaaagcctttatccccaccaattacacattcctttggttcaacaattcccttttagataatgtgaaaacccttaattacttaatcagcccttcacagttaaaacaagaaccataaacatcattattggttatcatgatttgatacaggtaagaaaaaagtagagaagtgaaaaatgaggtgctgcaaattaaaaatgtggatgtggccagggactttggattctagaaagacagccagaaatctctagacaaggaagaggaagagggtttaaaagtgaataaaaggacgctataagaaataattaaacatttggcaatttcttcttggccgatagagccaccgcaaaccatccttcatgttcccttttgttctttggggtgtatgtcacctgcataggggattagttg

SEQ ID NO: 259834 - DNA, 654 bp, Homo sapiens
ataagtctcaactttcttgtaaggtttttacatactaaagattttattattcatctactctgatctatagacaagttgtataataaattattcagccacttcctgatgaatagcagaatgatattatatactagagtctatctgaaaggaatatttctttataggctagaggccagttgactgtcctactctttgaagaagagtgacagttcctgattaaggttatttttcctcaatactagattccaggggagcagaagatatcacagagaggaaatccacagtgatcaaatgggacaacccatcacaggccttatcttcacctccagaacgagtagttctttgttctggggtatgctttggtgtaggaaaacttgaggattacccccacctgcctcaggatgtatccatctgtgaaccaattagggcatgggctatgatctcaccattttatagcagaagaaaagagaaagacctaaattcaaaaagcctgacttttgattgaattcttgcctctggtaaagcctgctcccatatgtgtcaaggataaatgccaagtaagagctcgcattttgtacccaggaacagcttaaatcaaaccctgtttctgctggatcccagaggttttgacagttcatggagagacactctcat

SEQ ID NO: 259835 - DNA, 487 bp, Homo sapiens
ggaatttgagtacgacagctccacatcaggggaactcttcaagtcagcctagggattgtcctgccttggtatggactctttaaaaggtcaacagggaaacacaaaccgtgtgaagccatgtctagatagcacaccgaaaagaagaatatttgctgccaacctatagctatgctgcccttggagggctggaaaatggcttccgcgagtttacgagaagagggaaacactctttgtgattgaaaacacacccgcacccacacacaatttctaagttttcttaacaagataaagacgggataatttaatactcagggaattctttgttaatgattccattcgtcctttattatcatccataatggtttaaaaattatagtctaattggtgtcttatgatttgatcaaattcaacattacgaaatttaatcaataagaaaggtctctgttgttcatgactctaaaaataaacttgatgaaaaatatgagaa

SEQ ID NO: 259836 - DNA, 639 bp, Homo sapiens
aaaatacaaaaattagctaggcatggtggcaggcacctgtaatcccagctacttgggaagctgaggcagtagaattgcttggacccaggaggcagaggttgcagtgggccaagatcatgccacttcactccagcctgggcgacagagtgagactccatcttgaaaaaaataaaaataaaaaataaaaaaaacactggagaagacagactgccaagataaatgcagatggtaaggtgtgatacaagaaaatggaggagtaggattcaaaccaatttctgaacaactacaagcctatgctcttcccatgacaccaagcagaatcgcttctttggagtaaaggaaatatggacgatactatgggtattcattataatacgtgactctcactttctaacggtgtgagcatgtttaccggccttgactgtatgagataatctcaggtcccattcctcaggcaggttttgaagcaccaaagcaacgttactttaaaaactttacttttgcaggacttactgcaagttggctcttgtttcttgaattattcaagtttttgatttttaaaggtagcatgtaatatgtaataccatttccacacacagatcaaatagttgagagggaaaaaaaagccatccaattatg

SEQ ID NO: 259837 - DNA, 161 bp, Homo sapiens
accaagaagaaatggtttaaatcacaatttcttggccctattgacattttgagccagacacttctttgctttgagggactatcctgtgcattgatgtttagcagtatccttaacctctgtgcactagatgccagtagtataacctttctaatctgagcacc

SEQ ID NO: 259838 - DNA, 427 bp, Homo sapiens
gctatatcattttgcattcccaccaacaatgagagtccctgttgctccaaatcctctaccagaatttggtattcatgttttggatttcagcattctaataggtgtgtagtggtatctaattgttgttttaatttgcacttccctgatgacatatgtttatttgccatgtgtataccttcttcgatgagatgcctgctcagttcttttgctcatgttttaactgggttgctcatttccctattcttgagatttaagagttctttgtatactttgtataaaattcctttaagtgacatgtcttgtgcaaatattttctcccagtcaatgccttgtcttttcattctctttgtagtgtctttgcagatcagaagtttttaattttaatggagtccaggtcatcaattagttttttcatagattgtggctt

SEQ ID NO: 259839 - DNA, 198 bp, Homo sapiens
tttttttttttagagatagggtcttgctctgtttcccaggctagaataaagtggtacaaccagaaaattttcccttttatttataaatatcttaatattgtctttaatccatttgttctgttctcttttttcaggaacactaatttatatctattttctttttcatatgtattatcttcttcataataatttttgtcg

SEQ ID NO: 259840 - DNA, 542 bp, Homo sapiens
ttaaattcaactttttgatgtctataagttttagattagaaaaaactctatatttaggatgacagaattatgttactgaatgatcaaattgggaattagtatcaggattactatatgtcagagctgtctaaataggcttcaaaccaatgggcataaaacattaaataagttcaaagattttgacccagaaattccacttccagaagtttgttctaagaaaataattcaggatttatttatggatttttgtgaaaagattccctctagagtattttttattgtaatgataaaatatgggaaataaatgtttgcaagtatgaggttagctaaatcacttgtattacattcgtataacttacacattaaaaatgatgttttaagcaaaaagcttagaaagattccagatgcccattaataagttcttgttgaatacaaagtaatccattcacacaatggaatgccgtgtcactgtaaaaaggaatgaggaagctctctattataagctgatatggagtaacttccaggatgtattagcaagtaaa

SEQ ID NO: 259841 - DNA, 373 bp, Homo sapiens
actctgaaaacatgactagaaatcctatttcattggtgtatgctcttaaaattcaaaaaaactaaatgcctaattctttcgtgtctatattctcaaaatcttgtcaagccaaggaaggtaaaggagaaagtagtattcagtcatcggtagctttttgtattcaatctttctcattgataaagctttaaaggtcgtacaggtcctcacttcatgacaatgataaaaggaatcacaagagggcaggtttacttggtgagcagaaggattggaagcattttctctcttgacattgtttggaattgccagcccatgataataaaaagcagagttttgatcaatcggttgatttttgagacaggttctcactctgtca

SEQ ID NO: 259842 - DNA, 465 bp, Homo sapiens
tccttgtaacttaataattaaagagcaatcagggcctcccctgattgcttccaccagcataaatatccttggaaaatgtcagtcgagcactgttaacttattttgtcctgagaacctctaatcaaaagagaaagatcttgacacagtctgtggtgggatgttgaatgcaacatcacagaacaaggccagagagtgatttgaaaggagcagctgcagaatcctacaggaaatgccgctacattctggtacctgagagaaggaaagtgaaaggcagaactcttggtggagcgcacaagcatgcccagcactctctgggaagctggccctggagtaataagccaagggtaaaatgaactaaggggctctgaaaagctgggatgcaggaagcaagtcttttcataaggaactgatggaggaaggtgttccttccataaacctctggtttccagatgctttaagagatgc

SEQ ID NO: 259843 - DNA, 474 bp, Homo sapiens
aagcaagttcacttctttaataagtacaaataaacaagactgatgaggtgaacaaaaatcaatccacagattccaaaaattttacaactgtttattttcagttcaaacatgattgatgtcaattagatgcagatctgtcctggtgattctcaggaaatctaccgtgtcagataattaccttccgtgaaactcagaaaatccagtgctatgctttaacctatcttttccccaaatccttaaattccatacattctttaaaattatttaatttttatcactatttttcatttctgctaatattaatattttacttacaaaatacagcaaatacttaatattttttatgtacagcatttttcttattactggcatattttaaactttattttttgtgagaattttttttacagtactatggaaaatccttccaaacaagaaatgcataatatgcaatttaaaatataatccttagta

SEQ ID NO: 259844 - DNA, 527 bp, Homo sapiens
gcccaattgtttcaagctatgaaattgtcagatacttacaagcaccatgtgctgaaaactaccatcttctgcagtgctcacaagggtctgttttaattggtggctttactcagccatgtttctgtttttcaaaccccggagtcagttggactgcctccatatcaccacttaccacttccaagaggagatgagttcccagcccatcgctgcatacccaccagcttggacgtagctccagttgctgccaaacaacagcctcgataacttttgaggtttcttctgttcctgggaggctatgattcagtcttgtcttctagcaatattatggaaactgcatgccagtaaccttttagatatcatcttgatcttcatgatactgactcataaacttaataactcttctaatttgcaaaagcaaaaatgtacactggaaagatcattatgcccccgctaggtttgaagcctggcttccaaggcttagcttcctcatcagaaaacagagacctcacctatctcttcccctaaaa

SEQ ID NO: 259845 - DNA, 172 bp, Homo sapiens
gggaagaaaagctacgaggtttgctcttcacagaattaatctgtgaaataatggattgtagttactggattaaaatggcagaaaacctagtcttggcctccttaagaccatcagactccctggaggctctgagttggcttctctctttacacctagattgcaacaagaccta

SEQ ID NO: 259846 - DNA, 437 bp, Homo sapiens
cagcagaggctgtctaggagattgggagtctttgatccccataccagagaccaggtatgtagtgcatcttgttgctggtggctagtgatgccatcttaaatactatcgtgtgtgtttgctgtttcattataggatgtgttaacttcttgttagaaactggggggccgggcgcggtggctcgtgcctgtaatcccagcactttgggaggccggggtgggcggatcacgaggtatgtagatcgagaccatcctggctaacatggtgaaaccctgtctctactaaaaatacaaaaaattagccgggcacgggcccctgtagtcctagccactcaggaggctgaggtaggagaatggcgtgaacccaggaggcggagcttgcagtaagccgagatcacgccactgcattccagcctgggcgacagagcaagactccgtctc

SEQ ID NO: 259847 - DNA, 1533 bp, Homo sapiens
gatggtggcaggtaccctgacatgcccactgctgctgatgttgtgaatgctttagatcaacaggcacttgcatctatcctaagaacatacggggaggagaagcatgccaagaaaatcgcttcagcaattgttcaggcacgcagcatctaccccatcaccagaacccagcagcttgccagcatcgttgcaggagcatttcctccctctgctatttatacacggaaagacttactacagcgatctacccatattgccaccaagactttccaggctcttcgcatatttgtgaacaatgagctcaatgaactctacacgggactgaagacagctcagaagtttctgagacctggtggtcgtcttgttgccctctccttccattcactagaggatcgcatcgtcaaaagatttttgcttggaataagcatgacagaaagatttaacctaagtgttagacaacaagtgatgaaaacatctcaattgggttcagatcacgaaaacacggaagaagtctctatgagaagagctcctttaatgtgggaattgatacacaagaaggtacttagtccacaagatcaggatgtacaagataaccccagagggcgctcagccaagcttagagcagctatcaaattataagttatcatcatcttattcttcaaatttttttctcacaatttctctaatctttactcatgttatgtccctgaatgtcttggtataggtttaagtgtgggacagtctgaaaattgatagcatttagcatttcttttttctcaaaaagaaactgtaggaaatacatgacagagaaagttacactcagggagcagcagcacctccagactggaaaaatgtgttaatctttgcatcatattggactcttgaaggcaatccttcctctggccaggaaattttttaaaaaataatactgtgttgtgtttatctaaatacgtaaactcaagctaccaaagagaaagatgttgtaatcatatctgcatgtcctaaattttgaatttagatattccaatttgcatcagtctttctgtggctcaaataatgatgattatggaatgaattttaatgtccctacttgtgaataattagctttctcaaatgtaggctttttacaaattttaaattttaaaatattagtttaaatgtgtgttatactgataaaatttcatctttcaaattatagtctattattttaaagggatttttcagtatgatatgggccattttgttcatctatcgcaaagtaaaaatgtaaaatccttacagagaattgtttcacaaaacttatatttcatgtcaattgtatttattttaataatagctcacaatgcctttagtaagtaataaagtctcttattagaatcttgtattttttaattgagctaatcaaaataattcagccaagtctatttgaaatagaaaactgtctatttaatatagtaaaatcaatgctcccttaatgttgttacaaagatatggtaactgtaatatgggtaaaagtttattcaagaaaagagtact

SEQ ID NO: 259848 - DNA, 427 bp, Homo sapiens
tccctccagcaattatattttattttttgagatggagtctcactgtgttgcccaggcaggagtgcaatggtgagatttcggctcactgcaacctctgcctctgggttcaagcgattctcctgcctcagctcccaagcagctgggactacaggcatgcgccaccacgcccggctaattttttttgtatttttattagagatggggctttcaccatgttggccaggctggtctcaaactcctcacctcaggttgtccacccacctcagcctcccaaagtgctgggattagaggcgtgagccaccgagcccgggcacactatttttaactggaagctgctttcctatgtcagtcctctaaacattaatttttataaaagtgtgtaaaaccttcctaggaaagataaaaataaattttaaaaattgtttct

SEQ ID NO: 259849 - DNA, 525 bp, Homo sapiens
catcaccatcaatttttaaaatacattatattttacacacttccttttttaaaaaattttacttttttatcacccccaccccacagaatattatcttaaggtaatgcatttttatgcttgaaagctttttattaatctctgtgatacatggctttaataacaatagttatataaattgaagctaagtttaaaaatttcctataactaattctgtaagttgtaatttttcttttgggttgagttattataaatagttgattagaatagcttaaaaacttgatggattttaatgaataataattattaagagtagaagtttactggaaatctgtgtcctaatggaatggatagtgggagttgtgcctaaattaaaggagggtctttgagcccttcgacttattgtttgttggtagggaggcttttccatcctggggcagtgtaccatagtaagaataggagtgggtgagaagtatgcctttattttgtaaagtggaagattgtgaaaggatcttggggaataaaaat

SEQ ID NO: 259850 - DNA, 850 bp, Homo sapiens
  misc_feature (39)..(39): n is a, c, g, or t
cgcccgcccgcgaaacctacggctaggtacgaggctggntgtcgcggcgcgcaggacttgacatgctgcccgactgcctgtcggccgagggcgagctgcgctgccgccggctgctggcaggggccacggcccggctccgcgcgcggcccgcgtcggccgcggtgctcgtgccgctctgctcagtgcgtggggtcccggcgctgctgtacacgctgcggtccagccgcctgaccgggaggcacaagggcgacgtcagtttcccaggcggcaagtgcgacccggctgaccaagatgtggtgcacacggccctgcgggaaacccgggaggagctgggcctggcagtgcccgaggagcacgtgtggggcctgctgcggcctgtgtatgatccgcaaaaggccaccgtggtgccagtgcttgctggtgtaggcccactggatccccagagcctcaggcccaactcggaggaggtgagctgggggatatgagggggttgggctgttccagtcctctgtctaccctctctgcctcctgcctgcaggtagatgaggtgtttgcactgccgctggcccacctgctgcagacgcagaatcagggctatacccacttctgccggggtggccacttccgctacacactacccgtcttcctgcatggaccacaccgggtctggggcctcacagctgtcatcactgagtttgccctgcagctgctggcacctggtacctaccagccccgcctggccggcctgacctgctcaggggctgagggtctggcccgccctaagcagcccctggcttcaccctgtcaggtcagctccactccaggactgaataaaggtctttgacagctc

SEQ ID NO: 259851 - DNA, 779 bp, Homo sapiens
  misc_feature (39)..(39): n is a, c, g, or t
cgcccgcccgcgaaacctacggctaggtacgaggctggntgtcgcggcgcgcaggacttgacatgctgcccgactgcctgtcggccgagggcgagctgcgctgccgccggctgctggcaggggccacggcccggctccgcgcgcggcccgcgtcggccgcggtgctcgtgccgctctgctcagtgcgtggggtcccggcgctgctgtacacgctgcggtccagccgcctgaccgggaggcacaagggcgacgtcagtttcccaggcggcaagtgcgacccggctgaccaagatgtggtgcacacggccctgcgggaaacccgggaggagctgggcctggcagtgcccgaggagcacgtgtggggcctgctgcggcctgtgtatgatccgcaaaaggccaccgtggtgccagtgcttgctggtgtaggcccactggatccccagagcctcaggcccaactcggaggaggtagatgaggtgtttgcactgccgctggcccacctgctgcagacgcagaatcagggctatacccacttctgccggggtggccacttccgctacacactacccgtcttcctgcatggaccacaccgggtctggggcctcacagctgtcatcactgagtttgccctgcagctgctggcacctggtacctaccagccccgcctggccggcctgacctgctcaggggctgagggtctggcccgccctaagcagcccctggcttcaccctgtcaggtcagctccactccaggactgaataaaggtctttgacagctc

SEQ ID NO: 259852 - DNA, 1441 bp, Homo sapiens
  misc_feature (39)..(39): n is a, c, g, or t
cgcccgcccgcgaaacctacggctaggtacgaggctggntgtcgcggcgcgcaggacttgacatgctgcccgactgcctgtcggccgagggcgagctgcgctgccgccggctgctggcaggggccacggcccggctccgcgcgcggcccgcgtcggccgcggtgctcgtgccgctctgctcagtgcgtggggtcccggcgctgctgtacacgctgcggtccagccgcctgaccgggaggcacaagggcgacgtcaggtacagcggccgggaactcctcgccctttgccggaggctacaggagcccggggctggcagggacctctggcagggcacttagccccttcgagcctcggtttccgcctccgtaaaatgggtctggggagagtccctccgcccaagggctgcagcgagaggtcagcgatccgtgtccgtcggccccggtgcacctgccggggcgccacgtcctcgccgcgtgggcccctcgtacgcgtccttgcgcgcacgcctgggccgggacacccctttgagctgtttcccgcttagaggcggagccgcccctgccggcgactacggagaggttcgggcccccccggcgggaattaagaacatcctgaggacaatgtcagtgttgctggggccaccataggccgaatttgggtatctgagccccaggatcttcttgcccctgctgcagaccctcttatcctgcgctgtcccgggcctctcttccttatccccattgctcagggaggtaaactggcctccagaggtcgcatggcttgcctggggcctcccagtaaactaggggcagaggcaggcgacacttcggtgggccagtggccccccccgcactgccgataccccgacctctccgtggccccaagagtccaaggaccagactccttgtgtctgtttagtttcccaggcggcaagtgcgacccggctgaccaagatgtggtgcacacggccctgcgggaaacccgggaggagctgggcctggcagtgcccgaggagcacgtgtggggcctgctgcggcctgtgtatgatccgcaaaaggccaccgtggtgccagtgcttgctggtgtaggcccactggatccccagagcctcaggcccaactcggaggaggtagatgaggtgtttgcactgccgctggcccacctgctgcagacgcagaatcagggctatacccacttctgccggggtggccacttccgctacacactacccgtcttcctgcatggaccacaccgggtctggggcctcacagctgtcatcactgagtttgccctgcagctgctggcacctggtacctaccagccccgcctggccggcctgacctgctcaggggctgagggtctggcccgccctaagcagcccctggcttcaccctgtcaggtcagctccactccaggactgaataaaggtctttgacagctc

SEQ ID NO: 259853 - DNA, 1512 bp, Homo sapiens
  misc_feature (39)..(39): n is a, c, g, or t
cgcccgcccgcgaaacctacggctaggtacgaggctggntgtcgcggcgcgcaggacttgacatgctgcccgactgcctgtcggccgagggcgagctgcgctgccgccggctgctggcaggggccacggcccggctccgcgcgcggcccgcgtcggccgcggtgctcgtgccgctctgctcagtgcgtggggtcccggcgctgctgtacacgctgcggtccagccgcctgaccgggaggcacaagggcgacgtcaggtacagcggccgggaactcctcgccctttgccggaggctacaggagcccggggctggcagggacctctggcagggcacttagccccttcgagcctcggtttccgcctccgtaaaatgggtctggggagagtccctccgcccaagggctgcagcgagaggtcagcgatccgtgtccgtcggccccggtgcacctgccggggcgccacgtcctcgccgcgtgggcccctcgtacgcgtccttgcgcgcacgcctgggccgggacacccctttgagctgtttcccgcttagaggcggagccgcccctgccggcgactacggagaggttcgggcccccccggcgggaattaagaacatcctgaggacaatgtcagtgttgctggggccaccataggccgaatttgggtatctgagccccaggatcttcttgcccctgctgcagaccctcttatcctgcgctgtcccgggcctctcttccttatccccattgctcagggaggtaaactggcctccagaggtcgcatggcttgcctggggcctcccagtaaactaggggcagaggcaggcgacacttcggtgggccagtggccccccccgcactgccgataccccgacctctccgtggccccaagagtccaaggaccagactccttgtgtctgtttagtttcccaggcggcaagtgcgacccggctgaccaagatgtggtgcacacggccctgcgggaaacccgggaggagctgggcctggcagtgcccgaggagcacgtgtggggcctgctgcggcctgtgtatgatccgcaaaaggccaccgtggtgccagtgcttgctggtgtaggcccactggatccccagagcctcaggcccaactcggaggaggtgagctgggggatatgagggggttgggctgttccagtcctctgtctaccctctctgcctcctgcctgcaggtagatgaggtgtttgcactgccgctggcccacctgctgcagacgcagaatcagggctatacccacttctgccggggtggccacttccgctacacactacccgtcttcctgcatggaccacaccgggtctggggcctcacagctgtcatcactgagtttgccctgcagctgctggcacctggtacctaccagccccgcctggccggcctgacctgctcaggggctgagggtctggcccgccctaagcagcccctggcttcaccctgtcaggtcagctccactccaggactgaataaaggtctttgacagctc

SEQ ID NO: 259854 - DNA, 639 bp, Homo sapiens
ccgctgccgctctgcagccccccaggcgggacgcgtcgcgcgggctgccccttctccctctcagctttcggagggacccgggctgagcgccccgccccgcctcgccccgcctcttccctcgcccgatcccgcgccctcagtgtcgcggcgcgcaggacttgacatgctgcccgactgcctgtcggccgagggcgagctgcgctgccgccggctgctggcaggggccacggcccggctccgcgcgcggcccgcgtcggccgcggtgctcgtgccgctctgctcagtgcgtggggtcccggcgctgctgtacacgctgcggtccagccgcctgaccgggaggcacaagggcgacgtcaggtacagcggccgggaactcctcgccctttgccggaggctacaggagcccggggctggcagggacctctggcagggcacttagccccttcgagcctcggtttccgcctccgtaaaatgggtctggggagagtccctccgcccaagggctgcagcgagaggtcagcgatccgtgtccgtcggccccggtgcacctgccggggcgccacgtcctcgccgcgtgggcccctcgtacgcgtccttgcgcgcacgcctgggccgggacacccctttgagctgtttccc

SEQ ID NO: 259855 - DNA, 275 bp, Homo sapiens
tttttttttgcttttaagcacatacagtgactcaaactagggtgctttagtaaatgaataagagtgataattagcatcttgtctctttggagggaaatgctagtgctcaagagaaaattttttctttaacaaaagggtaaaagcaaacttcagcccagccctgtcaaattactcccaaatgttgagtctgcggaggcgctgcttaatcaaatatagatgtaggtggctgagggtggtgggggatgattttctccaagcagcctttaaaaaacagg

SEQ ID NO: 259856 - DNA, 674 bp, Homo sapiens
ctccgggctgcaggaattcggtacgagcgccacttcacgccagcctgggtgacagtgtgagactccatctcatatagaggtgattttttttgtaaaaataagtattgtgttgctaagcagttcacattcaaccaagcacttgcaaggtcagtctcacgatcagccaccagcagctgcgcattcatggctgctggtgaagagccgtatcacctccctgtgcctcagagacctcttctgtaaaataaggaggctggcctcgatcaaaagaccacttgtcctctagttgacacctgagcagctttaagaggttgaatgttgtatagagaacgatcttgtagaaatctgtaagccccttatgtgacacccagatgctgacgacccacctttagaaacttcaggccattttgggagagttggcagaatgagtttccacatattcactgctgggactgctgcttccactgtttggtggtcccccatccccttcagccaggagcacccactgtatccctcaaaatcccccttggggggccccttctcttattctctggccctccaggcaggaagaggacaccccagctgcccagcactgggccaggcctgtgagtgactgctgcctcaaggtgtagggctgtcctgtggccctccccacacccttgttgccaccacctgcc

SEQ ID NO: 259857 - DNA, 1548 bp, Homo sapiens
atcactctgatgaacactgctctcctgcctagagataccactgagtccagaagcaagacctgtgagagtgcacagtgccacttcgccccatggctgaagatggtttgcccaaaatttattctcatcctccaacagaaagcagtaaaacaccaactgcagcaaccattttctttggggctgacaatgctattcccaaatcagaaacaactattacttcagaaggagaccacgtcacttcagtaaatgaatatatgctagaaagcgatttttcaacaactacagacaacaaactgacagctaaaaaggaaaaactcaaatcagaagatgatatggggaccgactttattaagtcaacaactcacctacagaaagaaattacctctctgactggcactacaaactccataacaagagactctattaccgaacatttcatgccagtgaaaattgggaatatttcatcaccagttactactgtttctttaatagatttttccactgacatagcaaaagaagatatcctcttagctaccattgacacaggagatgcagagatctcaataacctctgaagtctctggcacactaaaggacagcagtgctggtgttgctgacgctcctgcctttccacgtaaaaaggatgaagctgatatgagcaattataattcctccatcaaatccaatgtccctgctgatgaggctgtccaggtcactgattccattattcctgaggctgaaatccctcctgctcctgaagaaagcttcactactattccagacataactgcccttgaagaagagaaaataaccgaaattgacctaagtgttttagaagatgacaccagtgctgtggctacattaactggactctgatgagaagtttatcactgtgtttgaactcactacctctgctgaaaaagacaaagataaacgggaagatactctgctaactgatgaagaaactaccgagggagccagtatttggatggagagagatactgcaaatgaagcagagacccattctgttttgcttactgctgttgaatccagatatgacttcgttgtccctgcatcaatagctacaaacctagtggaagaatcatctacagaagaagatttgtctgaaactgataatacagagactgtacctaagatcactgagccattttctggaactacctctgtattagataccccagactataaggaagacacctccacaactgaaacggatatctttgaactactgaaagaagaacccgatgagttcatgatttaaaagcaacaaaagggataccatgtagaattgtgcaatagtctagccagctagccttaacatctaagaaatttttccaacaagcaaaaacctttagaaatgaaagaatgtgggcatttaaggtcttaaacactgaatatcacactcttcttatgactcttgttagcgattcaaggacataaatcttcattcttttctggcacagactacttaaatgggtctgttttcactttgctcatttttcttcaataaatctttttggcaagcaactga

SEQ ID NO: 259858 - DNA, 448 bp, Homo sapiens
gtggtaggacccgtcccttcttcagctctggtacccacctccatcccgtctgtaggtggcgtcccattctagaatggattaaaagtttggaacgctctagatgcttaggaaggagcatccaagggggaatggccgagcagcttgcaagctcacagcgatccgtgccttgccccctcctgccctctataccagtggccagcgagttaacagggaagttggcttttttttttttttttttgaagtgcagtctagctgtgttgcccaggctggtctggaactcctgggttcaagccaccctcccacctcggcctccagagtcctggggttacaggcatgagccactgcacccagcagaaacgctcctacacacgggtagccacccacccaggccccagactcctggactgctgctgtgggaatggctttcagggaatgactccagtgtgga

SEQ ID NO: 259859 - DNA, 484 bp, Homo sapiens
gaatgcttcaggtgcagctggatccaggcatcctcaaatagtgtgattaggactccactttcctttgtcaccttggcttggctcttccctgctctgtgttgttttcagacgaggtggggccccagcagctctggtcctcctgacatcctagagaagagccagcccttccctcctggggtctacaccgtcccctaagggacctcagactgggctgatggaaggtctcaagcaggccatgtgaagggcactgcacaggaaacacagaaacgggaatcctataaggtcagcagagctctgagccctttgttcttgggcctgtttttatgatcctccctctacatgtagctcacacttccctgcttctgtgcaggcaccaggtgagggggttgtcatggcctcctgccactcttgaggctgtcagatattacctgtgctgtccctgcattctcaagctccaaattgtcaactaagaaatggtcactta

SEQ ID NO: 259860 - DNA, 332 bp, Homo sapiens
gagaatatctgaagtaaaggatctttcataaaggatttcttataatgttaaaatccctcctccatttccaaatatcatatttaagtgttcatatattgacgtctgtcaaaatggagtacacctgaacctacataaccatatatacgtgcaacataacacatacatatgtgtcatagctcatttccattgttgggatttgggttcccctcatcatgtttgcttatttatatcaaatctatctagatcataagcactacgaaagcatcaatctcttttattttgcactccctaaagcgcacatccatgtgactgcaggatacacctgcagggag

SEQ ID NO: 259861 - DNA, 425 bp, Homo sapiens
gaagaaaagtgaatcttacatagcagctcagcatatctctttaacaacttctacaattgcctattctgacgaccactgactattgagtctctgtaacttgttcaagttctttcaatgctctacaaaggagaactagttaaggatataaacataaagaaaattcagaatcttaataactactttcgatgtgtcataaaattaaactacaccacaagattccaaaagataacaccaaaatattcatttgaagtaaaaacaaaaaaaaatactgagactcctctcctgtcacagaagaaaccccttctgtgtggcagctcaactcagtttttctgtttacttcagactcttttcatttcctactacagacaggtagctagactctattagtattcatgtgtgctcacaaatcaggttttagctaaaag

SEQ ID NO: 259862 - DNA, 360 bp, Homo sapiens
tatgtggggatttccccctaccagcaagcaagcaatcagttctgcagcagacactaactgcgtatcctccaatttaattctgacactatctgcctggaaatagcatcagatccctcaggttgagggctcagtccccaagactgccatcccttcagacaccagttgcaagtctgggcctctagaacttctgaccagctgggcttcaagttggcattcccagacatttacagtggctcatggctggaggatcacttgaggccaagagttcaagaccagcctgggcaacagagtgagacctgtctcaagaaaataaaaagtaaaattagctgtgcctggaggtacaagcctgtgtagtcctag

SEQ ID NO: 259863 - DNA, 1412 bp, Homo sapiens
aacaaacctctgggctctaagagccccgcaggctgtacctgcggatttcccctctcagccaactccagcctctgctccccctctgctcctcacttctctaaagcgaaacatctcacagtcatttgctccatgcttcctgtacgatttctttatttttactctccagtttgtgggctgagtctgtgtgggtgtgggagaggggctgggtatttctacttctctggcattttccttctgagctgggaggactttcacttcctccccagtctctcagttctgcctttcatgggctgttcaggccatgagaccacctctcctaatccttcctgagcaccagggaaatggaaaactgactgtaactggctgccctggaagggcctagcatccactcaggagcaacaggtggtggcaactacagcagtaacagtaacctccctggggcaggagccttgggctggcgtgacagcagcagaggcagccaagggagccctgcttgctcctgaggccatccgagccctggaacctgtcttgcatccctctaacaccaccatgggcaagcctgggcctccacttccctccctcagccttttctgtcccagcactcagccagacaagagtgactctcagcttgccccaatgcccccagctctgcctgctgatctagttctatatttgagagtcttagacatctaccacactggagcacagagccacgggaggggttggcctccatcaccggggcctgacaacctgccatcccgccatcccaacctccctgaacctcagtctcctctttcaaacaaagttatatgtagatacagtggaggattagaaaacattgaatgggtgccccaatcaacagtgtctgttactggcaggagttataaatgtgtattgaaaatggaatcccttctttttttcttccaatcataaggaccacaaccatccaaaaagcaaagagagcctcagacactccagctcagcctctagttgcagaaagtcacctcctcaaagggagagatcagtgttcacctaggactggaattcagtgtgatctagtggttgaaagtcttagccttcagcctccccagcctgtcagctgttccagaagcctgtcagctgccccttagttttctgctgtgtcctcaaagaagcactgggaccctaaaataaacctctggagagccagttgcccaactcttccagaagagagactagacacgcagctgggcatgcggccagagcccaagaaaagcctggtttgccaggggcagattacagtcaacgggagcagtaagtgcctctgccctctccctcacgggtccttctcttttctagaggggagtccagcacgtgccagccccaggaggtctcactcccttgccagcctcccgactcaattcccaggactg

SEQ ID NO: 259864 - DNA, 1966 bp, Homo sapiens
aacaaacctctgggctctaagagccccgcaggctgtacctgcggatttcccctctcagccaactccagcctctgctccccctctgctcctcacttctctaaagcgaaacatctcacagtcatttgctccatgcttcctgtacgatttctttatttttactctccagtttgtgggctgagtctgtgtgggtgtgggagaggggctgggtatttctacttctctggcattttccttctgagctgggaggactttcacttcctccccagtctctcagttctgcctttcatgggctgttcaggccatgagaccacctctcctaatccttcctgagcaccagggaaatggaaaactgactgtaactggctgccctggaagggcctagcatccactcaggagcaacaggtggtggcaactacagcagtaacagtaacctccctggggcaggagccttgggctggcgtgacagcagcagaggcagccaagggagccctgcttgctcctgaggccatccgagccctggaacctgtcttgcatccctctaacaccaccatgggcaagcctgggcctccacttccctccctcagccttttctgtcccagcactcagccagacaagagtgactctcagcttgccccaatgcccccagctctgcctgctgatctagttctatatttgagagtcttagacatctaccacactggagcacagagccacgggaggggttggcctccatcaccggggcctgacaacctgccatcccgccatcccaacctccctgaacctcagtctcctctttcaaacaaagttatatgtagatacagtggaggattagaaaacattgaatgggtgccccaatcaacagtgtctgttactggcaggagttataaatgtgtattgaaaatggaatcccttctttttttcttccaatcataaggaccacaaccatccaaaaagcaaagagagcctcagacactccagctcagcctctagttgcagaaagtcacctcctcaaagggagagatcagtgttcacctaggactggaattcagtgtgatctagtggttgaaagtcttagccttcagcctccccagcctgtcagctgttccagaagcctgtcagctgccccttagttttctgctgtgtcctcaaagaagcactgggaccctaaaataaacctctggagagccagttgcccaactcttccagaagagagactagacacgcagctgggcatgcggccagagcccaagaaaagcctggtttgccaggggcagattacagtcaacgggagcagccaatcctaacccagatcaaagatcctgggacagctggaacaggcatggcctaatggaactcccaagtggacagggccaggcatggacggacagagcttctgaaacagtcctcagaccccgtgcatctggatctttctgtaggaaccacccatcagcagtgccagacagaaccaagcacatgcactgatccaccgcacgatgggagctggtgtgggtgagcttgtttgctttagccatgcccacagacaggaacagaagagcacagtggaggccaccagccctctcgcctgctatttcaaaaggggttgcagcagggctggaaagcggttcccactgtggttgcccccttcctctctgtggcacacacagacctgaaaataaccagagagggactgtgagctgccagcctaaaacaggaaggctgcagaaagtcctaggctcagataggagagtttaaaagaatgttgaaaccaagaacgggcatcacagatcccacctgtctctgcaccaaagcagacctccccctctctaatctactggtggggagcctgtgtgctctgtagtcatgcagatcccagctttaccacttgctggctgtgtgacttaagcaagctatttaacttctctgaacccctatttcctgatttgtaagataagcgcagcaatataca

SEQ ID NO: 259865 - DNA, 373 bp, Homo sapiens
gggctcctaaagtgctgggattacagacatgagccactgcgcctggccacagatttattatctcttatggaaaaataactgggctcttggctttgggcctcagtgcaagtccattggaaaaggcagctgcaacaatctagtggtcaccagcagtcccatgatggttcagcgactgggactcatttcacctccagcaagccaggtctctactaaaaatatttttaaaaattagctgggcgtggtggcaggcacctgtagtctcagctacttgggaggctgagacaggagaatggcttgaacctaggaggtgaaagttgcagtgagctgagatcgcgccactgcactccagcctgggcgacagaccaagactcca

SEQ ID NO: 259866 - DNA, 925 bp, Homo sapiens
cgggcaccggcggcgagtgccgcggccactgcccctcccgggaccccctgtacgccgtccgcgccgtccagggtcacaccggcgacggaacccgccggcagcaattagccagcatcccggggtcggcccccagaagcattccccggcccaggacgaggatgaacaggacaggcgaggcacaaagtcgcaactgaactttttagaaacattatttgtgtgtgtatgtgtgtagcaggggagaatgagctgatgccgagggtccagccaccccgcctctgcctcctcctccccctgccgccgctgccctcgcagacgcgcgcgcacacacggcacttgggccgggtttccgcgctccgtccccccgtttggatgggggttttcatttccgaaggaggcacagcccgcggagcgctctgaagggctggagccccaagttactcctcgccagcgccggccgcccgctgtcactcgcgctggccggccgggggaagggacccgcacgccgggctttgttgtggaaatcccggttacctggtcccttatttcgcgtgagtctttggcgtccacgaccttgagtctgacggaaagtcagtcggcctcaagcatgaagcaggagtggtcccagggctacagggccctcccttcgctctccaaccacggctctcagaatggccttgatctaggggatctccttagccttcctcccgggacatccatgtccagcaatagtgtctctaactcattaccatcctacctttttggcacggaaagtagccactctccttaccctagtcctcggcactcatccaccaggtcccactcggcccgctccaagaagagagcgctgtccttgtccccgctgtccgatggcatcgggatagatttcaataccatcatccgcacgtcgcccacgtccttggtggcc

SEQ ID NO: 259867 - DNA, 717 bp, Homo sapiens
cgggcaccggcggcgagtgccgcggccactgcccctcccgggaccccctgtacgccgtccgcgccgtccagggtcacaccggcgacggaacccgccggcagcaattagccagcatcccggggtcggcccccagaagcattccccggcccaggacgaggatgaacaggacaggcgaggcacaaagtcgcaactgaactttttagaaacattatttgtgtgtgtatgtgtgtagcaggggagaatgagctgatgccgagggtccagccaccccgcctctgcctcctcctccccctgccgccgctgccctcgcagacgcgcgcgcacacacggcacttgggccgggtttccgcgctccgtccccccgtttggatgggggttttcatttccgaaggaggcacagcccgcggagcgctctgaagggctggagccccaagttactcctcgccagcgccggccgcccgctgtcactcgcgctggccggccgggggaagggacccgcacgccgggctttgttgtggaaatcccggttacctggcttataacccacaccatggataacttattggactttgcctgaaaggagtcattagtgacattggatatttgaccgtcttggccacaggtttttcagaatgaatggaagatcatgcagcatgagtctccaccggacatcgggaaccccacaggggcctaggatggtcagtggtcatcacattc

SEQ ID NO: 259868 - DNA, 720 bp, Homo sapiens
acacatcctttatggttgaagggtgttggaggaagcagagttttcatcagctgctgaagtggcaactaatagaggtttgaatggccgtagaaaaatattgtgttacttgtttgttgtctaggggctcttggctttgggcctcagtgcaagtccattggaaaaggcagctgcaacaatctagtggtcaccagcagtcccatgatggttcagcgactgggactcatttcacctccagcaagccaggtctctacagcatgcaaccagatcagtcctagcttacagagggcaatgaatgcagccaacctgaatatacctccttcagataccaggtcccttatttcgcgtgagtctttggcgtccacgaccttgagtctgacggaaagtcagtcggcctcaagcatgaagcaggagtggtcccagggctacagggccctcccttcgctctccaaccacggctctcagaatggccttgatctaggggatctccttagccttcctcccgggacatccatgtccagcaatagtgtctctaactcattaccatcctacctttttggcacggaaagtagccactctccttaccctagtcctcggcactcatccaccaggtcccactcggcccgctccaagaagagagcgctgtccttgtccccgctgtccgatggcatcgggatagatttcaataccatcatccgcacgtcgcccacgtccttggtggcc

SEQ ID NO: 259869 - DNA, 397 bp, Homo sapiens
accacaagatcaaactggcctgaatccctgagtcatcacatggaggacagctgcctacaagagtctcctgacctatagtgggctctggatgagtgagaagtataacaaaatgtgtgcattaattacagacctttttggcttctttgttagtacagctagacctataacatcctgattaatatatctttgtataaagatcaatgtgttgactattatattgaactagacacttttaattattgatttaaaatatattgttgatttaaaatgacctatattctctaagagtgagcagaaaaattggagattttacccagtttcaagggactgaacaagctctgaatatatttaaagggcaatggcaaacaaaataaaaaaatttttgaatatgtctcat

SEQ ID NO: 259870 - DNA, 420 bp, Homo sapiens
aaaacggcacgaggaaaaaaaaaaaaaaaaagaattgagcactgttgggagggaaagtcctttccctggtctcatgtttttgtgttgaaggacctccattgaaatacaactcttggcctgtagtctcactcctcacacactccttccagcagagaaattaattacctaattgctaggtggtgatggggtgctaacggggtagaacaactctatcaaaggactgtaaacttcccattttcctccctagagacagctccaaactttcctttgggtgcagagggaggctttggatgtgtatttggatacaggagagagttggcagtcacagagtattaataggctctttggttcacagatctaatgtcattttctccaattggtttatcaataataaagctgacagtttaaactctaaaatgt

SEQ ID NO: 259871 - DNA, 477 bp, Homo sapiens
caggcagcaggagcgcgcaagtgggaagcggggatcccagcccacgtgcgtggggtgctcccagctgccccgggacctgtccccagggcgaccctgggaggagaaggccccatcccagcgcctgcctggaaggaggaacccggcccaagaggagctgcccggggcgcgcccaggctcccctccccaggcctcccggctcgcctcccctcccctcccctcctcctgcggtgtttgcctccagccttccctagattcccacgccggcctcaccctacagcgctgcgcgactgctttgcagaagccagatgattctgcccgtgcaggaatgaagtgcgacccggcgcgcgagggagggaggcctctgcgctttggctccggccgcgcctcctccctgggatccggtctagggctggccgagctccgcggatccctgctcagagcggggctgctgcaccacctgccgcgggtggccaaagc

SEQ ID NO: 259872 - DNA, 378 bp, Homo sapiens
agtgaaggttcattctgaatgtgcatgtgtgtccacaggagattttacagctgaggaacctgaggctgagaataatttcatgactttaccatgttctgatttggcagagtctgaaccgggagtcagtttgttcttccatatgactccctttactgaaaaattcactgaagagcttttccgaggaaagcagcctctcctggcctttgcctatttcagcctgacttctctccatccggggcgcctctccactccactccaccccacccttccccacccattccctggtagaagctgccagtcttcatgggcggaaagcatgaatgaactagaatttagcttcaaccactgccttttgaaatgaaaaatatctgccttatt

SEQ ID NO: 259873 - DNA, 359 bp, Homo sapiens
tttgtaatgcaattagatgttttggtgcaggatgcctttattcctggctcctcctgaactcatgacttcggtgcaatgggtaattccttgaaatacacaaactaccaagagttacacagaagaaataaaccattcaaatggaccaatatcagttaaagaaattgaatccataaagctttcataaaagaaaagaaaagaagaaagaaagaaaataaattatcagacttttttggtttcattggtgatttctgtgcaacatttaaggaagaaatatataagttctctacagtgtctttcagaaaagagatgcaaagggaaccttcttaacacttttgtaaaaggctgttttttctctaatc

SEQ ID NO: 259874 - DNA, 575 bp, Homo sapiens
tcagttctgtacatctgcctatattccttgtgatagtgctttgcttttttgtagataagcttccttcttgccttttgaagcatcctttgggcagacttctttctcaggcacttgatcttcagctctgtgaaattccttcactttttcctaagggtttctggcacagcaggaaccgtcttcttcttctcttctacaccatccatggttccagccagaaaagagctgcttgttgatttaagtcccttatagattctggctattagaccttggcatatgcaaagtttgtgaatattttctcctatcgtgtaggttgtctctttagtaatagtttcttttgctgtgcagaagctcttctgtttaattaggtcccactcatcaatttttgtttatgttgcaattgcttttggggacttagccaaaaattctttgcctagaccaatattgaaaagtgcatttcctaggttttcttctaggatttttatagtttgagattttccatttacatttttaatccatcttaggttaatttttgtatatggtgaaaggtaagggtctagttttattcttctgcatat

SEQ ID NO: 259875 - DNA, 480 bp, Homo sapiens
gccctaacctcatgtttcataagccatctgagaatgttgttggtctcagctggagggcccctagcccaggttggcctctctggagcctgaagggcactgctggggagagacccatggccactgacccctccttctggagcagggtctcccagaccccagcagggtatcctccgaggtgcagcagatgtgggcactgacagagatgatccgggccagtcacacctccgcaaggatcggccgctttgatgtggatggctgttatgacctgaacttgctctcctacacttcatctgcaaggtcacttacatagccccactcagctgcttcggaaagcgtgacgaagcagtagtcctcagtgtgtgtgtaagtgaagaggaccttgtggtagcagggaccatgcttcattcgtggctgtgtccccatctgagggcctggtatgcagtaagatcaataaatacttgtggaatgcaaaaaaaaaaa

SEQ ID NO: 259876 - DNA, 232 bp, Homo sapiens
tagactctgagaatatattatgacttctagatttcctcttttttcttaagtaaataaatcatgttcaaaggatgtaagagaaaggagaggcaagtatttttgtttgtttttctctgaatatctgaatttcatagaataacactatacttctcccaaaagaaacactttcaagataagttatgttgtcttttcttttgtaaaattcccatgaaaaagcttacaaaccatactt

SEQ ID NO: 259877 - DNA, 453 bp, Homo sapiens
agctgggattcaaatctggatagttggggtctggagtctatgcttttagcctcttattgggagggtgaatgatgaacacagtggggaggccagatgattttgataacttccagattgcaaatctaaccatgctgatttaggaaattaacaatttagtgatgatgcaaaccagggatctgcaaactacagccagtgagtcaaatcccacctgaaacctgtttttatatagctggcaaactagaaagaattttcacataaatggttgaaaaattttgtaaaaatctgttttctcttttgttacataagtacctgcacatatcctcaatttagtctcttgtcttgcaaagcctaaaatatttactagctggtccttcacagggagtgttggtggcttctaatctaaggtaaaatcaactacaggaaaataaaataaaataaaataaaagtttttta

SEQ ID NO: 259878 - DNA, 1230 bp, Homo sapiens
cgagaagagtggtagagaccaggtcagaggtagctgtttttttgtgtgtgtgtgtgtggtggagatgggttctcactgtgttgctcaggctggtcttgaactcttgggcttaagcgatcttcccatcttggcctcccagagtgctgcgattacaggcgtgggccaccacacctgtcctgtgctaggctcttaacgtccttcccagatgttatgtcccttcccttggtggctgctgctttctgccacattttaccttgccgttccgcaccttctaccatgtctccttttccagcctcattccctgagatgtagccggagttccagttcagccaacctgcccgttgttttctctcctggaactgggtgtttgagcctcctgcatggagtgttcttccttcccagctaaagtcctggtcatcccatttccatctgaaaggcccccttgttcatgaagcctctcatggtccttccccctaccccagccaggtatactttctctcctcttggaattatcctataggaagaacatggtggcttgacctgggttccagtctcacccatctgtttacctggggagtgatcttgagtgggtcaatttatgttctcagtgccttacaaaatggggcagaggatacctaacccccaggagctggtgtggctggggtaccttacacagggcctgactgtagtagcttctctccaagcattggtgtcttacctcttctgtttctctaatggtgttttgcacattcattgttgtattagagtttgtttttttgtcttaccttgttttaataaattataatcttatgggagatgacactgtcttttctttgtttcatatataaaaagtgttttgctgatatacgtagaatcaagttggtctggagttactctggataagggatgaaatcagggagctcttgtgttcaaaggggccttcttcccttttttggttctttctcctcattttttagcttccatttttacttcctttagtattgagaaagtaccaggctcacttcaaagagttgacttcaaagctcccaccagctcagacatacttgccactgaagcctgtaggaattggcatcaatggaagaccctgtggcggttgcatttaagattttttttgggacttctatttttataattcttttaaatggtaaagggggagggttacaaaatatctgcgcctttaagatatcaaacataagccagtgaagttcc

SEQ ID NO: 259879 - DNA, 262 bp, Homo sapiens
tccccgatcaaacccttttatgttgctgtgcggagatgggttctcactgtgttgctcaggctggtcttgaactcttgggcttaagcgatcttcccatcttggcctcccagagtgctgcgattacaggcgtgggccaccacacctgtcctgtgctaggctcttaacgtccttcccagatgttatgtcccttcccttggtggctgctgctttctgccacattttaccttgccgttccgcacagcaacataaaagggtttgatcg

SEQ ID NO: 259880 - DNA, 422 bp, Homo sapiens
ataccacttcatacccagtagaatggctgtaatcaaacatgaattataactgctggtgatgtggagaaactggaaccctcaaagattgttggtggaaatgtaaaatggtacagctactgtggaaaattttggcagttcatcaaaatgttaaagttgggccaggaacagtggcccacgcctgtaatcccagcactttgggaggccgaggtgggaggatcacctgagcccaagagtttgaggccagcctgggcaacatggggagaccctgtctccacaaaaatacaaaaaaaattagctgggcatggtgtcacgtgactgtggtcccagctactcaggaggctgagttaggaggagcctgggtgaggctgcagtgagctgtaatcatgccactgcactctgggcaacagcagagaccctgtctc

SEQ ID NO: 259881 - DNA, 399 bp, Homo sapiens
gcatcccttgaagtctatgttccatattcctgagagttcaggactgtgcagtgagggattcagatagaaagagaaaaggagcattggagagtacatagtgacctggacaaggcaggtactcaaaaagtattcataagatgtacgcatgggctgggcgtggtggctcatgcctgtaatcccagcacttcgggaggccaaggcaggcggatcacgaggtcaggagatcgagaccatcgtggctaacacagtgaaaccccgtctctactaaaaatacaaaaaattagcgtggtggaggctgcctgtagtcccagctactcgggagactgaggcaggagaatggcatgaacccgggaggcagagcttgcagtgagctgagattgtgccactgcactccagcct

SEQ ID NO: 259882 - DNA, 431 bp, Homo sapiens
catggtgagacctcccatctctattaaaattattttaaaaataaaattttaaaaagcattaaagtgacatagtcttcattaggcaaacaaaagatagctttgcccagggaagagtatgaacaaaggaatgggaaatcaaaacagagagcccatctcctcctggaactacaagtagttaatttagctaacacctagaaaatggagggcagggatttctactaaaagaactgaagcctgggcaacatggcgaaaccccatctctactaaaaatacaaaaagttagccaggtggggtggtgcatgccagtagtcccagataactcgagaggctgaggtgggagaatgacctgagcccaggaaatcgaggctgcagtgagctgtgatcttgccactgcactccaacctggccaatggaagtgagaccctgtctca

SEQ ID NO: 259883 - DNA, 598 bp, Homo sapiens
aattcattctttcctaatgttgaaatgctggcagtccagtgagtcaggtaaccatgttacaagaattgtctcacaaattctgtaaggaggtagggaacaaagatacattctgatgtatgtttcttctattaaatctattttggtattccaagtgacatttgttcttgcacagcttatgcttcacaccaacatgctatctgtcagggcacacactgattaagacctattctgagaaaacatattctctgtgattgaaatccaaacgtattgattgttttatttccatcaggagagattgctttctatttggtgatggatgacaactcttcacacctctctgtctgccagctggacagaggatgacacaagcagcctctaagtcttgtgtgggctgagccattagctatgacaggcagctccaagccctcagtcacttcgccatggccctagcatcgtcaagtgagcaagattagacatgtcacagttgcaagatgatgcctaaaactgatggcttggtgaaaagaacctttaaaaatgacaaggccatcttaaaagctcctgaacagggtgggacatggaggggtttgagagcagagcc

SEQ ID NO: 259884 - DNA, 239 bp, Homo sapiens
ttggtagaggattatccaagacttctcctgcttccaggcatgcgtacttgcccagttggcttttactggcattcttggtgctggagaagcgttggagcaaatataaatgcatgacacattcttaaagcaggatgctgtccaagaaaggctaaaaagaaaaaagctgaaataaattaaagataaaacataggtaatacaaaaagagtacaacagcctacaataaaattccactgagaact

SEQ ID NO: 259885 - DNA, 507 bp, Homo sapiens
gtaagcctagttatggacatactccccgtctccatttaggattatataaggattaaataaattttctggggcttggagagaagaaatgggggtgtattttccgccttcctcctgttttctgcatgtatttttaggtaaagatgtgccagtttttattgcaggaatattagcctgaaaaggtttatccagaatcagtcggttacttcctattgactttaaggatcagatgaattgtgatcaactttcataaaatgtgactggaatttagtgctgtatgatgaatcaagagtgctctgagggttgactttatgagcagctaattaaatatacaatagaggtcttgttccagtaagctttttaataagcttagaaaaacttcctgaaattcagattctttccttccatcagtttaatgggaggaaaaacccttctatagtgaatagtttcatgggcatataagctattgtaatatacatgcagttttctactctcctaattaaaaaaaat

SEQ ID NO: 259886 - DNA, 184 bp, Homo sapiens
  misc_feature (61)..(61): n is a, c, g, or t
atggcggtgcagaggctgtgaaaggcctgcatggccaggctgtcaccagcacatggctcanggtcatgaccctgagggattctaaaagagggagaggaggagtagtgatattatctcatctttttttcctttcctgttttgtatttctccctctccctctccttttccctcttcaccggccatc

SEQ ID NO: 259887 - DNA, 471 bp, Homo sapiens
cacagccctcatgcttgccatatgccatggatcatcagagatagttggcatggttcttcagcaaaatgttgacatctgtgctgaagatacgtgtggaatgattgcaacgttatgctgttgcttgtgggtttaatctcattgatcaacaacttttggaatataacaaaaggtatctaaaaattctcaaaatagcaatccaggtaagacctctgatagtaaactacacttggtggtgctaccatgagattataggagtgttgatcacaaaagaactattaaaaaagcaatgtgtaagtagcatgtgtttacatatatacctatatgtaagtgtttttatatatacatagctttgatttaattttttagtttataattcagaattaagaatttagttgggcaacccgctcgggtccccttccacactgtggaagctttgttctttcgctctttgcaataaatcttgctagtaaa

SEQ ID NO: 259888 - DNA, 370 bp, Homo sapiens
aagtgtagaaccctagggatacgccgacgggtgggtcatgaaagaagaaacttgagaaaggaggaaggagcagtcaaaacaaaatgtgaagagcatatattgagtattgacaaggagatctttgataattggggaaagcagtttctttgaagtggtggaagatggagcacagatacattcctagttcccaggcattccttttttattcatgacatttctgtatgttgacgcttctttcagtattataactccttttgagggacagtcctgtattgatttttgcatttagaagaatttcaaacctaagatccagtgtggtggctcacgcctgtaataccagcactttgggaggctgaggcgggtggatcac

SEQ ID NO: 259889 - DNA, 485 bp, Homo sapiens
agtggctttggaacttggggcctctttgggacctggtaggcaatggggtttgggggcaagtttgtgggacatgtgtctgaacaggaaggaagggaggagcagtggggccagccaggaagcagtgccgaatgcagatttctcttcttgtgcagctttgcttagagttgaacattacttcccagagatagattgaccccaatcctgcagagattggctatcctgctcttcaacttatttttagatatatggtctcacttgaatctcacatccaatgaggagttcctgacccctcaatttagctccacctggcattccagagcaattcaaggacctggtagggctactagcaatccactgctacatataggggaacaatgagttttaaagctgctcagaaatctgtgattcgagtatcaggaaatccttgactctttatcaaatgtgaagttgctgatttaagaaataaagttaagaaacaatattca

SEQ ID NO: 259890 - DNA, 445 bp, Homo sapiens
acacatattctcatttataagcgggagctaaaagatcacaacacatggacacagagaggggaacaacacacactgggacctatcagagggtggaagttgggagaaagaagaagatcaggaaagataactaatgggtactaggcttcatacttaggtgacgaaataatcggtacaacaaactcccatgatacaagtttacctatataacaaacctgcacatgtacccctgaacttaaaaattcagtggctaatattcgtcagaatgaatcatttctttccttaaatatgtagccttcctctgtctttacccatttttaaaaatccttttcttaaccccctctagttcttctttatgtgtagcataaaactgcagaattcagggtttgaatgtataagggttaaggaaactaatgtgcattgagattaaaatttaaagtatggactc

SEQ ID NO: 259891 - DNA, 207 bp, Homo sapiens
ttattctttttactaagttgtctcatgggacgtcctgctaaatatcagctgcccaaagtttataaactatttgttcagcccaggagaaaactgctatgaaaattacagaagagcagatataaaattcatttatcatgtctaattgtaccaacttagtcagcatttttcatttttattgttatcttttagcaatgttgttccctgtct

SEQ ID NO: 259892 - DNA, 105 bp, Homo sapiens
cagacagggtctcactgtattgtccaggctgaacatttctaggcatattgattttatgaatcagaaggggatgagatggcagcagcctcaatgaagagatgaatg

SEQ ID NO: 259893 - DNA, 385 bp, Homo sapiens
tcactggagctagcgtctttcttttaagagtgggttggatgacagaagctggagaggaagtggaggagatgagccctgggcacagaataatcattttaaaggggtggctgggcgcggtggctcacacctgtaatcccagcactttgggaggctgaggtgggcggatcaggaggccaggagtttgagaccagcctgaccaacatgatgaaaccccatctctactaaaaatacaaaattagccaggtgtggtggtgcatgcctgtaatcccagctactcaggaggctgaggcaggagaatcgcttgaacctgggaggcggaggttgcagtgagctgagatcgcgccattgcactccagcctgggtgacagagcgagactccgtctca

SEQ ID NO: 259894 - DNA, 472 bp, Homo sapiens
tatttttttgtagagacagggtctcaccatgttggccaggatggtctcaatctcttgacctcatgatctgcctgcctgggtctcccaaagttgggattacaggcatgagtcactgtgcctggccaatttgtttttttataagaagtagctggtctataggagaaatagcttttatctaacaaataaatctgttataatatcaaaacagtactactgactgcggcaattgcaatgatataccgcgcagaatttctgagtgtaaaagacccttagggctaatatcaaaggctccccttgtaccttatatgatgtttcttgttgttatttttctgaaaacacttcagagtgtccacaaatatctattagtccctcagtttatggtttactgagtgacaacattttgggactgatctaaagattctatataccccttattgacaagaaagtggggtggaaaaggggagattggaga

SEQ ID NO: 259895 - DNA, 454 bp, Homo sapiens
cttttacttttcaaaactggcttaggtattcatggaccttgattcttctatatacattttataataaatacgtgaaattgcttaaaacctctttttggaatttttaatgaacttgcaacaaatttgtaaataggagagaactgacgttcttgtgatgttttctcatgcataaacatgccacatccatgttcttgggtcatcttttttgccctttcatggagtcataaattttcccaactgaagtcttgtatattctgttagattaattcctatttctagttgctgtaaatgatatcttatgttttattacatttctaataggatatggtgttggtgaaatgttaaccctctcattagatctactagtttacctgttgattctattgtgttttctatgtaaatgattttgtcagctataaataataacattttattttctctttccttgcaatac

SEQ ID NO: 259896 - DNA, 504 bp, Homo sapiens
tcactttactaaaataaattgctcgtaatcttttggtgggttgtgcactggactttgagtcagaaaattgaaatggtaattgaatgttggccctgcccttgtgctagttacgtgtctacatccgagtttcctcaactaaaaatgaaaacgatctttttatctagggtaaccaatgcattcattaccccaggacttctctggcttcagccctgaaagtcccaccgaggagactgatccccctccatcccaggcaaaccagaatgattatttaccttacactttgccctggtccacagacttgtgggaggataagtatattagacagccctttttgaacaaggatagtcccttcatctagaagggattaaatacgtatttggcaggcttattgtcaaagtatgtttatgaaatgtgtgggcctccaggtttatcttccattataaccaactatgttttctacaacatcatggtatccaataaaaacctgtaaaaatcttggctcag

SEQ ID NO: 259897 - DNA, 243 bp, Homo sapiens
caaatttaattgttaaaattatttaaaatattacacttatcgataaaactatcaatagtatatactgcatttaatattagaaccaattattctctgaatgttcaaaaccattcatacaaaacagattatgagcatggtcatgagcaaacactggaggctacagggcagcaaagggaatcgctaagatcaataacgaacagttctcttcggaacaaagaagtagtccttggctaagtactaaaa

SEQ ID NO: 259898 - DNA, 395 bp, Homo sapiens
gaggtggaggttgcagtgagctgagattgtgccattgcactccagcctgggctataagagccagactccgtttaaaaaaaaaaacggttgctttaaaaaaaagtggttgctttctctggcagctagccctcctcctgaagcagtctaggagcttgcagccaccctgttagctcaacagcatcccacatgcattcttaccatgctgcagatctgaaagaccttagaggcccttgtgtcaggaacctgggactaagactaactatcaaaacagaaaatgctcctattacctctgtcacgaagggctttataagagctttggaagctttatgccaggaaccaggggcagagaccaaatgtatatttcttttcttatatttgagacagagtctcactct

SEQ ID NO: 259899 - DNA, 544 bp, Homo sapiens
gactctgttgcaactactccactgtgtcattgtagcacaaaagcagccaacgacatatgcaaatgagtgagcatggctgtgttctaataaaactgtatttatggacactgaaatttgaatgtcatgtaatttttatatgtcacaaaatattcttttgattttttccaactgtttaaaaccccttgtagcttgtggaccatacaaaaacactgtggccagatttggctactgggttgtaattgtgtgattcctcatctagctccttgctgctcagtatgttctgtggaccaacagcacgggcatcaccagaaagcttgttagaaatgcagatcttaggcctcatcccagacctgctgggtcagcacctgcattttaacaagacccctggtgattgtgtatacactgatgtttgggaagcactgggcaatgtttcattttttttatcctttctcatttagcactcttctaaagaccgaaccatttcgctagatctaacccattgcttgtaactgcagcacagtatttccatattcacttttccacc

SEQ ID NO: 259900 - DNA, 445 bp, Homo sapiens
gtagtgtttctctattataaaatgttttgctaatgagtattaggccaaggagaaatgttttccttaaaaagcacgtaagagacacctcaatttccatacctttctgttatcctaatagtctttcaacatgagggaaaataaatgcaatttaattttaaaagaaatcctaaaaattaaaggttaatttgcttgtaaaaaattagcagcaatcaatttaatttgagacttacattcttgcttaacaacaaataaaattctgaggtaaaattgccacacatttggatgaattccagaaaattcaatatacctaatttgcaatatataatccatcacacagagaaaaaaaatgcctcaaatatttatggcaaggtttttaaaaatgatcctgaagtacaaatactatgtttacttatttatatagggaatgtctctggaaggatactaa

SEQ ID NO: 259901 - DNA, 407 bp, Homo sapiens
tgtcttggaacgtagacccacttcagtatttctttcttactaagtgagatatacaatataattgagatgcactttatcttattagtactctaagagtcagtaccttgaaactaagaaactaaagaggcttgatgcagttattttggtctcaggcttcaaagggttaagctttcttttccttttaactttttattttgacataatttctgacttaagaaaattttgtgagaatagtacagagaattccatatacttttcacccaggttacccaccaaatgttaacactttaccacacttgcttttccctttcctttctgtaaatatattcttttttattttgagacaggctgtcactctgctgcactccagcctgggcgacagagggagaccatctcaaaaaaaaaaa

SEQ ID NO: 259902 - DNA, 457 bp, Homo sapiens
tgtcttggaacgtagacccacttcagtatttctttcttactaagtgagatatacaatataattgagatgcactttatcttattagtactctaagagtcagtaccttgaaactaagaaactaaagaggcttgatgcagttattttggtctcaggcttcaaagggttaagctttcttttccttttaactttttattttgacataatttctgacttaagaaaattttgtgagaatagtacagagaattccatatacttttcacccaggttacccaccaaatgttaacactttaccacacttgcttttccctttcctttctgtaaatatattcttttttattttgagacaggctgtcactctgctgcctcggatggagtacagtagcacattgtatgagtcaggatcgcgccactgcactccagcctgggcgacagagggagaccatctcaaaaaaaaaaa

SEQ ID NO: 259903 - DNA, 640 bp, Homo sapiens
  misc_feature (522)..(522): n is a, c, g, or t
  misc_feature (605)..(605): n is a, c, g, or t
  misc_feature (609)..(609): n is a, c, g, or t
gcagccccttgccagtcatgcgagtgggccaccttggagcagaccctctgattaaggcttcagttaattccagctttggctaacacctgactgtaatttcatgaacagctttttcaagccaaactacccagccaagtagcttccaaattcctgacccagagaaacaagttgtcaaagataagaaatatttactgttgttttaagcttctaagttttgggtaatttattatgcatggttaaattaatttttgtacattcccaaatcaggcaagtcagggtaaactttctcatccttcagtagccatgcatagtgcccatctaatgtgactcaaatagagaggaaatgggcagaaacttccacattcttttctttggatcccataggtattcttttaaaaaagacaaaggagaaagaatacaggaaacaaagaacatctgatgtgtattttacctagtttgctaatatcactggaacgctaagaaaggaaatgtcatagcatagcacattgaagctggcgtcgnttacaacgcgtgacttggccctgcgttaccaacttatcgccttgagacattcccctttcgcagcttgcgtataacgagaagcnccgnacgatcgcctttcccagtggcagcctgttgg

SEQ ID NO: 259904 - DNA, 228 bp, Homo sapiens
tgaggcaggaaaacacggcttccgctcggctgtctcccagcttggtttcttagaaatctatgtcattatctttctgctgggattgtcagacctgattttgagagcatttaaaacctgacccctgatggagcctctaaaatgcttcctgtcttctatttcaccaagcttttaaagcagtctccacctcccaccacatctgtagtggtggctgcttgggagctgttcctg

SEQ ID NO: 259905 - DNA, 583 bp, Homo sapiens
gagtttgtaaaagattgttatgaatttctctctaaacatttggtagaattcaccactgaaactatctgggcctatgtttgtttgtttgtttgtttgtttgtttgtttgtcagaagttttaagttactgacttaatttctttatttgtaatagatttattcagatttttaatttctacctgtcagttttgggagtttgtgcctttctagaagtttgtccattttacttccattttctcatttgttggcttacggttgctcagtttatttccttttagtgtgctatagaatccctttgctttctgtaagcttggtagtgcttcctctctttcgattctgattttcacaatttgagccttctctcattttttcttggtcaccctagctaatagtttgttgattttgttggtcttttcaaacaaccatcttttggtttcattggtttcctttattgttttctattctctatttcatgtatttctgcttaatctttgttattttcttcctgtgcgtgctttgggttttgttttttcttatttttctggtttcttaagatgaaagtttttgttgatttgaggtctgtct

SEQ ID NO: 259906 - DNA, 263 bp, Homo sapiens
aaacccgtttcacagatgcagacacagacacagatctgggctgacggcagggggtgccccaggccacacacagacacaccccaccccacggtgcccagcaatggggggcacccagcaaacatttcaatgcagaatctcagtgtgggctgggcacagtggctcccacctttgatcccagcactgtgggaggccgaggtgggcagactgctcgagcccaggagtttgagacccgcctgggcaatatgacaaaaccctgtttttac

SEQ ID NO: 259907 - DNA, 419 bp, Homo sapiens
tacatgtatttacatggctctttcttccctagttacttaaaattttcacattatacaactccccaaagtaagtgtcctctccccaaagcaagctttgcagaaacaatgaggccaaatcaccataagaatagcttgtgcaggcggggcatggtggctcacacctgtaagcccagcacttttggaggctgagggaggcggatcacctgagctcaggagtttgagaccagcctggccaacatggcaaaaccccatctctactaaaaatacaaaaattagacaagtttggtggcccatgcctgttaacccagctacttgggaggctgaggcacgagaattgcttgaacccgggaggcggaagttgcagtgagctgagatggcaccactgcactccagcttggtggacagagcaagactctgaa

SEQ ID NO: 259908 - DNA, 150 bp, Homo sapiens
  misc_feature (2)..(2): n is a, c, g, or t
  misc_feature (147)..(148): n is a, c, g, or t
  misc_feature (150)..(150): n is a, c, g, or t
cncagggaggccacttcgatttctagaaacagaaaagctgtagatccacatcaatcaagatgtagatttacccacagatctagagaatcaaggctgccacagagtgttcgacatcatctaattatttctcacttctcatcaaagganntn

SEQ ID NO: 259909 - DNA, 2746 bp, Homo sapiens
actttctaaatcacagtgcctgtggccggatgacatggagggagctccctgaccataggaggggttagagacacgacgcccctctaccctcactcacagcagaggtggaaagctggagactgacacccagtcgcagagcgcaccccactggggacccccagctcagccatgctggcctgtctgcagaggacccagaacgccccgggccaacacctggcctgcccgagcaagagcctggagctgcgcaagtgcgaggcggtggccagcgccatgcattcctcccgctacccgagcccagcagaactggacgcctatgccgagaaggtggccaacagcccgctgtccatcaagatcttccccaccaacatccgtgtgccccagcacaagcacctcagccgcacagtcaatggctatgacaccggtggccagcgctacagcccctacccacagcacaccgctggctaccagggccttctggccattgtcaaggccgcggtttcctcctccagcacggccgcaccagctgggcccgccaaaagtgtgctcaagagcgccgagggcaagcggaccaagctgtcaccggccgccgtgcaggtgggcattgcgccctacccagtgcccagcactctgggtcccttggcctaccccaagccacctgaggcgcctgctccaccacccggcctgcccgcagccgccactgccgcctccgtcatccccctgccgggccggggcctgcccctgccaccttccaacctgccctccatccacagcctcctgtaccagctcaaccagcagtgccaggccccgggcgccgcaccccctgcctgccagggcatggctattccccatcccagccctgccaagcacggcccagtgcccagcttccccagcatggcctactcggctgcagccggtctgcccgactgccggaaaggcactgagctgggccagggagccacccaagccttgacgttggctggggccgccaagcctgcagggtacgcagacagcggcctggattacctgctgtggccgcagaaaccgcccccaccgccgccccagccactgcgtgcctacagtgggagcacggtggccagcaagtcccctgaggcttgcgggggccgggcatacgagcgggccagcgggtcacccctcaactgtggcgtggggctgcccaccagcttcaccgtaggccagtactttgcggccccgtggaacagtgtgctggtgacacccaccagcgactgctacaacccagcggcggcggtggtggtcacggagctggggccgggggcagcccgggagctggctgggccccctgcagatgccctctcgggcctgcccagcaagagtgtgtgcaacacatcggtgctgagcagcagcctgcagtcactggagtatctcatcaacgacatccggccgccctgcatcaaggagcagatgctgggcaagggctatgagacggtggccgtgccccggctactcgaccaccagcatgcccacatccgcctacccgtctacagataaggcctgccctgcggacatacggacatgcggacagggcgcagagccgggaggcaggccgcagaacagggtgggcggctcgcaggggcgctcagccccaccctgtgcctgctgatgcccacaggggagccaggctggctgccgcctcgctgtggccggatggagggtggcagggcaacctcacataccaaggcccctccccaccatcggttgccccaggacacagtgagggcctgggggcagccactgacgcccatgccttcctttatctaagctggcagaggcagggagagagaaaccactcaaaaacaggaatggttctttctgggcctcctgggacaggggcccaggccaaggtggggtgcaggaggaaacaggcgcaccagagtcagggtgggggcagggcagcccccccaggggtcaggcagctgtgtctccccacactggctccccagtattctggaaaaggggtacaggaggccgataggaagtcactgggcccaaagtgtctccccaccagccaggtgaagaccactctgacagaggctccagggactataccagtccccctgttcctccttcccctacccccaccattccttcctaacacagagttgcacccccatccccattctccaaaccctggactaccatattcccccttccctccaatacatcttatagggctgctgggtacagttgttcaggctgtgcactgcacaagggcaccttgtccaaggagacaccactttcacccaaacttgtatatttattacaattttctgcatcttgaggaaggggcgtcattttcctgttcgcacaaaggcaccacaggggctaacagtgggcctgcaatcttagatcccatccttgccttcttcgagggatctcttgggaccctcctggttttaactgggaggcccagaccaactcctttcctgcaaaccaccctccaaggcctgtcccacacgatcaaggcagggaaagataggcaggagtcccctcacgaagtcctcaagtcctggcccctctggcgctctggaagcggtactgtatctctctccaaggcctggtcaagcactaagtgcatttacaaatctctgagaatgttttttttatactaaaattgaccattatattctactgtgagaagtgcagtctgcactatattgttttaaaaacgaagagaaagaagaaaaaggaaaacacagatggtgtctca

SEQ ID NO: 259910 - DNA, 1359 bp, Homo sapiens
cgctagtacgaggcctggtgtaatcggcgaggggcgcctgcatcaaggagcagatgctgggcaagggctatgagacggtggccgtgccccggctactcgaccaccagcatgcccacatccgcctacccgtctacagataaggcctgccctgcggacatacggacatgcggacagggcgcagagccgggaggcaggccgcagaacagggtgggcggctcgcaggggcgctcagccccaccctgtgcctgctgatgcccacaggggagccaggctggctgccgcctcgctgtggccggatggagggtggcagggcaacctcacataccaaggcccctccccaccatcggttgccccaggacacagtgagggcctgggggcagccactgacgcccatgccttcctttatctaagctggcagaggcagggagagagaaaccactcaaaaacaggaatggttctttctgggcctcctgggacaggggcccaggccaaggtggggtgcaggaggaaacaggcgcaccagagtcagggtgggggcagggcagcccccccaggggtcaggcagctgtgtctccccacactggctccccagtattctggaaaaggggtacaggaggccgataggaagtcactgggcccaaagtgtctccccaccagccaggtgaagaccactctgacagaggctccagggactataccagtccccctgttcctccttcccctacccccaccattccttcctaacacagagttgcacccccatccccattctccaaaccctggactaccatattcccccttccctccaatacatcttatagggctgctgggtacagttgttcaggctgtgcactgcacaagggcaccttgtccaaggagacaccactttcacccaaacttgtatatttattacaattttctgcatcttgaggaaggggcgtcattttcctgttcgcacaaaggcaccacaggggctaacagtgggcctgcaatcttagatcccatccttgccttcttcgagggatctcttgggaccctcctggttttaactgggaggcccagaccaactcctttcctgcaaaccaccctccaaggcctgtcccacacgatcaaggcagggaaagataggcaggagtcccctcacgaagtcctcaagtcctggcccctctggcgctctggaagcggtactgtatctctctccaaggcctggtcaagcactaagtgcatttacaaatctctgagaatgttttttttatactaaaattgaccattatattctactgtgagaagtgcagtctgcactatattgttttaaaaacgaagagaaagaagaaaaaggaaaacacagatggtgtctca

SEQ ID NO: 259911 - DNA, 1309 bp, Homo sapiens
  misc_feature (1309)..(1309): n is a, c, g, or t
ccgctgttcgccggcttcccctccccccacacccggggctcagagcaggaggaggaggggccggtgcattctcgccgctgttctttgcaacctgcaggggccggtgtatgtccggcgaggagccggggccgctgcgggtgcgtgcaacccccgaaggagacaatccctccacctcggggcgaacccgggggctgcaagccgcgggcgggcgggcgagcgagaggaagcaacaaagacaggctgcagctggggctggcgaaatggttgcctgtgtgctgcctgtgtgcctcccatgctgctgtgtgctggagatgtgtgctgccctttgtgagctggctgctgtgtgcctgatgcttgcatggcctttgatgctgtggtgccccgatgtgtggatgtgctgcatgctgccgccctgccttggactgttggctgatcaactgtgtgccacctgtgctggacagattgctgtctgcccttgatgctggcctctgtctgctggacccctctgatcactgtgtggtctgtggctgttgaacccacattgacttgagactgtgagcagcctctccccttcagccaccaccgactttccgggaagcggtgactgccacgtgcccggagcagacccaagtggaattaagcgcccagttcaagctggaaacaatggctgggcccccattttatacaccaagagcaccgtgggatagagagacaggcggagtcttagaaaagacacgccaaaaggggaacagggcgctcttacagttctacgaggcggacagggccctcattcgttgtcgcaggcacagttcttcctctgttggacagtagtttggtcgttctttcggggcagcaaacacggccctgcgatcacgggacccggcgggcagaagctggactggtatcacatagctgtgatggcttaccgtcgcgttttgacagcaaaccagcgttttgtgggtatcgacgccgcaccgttttatctcaggagcaaacactagctggaccactgagtattgggaggcagagattgtgacagacggttcaccacggggggaggtgtcaacgacacaccccaaactagatctttctagcaccagagtagaaaatagtccaggcgcacagaaccgcccactgcacaaatagagctttgtggtgaagtgggaaaactcgcacacgtcgccaagaagtgtgtcctttctagagcagtgcccccacagatttggctacttcgggtagcacaccgacttcgtattccattttgaccacagtgcaaactgtggtgacacccctccaaaaggaagcaatn

SEQ ID NO: 259912 - DNA, 2995 bp, Homo sapiens
gcggccgccgggctcccagcgcgggcggagagggcgccctgggagcggcgcgggccgagctgcagccttgagcggggccccgaggggaggcgcagcgccgcccgccggacgtggcgatcacgggccccggcgaagatgcgtcgcctgagcgcccgcgcggcccccgtccggggcgggcgtgacccctgctgaacggagacctcccctcccccccgacttcggacggcgcaggccggcgccaggatagccctcaccgacagcgccccttcccacccggagagaggcatcgacccccaaggagggcttcctcaggcagcctctgccactcctgcatggctgcgacccgtcgagcggagcgtcgtggtagctgagacctggtgcccttcgacggcctggctgatccgacccagtcgcagagcgcaccccactggggacccccagctcagccatgctggcctgtctgcagaggacccagaacgccccgggccaacacctggcctgcccgagcaagagcctggagctgcgcaagtgcgaggcggtggccagcgccatgcattcctcccgctacccgagcccagcagaactggacgcctatgccgagaaggtggccaacagcccgctgtccatcaagatcttccccaccaacatccgtgtgccccagcacaagcacctcagccgcacagtcaatggctatgacaccggtggccagcgctacagcccctacccacagcacaccgctggctaccagggccttctggccattgtcaaggccgcggtttcctcctccagcacggccgcaccagctgggcccgccaaaagtgtgctcaagagcgccgagggcaagcggaccaagctgtcaccggccgccgtgcaggtgggcattgcgccctacccagtgcccagcactctgggtcccttggcctaccccaagccacctgaggcgcctgctccaccacccggcctgcccgcagccgccactgccgcctccgtcatccccctgccgggccggggcctgcccctgccaccttccaacctgccctccatccacagcctcctgtaccagctcaaccagcagtgccaggccccgggcgccgcaccccctgcctgccagggcatggctattccccatcccagccctgccaagcacggcccagtgcccagcttccccagcatggcctactcggctgcagccggtctgcccgactgccggaaaggcactgagctgggccagggagccacccaagccttgacgttggctggggccgccaagcctgcagggtacgcagacagcggcctggattacctgctgtggccgcagaaaccgcccccaccgccgccccagccactgcgtgcctacagtgggagcacggtggccagcaagtcccctgaggcttgcgggggccgggcatacgagcgggccagcgggtcacccctcaactgtggcgtggggctgcccaccagcttcaccgtaggccagtactttgcggccccgtggaacagtgtgctggtgacacccaccagcgactgctacaacccagcggcggcggtggtggtcacggagctggggccgggggcagcccgggagctggctgggccccctgcagatgccctctcgggcctgcccagcaagagtgtgtgcaacacatcggtgctgagcagcagcctgcagtcactggagtatctcatcaacgacatccggccgccctgcatcaaggagcagatgctgggcaagggctatgagacggtggccgtgccccggctactcgaccaccagcatgcccacatccgcctacccgtctacagataaggcctgccctgcggacatacggacatgcggacagggcgcagagcctcgcaggggcgctcagccccaccctgtgcctgctgatgcccacaggggagccaggctggctgccgcctcgctgtggccggatggagggtggcagggcaacctcacataccaaggcccctccccaccatcggttgccccaggacacagtgagggcctgggggcagccactgacgcccatgccttcctttatctaagctggcagaggcagggagagagaaaccactcaaaaacaggaatggttctttctgggcctcctgggacaggggcccaggccaaggtggggtgcaggaggaaacaggcgcaccagagtcagggtgggggcagggcagcccccccaggggtcaggcagctgtgtctccccacactggctccccagtattctggaaaaggggtacaggaggccgataggaagtcactgggcccaaagtgtctccccaccagccaggtgaagaccactctgacagaggctccagggactataccagtccccctgttcctccttcccctacccccaccattccttcctaacacagagttgcacccccatccccattctccaaaccctggactaccatattcccccttccctccaatacatcttatagggctgctgggtacagttgttcaggctgtgcactgcacaagggcaccttgtccaaggagacaccactttcacccaaacttgtatatttattacaattttctgcatcttgaggaaggggcgtcattttcctgttcgcacaaaggcaccacaggggctaacagtgggcctgcaatcttagatcccatccttgccttcttcgagggatctcttgggaccctcctggttttaactgggaggcccagaccaactcctttcctgcaaaccaccctccaaggcctgtcccacacgatcaaggcagggaaagataggcaggagtcccctcacgaagtcctcaagtcctggcccctctggcgctctggaagcggtactgtatctctctccaaggcctggtcaagcactaagtgcatttacaaatctctgagaatgttttttttatactaaaattgaccattatattctactgtgagaagtgcagtctgcactatattgttttaaaaacgaagagaaagaagaaaaaggaaaacacagatggtgtctca

SEQ ID NO: 259913 - DNA, 1659 bp, Homo sapiens
gcggccgccgggctcccagcgcgggcggagagggcgccctgggagcggcgcgggccgagctgcagccttgagcggggccccgaggggaggcgcagcgccgcccgccggacgtggcgatcacgggccccggcgaagatgcgtcgcctgagcgcccgcgcggcccccgtccggggcgggcgtgacccctgctgaacggagacctcccctcccccccgacttcggacggcgcaggccggcgccaggatagccctcaccgacagcgccccttcccacccggagagaggcatcgacccccaaggagggcttcctcaggcagcctctgccactcctgcatggctgcgacccgtcgagcggagcgtcgtggtagctgagacctggtgcccttcgacggcctggctgatccgacccagtcgcagagcgcaccccactggggacccccagctcagccatgctggcctgtctgcagaggacccagaacgccccgggggaggcaggccgcagaacagggtgggcggctcgcaggggcgctcagccccaccctgtgcctgctgatgcccacaggggagccaggctggctgccgcctcgctgtggccggatggagggtggcagggcaacctcacataccaaggcccctccccaccatcggttgccccaggacacagtgagggcctgggggcagccactgacgcccatgccttcctttatctaagctggcagaggcagggagagagaaaccactcaaaaacaggaatggttctttctgggcctcctgggacaggggcccaggccaaggtggggtgcaggaggaaacaggcgcaccagagtcagggtgggggcagggcagcccccccaggggtcaggcagctgtgtctccccacactggctccccagtattctggaaaaggggtacaggaggccgataggaagtcactgggcccaaagtgtctccccaccagccaggtgaagaccactctgacagaggctccagggactataccagtccccctgttcctccttcccctacccccaccattccttcctaacacagagttgcacccccatccccattctccaaaccctggactaccatattcccccttccctccaatacatcttatagggctgctgggtacagttgttcaggctgtgcactgcacaagggcaccttgtccaaggagacaccactttcacccaaacttgtatatttattacaattttctgcatcttgaggaaggggcgtcattttcctgttcgcacaaaggcaccacaggggctaacagtgggcctgcaatcttagatcccatccttgccttcttcgagggatctcttgggaccctcctggttttaactgggaggcccagaccaactcctttcctgcaaaccaccctccaaggcctgtcccacacgatcaaggcagggaaagataggcaggagtcccctcacgaagtcctcaagtcctggcccctctggcgctctggaagcggtactgtatctctctccaaggcctggtcaagcactaagtgcatttacaaatctctgagaatgttttttttatactaaaattgaccattatattctactgtgagaagtgcagtctgcactatattgttttaaaaacgaagagaaagaagaaaaaggaaaacacagatggtgtctca

SEQ ID NO: 259914 - DNA, 828 bp, Homo sapiens
ctgctgccctgcggggcacagatctctgcccttcccattcagggtaaggagctcaggcagcgacagggatctcgggtcagggcagccttgatggcccattggggctgggctcagggtgcagcatggatcaaggttcaagagccccttgttctctcaggaaagccatcctgacatctcccctccaggggggctatgaggatgccctgggcgggagacagaccagtacttcagtaacctgggacacccatgtacccactggcatttcccgagcacccctctgtgtagatgcccaagatgaccaagtggggtcttcaggctgacttgcttacagggggccaccaccggccggaagcacagcctgctgcggggcacggagggagtgaggatctcacccagttgggggcatcagggcaggccccagagcagatgacccagatgccgagcagggccggggcatgtgtgatccatcagtccagcccccactcaagagccctggattctgtcccttcccatgaggccacagatgggcctcttgatgcctcaggccttggtcccctcattggtcgaataagggaaatgggtgtctgctttgagagtctctgatgttcttcggggttgcagggagactcccggggggaatggtgggaggcgaacacggagcagcccccaagtgacagagcaccccatcttcctcctgcagggacccagtcgcagagcgcaccccactggggacccccagctcagccatgctggcctgtctgcagaggacccagaacgccccgggccaacacctggcctgcccgagcaagagcctggagctgcgcaagt

SEQ ID NO: 259915 - DNA, 337 bp, Homo sapiens
aaatatgggcttggtggtgcatgcctgtgctcccagctactcaggaggctgaggtgagagggttactagagcccgggaggttgaaactgcaatgagctgtgattgtgccactgcactccagcttgggtggcagagtgagactctgtgtcagaaagaaaagaaaagaaaggaaggcagttaaaagaaaagaagaaagaaagagagagagaggaaaggaaggaagaaagaaaggaagaaagagaaagaaaggaagagagagagagaaagaaagaaaaagaaagaaggaaggaaagaaagaaagagaaagaaagaaagaaggaaagaaagagaaagaaag

SEQ ID NO: 259916 - DNA, 162 bp, Homo sapiens
  misc_feature (161)..(162): n is a, c, g, or t
aagggaaagattagggtcaagagtatgatttaggagactgtgcaccattcatatgcaagtggatgcacaattcctgaggcagtgccacagggagggatggagaggctggactcaagagtcagtgcaggagaatatctaaacttggtgcttgagcgatggcnn

SEQ ID NO: 259917 - DNA, 453 bp, Homo sapiens
gacgtcaaacgaggtcctgtccccgtggaactcacacgctaaatgtaagcaaatcatagcaagcctggagatgctccaagaggtgctggatgagttagaaggagcaattccttccacttagggaatcagataaggcctcacaaagatggcaatgtttgacctaagacctcggaagatgagtcctcagatgggaagggctcaataagcagagttgttacacaggcagcagcctggcaggagcaaagccacagaggacatgtggccccagtgggtctgagaaacccagaggacattggggtgagggagtgactggtgtagaagctggaagatcagagttacatcatgaatttcaggggccctaggcactttagccttcacggagctcttgctccattcaaaaaaaaattaatgttatgactatgttggtataaagatgaatgtaatccaggctga

SEQ ID NO: 259918 - DNA, 187 bp, Homo sapiens
tagagacagagtttccctctgttgcctaggttggagtgcagtggtgcagtcatggctcactgcagcctcaacctcttggactccagtgatcctcctgcctcagcattctgaggagctgggaacacaggcatgcaccatcacgccttacttagacgtttatattatgattttaagaagtttgtcttat

SEQ ID NO: 259919 - DNA, 1213 bp, Homo sapiens
ctattctagagggtccccctggatatttctggagtgggataaaggcccagactccatggtggaagttaaagggtatttccaagttaaggctaagacttgcttttctaactaagagaatgtgctcatgcattgcttgtgtagtagaaactagtttttagaaaagaaagcaaacttaagaaacactgactcctgtggagatgacttggcaccactctcctttcacagagcagagtctgaatggtcttcagagataggcctgtgggccagattgccatcccctatggaccagaagccaaggatctctctagtgatggtcagagggcccaaatggcagggatacccagtgatgtcaggaggaatagtacagacagaaggtgctaagcagacaattcaactgccatgttttgccaccccctgtgagcagggattaggtgttcaggccagtatcttgggcatgggggagcctttggccagaagaggtataaagctcagaagtttttcagtctgataactattgatataatttccatagtgtgagggagcggtatgctctacccttgtgtatttaaggcaggacagagaaattgaggatgcccctggggctagatcgatgatatgaccagaaatcaaaaagggaatgcattatttattgctgtgtaacactgttaagagaggaggtagttaagggatggataggcacatagagagggaaggtctcaggagaagggatagaaaggaactatgttcacaagaacaacggcaagacagtgcctatactgcctctacagttaataggaaaaacggaagaagttacccttaagctaggatgttgctcagaagtgaccatcccaactttggtgcgggcacaataaatcagcctaaatgtccctaatttaacccagctcattataatgtcattaaacatgacattagcattgtggttttagcacccccatgggttttgcttaggcactcatgggtaataaccaagatggagtccctttggcaaaacttaggcatgcacagctgtagtaccccaagaagaaaatgttacttctctcatctgggcaaaacccacagaagacttcccagcttctgccacataaaagacacagaacacagacgccttactggcaacctgctttcaagacccctgtctttgctgagagctttcctttttcccaataaattctactctgccctaaaaactctc

SEQ ID NO: 259920 - DNA, 281 bp, Homo sapiens
aggggaacaaagaaggtgttaatcacaaagcaatttaatttacataagcaaggaatatattaaacatctatttagaaatcatttgcatgaatgttcaatattcactttatttccagagtcatccatatgtaatctggattacttagaggctgtcacgttagccaacattaatgtataatgaaagcgcatcagtttaatataagcatccacaagtaactcccttagtattgcagcaagctcaatgttaactgcttctcccatatggtcacttgtggtcgacg

SEQ ID NO: 259921 - DNA, 191 bp, Homo sapiens
tgaatgtttttgtggctagagcctagattatggtggtttacggactccagcctgtcacttgcctgaggctgagcctcagtttgaccctctagaaaatggaaccacagcaagtacctccacaggtttgccaggtgggcatgaatgaagcaggggagcccagcaagagtttgtcagtttcccattggcaaatc

SEQ ID NO: 259922 - DNA, 399 bp, Homo sapiens
tcctttcttcagagtccgttgccacaattaaagaagaaacagctgcatttcaaagggattccgattccagaagcttaatcgtgattgacatgttcttattctaagctataagacactctaagagtcctttcttgggttaaaacttcaatcattttctaaaaaattatctcactatggattttattcattttctttgataactattctttgcattttttaacttgaaagatgctttgcgtttgcagtgaatatgagcaactacttccagtgaaagatttggatagtgtcagaccttctctagatgcaaaattgctaaattcccttttagtgccaaaatatgattatgaaatctgatgtctatcacataggtaattattcttcaataaactcgaaaggtta

SEQ ID NO: 259923 - DNA, 708 bp, Homo sapiens
aactcctggactcaagcaatttcttcacctcggcctcgcaaagtgctgggattacaggcatgagccaccgtgcctggccttaccagactgttttccacatgggtccctaacactgctgcccctcactaggcaggttgcgcaacatggacctccagccatcccctagttggactctcaggctggtaacagctctgtagtttcctgggacagagttcccagagtgagaagcaggccatcatttttgtctttccacagccctcgcttctgttgccctcaggctcaggagagagtgtaaggaatggaggttgacatgaacttccagaagagtgcccatgttcagctttgtaaatatcaccaaatcctgttccaatataagtacaccaatatacttaatacgtgactacaacagtgtgagatctccagttgctctatattatttcaacacttgatgttttagttcaaggggattttaaatgaaaattagtaaatggatcatgaggaaatatccagttgctatttaaaagaggttttaaccagaagttttggcaaagttttgttttgttttttaactactattcttgctgttttttctattcttctgttttttcttttgaatagatttttcctgccattgaagaagtggaaaaaagactgggtctatagtacgttcagacaaatcttaaacaaaagttaacatctgtgattctc

SEQ ID NO: 259924 - DNA, 432 bp, Homo sapiens
tgtgttttgttgcacgattttttggttgtttatttagttggctttttggaagacaaatttggaaaggggacctacacagaagtgctgacccacccacattcccttattatcattacagacaagaaggaattagcagagctaagaatggagtgaagaaaggcagtgtgataagcaccagcaaagagttgagagctgttgctctctaaattattatttgattattttaaaagtatggaagttttctagtcactgaagaaaggaggggaaagtgcacttatttttatatggagttacttaactaccacctaaacacatatgtggaaattgtttttgctggtgcaaagtattttaattagcaagaattcatatattgagattataattagagagctcaattcatatatttgctatcctgctcaagcctgacatggc

SEQ ID NO: 259925 - DNA, 553 bp, Homo sapiens
acatattatgcaaggtacttcttaggtgatttcctatgagagcaggtgctaacttgttcatcatacacaggctaggtttacaatagaaagtttgtagcaactattctaaactgaactctcacattatcttgaggaatgtcttcaagaagaaataaaatgtttatccaaaaaaaaagtttatcttaaatgtagaagtctaaataataagcagtacagcttctagcagggagatgggtcatgcatcttaaaatcttggtacatggctgggcttggtggctcatgcctgtaatctgggcactttgggaggctgagataagaggattgcttgacccccatgagttagagactagcctgggcaacatagtgagactccatctctacacaaaatttttaaaaattaactgggtgtggtggcacgtgcctgtagtcccaggtataggagggtgaggctagaggattgcttgagcctaggagttcaaggctgcagtaagccatgattgcaccaccgtactccagccagggtgacagagaaagacctgtctcttaaaaaaaa

SEQ ID NO: 259926 - DNA, 166 bp, Homo sapiens
acatattatgcaaggtacttcttaggtgatttcctatgagagcaggtgctaacttgttcatcatacacaggctaggtttacaatagaaagtttgtagcaactattctaaactgaactctcacattatcttgaggaatgtcttcaagaagaaataaaatgtttatcc

SEQ ID NO: 259927 - DNA, 1894 bp, Homo sapiens
  misc_feature (9)..(10): n is a, c, g, or t
  misc_feature (14)..(15): n is a, c, g, or t
  misc_feature (17)..(17): n is a, c, g, or t
  misc_feature (23)..(23): n is a, c, g, or t
  misc_feature (39)..(39): n is a, c, g, or t
  misc_feature (43)..(43): n is a, c, g, or t
  misc_feature (45)..(47): n is a, c, g, or t
  misc_feature (52)..(52): n is a, c, g, or t
  misc_feature (61)..(61): n is a, c, g, or t
  misc_feature (69)..(71): n is a, c, g, or t
  misc_feature (77)..(77): n is a, c, g, or t
  misc_feature (79)..(79): n is a, c, g, or t
  misc_feature (85)..(85): n is a, c, g, or t
  misc_feature (89)..(90): n is a, c, g, or t
  misc_feature (94)..(95): n is a, c, g, or t
  misc_feature (99)..(99): n is a, c, g, or t
tgagatagnntctnncnctgtcncccaggctggagtgcngtgncnnnatctnggctcactncaacctcnnnctcccngntcaagngatnntccnncctnagcctcccaaagtgctgggattacaggcatgagccacgactcccagcctgaaatatagattttaatcttcagcttgcattttgttctaaacaacttgttttcaataagaacgggcagacaagtttaagccaccatttgttggagcagatcatttattggtgtgttcagatggtactgtactagccttcctcttcccctccatcctcctagccatgtgcagggaattttctctttttgttggttaacactcttcctcatctggattgccttcaactatgtgacaacgaagaattcaagcaccaaaatagcagcagctacatatcctttgcatgacagtgtaatttcttctgccttaaggctgtgtctagcactgaaatcatagtctgtttacttcgatctggtgctacattacaatgggagggatttaactcttacttataaacacacaagggaattatttctcagctctgtttagattagaattagagatgaaattgtgcagttcttgttgctgctgagccaatcaccccattgagcaaaaacttaccttcctactttactagacaagcaagaatactgtgctgtcttttaaaatgttctgcaatataactattagaaccaatacagaaaatttttggtggctagtgagtataggcaattaatcttgaaagtttcccacttgacttgaatgtttgactttctcttcagatgctttctgctggggaaggagcacttctgaattaaagaattttgcaaaagaaaatgtggccagggatattatgtgcgtgtgtctaaaactggggattatcagtacatgctaagtgaatatgaggctttataaaccaatattttaaaatttcatgatcagaaaaagtaatctttaacaccattctcttacccgtgatcgcttagtaatcttcgtgtctatgaaattctacctctgaaatatctcttcagctgttcccttctctctattcccaattttatcttttagatcctattgtctcatctgaatttttagaagagcctactaatttaatcttctgcttctgatcctttccctatgttaactttctaaattatgaatataatgtcacaatttggctcaaatgtgattttaaactataaagtaatttaaactgtaagtcatataactagtttgatgataccgtaaaggtagatataagatattaatactactactcagagacccatgaatgtatctcagtgcctggcacagaataggcacttgataaatatttgcttaatgattagtaagctttccatcgttgggcttatgagaagccaacatttattgagcatctcctttgtggcacatgcgtcaagtctccagcacttgcttgatctttagctaacactgttgttttaatgattttctcaatacaatacttctctgtcttggtaaaaataataaagcaaagaaaataattcatttctgaagttgctttccttcacttgtaaaggtctgatctcctcccactatgcatatgtaccctttactgttaaggaaagctttgcatatgtagatatagaagaataagctacgtaaatactaaagatatgtcattctcccaaaggagacacaggtggttttcaatgattccttgcctcatgttgatgagtctgtagaattcagaacccatttggacacagctaatatccctgctcttggggtagaaaataaggacaccaagtcattggtagggaggtacaggcccttcctctgctgctgcagagagagaatgactcaagaaaattgggctaaaatttgttt

SEQ ID NO: 259928 - DNA, 439 bp, Homo sapiens
actttcagacaaagccacggcggtcccgcggccccggccgcctgggtccggatcgggaaaaacgaggggctgggtcctccctactcggaccccatatccccagcacgcgagaaagagcgagaagccacgcggcggctgggccgagcgtggggtgtcggcggagacaatgaaacttgcaggcgcacaaacaaggcgctgagcgtgtttcttgacaacgtgccagcagcgtggagaggctcgccccacaacagcccctcgtgttgtgtctagcaggaaaacagccgctgccgtttcagacgcagcctcaacaaagagcacggccgccactccagcatgagagcccctgggcggaaaagtccaccaagtgactccgcgcggcgcggcccggccagcacgtttccccggactcgcgtcttctggtgcgcgcagcccgcggccg

SEQ ID NO: 259929 - DNA, 167 bp, Homo sapiens
gaccacaaagccattttaagaaagaaccaaactgaacttccagaaatgaaaatttactacaggaatttcagaatgcaattggaagtgttaataacagaatagatcaagctgaggaaggaatctcagaacttgaagactgctcctttgaatcaatgcaggtagacaaa

SEQ ID NO: 259930 - DNA, 833 bp, Homo sapiens
tactttctacatttgttttatatttgtctgtaaatatacatatgtatgcatgtacatagtatgtacatgtatataaaaacatttttccttaaccatgaagattatttgcagacaccctgagtattccttcctaaatacttcagcatacattttctaagaacaaaaacattttatttcttaaatacaattgtcatatttaggacattgaatattgataaatatttatatacatatacacttaaaaaattttttttatttaggagatgggatcttgctctgtcacccaggctggagagcagttgctcaaatcactgcaactgaaccgagacttcaactgttgggttcaaatgatcctccccgctcagcctcttgaatagctgggactacaggtacacagcactgcacttggctaatttttaaatatttttgtagacacggtgtctcgctatgttgcctgggctggtctcaaactcctgggctcaagcaatcctcccgccttagccttcgaaagtgttgagattacaggcgtgagccactgtgcccagccaacatacatacattctatattcaaattgccctaattgtgacaataatgtgttataacttttttttagatctttgctgttcaccttcaagctgaggacttaccacttttcttcgattatgaaaaatgctcagccaatagctattcattaaacaaatatttatgaggtgtcaacaactgattgttaatgttctagggtgatacaatgcttatcaaaacatgagtttctaccttcatggttcacactctagtcagggtcaaacagtaaatacacataacttatgtagta

SEQ ID NO: 259931 - DNA, 608 bp, Homo sapiens
tactttctacatttgttttatatttgtctgtaaatatacatatgtatgcatgtacatagtatgtacatgtatataaaaacatttttccttaaccatgaagattatttgcagacaccctgagtattccttcctaaatacttcagcatacattttctaagaacaaaaacattttatttcttaaatacaattgtcatatttaggacattgaatattgataaatatttatatacatatacacttaaaaaattttttttatttaggagatgggatcttgctctgtcacccaggctggagagcagttgctcaaatcactgcaactgaaccgagacttcaactgttgggttcaaatgatcctccccgctcagcctcttgaatagctgggactacagatctttgctgttcaccttcaagctgaggacttaccacttttcttcgattatgaaaaatgctcagccaatagctattcattaaacaaatatttatgaggtgtcaacaactgattgttaatgttctagggtgatacaatgcttatcaaaacatgagtttctaccttcatggttcacactctagtcagggtcaaacagtaaatacacataacttatgtagta

SEQ ID NO: 259932 - DNA, 386 bp, Homo sapiens
cacttatatgtagaattgaaaagagtagagcacatagaagaaaagagtagaatggtggttgccaaggactgagggggtggggaaataaggagatgttggtcaaagggtttcagttatgcaggataaataatgtgtagagctaatgtgtagcatggtgactataattgataataatatattgcataatggaaatttgctaagagagttcatcttaaatgctgttaccacaccaaaaaatggtagccttgttaggtgatggatatgttaattaccttaatagtggtaataatttcacaatgtatacatatatcaaaacatcacattaaatatatacgtaatgtcccttgacttttgaagacagctatgatagatctcttgagtttatt

SEQ ID NO: 259933 - DNA, 414 bp, Homo sapiens
tccatcattgttaataaacatgaaatttcaagcttatagttacaggagagacggtgttgatgcggttagaatatggaataggctatggggatttcaaggtcctattttcagctctgcctttgcttcattccagttttgattaagatatttagttttcttatacctgtcttacccgtttctgtagaaatagagattctgagaaaattcttacctattcaatttgtgaagaaaacagtataggatataaaataaaagttttcttaaaaatgtctttacagaccaatgaattttttatgtaatatagtgactataagagaagagaaagataatttattttgtctttatcattatttccgattttttaattttagtcctgctggcttagtatcgtgagaaaatgtgttctaaacccca

SEQ ID NO: 259934 - DNA, 508 bp, Homo sapiens
aatgaaaacttcattttcgtatttttcagattggcatcctactaatttgacccttagtgatgagacttgtcagagatccaagaatctgaaagttgatgataaatgtccatctgtatcaccatcaatgcctgaaaatcagtcagcaaccaaagaactgggacagatgaacttaacagaacgagaaaagatggacactggagttgtacttctctcagggaatgatactctccatgacctgtgccaatcacagctaccagaaaacaaagagagcaaagaagcagaacaagacttggagctgacatcagaggaagagcaagaaagacttaaaggatgcgaaaataagcagccacagaaaacgtctcaagaaccagaaatggctaaggattgtgatagagaggatatacctatatatccagtacttcctcatgtgcaaaaatctgaggaaatgtggattgaacaaggcaaattagagtggaaaaaccaattaaaactcgtcataaatgagtta

SEQ ID NO: 259935 - DNA, 519 bp, Homo sapiens
ggtgagcagcaggaggcatgtagagaggatgggcagttggggagcaatcctctctcattcccagagggagcgtggctggtttacccaacacctaacgaggtcagcaaaggttgcctctgggttctgactccgtctatttttcagcttctgattttattcttaaattctgttctgatgagctgcagaggaggaggcctttggaagtaagcatttctatattcgcacctgtctcctttttagaaattaaatgcaaccatttgtcatatcttaaaatcagtttagggtttaattggccataaatttgatcatattttgccttcatactctagacacatagaaattattttctaaagtatcatttttttttaaaaaaatgtaatactgctcaaaatactatgatattatgctcaagactttcttataaatgacgtcctaaaagaatggcagcatttggcactgcttgttttttatccctacatttttatactgccttgggacatgacaattattatttaaatc

SEQ ID NO: 259936 - DNA, 1313 bp, Homo sapiens
  misc_feature (1303)..(1306): n is a, c, g, or t
  misc_feature (1308)..(1311): n is a, c, g, or t
  misc_feature (1313)..(1313): n is a, c, g, or t
cccgcgctccccgtcaggttcaaagccccctcccgcctaacgtcttcagcccagccaggctgcccttcttccctgcggagggagggcctgggcggtcgcgttggcgggagggaggttacctttcccagtctcgctctggccgcctgagccaggaggaagcagcggcgaggtctgcgggaggcatggcgggagctccggacgagcgccggcggggccccgcggcaggggagcagctgcagcagcaacacgtctcttgccaggtcttccccgagcgtctggcccaggggaatccccagcaagggttcttctccagcttcttcaccagcaaccagaagtgccagcttaggctcctgaagacgctggagacaaatccatatgtcaaacttctgcttgatgctatgaaacactcaggttgtgctgttaacaaagatagacacttttcttgcgaagactgtaatggaaatgtcagtggaggttttgatgcttcaacatctcagatagttttgtgccagaataatatccataatcaggcccatatgaacagagtggtcacacacgagcttattcatgcatttgatcattgtcgtgcccatgtcgactggttcaccaacatcagacatttggcgtgctcagaggttcgagctgctaaccttagtggagactgctcacttgtcaatgaaatattcaggttacattttggattaaaacaacaccaccagacttgtgtgcgagacagagccactctttctatcctggctgttaggaatatcagcaaagaagtagctaaaaaggctgttgatgaagtttttgaatcttgtttcaatgaccatgaaccttttggaaggatcccacataacaagacttatgcaagatatgctcacagagactttgaaaaccgtgatcggtattattcaaatatatgagcacaatgacatttttatattacagagcttccatcatcatgaagaaaaaaaaatttggttctcaagtgaacaaacatataaaatgtaaacaatccctacaatccagataaaacagagaagactgtgattctagcatattatcagaaaaagtaactatggcaaaaaatgaaactgctttaaactccaaggcagaaattgtatctttatagctaaccatttagtaaataaatacattacatttttgtattttagtcatttgtttttattacatgtgattattttaaaatttgattatgaaacctgtgaagtgtgctcttccatgatgttgataggtgaccactgttggtatttacattaaatgtaaagaaatgtgtactgannnnannnnan

SEQ ID NO: 259937 - DNA, 1174 bp, Homo sapiens
cccgcgctccccgtcaggttcaaagccccctcccgcctaacgtcttcagcccagccaggctgcccttcttccctgcggagggagggcctgggcggtcgcgttggcgggagggaggttacctttcccagtctcgctctggccgcctgagccaggaggaagcagcggcgaggtctgcgggaggcatggcgggagctccggacgagcgccggcggggccccgcggcaggggagcagctgcagcagcaacacgtctcttgccaggtcttccccgagcgtctggcccaggggaatccccagcaagggttcttctccagcttcttcaccagcaaccagaagtgccagcttaggctcctgaagacgctggagacaaatccatatgtcaaacttctgcttgatgctatgaaacactcaggttgtgctgttaacaaagatagacacttttcttgcgaagactgtaatggaaatgtcagtggaggttttgatgcttcaacatctcagatagttttgtgccagaataatatccataatcaggcccatatgaacagagtggtcacacacgagcttattcatgcatttgatcattgtcgtgcccatgtcgactggttcaccaacatcagacatttggcgtgctcagaggttcgagctgctaaccttagtggagactgctcacttgtcaatgaaatattcaggttacattttggattaaaacaacaccaccagacttgtgtgcgagacagagccactctttctatcctggctgttaggaatatcagcaaagaagtagctaaaaaggctgttgatgaagtttttgaatcttgtttcaatgaccatgaaccttttggaaggatcccacataacaagacttatgcaagatatgctcacagagactttgaaaaccgtgatcggtattattcaaatatatgagcacaatgacatttttatattacagagcttccatcatcatgaagaaaaaaaaatttggttctcaagtgaacaaacatataaaatgtaaacaatccctacaatccagataaaacagagaagactgtgattctagcatattatcagaaaaagtaactatggcaaaaaatgaaactgctttaaactccaaggcagaaattgtatctttatagctaaccatttagtaaataaatacattacatttttgtatttta

SEQ ID NO: 259938 - DNA, 495 bp, Homo sapiens
cttctccagcttcttcaccagcaaccagaagtgccagcttaggctcctgaagacgctggagacaagtaggagccatgacctggaggctgtggttccacagaatgggtctgagaccgggtgggcgaggaagggcctgggcaacacctggccaggggcttcaggttcagcacagagtctagacagactgggcatcatgggggctgggttgggagcctgaggctcagtttccccactagaggtggcgctgagacccttttcgtcgctgtttttggcttgtggaatgaatttgtctgcccttttttgtcactcactgttgtgacagatcctccgatttcttacataagttatgcagccacactgtgacttcagggtaagggtgaggccaagttttaaagtgccagccaggttaattaaggcacacaaaggctgtaaaaatgtaaaaatgtaattaaggcataccaaggctgtaaaaatataaaagcagttttgcaaacc

SEQ ID NO: 259939 - DNA, 427 bp, Homo sapiens
cattctcccttctctctccttctccttgggcttccctactccctgagacagaacaatgccaataaataacctttcagtggccttgatgtattcaagagacaagaagaatagcatgtctctcactttaaattaaaagttagaaataggctgggcgtggtggctcacacctgtaatcccagcattttgggaggctgaggcatgcagattgcttgagcctaggagttcgagaccagcctgggcaacatagtgagaccctgcctctacaaaaaatacaaaaattagctgagcatggtggtgtgtgcctgtagtaccagttacttgggaagccaaggtgggaggattgcttgagcccaggaagcagagcttgcagtgagctgagatcctgccactgcactccagcctgggtgacagagccagaccctgtctc

SEQ ID NO: 259940 - DNA, 466 bp, Homo sapiens
cattagttaggggctttctgggcaaagggtaggagtctggttaggagcaggccctcccaaagaagatgaccatgtggtggttctcaaccccaaccacacatgggaagcccctgaggagtgttcaggccccatcgcatttagccagacactagggaaatggggtatcagcagtttttaaaagctcccaggtgattccaatgggcactgcatacctagactctgcagaggagtctgcacctgaggccagacactcgcctaagcccacactccttcatataacccttggttctttcagagcccacctaggcatgaatttgaagtttaccttcattttctctacattcacaatgacattactaccccaccgcccaccccatccaagttgtcgagagctgcattgtccagaagagataaaatgtgatacaaagttgagccatatgtgtgattaaaaattttctagtacgta

SEQ ID NO: 259941 - DNA, 397 bp, Homo sapiens
attagcatagccttgcaactctaggaggttttaacttcatcaggagattaattacatcagaaagtggtaccgtctggagaggcttagtcaaattttacagttcttcctctgaaagcctacctagtgtggtggaaacatgatctttgtaggcaaatacgtttgccctgattctatattcttgaccttaataaatggcactaccatcagtcctgcctgtaatccttgtcttccttcctgtccactatttcccaataaaatcagtcaccaaatcctgtctctccctgaaactgttcccatcagcatacaaattatgttctggtatccttcacatccctctccaattaccatgccaattttttaaatttccattcatagatttctacctgtaccaactcag

SEQ ID NO: 259942 - DNA, 763 bp, Homo sapiens
tgtgaaaagatacatgtcaatgaaatggctgactaggaaacttcaagccatttttttctagaaagacaaaataaatgagcaaaaattagatgaattcactttataagaactctggaaaacagtcaaatgtttacaacaaccaagcaagtgaccaattagggaaagcccaccttaaaaatgataggaaattgcatggcaattttacttattcttgctcaatcccctccccatgtggtgtggtgttgtggccttggtatcaaggaagcattacctggttcctgctcctctctcttgaactgcagggagcagattagcactatttgcaacatttcaacctatctatatgctatctaaagaaaagatgtttgtcacatctaactcaaatctgaagcagggaaaagcagtaaccaatgattatgatagctataaggtaaaaacagacccacatatacctgttgcaagagataatggtagcatcattctacagaccatctaagatcctgaggaaaagctgaagtaaaattctttggaagactaagaaattgaaaagcagccatgtattagggataactgagaaagctacatgcagatccagtcaagagatatgctcagaaacattctgaaattgcttaatgctttcaccttggcctgatccctagactcagagcatgcacagctaatcaatgataggctgtcctggcaaaatggcagtctgaaaatactcacagatttatatatataaatatatcacacagcatacaaa

SEQ ID NO: 259943 - DNA, 385 bp, Homo sapiens
gagactcagcgagtctgctctttccattgtcttctgcctgctttattctagccacgttggcagctgattagctggtgcccacccagattgagggtgggtcttcttctcccagtccactgactcaaatgttaatttcctttggcagcaccctcatagacgcacccaggaacaataatttgcatccttcaatccaatcaagttgacactggatattagccatcacaatactcttaacatgaaaatctttcatgtttaatctttcatgttttcatgtttaatctttttgaaattaaaagccaacctctttgattttacctcataatgttcaatagattcccaaaactaaagaagaattgcttcttcataaaagatgcgttgcttttta

SEQ ID NO: 259944 - DNA, 214 bp, Homo sapiens
gcggccgcctactactactaaattcacggccatactggatattagccatcacaatactcttaacatgaaaatctttcatgtttaatctttcatgttttcatgtttaatctttttgaaattaaaagccaacctctttgattttacctcataatgttcaatagattcccaaaactaaagaagaattgcttcttcataaaagatgcgttgcttttta

SEQ ID NO: 259945 - DNA, 462 bp, Homo sapiens
cgctttaatgaaaacaaactttaattatgacactgattctctttcacctgagtacatcagaaatttaagtgttaaaatgtgtttacactagtgcaaaacatctaaagtagatgtatttgagaaggtcttaaaataggaaaacttctgtttattttttcacttgaaattgtgttttgtaccttagtatttcttgtaaatcttttctgaatggaaaaaatgtttcctcttttgcacattttctaatattacctttcttagtagaatattaaacgacaaaagatcatataatatgtatgtgtataattgcaaggatgaagtgtgttcagatgatcaaaaaatttatcagcttatatttctccaaagtggaacaaatactgaggaagacggggagagaaaaagaaactgggaacaatactagagccaaactaaagcaaacaaaaaataaaaatatttcacaaaaca

SEQ ID NO: 259946 - DNA, 228 bp, Homo sapiens
tgcacctgccacccgaggagttccaaagtttgcctcagggatgtggtgtggagcccagagcctccagggtggaccaggttctgcccctgagtcgtaccaggaggctgagcccagccatgcagctcagctgctccagatgcctgagcctcagaaaccgggagacagcgatgtctattgtggattctcgctccagcctgggtgacagggtgaaacgccatctcaaaaaat

SEQ ID NO: 259947 - DNA, 668 bp, Homo sapiens
atcagatctatcatttatggaatgcctaccaggtgcccagcattgtgcttggtatttatcatcactaatttatttattactaatttaattgccaccaaaaccttatgaaaatggatattatccccattctagacatgaggagactgaagttcagaaagattaatgacttgttcacactcatccatttgttgtggtgccaccaggatttgaatccaagtctgactctggaatccatggtctctctactgccccaacacagcatcccagtatgccttgaattttctggaacattactgatttcaaacacttgtcccttaggactcctgagtgtacacacacatatgtcagattatttattctcaattatgtttagaaaagagagtacctggcaggggacagtggctcatgtctgtaatcccagcactttgggaggcggaggtggacagatcacctgaggccaggagtttgagaccagcctggccaacatggtaagaccccatctctactaaaaatacagaaattagctgagtgtggaaatgtgtgcctataattccagctactcgggaagctgaggcagaagaacctcttgaacccagaaggcagaggttgcagtgagctgagatcacgctactacacttcagtgtgggaaacagagagaccgtgtctca

SEQ ID NO: 259948 - DNA, 524 bp, Homo sapiens
gcgagtcacaagacgaaaataaaccttttaatttgtgagcatggtagttcacagatgtgaagaaagtgaagtgaaataattgttccacttccatgaaaaactctgaaaacaaatctaagggtaaaattcaggaaaagtttgacattataatttgctcttggatcagtttttttctcttttctctttaaacatgtatttattgatagtttgaagaaaaatgttgtatgcattaaataaaaatcaaaagaagccaccatactaatgtttgacacatattactaaaattaactacaaatctattgtttttaggttgatttaatatgaatatttaagtaaataattattatgcttctattttaaaaataaggagactaaaaaccagtacaccagcttacaataaacaatttaagagaagtaaaatgccttattaaattatctttataatacccaaattactttaagatactttccttttgactgcagaggttttaattctttcctttcttggcttccatggcaccact

SEQ ID NO: 259949 - DNA, 640 bp, Homo sapiens
  misc_feature (176)..(176): n is a, c, g, or t
  misc_feature (180)..(180): n is a, c, g, or t
  misc_feature (263)..(263): n is a, c, g, or t
tcctctgtcaccagggcggctgggctcccgcagtcctgcagaccgcgcccgatcccggcgacagggcgggcggacagccgcgcatccccggggtcccgccgagcctgggcgcagagagccgggaggaagcgttcgctcgcttcgccttgctgctgggaaactgaacgaagggcccngagnagagaaggttcttgagttcatgtaagaggacagtcttaaaacggaagaagaaaaagaagcagttcagtctttgggagagctgnctccttgtgagtgctgcaaaggcctggaattcatttatgacagaatagatctagaaaagtccaagcatgttttctagagtggtgtagccctgtgctgcctccagtgaagagtctcttggtgttggcttcgtgcttccggagggaccatggcaacctccagaggggcctcccggtgtcctcgggatatcgccaatgtgatgcagaggctgcaagatgagcaagagatagtacaaaaacgaactttcacaaaatggatcaactctcatctggccaagcggaaacctccaatggtggtggacgatctttttgaagacatgaaagatggtgttaaactgcttgcccttctggaggtcctgtctgggcagaaactggtaaga

SEQ ID NO: 259950 - DNA, 308 bp, Homo sapiens
ggatgggcatggatcacacattgtatttctgtctcagctctttggaaagaggggaagacataatcttcctgctaatgttggatattgcattgaaacgccttttgcgtttcttgcctcggttggaagtcacaaagggattgaacttcattttggctgctcctgcttcggtgatggccgcaaaagggaagagaagggtttgtatttttaaggaaggtctccttctttccccacgtatgttttagttgtctgaaatccatctggctctgccagtttccatggaactaaacgtgacaagataaagagtagag

SEQ ID NO: 259951 - DNA, 785 bp, Homo sapiens
ttttctcttttttcatgtcacaatgagctataatttgagctgcttttattgttccctaaagactttggattactctgtatcacaaacactgaaatccaattcgtatttttttggcctttggggaagtggaaccatgggtgtgtttgtcatttttagcagtcattggagtagggccaaagctccaggagatactaaaagtgtctagaattgtctgattggctgttggaattaactgttaaacaaagcagccagtaactgaacaccggagaccttcttgaactccagctgggtgggagaccttccagtgtgtctggcagctctgaactaggacagaaaggtagagattcaaacagtggactggtgacaaagcagctgataaaagcactctcatctccatcctttgtctgggagtctcgccttgccttggaatcacttcctctctttttccctgcactggtttgtgccagcgctgtcctgcctggtcacatttaccagctagcggatgagaaactcagaagtgcggggctcatgttccataatgaattgaatccgggactacaggctgcctgatacacaaatgaattttgttttgtggattgaaaacaggaataaggaaagataagttttggacattgacttagtctactcaatctttcgtaggtaaggtgattcttagagagagttcagagaaagtgcctgggtttatcatttatctttttctaaggtatttgattttatacacatttcatacacattaaacaaaaccagtttttaaagcaccactt

SEQ ID NO: 259952 - DNA, 166 bp, Homo sapiens
cttattttcaaattccacaaggacatatatgccaaattaggttaactttgaacaatatattctgttatggaccaggcattgggttacctgctagggatcccaagatgaatagaaacagttctttgaatgtgaagcactcacaatgcaatgggagctcagtgcaatg

SEQ ID NO: 259953 - DNA, 437 bp, Homo sapiens
tgaaacatgtgctgtgtccactcagggttaaatggattaagggcggtgcaagatgtgctttgttaaacagatgcttgaaggcagcatgctcgttaagagtcatcaccaatccctaatctcaagtaatcagggacacaaacactgcggaaggccgcagggtcctctgcctaggaaaaccagagacctttgttcacttgtttatctgctgaccttccctccactattgtcccatgaccctgccaaatccccctctgtgagaaacacccaagaattatcaataaaaaaataaattaaaaaaaaaaaaaaaaagaaaatgaaagctgcaatagaaactcataaatgaaaaaattatctcctgaccatttttgagagaatgagagacatattctgctcagtgtaaaagtggttattaaagttattttgaaaaatttcattta

SEQ ID NO: 259954 - DNA, 681 bp, Homo sapiens
gagagagctagtctcgagttttttttccagaagccccacccaatagcatttcacttacatctcatttgttagagctgggttttcgtttgtttgtttgtttgttttgagatagggtctcactctgtcgcccaggctggagtgtagtggtgcagttacagctcattgcagcctcaccctcccgggctcaagcaattatcccacttcaacctctaagtaactaggaccacagttgcgtgccattatgtctggctaatttttgtagagatggggttttgccatgttgcccaggctggtctcaaactcctggcttcaagtgatccacctgccttggcctcccaaagtgctgggattacaggcatgagccacaacgcccagccagagctgagttttgagaagcatttctggctggccacattgccacctcaatcagaggggttctgttacaaagtgtcacgggttgaattatgttccccttcctgccctctgccaaatgcgtatgttgtcctaacccccagtacctcagatggggaccttatggggatctagggctgctgcaggtataattagttaagttaggatgaggtcatgcaggagtaaggtgggcccctaatccactatgcctggtgtcctatagaaagaagaaatgtggacacagatccgcatgcagtgagatgatgtgtg

SEQ ID NO: 259955 - DNA, 377 bp, Homo sapiens
tattggttacctttggtggggaatttattggctcagggcagcaatgagagtgagaatttttcacatatatacttttttgaaccattttaatttaaaaccatatggtatataatatcaattcaaaaatttaaattaaagaaatgtacctcctaaatatattatagtcatacaatggaacacttggcaaatcttaaaaagaatgagctatatatcccgatgtacaaaaatctcaaagaaactggtgtggtagtgtgtacctatagtcccagctacttgggaggctgagactggaggattgcttgaacccaggagtttgagtccagcctgggcaagatagcaagacccccacctccaccccacaattacctctaaggaaa

SEQ ID NO: 259956 - DNA, 382 bp, Homo sapiens
gcccgttccatgcgtgccgggggtcggggggttgactcgagttcatcgaacccagcaagcctcgagatccaacaatgggctcggaaatgaggagcgaaaaaggaaagagaggcgcatgggcgtaggggggaggttgactgaacaccctcagaataaaagccagaaaccagggctgggagcgcagatcacgtaacctctacagacaaagcaaagagcccccgaagaaggtgctgggcgaacgcccccagtgctcacgcccgcagcagcaaaacgccaagatttcagcgctgattgtccccctccctttaatgccaggccccgccctgtcctatgaagcccggccacccggtttggcatggcaccgtaaagacgtgacacgccg

SEQ ID NO: 259957 - DNA, 491 bp, Homo sapiens
atacatgggcttgtctcatctgtacagcacccataggaggcaggtctcctcaccccatcctacaggggaggacaccaggcacagagaggcaagagcacaggccaaggtcacacagccagaccctgtggggaagccggattggaacccaggcagcctggcctcagagtcagcactccttatgcagtttcagatccctgtgccttgcagctcctccatctagttcctctcctctgagttccagccacagcaaccagcccttcctcgggacgccccaaagtgaggcggtgagccgccacatcccacagcctccccagagcctgggtctcacttcattgcccaggcaggagtccatggcgcgatctcagctcactgcaacctccacttcccaggctgaggcagaagaatcacttgaacccaggaggcagaggttgcagggagccaagaacatgccactgcactccagcctgggcaacagagcgagactttgtctc

SEQ ID NO: 259958 - DNA, 1125 bp, Homo sapiens
atacatgggcttgtctcatctgtacagcacccataggaggcaggtctcctcaccccatcctacaggggaggacaccaggcacagagaggcaagagcacaggccaaggtcacacagccagaccctgtggggaagccggattggaacccaggcagcctggcctcagagtcagcactccttatgcagtttcagatccctgtgccttgcagctcctccatctagttcctctcctctgagttccagccacagcaaccagcccttcctcgggacgccccaaagtgaggcggtgagccgccacatcccacagcctccccagagcctgggtctcacttcattgcccaggcaggagtccatggcgcgatctcagctcactgcaacctccacttcccaggttcaagagattctcctgcctcagcctcccaagtagctgggattacaggcacatgccaccacggccggctaatttttgcatttcaagtagagatggagtttcaccatgttggccaggctggtcttgaactcctgacctcaggtgatccgcccgccttggcctcccaaagtgctgggattacaggcatgagccaccacgcccacctgacattatagcctctgctttatcttcactgcagagtcaactccagaagaaaacccctactagatgcaagaagaatgggcatcgctaaccagcccgtttgctgatgtatggcccctatactttcgttggtttcctggtttctctttgcaggcaattatttaaccctgtgatggaacaaagcagccaggaagcagtagggttgccgtggttggggctggagtcttagcagtcagcctggaggagctgcgggctcatgtcagcactctgggagaaatgagcaagcttttgggaggaggaaggcaaatccatcctcacccgggctgtgagcatgccactgggctcgaggcgaatggggaggaaatcaaagtgtcagctcgtgttaggaaaccgcacatgatgcttcccagtcctggccgtgcttttaaaaattagccaaataaaaatggttgaagtcatttcagtctgctctttatgactgctaactagcagaaaaacgtgtcctccctggaagcatgggcttaatgagcccagc

SEQ ID NO: 259959 - DNA, 311 bp, Homo sapiens
ttattgaaaaataccgcctaggacttcataaaaatttacttggacaaatcactcttaacactgctaagcctctattttcttttctgtgaaacaggactaatattctaccatacttcctcatagaatcatgaggattaagaaagaaaacttctgtaaaatgcctaccatagtggctgacacacagttttactatgatttgaaagcctatcattaataaatccaaagcgttcctgtcaagagcacccactagacttccaatgaagccatataaaccaaggaatccagccaacgggccctgaaattcttttaat

SEQ ID NO: 259960 - DNA, 567 bp, Homo sapiens
  misc_feature (557)..(557): n is a, c, g, or t
gcagtagaagctcctgctagccttgcaagagcaaactgccatgttgtgggagagggccacatggcaggacacggcaggtggcctctgggatcgagcctctaactgatggatgcagtaaggaactgcattctgccaacaaccatgtgaaccctgaagacaactccaagctccagaaagaaaggcagcctgactgacgccttgatgtcagctttatgagaccctgagcagagaatccagccatgctgcacctagacttctgacccacagaatttgtgtgctaataaatgggtgttattgtaagccactgagtttgtgatcatttgtaacacagcaatagaaaactaatatactgccaggcgcggtggctcactttgggaggccgattttcctctgctcacccccctccgccacccagtccccactccagataaaacaatctgctcacccaggctggagtgcagtggcgcaatcttggctcactgaaacctctgcctcccgagttcaggagaatggcgtgaaaccaggaggtggaccttgcagtgagtcgacagtgcganctccgtctca

SEQ ID NO: 259961 - DNA, 370 bp, Homo sapiens
ttaatggcaacttgagatcaatgctaattccttacataattctgtttagataaaaaaatctgtcccaaagtgctgggattacaagcgtgagccactgcgcctggccacaactggctaattttttatattgttggtagagatggggtttcaccatgttggccaggctggtcttgagctcctgacctcgtcatccacccgccgcagcctcccaaagtactgggattacaggtatgagccaccgtgcctggccccgaatgaaattttaagtatgggaaatatcacatattccagttcaattggatttggggtaccaaagagctaactgcttctttgtacacttggttgctgagtactattaggaaaaacaaaa

SEQ ID NO: 259962 - DNA, 422 bp, Homo sapiens
gttttgggaggaaaacaacagaggcaaaatggcattctcatcacattaaatcaagggtacttactgttaacatgatttactactgtccttgatcccctggctaagttggtgttgccgtatttctccactatgaagttacgcttcttcccttttttcattttgtggtctttagaaggaagtcactatgcaaagctcacacctcatgttccagaagctgcttttccaaggagtgaatatttatcctccacccttttgagtgtggagcatttacttaaattgtttggatttatgctctgcatgagagacttatctattatcttccattttaaaatgtatttaatcatcctatcagtatggactcatgaatatggatattattttatactatgaattatagtccattactactctattttgttgct

SEQ ID NO: 259963 - DNA, 272 bp, Homo sapiens
acagtaaaatgttggtcaatggattgaatcatttgaaagaaaaagaacgtcaatatgaaaaagagaaagcagaaagagaagcttgaagtagaaaatgccatgatgagaaaaacgattaaaaaacagtatgaccaaattgagcggcttgagaaaatcctgcagcgttcaagtttgatgctgccaggtgttcaagagctagatgaaggtatgttgccaaaatttatgaattaaattcaaatcattgatttctgaaataaactgtaagtagtgaa

SEQ ID NO: 259964 - DNA, 446 bp, Homo sapiens
caaagaaatggattcttccttagtgcctccagaaggaatgcagccctgctgacttcttgaatttagcccagtaatatccagtttggacttctgacctgtagcaaggagtaaaaagactttggcgttctcagaagaaaaccaaatgagatcacacgaatgagactgctggagcaatctaatgcaaatatctactacagattatcaaaaggaaaaaaaaaggagcttatatcatagttgagaggttctcaaacacaaactggtgccaaaagtgacaaaatgagaaagataagtattgtgcaatgatcatatctgtgcatggtatggtatagacagctgatttgtaatcagtacacttgcatgattttatgaatttccagtaaaactttgccaaaggaaaccttcattttattgcttgttcccacaataaattagagcttatcagcaaa

SEQ ID NO: 259965 - DNA, 562 bp, Homo sapiens
ttcctgaggccagatgtggaggcttttcttcagaaatctcctggtcagccatgaataatcactactgtgcaagaggatgagctccggcctctcttagtcacctttgagtccatctcagctactgaaatgtctgtcctatggagtgggaggctacccggatgagaagaggaatagaaacagcacaaggaccacgtgaactctcccgtactgaaccatagtacaggtcctacagggaagtttgccttgtttccgaccccactcctgaatgtatgacaggcatttgctgagaacaaaggctaccattaggcatcgcggctgatgctgtgagagtctaaaggatacactttctaccaggaggctttccgcctaggaaaggggagacatgaatctaaatgcactagatgagagagctgtgtagatgcgcgtcttcctcactggtctcagtcattttttaacctcccgcttacccacagtactgcacctggcatgcagatgatgctcccataatgtttggtaagcattacatgcaaaatacaaaagacagttcataggaggaagagaa

SEQ ID NO: 259966 - DNA, 452 bp, Homo sapiens
caaaattctttcatataatcacccaagccaaaagcagcattcagtacgcatgaatcatatgccgtaagcagatgtaattcaatgttggaatcaaataacatatgtttatttttacacatttaaaatatttctccatataaaaaactgtcataatttcattggaaatttttacatcccaatttttagctctatgtacaaccagcctgtttttacactcaaatccagagttggataaaaattaaagaaagattaaaagggtagcagtgttgtatttattactttataagatatttagctagatgacaaatctataatgctattctacatggcatctcatcttgaatggcatttcattttcatagcgtcgatgttgaaagatatgggggaaagggggaaacaggtagaaaaagtaaaatataagtttttgctggcaggcagggtcactattaagt

SEQ ID NO: 259967 - DNA, 526 bp, Homo sapiens
acaatggcatgatcttggctcactgcaacctctgcctcctgggttcaagcctcagccttaagattctcctgcctcagcctcctgagtagctgggattacaggcgcccaccaccacgcccggctaagttttgtatttttagtagagatggggtttcaccatgttggccaggctggtctcgaactcctgacctcgtgatcctccttccttgggctcccaaaggattacgggcgtgagccactgtgcccagcctatcatcattttttaagcagttccagatattatatggattttgaatggaggtttgtggtaagaggtagaaaataagtagtgagttagaggatattcacaaatagtgtaagaggttgaaaacagcagagggagaacatccaaaacagaaaaaacaggctgaatacttttctgtgatgaaagagaaagctgctgatataaagcagtttatggggaaagtttgttgtaaaaagctttaactctgtcatttgccttgttctattaatcagaaaaactaag

SEQ ID NO: 259968 - DNA, 562 bp, Homo sapiens
cagttcgagaatatctctagtcattgcatcttgacacccaaagcattgggcctaagggtcaccctttctgctgtcccaagagttatctctggtcttacctattatttttgagcagtgccttgagaagaatttcagtctgtttgtaggccccactgcagctaattctgtacctaagaccttcagtcttggctctacaatttcctaaaattgcatgaaacaaaaaaatctgtgattgtgtaattgcacattttctagagagaatttccctagttctgttaagcctcaaaggacttagtgacctattcaggtcagagaccacagctctaaccagagagcccagagctgcccctgcccctgcttccatgctacatactaaacacacccaggcattccttaggggtaatattgaactcttggtcatctaggttctgtcaaaattcatctgacatatggttacatggattttgaagaagagagaagaaaaagaatatgaaattttataaataacatgaaaagaacaatataaggccattttcacaaaaataaagacaaatggaatatg

SEQ ID NO: 259969 - DNA, 880 bp, Homo sapiens
gagagggggtttcgccatgttggcgaggctggtcttgaactcctgacctaaagcttcccaaagtgcctgcctcagcttcccaaagtgctggaattacaggcgtgagctgctgcactcagccataaatcgtgtcacttttccacttaaaattttccaagggattccatcttgccagggaagagcatgtcaaaggagaatccaagcgcttttcccgccacctccagttctctgcactcttttttttgtttttgtttttggcgagtaggggagacggagtgtagctgtgtcaccgaggctggagtgcagtagtgcgatcttggctcattgcaacctccacctcccgggttcaagcgattcttctgcctcagcctcccaagtagctgggattacaggcgcccaccaccacgcccagctaattttttgtgttggccaggctggtctcaaactcctgacctcgtgagttgcccacctcagcctcccaaagtgctggcattacaagcgtgaaccaccatgcccggcctgcactcttctttgaacagaactctgttcttgtcctggggcctctacccttgccattcccctgcccagtatgttcctccctgttcttcacattacctgtgccttcctgtcaatcaagatctttgcttctcaccctctctgaggtccaaccctgaacctcaggtcctccaagacagaggcctggggacctgcatgtttaaccagctccccaagtgatgagtgaggtccaggcaggtatggtgtacaccacctccatcccttccatgtatcttaccttcctcttctccaggaagctcagcccgcaaccaagtgggaggccaggcaaccaagtgggaggccaggcaaccaagtgggaggccag

SEQ ID NO: 259970 - DNA, 268 bp, Homo sapiens
  misc_feature (4)..(4): n is a, c, g, or t
  misc_feature (6)..(6): n is a, c, g, or t
  misc_feature (8)..(8): n is a, c, g, or t
  misc_feature (10)..(11): n is a, c, g, or t
  misc_feature (14)..(14): n is a, c, g, or t
  misc_feature (16)..(18): n is a, c, g, or t
  misc_feature (33)..(33): n is a, c, g, or t
  misc_feature (267)..(267): n is a, c, g, or t
ggcntncnanngantnnnatcacaggcacaagncactgcaccactgcacccagccacctctctctcatttgtcaccttccagtcaatcagagaagcccaaggtcccaatagagagggtcacaactgccaaaagctttagatatgtcctctaatctccctgacaaggtcatgtgagtattatcatctcctatacagatgaggaaacagaggctcagaggagttaggacacacagcaagcatcaagatattttggtgccaaataattgng

SEQ ID NO: 259971 - DNA, 393 bp, Homo sapiens
ctttctgctactgtacatatacgtgcaagagggaggagacatactaaaaagcacaaaggcaaacttcagcccattcatgacttgcactcatatttggctcaatgttttccaaccatggtatacattttaatgaacaaggagactggatagaggattttggtggctgactaaacacaaaagacatagtgatttccaatgtatcaaggttgatcttttttaaataatctaatttctcaacagaaagagtgctgaaaaggatttaactaagcttaggtcacagaagtgtccataaggttctctcagcatatcttgtgttgactgtttgtaagaacatgcagcattcaagatactactactcagaataaatggcatcacctacctcttgctctctgg

SEQ ID NO: 259972 - DNA, 809 bp, Homo sapiens
atcctgggctggagctgttttttcagttgtaaaatgctgtttattggtgttaggtagcagctaataaggctggaggtggggctgggtgtagtggctcacacatgtaatctcagcagtttgacaggccaaggcaggaggattgctggaggccagggatttgagaccagcttgggctacatagtgagactctgcctgtactaaaaattaaaaaaaaaaaaaataactcagtgcagtggcgcatgcctgtagtcccagctactcaggaggttggggtgggagggttgcttgagcccaggagtttgaggctgcagtgaactatgatcaatcacaccactgcattctagtagcctgagtgacagagcaagacctgtctctaaaaaaaaagaaattttttttaagggtggaggtagggaaattcaaagctacttactagctgtgtgaccttgcctaaactacctccttggatttgcagtctgtttatttgaaaatgtcataagggataaatgagattccttatgtaaagtactttataaatattaagcacttaccaaatgttagtctgttttcacattattcttcttggattaccagaaattggtttgaccatgaataaacaggagataatttcttgggtaatctgagtttgaatcccctttctctctcttactaattgtatgactttgattaggttatttaatatttaattgttctgggtctcagttttctcatttgtgaaattaaaatgtgttcttcagaattgtgagggttaaatgtgataaaaggcctgactcatatgagaaaatgctcaa

SEQ ID NO: 259973 - DNA, 906 bp, Homo sapiens
gagtctacctacctactaccttcttctttcttcctctgctaccttctactctactactatctttttcttcttcttccttatacttcctcctcttcctcgtcttcttcctcttcttcctcctctgcttcttcttcttcttcctcttcctcttcctctccccctccagcctctccccctgcttcttccccaccccgggtcctggagttgccaggagtcccagcagctgcgttttctgatgtcctcaacttcatctacagcgcccggctcgcactgcctggtggtggaggggacggggcagctgtagcagagattggagctttggggcgccgtctgggcatctcccgccttcagggcctgggggagggaggtgatgcctgggtacctcctaccccagcccccatggccacctcgcagcctgaagaggacagctttgggcccgggcccaggccagctggggagtgggagggtgacagggctgaggcccaggcccctgacttgcagtgctccctgccccggcggcccctcccctgcccccagtgtggaaaaagcttcatccatcccaaacggctgcagacccatgaggcccagtgccgacgaggggccagcacgcgggggtctacagggctgggagctgggggcgctggccctggtggtcctgcaggggtggacgcctcagccctgcctccaccagtgggcttccgagggggccccgagcacgtggtgaaggtggtgggcggccacgtgctgtatgtgtgcgcggcctgcgagcgttcctacgtgaccctgtccagtctgaagagacacagcaatgtacactcgtggcggaggaagtacccctgccgctattgtgagaaagtgtttgctctggcggagtaccgcacgaagcatgaagtgtggcacacgggg

SEQ ID NO: 259974 - DNA, 858 bp, Homo sapiens
actcatttaactaaaacatgattttcagtttgaatactttaagtttcaattaagaattctgctttttcatggtaagaagttatcgtggatctcctgcacatcattgttctgtgtgtcctacttctaggataaagcctctaggctccttagtatggcacttgaagatcttcatttttctggctcaagctttgtttttttctcatcttcatctctaccaagtatcccacactctggccatatccccgtgactccctatttctagagctaatattcactttcacaagtttttgcctttcctagatgacactgaatttcttcttatccgtcaaggattagcttatgcttgacatctgtagcttcggaaatagacattcactgcttcttttgtatttccttaatgatctgtgcagctcgctgagcagcataccttagtaccatttatcatagacatttgtgtacacctctctctttttctgctgaattataaattccttgagggcaggtctccttgttatttatatttctatctgtatcttctacaatatgcctgaaatatagcaacattcagtaaattagcatttcttgactggcaatcccttacctttcttttgcttcttttttttctttttctttttcttttaatgctcatttcctaacatcccccttacctttcaagaaaggagtactgtcattgtctgctggaagatacagaactcctgttgaaaagtaaatttaggctgggctcagtcgcttaacacctgtaattccagcactttgggaggacaaatcaggagtattgtttgagaccaggagttcaagaccagcttggacaaaataacaagagctcgtctctactta

SEQ ID NO: 259975 - DNA, 313 bp, Homo sapiens
ccccccccccccccagacatactgagccctccggctatttttaacactttgacctaatgtgggctggtccaccacatgtgctggaaagcaggccgcccaccaggaaggcgaggcaggggaggaccctcaggagggggcttctcactcttgcatttgacccgtcacctcgggctgcgtggggtctgtgcacgccctttcctcactactgccaaggcagatctaaggggggcttcctctgcccagggccaagccccaggcctcgggctgtgctttacaggaaagaactttgcggtgtcagccccctgcatccgga

SEQ ID NO: 259976 - DNA, 374 bp, Homo sapiens
cctcaaataattgagaaaaatctgtgagttgacctggtttcaaatgttgctcaatggtggcccaaattcagctggtctcaggtcctcttttctactttattgccaggcacatttatccaatatggtgacctccagcagttccaggcttacatcattcttacagcaacaagtgttattgcaaagatagccttttgccagttaattccaacaactctatgaaaattgagttgtatagttcatccttgaaccaattactctcaccaagggaattacatgctagcttgtggagctggaaacaggtggttgtcaaaccagtacaggacacatggaccaagagtaggagagtagtttactaaagcaaaaaaagtgaaaca

SEQ ID NO: 259977 - DNA, 560 bp, Homo sapiens
aaaactcccctccccgaccttgtcatctagtgtaaagacactgacttgggccggttttcttaaggtagtatttaaggtagtattcttaaggtagtattgctgtttaaggagtcaatagtcttaatttagacgctcctcagcccaaggctaatgcaaatgttttgtcatttatgtcattttgcagaggcaatttgaataacacctacagtaaggcaggcgtgggtttgctagccagtgaaagagctcctctcgcattgttggtcccccagtgctctgtgtcagtggggaatctctccagaaggtgactttatgggggatgtcatgggctgcagtgggtggccagaatttgagaactagcagataacgtcacatacgtgccccatccccatcacttcagccagcatcagatctgctgtccaggatagctatacattacttgtggttaaatgtatttgtcttaatacattaagttaaatatatttgtacttgtggttaaatgtcttagagtaagttccttcaaaagttaattttgagcccttaagttaatgatatttctttcc

SEQ ID NO: 259978 - DNA, 161 bp, Homo sapiens
gttggtttctgctgagggatgtgagggataatctgtttatgcccatttcctaatttctggtagttttctggaaattttggcattttttggattatagatgcattttctggtatcttccttcatgctcacataggattctccctgtgtgtgtgtctatgtct

SEQ ID NO: 259979 - DNA, 424 bp, Homo sapiens
atgaaatttatccactgcctgcatttgctaatttgaaagagttctgatttcatctgccgggcttaatatagaaattcttttaacctgaacagatacacagaaatgtggaatttattcaatgccattttcttgatttatgtcaggaaatatatatggctatgctgtcatctttttatatatagacatcaatatatataaatatatagagtcaagtcagaaattctgaaaccacattgcacttagcccttacagcataatgctttccatattcttcacagtttgtttccctgatcctttagagagagctactgtgtttaaagtgtaaaccatttttacagaaaaaatgtattacaattctatatgataattctcaaagttcaggaaaataatctgaaataaacattctaaattgaggaatgaataa

SEQ ID NO: 259980 - DNA, 511 bp, Homo sapiens
caaaagccacacctatgttttcttgcctacatagttccctttttgccctagtcttagttaagatgttatgagaacaaagcccccaatttttgcctagtcttagttaagatgttatgagaacaaagcccttaatttttggatccctttttgtctagttggaaggatcttagatttgtagcttcagtaatgatgatgcaaagaagctgagaggtgaacttgtagaggtgacacagaaaactagtttaaaactagggacagtggttagaaacaaatctttcagcacagtgatatgaactaagcagaaaacaaaagcaaaggcagttattcctgaaaggtcataaagagcttggttaggaaattgtgggacaagtaagtgtccaaacatggggcttcagaaaggaaagagtgttgtaggcagaataaaaataaatattggctgtgtggaaactttccgaatttgatgaaaactttaacttacagacctaagaagctcaatgaaagaaaaaatata

SEQ ID NO: 259981 - DNA, 207 bp, Homo sapiens
gcgccgcagtttggccaagaagggagggagacggccacgaaataaataaataaaaacagtcgggtctacgtaacgccctgtcgaaagcggacgccatatttttttgtggcttatgtcgacatagggaaacgtagacatgtttttcctcctcctcctccccctcctcgctctggctcccatttatccaaacttgtaatcaaaactctt

SEQ ID NO: 259982 - DNA, 528 bp, Homo sapiens
ctgaccaagaagaatgaggttatgctgacaactggagggtgagcagagcagagagttgtattgagcaatggaacagttttctgcagagaggggacctgaaggagacggccccctacccaaagtcaggtagctccccaaagtgtggctgagtccagggcttttattggctccaaatggaggagtgagtgataattgttttgtgagtatgaaaaaaagatgtaattaaataagggtaggtatatgtaaaatagtgaagagaggggatcaataaaaggaaactgcaccaaacaagaagagaggttctcagtctggtccacggatttatttgagacttgtagcttgcttgtcagggtttaaactgtctgtggcttgaaggctgggtttcactggggacccacctacatctgcttagggatttgactgcctcctgctgtatcaggttggctatttttccatttgtgactcacaagatagtcaatagtctcataatatgttgattgtcaccaatgctaggctgctagtttgcaa

SEQ ID NO: 259983 - DNA, 396 bp, Homo sapiens
gtttaaaatgctctatgttgtgcccaaaagacatttttttttttctggggatatttccagtgcagtaacttgtgtatagacaagataactactttagtgctaggagctttctatatgtgttcatggattcatcgttggcccttaattgtgtgttcaaattttaagtcctctttactttggcatagagacaattcctagggaagcaggtaaataaatactcagtaagcagtaatgctaggggctttcatagtggtttcatggtatattaaccacatcttttattttctgtatcctgatgctttgacatctggggccttgcagaccctggagggactgtcccttccaaggtcagccaatttttttgagataataaagaattcacccacaagcatgcct

SEQ ID NO: 259984 - DNA, 1810 bp, Homo sapiens
gcaataatctaataatacagaaggattagagatacaaataaaaaatatttcatctcttcttcaaagcagggttccttaatacagttgtttaaccatttactgggtttaccatcattcttcttgatgtaaataggatcaaatagaaaatatcagtatacactgcacataacaaaaacaaaagttatttgtaaaactgttacttcagtataaatattcatacatacgggtaaaaggtatctgttaggaatggtttagtctgctataataggatgttttagaaaaaaaaaattttttaaagaacaaaaggaatggtttagtcaaagtgtgataggtacttccctaatgccctcgactaagcattggcctaatctgaataccaacaccatggaaaatttaaaacaatttgcaataaaacatcctaattcagcctttcactacttcacattggcacgcctcctcaatgccccatcctacatcctcacttcttccactcttcttctgtcctctcctagttagttctttaactgcaacccacgttagcctacgtcacacagcagaataaattaatgtgcagaaaatatggatgaaacttctccttaaatctttcaaactgggtaactctacttcttgagacagagaaggatctgcccaagcatgagcaggactaagaaaaaatttcagtttctctccgctttactaaacttagaaatttaagagagagaacgtagggccgggcattgtggctcccacctgtagtctcagcactttgggaggccaaggcaggcagatcacttgagctgacaagtttgagaccagcctggccaacacagtaaaaccccgtctctacaaaaaaatacaaaaattagccgggtgtggtggcacacgcctgtagtcccagctacttgggaggctaaggtgggaggatggcttgaacctgggaggcagaggtgagccatgatcatactggtgcactccagcctgggcaacagagcgagaccccacctcaaaaataaattttttaaaaaagagagagataatgtaaaagtagatattcctgtcaggaaaaaatgaattaaatgaatcaaatcaaatgaacacattttctcctaaattgtgcccagccatcactataataggcttatagtctaaagattttaaagtatattttagtaaggttttgcattcactgaagaaaagcactagcccaggctgttttgaaagatgactaaagtattgtcacctgaaccacacaaaacataagaatttacaattttgttaaccccttttctaaataaggtctcttgtcagagtcatgttgaaaattaactggcaaaacatctgtaagaatagtcatcatcataaaaatcatgctattctctccatacaaagatgaaaataaagacactgccatatgcttcaagtaagtattcaagcagcctgatggttttgcaatgaatcatcactcgctctcctgttcactctggtgatctcccatctgagcggatggcaactccattcttccagatgctctagccaaaaatcttggaatcatcttatcttccctttctctcacatctaatccaacagcaaatcctcctaacttcaaaaaatatgctatatccagaatctgaccacttctcaccatctccactactacttctctcccctggataacctccttccacccttgtgcccttataaaactattcttcatattgcagcctgaggtgtttgtttgtttttgagacagtgtctcattctgtcacccaggctggagtgcagcctaggcaacaaaaggagactctgcctt

SEQ ID NO: 259985 - DNA, 1921 bp, Homo sapiens
attagaagcaatgctacctgttagggtcctccagtagttgtttcttccccctacttcttgagctttgacttctgagattatctgtgtgaaagcccttagcagtccattgaaatcttctaaagtaaggcagttaaaaaatatctttcctgcttagcagaagggactttgttctttggcaccaccttactctttgcaatatgttgctagtagccctaaatcagaatgtgcattaatatatcttttgaattgtttggtctcctcaggagaaaaaaaaatgttttcaacaatcttataatattttgttaaaaatccaattctggttcaatgttttgttctcaaaggaattttgaatgaagaaaaagcttttgtaagagggaggaagcttatctaatctcttcaagactgatgagaagcaatcaggagcttgtgactctttgaaacagtaaatttctagggaattgggcacacgtttctcaggaacaataaagagtgttacacttcaggttggctctaaatgcaccccttcatgtatcccaaaaggcaatttgaaagcaccgttctctgagtcaactggaaaagggaggaagccatgctgagctgagattctttcagggggtcaagagacactgaatacagaatgaagatcactcttctgattactgtcgaattctcagttataacctttttaataaaatgtcttcaaagatgtaggaaaataaattggctcagacaagagagttactggatattagaagatttagatttttgacaaggtcttctacttgtttgcaaatgtactatcttgaccatataaaatttgcctaacctttgctaaaatttcactgaattgttctttgcttacattacttgatattttaagactttgttagataatcaataagtgatagatgtgtagcattgttactgttgccatggttaccatcagtgttctcttcccttctctaggttagggttggcaggtacagctatgaacctgggttccacatctaaccccacatctgctcatcttcttgtagcactggaaagtgtgaggggcctgactagactctggctgctcagtagttaacctacactcatctcacctgaaaaacttgtcagtgaagttttagtcacaagccttttagaagatagaaaaacagtttgcatggaaagctctcatttttaaataaaaactgattatatcaagctaagtgagactctctaattgatgacataatactgtctacgttatcattgcttaccactagcaaggcagcaagtataattggaaggaaagagtatggggctatctggagacttgattcaggtgttgtcagttttgtcttaacatcattttccttatctgtaggggacactttctcctatcttaatgacacatgcagaaaagtcaaatgatatatgtgaagcattaaatatttagagttccatggaataaggctagtttataaatatcatatattacaatagaagtactagtggaaatgtaaatcactttgaggtctcaagagtaaggtcctttatctgagttcttagtggttggaaatttgtttttgagtcatcatatagggaagtcttctgttgctactaaatactgatcatgcattggaaacaatgaagaatgaattgctagtgatatattacttcttttaaatagttgctttaaaagcatttgttactataaattctctgagaagtttctctcaaattaaaaaaaaaaaaaaacttactgttatgtctcccctatgatagtcagtgactttctggagggcaaaaaaccaggagtacctcactgattttctttcttggtcaccaaagctggtaccagataggtcttcagtgtttgttgagcatcctgtgtaaaaatttagtaatacttttagtaaaatttgtaaaaaaaaaa

SEQ ID NO: 259986 - DNA, 675 bp, Homo sapiens
gacctagaggatcccctctctccacactggtatccctctctccacatcctctccagcccctgttgtttcctgactttttaatgattgccattctaattggtgtgagatggtatctcattgtggttttgatttgcatttctctgatggccagtgatgatgagcattttttcatgtgtcttttggctgcataaatatcttcttttgagaagtatctgttcatatcctttgcccactttttgatggggttgtttgtttttttcttggaaattagagatgttaaagtgtgtgtgaaggaagctcctgagggcaggagtggggtgggggtggggcgacctgatgtattcaaataactgaaaggaaggaacgcagtgtgagttgtagagcagagcagtatgaggagagagtgataccagatggggtaggagaaatggacagggcaaagatcatcctgtgaggtaattccagtacattaaaaggaattgacttgagtgtagtgggaagccatcctcagggtgctatttggagaatatgttggtgagggcaagagtggaagcaaggtgttcagtgaagagggtagttgtaatagttcagtattagcttggactagggtggggcagtgatggagagaagtggacatatcagcccaatttagtgatggcattggatgggatgggg

SEQ ID NO: 259987 - DNA, 315 bp, Homo sapiens
acatggaatgcacagattgcaagagagaaacataagcactattccttctactccaatcccttgcagccagtgctcaaattttatgccagcaggcccagagtcctaccccttcctcctgaccctctagagtccctgatatggtttggatgtgtgtcccctccaaatctcatgttgatgtgtggcctccaatgttggaggtgggactgttgggaggtgtttgggtcatgggggtggatccctcatgaatgacttggtgctgtcctgcaataatgaatgagctctcgctctattagttcacacaagagctggttgttt

SEQ ID NO: 259988 - DNA, 337 bp, Homo sapiens
ccagtattttcgtaataattattttgtataaatttgaatataagtttaatattgaataccatgataatatgtgcgtgtgtgtgtgtgtgtgtgtgtatactatttttctgatcaaacaagtgtttccatgctcacacagaaaaactattaccaggaggagagttgagtataaaaaacgtgattcagattttaattaaacaaaggaaataattttttaaaatgctattaagtgtaaattgtatttctcttaatatgtagttagtatttaatcatttctatatataatgaagttttgtggctaggtttcttcattgtaaaattactatttttttccatt

SEQ ID NO: 259989 - DNA, 483 bp, Homo sapiens
gcagggaccatttgctaaatctttgctgtctctcagcacttagcccagttttcaaaaactgtgagaagagtagacatttggataacaatgatgcctaagtaaatctatccaaaaacatttggctcagatgctaacctggcaggcccaggctgtgggtcagtggtgggaaggccaggcatgggggctgttgctatcttgccagagtgtggatgagacctgaattctgaggaggcagagaaatcctagaggccagtggactcagcaacaagagttgaagaatcaataggtaccagttgagcctgacttgatgtttcaccttgagctccatcactttgattgcagatatcgtcatattttcttttagaattcctgttcttcaaccagcagtccatttctttttttaagggaaatgatttcacttcatctaaaataaataatatgtataaatattaaaagttagctaagaacacctacaacttagtt

SEQ ID NO: 259990 - DNA, 430 bp, Homo sapiens
gatgtatggttaaatataaggaccatctctttatcttctgtgtaggctgaccctagcacagcttctgcctagtacatttccacctagaatttgtggattgataatgaatgaatgaacaaaaaatgtatcaacaaatgactaaaaggacatactggcagagtccttcaaggctgttaggacaaatttaaagtgagtgagttattgtcaattatgtgaacaaggtaatccatgtttctttaaactcataagtagcctttattcctcccactgtatctttaatttgtaaagagaggggatagacttttgtcatccaagaagcccttcttctgcacaaaggatgcagttaatgtcataactttacctctatgcatgtcttaaattggaaaagccattcatatatttcatataccctcaacaactgtgagatttt

SEQ ID NO: 259991 - DNA, 332 bp, Homo sapiens
aggtccattcaagtgggcattatgcccattttagagaggagaaggtggagtctcagaaaggttaaaaaatttcccagagattccacactggaagaggtgatgtcaggatgtaaatctgtgtgttgtggaagattaagtgcctggatcacagatgctgtcaccctttctgatcacaagggctcccctgtgagtggtcattttaggaagggatgtttcctgggagagacggggctgcttctatcgttttgatgctgatatttttgcctcattgacttttcagtaatgggattcttaaaataagcagtcttcttacctcatcctgctgccttcct

SEQ ID NO: 259992 - DNA, 464 bp, Homo sapiens
ctgcaggagctatgattgtgccattgcactccagcctggctgacagagtatgaccctttctcttaaaaaaaaaagattctattttctctttgcctgatgctttagcacagaagcatgttccccttccgtatttctccaactagagtgaactcatcctttaaagcaatctggcatggtgtcctgtagtgaagcagaggatcataacataagtaaactctctatgggtggaagttggagagaaggacattttggctttgtacatgaaaagactctccagatagaaacagattctgcccataagtgaaataaaatgctttgtgggggtaatgagtgacttatagtattcaggcagatgttacataactgctaattaagtttccctggattgagtttaagcaaagaattgaaagttgattttggtcaggtgtcagcaaactactgcctataaaccatatcctacccac

SEQ ID NO: 259993 - DNA, 339 bp, Homo sapiens
tcccagagccatctttccaaatgcacatatctatggcacactggcacttaaatctctgatgtttctccctcttctacaggatgaagtccaaactcttttgcatgtaattataaggtgctcatgatctggagcctgcagcctttctaaccctcactcttatttcaccaagtttgtgctccagacatagcaaatcacttcttctttctggagcacactgtgattttatgcttttgtgtatgctgttttctctgtctaggatgtcttacttctatccccactcccctcttacctgttttactccctgtaatcaggatatccatccatccatccatccgtcca

SEQ ID NO: 259994 - DNA, 473 bp, Homo sapiens
gctgggaatgcaaccacacgcccaaacccaaatgacggggatctaaaggacacatggggttctcactatgttgtgtaggctgattttgaactcctgacctcaagcagtcttcctgcctcagcctcccacagtgttaagattacaggcgtgagctaccacaccggctatgagattttattctaacactgtgatttaattaggcttctgaactcatgcatctgctggagtctggcagtgtttggccgcttcatttaaaaacttgatgctaatggccaggtaattgtttcaaagatcaccattgatgaagtgtccagatctatcagccacaaatgctgtgaaggagagaatggctatcttccatttcctttgggtttgctgtacttttagttcagagtagcagtggcccttcaaggtttgaaaaagctgaaaacatcagagaggatgcagtggacaaatattgagtcagtccttat

SEQ ID NO: 259995 - DNA, 184 bp, Homo sapiens
taagaactgtgtagcatagagtagtgcaggcaggactatggtgtaaacttaaaagaggctgagacaatctgggaaggcttcatggtaaagaggcttgcatagggccttggataagtggtactcggataaatagaaaagggagaaaatgaattcctggcaaaagtgtgaaaaaatgttttggaaa

SEQ ID NO: 259996 - DNA, 659 bp, Homo sapiens
gggacaggggtccgatatcctgaatttctatcaagctcccaggtgatgccaatgctgctggtcctcagagtgcattcataatagcaaaggtataataataagaccgaggctatgatgaccagtgctgtgacatttagaattgactcacttgttgcaggcaatatgtgtgcgatagatcctagaagagtgagttcaaaaagcagataaatctgtgcaaaatggtcacttctgtactccaggttgtgatcatcctcaatcagtggtatcaacttcacattttgtttaaaagctggctcctagatgctttttatgtttatagacctgagtttccaccctatccatttattttgctgtggcctcataaagagtagattcctaggaaatcactcagttcaacctcccatccaggacagggaacctccctctctcctgccactgacaatggtccacagcagcctgtcagcctgtttgatatccatagatggcagggacttactatctccaagggagcctcttccattaaggaatggctcttatgaaaacaaagtttgttgctgagtcaaaatcaatttccttgtaacctcacccattaagcctattctgtcatctgcagcatttcaagtccgctctcaagtcagccttccccacactgcagagag

SEQ ID NO: 259997 - DNA, 2183 bp, Homo sapiens
  misc_feature (8)..(8): n is a, c, g, or t
  misc_feature (1856)..(1856): n is a, c, g, or t
  misc_feature (1866)..(1866): n is a, c, g, or t
tggagacngagtcttgctctgtcacccaggctggatctcagctcactgcaacctctgcctcctgggtttaagcgatcctcccacctcagcctccccagtagctgggactacaggcacccaccaccgctcctagctgtaaggttttttttgtatttttagtagagaggggttttaccatgttgaccaggctggtctcgaactcctgacctcaggtgatccacctgcctcggcctcccaaagtggtgggattacaggcgtgagccaccacgcccaggcttccttccaagttcttaaggtgcatgccgagcaaattaatgttctaccttcttttccaatatgactatcaaaagatacacgagttcaattgaaaaaaatatatatatatataaatttccctttgtatatcttcttttattgcaacatacagattttgatatgtagtttttctagaattatttagttctaagcgttttaagattttggttgtaatttctccttgcacctgtgagttgtttagaagtttgttattaagtttccaaacatagaagtttgtataatgttacttttggtgtgtatttttccccttgtgaagaacttacaaggagtggaaatttgatttgactgtatttcactgcatcattaggacttgaaagttctcatggtagggttttattacaggttaatttcagtttaacagtaatgttttcaatacttatttaatatgcttgaagacttcttaagtaaaaattcctaagtaaaatcttaagtaaaaattctaagaggaagtaagaaccccagcaccctattgtgaggttagaagaataagaaagggagtctggactaattttaaacagaaagaggagaatttcactgtggtggggaaatatagtaaagataaaactcccccttttttggtttctttgtaattcaaattgggtgatcatatgcaggaacttagttctcattaatgagtaacatatatagggaaacatgcaaatccatgcaggctccttgatcagaggcatagttagtgaaatacatcagtggttctgctgtctgacttgtttctgcttctctctgtttgcttttataggtagaagaagtgaaaaagcaccaacactgtttagcatttagctcctctggaccccaaagccagacttactacatttgctttgatactttcacagaatacttaaggtggctgcgacaagtctccaaggtaagcaagcacttaatccaggaatccactcagcttctagctggctacaaagttcctttctgctttagctgggtctaaaatatggttagttacacacactttttttttcctccccagatactgccagtgattagcaatttttagttttttaaaaactaattttgcctgaaaagtggctttttaaaaattgttttttacttgcccagtttatacttaaaaataaattggtctgtaaacaggcattactatcttaatgttgtagataaaaaacatgagattgggaatatttgagggactgacccaggctaagacaactataaaaccacaaaatacccagagaattgttacaaatttcccttctttctctgactgttttttcatataaatagtctaatattataccatctccccttcacctttattctgccttttcagtgatttaattttttatcttattttggccattttatattcctctgatttaataagatcaccatgtcccatgaaataatatatagtacttttggccaggcacactggctcactcctgtaatcccagcactttggaaggctgagacaggcagatcacttgagttcaggagtttgagaccagcctggccaaaatggtgaaaccccntctctactanaaatacaaaaaaattagccaggcatgatggtacgcacctgtagtcccagatacttgggaggctgaggcacgaaaattgcgaactgggaaggtggaggttgcaatgagccgagattgcaccattacactacagccttggtgacagagtgagactctgacttaaaaaaaaaatatatatatatgtatatatataatataatatataattatatataatatatattttataatatatatatataatatctagtgcttttgtgtttaatgtaaaccagaatcacattataaataagacaaataaatgctgatatttcaggt

SEQ ID NO: 259998 - DNA, 449 bp, Homo sapiens
acttcccctctccaaaatttttctacgtgttagtaatttatgtcttccagatcgtgtaaatacagatgtgttagacttagtcatctaaatcaattgttcagtgactacagccaaactataaaaaatgattacttctctttgttttcagttcaagtatttttactattcctttgccacacatttatttttcatacagttacatcagcgccctgggtcccttttcttttgtacacatagtgatagagagggaaattactcatctccaacgtcctggaaattgttttccagcgcataaatttcctagccctctgaaagatgtcaatcattttctttagcagggcattagggaactccagctttccgaaagatgttaggaaagaaatgtcatgtccgaagacacaaagtaaatgattactttcttcacccagctttatttgtcatttgtctta

SEQ ID NO: 259999 - DNA, 699 bp, Homo sapiens
ctgggggttaggggttaccccaagacggtgcaggcagtgggacgaggaggccttttacccccatccaccgcagcccttgacttcacgctcgcctcgaagctttcgcaaagtagatacggggactgaccctgttgacacactaacccaaactcgcagacgcgtggggctcgcatgtacccaagacaggaaaacttcacgttggcctggaaacttcttccaggctaagcctgagtcttcaccagacactgcagcacgaaggcccttctgccttttggctcgccctggcccagaatgcgcaccagccggcaagagaaagaggcccactgcaatatgctgtgaagaatacataagaagtcaaactgttgacctcttttccccagcccgttccaaaactacatccctgaggagttgtgcacctctacggaaagttcagatgaaagagctaattccccttgatctctcttcttgttcagagtggaggaaaaacatataccatcccttccatcaatcctcagcataactttgccagggacactggtaacaagctacttttacctcagaagttggagagtatcacttgacccacattgtgtatgtgtaaatatctttattcagtgtatatacaatatattcttaatttgactctcaaagtttataattagcattgaatgagtatgaaacattgttttccaaatactg

SEQ ID NO: 260000 - DNA, 732 bp, Homo sapiens
ctgggggttaggggttaccccaagacggtgcaggcagtgggacgaggaggccttttacccccatccaccgcagcccttgacttcacgctcgcctcgaagctttcgcaaagtagatacggggactgaccctgttgacacactaacccaaactcgcagacgcgtggggctcgcatgtacccaagacaggaaaacttcacgttggcctggaaacttcttccaggctaagcctgagtcttcaccagacactgcagcacgaaggcccttctgccttttggctcgccctggcccagaatgcgcaccagccggtagagaggagcttcgggccgtttagccctggggcaagagaaagaggcccactgcaatatgctgtgaagaatacataagaagtcaaactgttgacctcttttccccagcccgttccaaaactacatccctgaggagttgtgcacctctacggaaagttcagatgaaagagctaattccccttgatctctcttcttgttcagagtggaggaaaaacatataccatcccttccatcaatcctcagcataactttgccagggacactggtaacaagctacttttacctcagaagttggagagtatcacttgacccacattgtgtatgtgtaaatatctttattcagtgtatatacaatatattcttaatttgactctcaaagtttataattagcattgaatgagtatgaaacattgttttccaaatactg

SEQ ID NO: 260001 - DNA, 498 bp, Homo sapiens
ctgggggttaggggttaccccaagacggtgcaggcagtgggacgaggaggccttttacccccatccaccgcagcccttgacttcacgctcgcctcgaagctttcgcaaagtagatacggggactgaccctgttgacacactaacccaaactcgcagacgcgtggggctcgcatgtacccaagacaggaaaacttcacgttggcctggaaacttcttccaggctaagcctgagtcttcaccagacactgcagcacgaaggcccttctgccttttggctcgccctggcccagaatgcgcaccagccggtagagaggagcttcgggccgtttagccctggggtattgaagagaggggtgggggtacagggtgcaccactgtcagagtgagtgggaagctgccttcatgcccagttgaaggatatgggaacagtagcagtgctgtaggtggcatgagggaacattaggttccgttgtactcctcatcccaaataaccgttta

SEQ ID NO: 260002 - DNA, 402 bp, Homo sapiens
ttaggattctgcagttacaaggtcacttaggaaagcagaaatctccataatttagagatattcacttaagaactattcatttataaacctactctcaccgggcgcgatggctcacgtctgtaatcacggcactttgggaggccgaggcgggtggatcacctgaggtcaggagttcgagaccagcctgaccaacatggagaaactccatctctgctaaaaaatataaaattagcccggcatgatggtgcatgcctgtaatcccagctactcgggaggccgggagtctgaggcaggggaatcacttgaacccaggaggcggaggttgtggtgagctgagattgcaccattgcactccagccagggcaacaagagcgaaactccatctcaagaaataataataat

SEQ ID NO: 260003 - DNA, 156 bp, Homo sapiens
cctttcaacatcagattgtagttatgtgtaagttaggatgatctggcagcaagcaatagagaacctaaatgaagcttccctaaatattaaaatttattggctcatataaggagaaagtccaagaaaaaaaaaacatcagcagggttatcttgaaga

SEQ ID NO: 260004 - DNA, 390 bp, Homo sapiens
cagagccagaccctggctgaagaaagcatcagccagaaccttggagaggagaagagaccgaggcaggggctcagggtgccaaagcagccgctcaagctccaagagcttcctcagaagggttgctataaaccaagactgactaccaatataagaaccattctgcttggggaaggccagatcacaggatggggagactggagaagaattgtatgtattaaggacccacatatatcaggtgcttttcatcaatctgtgatgtgtgatgtgtattcatttattcttcccaccttaggagggttggtcttcataatcaggaagatataggttcaaatcctggctgcactatatgccagctgggtgtccttgggtaagttatttaacctttctgac

SEQ ID NO: 260005 - DNA, 394 bp, Homo sapiens
gaaaatgaaaaagaaagtaaatataatttttagaagtggaaataactgattaaaataggctcttagtctgaagacttcctgtcatgtaatcatttaagaggtgtattgctttaggaaagccttgcactaataatctaatatgaaattaggttggaaataatggatgacatcagagagattaacaaagggacatatgttttttgatgtgaccaacctgggcagttagcctagtctagatatgtgccatagacaaattgctgtctgggatgttagctagcctaagactactagatggtttattgtttgcttgctgcagacatgtacataagtgtgtgtttcacttatttttagcacaaaaacaatgcatatgtattacagaaaatttagcaaagct

SEQ ID NO: 260006 - DNA, 319 bp, Homo sapiens
ccttttttacagagatgccctgtccagggaggagcaatctcgcagtctgaacacggcagccttgctgagctgcaatgggctccacccagtttgaacttcccagcagctttgcttacactgtggtggtaaaaccgcctgctcaagcctcagcaacggcggacgcccctccccctaccaagcgccaccgtcccaggtggatctcagattgctgctgtgctggaagcgagaatttcaaaccagtggatcttactttcctgggctccatgggggtgggaaccgccgagccagaccacttggctccctggcttcaggccccctt

SEQ ID NO: 260007 - DNA, 574 bp, Homo sapiens
cagacagatcacttgacctttttgagcttccaggtcttcatctgtcaagtagaaatgatgacctctcaatcttcccgtttgttttaattgtgaacgtttcttttttgggagccttcctttgttgtatcttctcaaaaaaggagccaaatccagtaattttatattttatttagtagtcaagtttcccaaacacttatcagttaatcagtaaaacatgaactggtttaatggcaacatcactgattgagctagtgactcaccttggctcttttgaaaagctaaagaatggtgacttgaggagccaaatgccacacacctaaggagagcccttctctgggcaagtgaattaattacttgcctggcagtgtggaatgtcaccagaatacccaacatacacaaagcctcatttgtaggatattcatgagaatagcactaaaagtggctgattgaggccaggcaccagggctcacgcctgtaatcccaacactttgggaggcgaaggcaggaggatcacttgagtccaggacttcgagaccagcctgggcaacatagtaagaccccgtctcaattactt

SEQ ID NO: 260008 - DNA, 429 bp, Homo sapiens
ttctgttggctggtgagcatttgtttatagtcggccttgactctaccacaattttagaagtagttcttttatttctttaaaagaaacattttgggacaaaatattgtgaacaaataaggaatacgactatatttgtgaaaccccttgttaatttccaagtgacattttaaatcttgaataagacatgaacgctcataaataaagagggaaaagaaataattaaatcaatgttcctaagagcttctcagaaaataagagataagtgatagaactatgatctacaatctaccctaacagtatatttgcatcacttcttaaactttgtttagtattttaacacgctgtttcttattatatgtgaagaatgctgtgaggtagcatgtcaatgttttgcagattaataaactgatgtcaaaagaggttaagtga

SEQ ID NO: 260009 - DNA, 667 bp, Homo sapiens
aattcgcggccgcgtcgatacggctgcgagacgacagaaggggcaggcggtgcgacagggctgggcggaagggaggctcatgccgcacacagggctattttcttggtgggatgaggctttgccaaggaagtcctgcttccagggacaggggtctctaaggcccagagcagagttgaggaaaaaagacctcaaatctgcaggaggacacacagggcgggtggaccccagctccagctggggcgttggtcagggaggggtactggcagcatgagaagtgaagctgccagaagaggaacccacttttactcactctgctgggggccgcccacctgtgctttcccagggagacaggggctgggcagccccagctgggagttgagaccaccttctgggtgaccccagccttgtctcagcccaggcctccggtgcttctggggctcacaacacacatctgtccctggttccttgtcttagcaactcctactccattgcctaacaattttctttctgttcccatctcaggctgaaaaggggaccaccgctccccgggcaacccctatcccatcctgtgcccctctaaccctggaccccacaccttggccctgatgagctcactctcccgtctgtgtcttcacagcccacctcaccccgcctcccccggcccagg

SEQ ID NO: 260010 - DNA, 643 bp, Homo sapiens
tgcaggggcaaaatcactctgattgagaggaccgtgatgcaagcgcatggacagaccgaaggcatgatgacagggagaagagtaagggagctggggaaggcggggcacggagagatgataaaaggatagtgttctgagatgagaagaaacggcctgcagcccgggtaagctccgagatgcattcattcattcagccagtgagtgcctaccatggattgggcactgtgctagtctctcaacaaaacaggcaaggtttttactcagctggaacttgcatttagtaggagagacaaaaataaagtctataataggtgctgataggtactttgaaaagtaaagcagggtaaagggattacagggtgtttggcaggtgttctttttggagtcaacatccaggtctcccatgggcattttggtcaactccagagccaggaaggaccaccagcagtgaccctttggtatcacttgattggggaatctaagagtttgactttgatcttaaccaaagacttttctcttcactgaggtctggacttcaacagaaagaggtcagatctctagccctgtccttgagactctgagactcgaacgttattctaaacgatgccttcaatgttactctcaccttggaatgctttattta

SEQ ID NO: 260011 - DNA, 663 bp, Homo sapiens
ccaattcatatgttgaagccctaatccccagtgtgacagtatttggagatagggacttgagggaggtaattacggttagatgagattgtgagggtggggccccgatcctataggattatcatcctaaataaaagagatgtgagagagctcactgtctgtccaccatgggagggcatggccagaaggcagccgtctgcaagccaggaagagagccctcaccagaccctaaccatgctgggaccctcatctcagacttccagtctccagagctaagagaaaatgtctgtctgtctcttaagccatttagtttgtggtattttgttatggcagcctgagcagactaattcattttacctcagagcattcataaatcaatggaggctacatctttggcccaggactgagactaggaggaggccaggtggatgtctcctaggaggagggacaggtgtatgcctcgtccctcctccacaggcacacagtgcagtcaagggaggatgacagcagaaacttttcttctatcagctccaaactaatgataaaaggggaggataaattctccaaggctgctacctcattaaagggacatcagatcaatatgtcagtgctcctttaactaaggttgggatatggatgccaggtttatctcctgaatgcttcttg

SEQ ID NO: 260012 - DNA, 92 bp, Homo sapiens
agggtatcaacaccattatttttccaatacaaagtgctttcccatcctgcatctcatccctctttttccccctctatggtacatggctgcga

SEQ ID NO: 260013 - DNA, 317 bp, Homo sapiens
actgcaacctttttcttccgggttcaagcgattctcctgcctcagcctcccaagtagctgggactagaggtgcacgccaccaagcccagctaatttttgtattttttcttttagtagagacagagtttcaccatgttggccaggatggtcttgatctcttgaccttgtgatccgcccgcctcagcctcacaaagtggtgggattacaggcgtgagccactgtgcccaccctttatgtccatttttaaaagtaggtgacagtatgatggtgggtgccaagatcagcaggcagcagagaaatactctggtcagaactgc

SEQ ID NO: 260014 - DNA, 119 bp, Homo sapiens
tctcagataatacagattgtacttactagaatttcatgttataaaacattataaacctcctacatgatttgattggtcaactctccttcacagcataataaattctctttgtaaaattt

SEQ ID NO: 260015 - DNA, 327 bp, Homo sapiens
caatggaggagaaagaactcaatcacactgaaacagccaggagaacccatgcttctttctccgtataataaccattataatgtaagaaaagttacactggacaagttaggcaaggaagactttattcaagacaattgcaaaagagatcaagactatcacaatggaggagaaattgaactcaatcacactgaaacagacaggagaattttaagcattgaggtgagttagtaagtactgaaagacactagaggtgagatcggtaaatgggatcaggctatctgtgtttgctaattggcacctactgaagttaggcttctcctttcccac

SEQ ID NO: 260016 - DNA, 399 bp, Homo sapiens
acactcaaaatagataaagcaattagaaccaaaacacaaatgcagatatgacatatatggtggaactgtcccataagtattcttaaataactatgatgaatatgttgaaggctttagtggaaaagctgggcaacattcaacatcagatggttaatttcagcagagatacaaaaattttatttgaattaaaaggaagtcctagaaatgtaaaacatagtaacagaaatggagaatggctatgtcagggtcatcagtagaactggcaggcagtgagctgaaagataggtcaatagaaatcacccagactgaaacacaaagagaaataataatgaaccattcagaacagaacacccaagaaccatgagaaatatcaaatggtacatgtaattggagtcttgg

SEQ ID NO: 260017 - DNA, 677 bp, Homo sapiens
cacatatacagcattggtcccatatgatagggaactggaaaattcccatcacctagtgacaccttgatgatcctgaccccatctaggcctagattaatgtttgtgtgtcttagtttttgacaaaaatgttttttttttgtttttttgttttttttttttgagacggagtttcactctgtcacccaggctggagtgcagtggcacgatcttggctcactgcaacctccaccttccgggttcaaatgattctccttcctcagcctcctgagtagctgggactacaggcgcctgccactgcgcccggctaattttttgtatttttagtagagacgggttttggccatgttcgtcaggttggtttcaaactcctgacctcaggtgatccgctcacctcggcctcccaaagtgccgggattacaggcgtgagccaccgcgccgggccgggtatatagatttgaaagctcagtgttggcacagtgaggtgggctctgagtaagggcctgtgttagtttgcaagggttgccataacaactggcaaccgacagaaccataacaactggcacccacagattgggtgggttaaccaacagaaatttatttatttttattttgagatggcgtctcactctgtcacccaggctggaatgcattggcgcaatctcggctcactgcaacct

SEQ ID NO: 260018 - DNA, 493 bp, Homo sapiens
cagagaggagagcaggattttagatgcagacctgcctgcccaccatgtccatgttctatgaccacacttttctctttcctgttcacgccacaaaagatctcaccggctgtgggaccagcagaaggaacacaaaccttcaggtactccccaaggttcaaattctcaagctagcagcgacagcactcagaggccagggaccatgatctgttcatcttatgccccagcacctgtcttaggactcggcatataggagtcactcaacagtttgctgaattaaatgaaattgaacttggctttgctgcatttaacaaaaatgtaatcatcaattataatgtatacctttgttttttattcctaagaagaaagcactactgattataactgtaagatatataccaatcaatgatgtacatcatcagttttaagagatgttaaatctgatttcaattttagagatgttaaaatatgaaaatgtctgattaatgatataact

SEQ ID NO: 260019 - DNA, 301 bp, Homo sapiens
agcattcagagagagtgcctgaaggagcagaggggacagaagagtctgttggcctggactttgagaaggcttcctgaagcagcaggaagaacttgagaaagacctttaagcatgctgggatttgtattcgtggatgaaagtatgagggcatcctaggtagaagatacagcatgagcaaaggaccaggagcagacatgaatgagaagaagggagtcttcactctgggaatgggaggatcttcaatgagcagggactaatttttccagctgactctgaataaagatctacaaaagctgtcagc

SEQ ID NO: 260020 - DNA, 460 bp, Homo sapiens
cggccctgggctaaccaatggctgtctctgttgccatccctatgaggtctcactggactaagtccactgaccttgcttctagcccctccttccactttacctctcaccagctacgtactttaggaaagccctttgacttctttgggcatcagtttccccatctttacaaatgagatgtggaccaggtgagccttaaggtttctcctagaactagtgttcaggttccttgtgagggccagtggctggcacgctcatcacaggccaggccacacctggatcgtaggaactaccccattccacctctctggaacattcctccaaagagaggaactcaaaacatccttttagggcaagggttgcaaacaaggttgaggaccacacacagttttcccatgagttttatttggcctgcagttttctagaaatgtgaatttgcggcaaaatcaagtttccaacctct

SEQ ID NO: 260021 - DNA, 516 bp, Homo sapiens
ttcagacctgtagatgggctcttcttgaacattctggagtccctgggggaaagggaagtctgcagctcagttggccacctctgcataacaaataccgagagcactgcaagtggagcttggacaaggtctggaaaatcagccttcttctggatgcctccagcctttgctatcatctgcctaggaggttggaagttactcaagcggctcaaggaaaagtccctatttctgttgcagttgatttggagttatgtgatgtgtagcccatcagaagtaagcagaaaactttgtgccgttttctgtcctggaaataacacccccgccccctggccccgctgcattatcagccactcctcttcactcctttctatggctccagaagtgaagagctctgaaatgcctaaattgccagatgtgaacatctttactgcttggagaaagccacacaggagttacctgacctgccttggatggtgacatgagtgagaaataaacctttgttgggttagactgctaaga

SEQ ID NO: 260022 - DNA, 655 bp, Homo sapiens
aagacaccaagcttggttctcaagggttagctataacaggataaagggtcactgttcatctcattccattctgcttctgtcacccaacacatgcccaaaacagatgcaatgttctaatgtaaaaacacctagaagaggcatgtgaataaacaatgctcacaccaggcacttcgccagctgaccgtgaagaattcttccttcaccatgagctccagctgctgcccaggacccctggtgaggggagggcaggaggagaggagggaagacagagggagggagccagaaaggaaagggaaagcctgtgcacacgagctaagcttctgagcacatgtcatgtactgaaagagaaagcccaagtcgccccggtgatcatggtgctttgtctccggagggaaccaggggaaaagcctttggcagcaatcagcattctatacaaagcagattgaactctccccacttttgtggaataaagttttataaaatattatttacactgaatgatttaacatttgtagagattcatccttttttggtttttctgtacatgtaagacattcaaaatttgcactaacagaaaacagttgctgcttctaaaaccaaatctgatactaaagaagacaagaagtaagatgagcttgtaaactagcttaaatgt

SEQ ID NO: 260023 - DNA, 430 bp, Homo sapiens
tgctcaatatttctttttgctcatagccaacaaaccagttatattatcattttgtgaagtattgctatcaaaaggtatgtttctcttgcactttccctgcctagactggacactgtgaagttgctgtggctgcatttctcaggtctggctgttccgctctcacttggtccagggagtgggggggattttccaaataaacagcacaatggattcaacagcagcagtaaatgttaggaggaatatgtaggtgacagaagctctcgtcgcacctgacttctcaatgaaaccagtgatgaacccttccagtacaaaaactaagtgaactacacctccagctgttgagccctcctagttctcaccccactccagctcttcccctctctcagttgtcccaattgtaactcaaaagatggaatatcaaagtcttaaa

SEQ ID NO: 260024 - DNA, 226 bp, Homo sapiens
agatggctacattcttccagcatggtctggtttctgtcccattctgttccttatgggttttcagctcctctgaagtagagaaagcacaggccgcctcaggattcctctgtggatgttgatcatgttgatgatgacgatattgatgaccaacatgtattttccaaatactcgtgccttccgtaactcagctaagtctccagagaccctggttcctccaggagtgatc

SEQ ID NO: 260025 - DNA, 381 bp, Homo sapiens
gtgactcaattatcctaattgaacaacaagtattagccattgttaaacactgcttagaacattaatgctgattaaaactttaccttgaccatatccagttaaatcctacccaagttttggatttcttctggccacatgtacctcagtctagattctatcttcttgttacacagtgcttttataccactctgtacctttctagaagaaatagtattactgctagtaattatatatttctgagtttattagtttaatatttatattctcattggattctaagttctgtaaggaaaagaatatattttgctcagaattttatttgtgctgcttggcagtggctggcacatagtagtcctcaataaacatttgttggatcaacaa

SEQ ID NO: 260026 - DNA, 408 bp, Homo sapiens
cttacctctgcattacacgtattgtgttacacatatacgtgtttcaggcttgagcaaagggctcattttacaaatcagtggggagatataagtgtaataaatataaataagaattgagttttaaaaaatacctaagttggtcaagattaaaaggcatgatagcaggcactttaacagcaaaactgcaagagacttaagctgagtttgggcaactgtgatgtgactggcaagatgctaaattagctttagacttaatacaataagaacagaggctataatgaagaaggtgattgtcttgctctatttattcattctttcattcaacaaatatttattgagtaccttgtgtgccaggcactgttttggtgctggatatttagaattgagcaccacaaagtcttcggccac

SEQ ID NO: 260027 - DNA, 469 bp, Homo sapiens
atttattgatttctggcttttatcacattgatctagctcaaatttagttgattttgagtgctttgtcagaaacagaacttccaattattccattgttctaatgggaaacatatgttctcctttacgatcatggtttatgatgggaggttataggattgtatttcagggactgtcttttaagaattgtactgcactaaaaaaaaaaaaaaaagaattgtactgcactagtctccagaacaaagatgaattaatatctatggtaatgtcttggtcatttgccatctgtggctcaatacttactttgctaatacttaatatgataaatgctattaatatataattcattctgccatgttagctttatataaaatgagctgttttgaaatattaaatttgagaataattgcataatatagcaattcaattttcccatcacaaataaaatattattgaatattaaatacctaaa

SEQ ID NO: 260028 - DNA, 428 bp, Homo sapiens
ggtctgcacagtggctcctgaggccgagttgatcaaaatgtaatcagttctaacgcaagacctatttgatgacaggtatggtgtggccgtgtgtaactatccttacaattaattaacttttcatgtcgttcattaagctccataacttatgaggccgggcactgtacagttggaagtcacagaagggaagactggagttaaaccgtgctagggtgtccctggcatgaggggcaccctgcgtggcagctcccagagctggtgtctgtgcacaagcatggtggggcttacccgacccctgcccctggctcagctggggactcatggtggagcagctgcagtcgctgtaggatcattccctttgtgactggaaataattgtatttgtgatttgcacaatgctgcaacatattgatttttcaattacgccgg

SEQ ID NO: 260029 - DNA, 402 bp, Homo sapiens
tgctgcaaccatcacaaaaggaaatgccagtagaaaactaatttggtatttgttgttttgtttgtttgcttgggtttttggttttgttttttgtttgtatatatgtttccttatgtttcttacctaataagctgaaatggagccttctccttttctttcacttaaagatctctcttagctgtaatggtttgctctccaggcattgtctatatctaaacagaacaattgaattgatttgcttttctatgctttgggggttttgtctgattaccccatttaaatggaactgtttgatcacaaattggaagttttgaagcctgcaaactgggagatcttctgctatctctaaatagcaagccactgatttccaatttaatatggttacttcatttacacagggtt

SEQ ID NO: 260030 - DNA, 874 bp, Homo sapiens
gagacacacgggtcaggggggtgatagcacagtctaggttttagtgaccttggggccaagagtgaagccacactctcctcccacggggcaggggaccactggctcggtaagatctttaaaatgcagtgatatcatacctgtctaggagaactttctctcactgccattctaggagggaggctcacatacattgtctccaggaggccctccccgctgtcttttaaaatgtccacgttttacaggaggggacagcagcagatggaactaacaaacacagtaggatggcttgacgtctcatttgcttgatgacacttgccaagccagagaactgtgagcagacaaatgtaatgaatgactaaggagatgcagggcttcatatgttgagaaaatattttcgtgcattatgtcattgaattctcccaacagccttgtgacgtaagtacagtttggattcccattttacagatgagaaagctgaaaactcaagtaggaactcaagatcccacagccagtaagtggcagaactgagattcaatttcaggtcttcaggagaagggcggggggtggtggtggagggaagtgtccaggtcctcttctctgttggacagtagattcaagcacattagaagaggtcttatggagaagcataaaatgaaataatttttctgtgttggctgtaactcctcctccatgacagctatacttcagttgtgtcaccaacgaaaacagaggctgtatctcattcatctttgtcttcccaaggcctcctgtgtgcctggcacagaacaggcactagtgtgtgtgtttgctgaatgaaagggtatttgagagtttctgtgctgtacgctgctatatggaaatacatgccagatat

SEQ ID NO: 260031 - DNA, 472 bp, Homo sapiens
ctgtggcagagacggagaagatgaacagggattttataccaggcgtcagaagggaaccagtgctaaagaaaatgaaaacaccaggccgggagaggcagctggcatgcgggccgtggtggttttacgtggccgatttgagagagtgagacccctggggtcttggagccaggcctgggaaaagctacttcacgtcaggccaggggctgtagccctggcaacctccactccgcctggaaatcctccacctcggggcctctctttgcccagacctggcccaggaggagcacatgggagccgggaccttcccaacaatccttgccgttggctccacaaacctcagccagtcctgcaacctgggatgccttttccaccaggatgcctgctactgtcactgttgtcattagataattaatgaactataattagaaatcatatcaataaaatttcacagtctaaggctgttgaaatagga

SEQ ID NO: 260032 - DNA, 650 bp, Homo sapiens
ctgctgaggcgcgatggctgcgaggccgctaggggcgcttgcaggcggcacagactggtggagccgagtgacgcggccgccagaggtttgggccgattttggagaccggtgattaggtttctttctgcctgattcagtcctgctaagttaaaacgtgcaataatcccttactgccaaggcacacgtttctctgtgtttcaggggtatcaaaagcatttgctaaacaagtcaaacccgtcgttctttcggtctattctatcagtgcctggagaggaatctggaagaaggaggtggagaaggaaggaagggcgtggagggtgaagacggccctgtgttcccctgggctggcccggccctcctttcccagagcttttccccctctcgccgtcactcccgggggccctgggccaggagggaagggggatggaggggagaacggcagccagaaaaagttgatcatgagatttgcttgaatcataagtgttcaaccattctgaatgctatatggccagcactatggcctgtgccaagggattatatgatgatttacatgaggggttttgggggtggaacttattggcctaatgggggagaggtctggtctatgcatttatgcttataattgataacttggtacacactagggaagg

SEQ ID NO: 260033 - DNA, 308 bp, Homo sapiens
gtgggaggtgactggatcactggggatggtttctaatggtttagcaccatccccctcctggccgttcttgtgatagagttctcagtagatatgcttatttaaaagtgtgtggcctggccaacgtggtgaaaccccatttctactaaaaatacaaaattggcctttttgcagtggcacatgcctgtaatcccagctactcgggaggcttaggcaggaggatcacttgaacctgggaggcggaggttgtggtgagccgagatcacatcactgtgctctggtctgggcaacagagtgagactctgtctcga

SEQ ID NO: 260034 - DNA, 350 bp, Homo sapiens
ttgtgcatgaggacagatttcaaagagtgcatgcccccaaaatgcaaatgcctgttgcaaatcaatgggaaaaagagtttaatactgtagatggcattttaatttaccttcagtttttcaggatgacacctgtgtatctctcctgtatctctccttggatatggtcagaaaaacctaaaagctcagataatcctaagccaatccatgcttaggcttttaaatttgcagatttaccttcctatcaacttatttgaagctaacattaagatgagtttgccttccctgagcaaatgagcacaggtgttagtccagaaattgcaggaaaccagaatgtaaccagccacaccggg

SEQ ID NO: 260035 - DNA, 644 bp, Homo sapiens
aaacatttgtcaaaatatcaaactacaatatgaaagtgtgagttttactgtacaaaaattatgcctaaatagaccaaatttttaaaaaacctaatttaagatttttaatctttaagaatcctaggagagaacatattttttaagttttaatttcattcatatcactaataactacaacttattacatgtttcctgtggtgggtcttttacccatattggctcatttcgtcttcatatttaagtatagttccatttttatagatgaagagaacctaactctgaaaattttattatccatgtcaccctgagatgataaacatggactttcaaaatctaaagcccttcctttcccactatgttttgctgcatctcaagtatttatttaatgcaaacatgttaactgtatttacattaattcatgcagtccttggaaccaaagtgtaaggtgtatgccgttatatccattttcagatatggaaacagagggtaaattatttgcctgggtcacatggctcttacaaatggaggccaatcctgctgtaattcaaaagactatgctctctctactctcattgccccctataatgatctggtcttgaattgtctgtgtgtgtattctaataaaattgtattttgtgacactg

SEQ ID NO: 260036 - DNA, 621 bp, Homo sapiens
gacatggtggcgtgctcctgtagtcccaactactcggaaggctgaggcaggagaatcgcttgaatctgggaggcggaggttgcagtgagccaagatcgcgccactgcactgtagcctggctacataacgagactctgtctcaaaaaaaaatgggaagaacaaatagatatgagacatattttggaggtaggattatgactgattggccaaggccggtgaggaaaaaggaggcattaaggatgactccaaaacaagtaagaatgtctcaggggccccgaagcttggctactttgcccgaaatagattcttctggtcctgggatgctccatggatcatggcttagcacagatttcacagccagacagtcctaaccaggcctgttgagctggtcatgggagatagtagttccttattgctttctcgtatattctgttgatgattcttaaggcatcacagagtagaggtcaatgataaagacgatggtagtacctactaggtctccaaagcagacatgacaccaaaatagggtattcactttgaagttcctacttaaatttatgtgtactcactctaatttttttgagtagaaaagagtaaattcatgtagtttaatttttcttt

SEQ ID NO: 260037 - DNA, 327 bp, Homo sapiens
cctttctcgaggtttaccggcctatggtagggatacttttctcagtagcttctttctctgcctgtatcaggcccagcctcaagagagccagtaacatcttgtgtggtcatattttcccaagccagccatccttctatagccctgagagggaagggagggtctttctggctcagaggcttgacataccatcagtttggaaagagccaggttctcccttctcagctccgcatgccaagtccccttgctgcccatggcctctccctcccctgtctgctgtgtgatggggagtcatgtaccacttcaccaggctgctggcactggcatgga

SEQ ID NO: 260038 - DNA, 750 bp, Homo sapiens
ggtaatacttcaaggaagattcttcaactttaccatccactccctctactaagtttacctgttttatattgaattgctaagtttttttattgttctttatctctatagcatcctttcttgactcactaatgcagtaccttttcttactactctaaggatattaagcaaattcacttaatttgggggttttcctgaaaatttttttgttccctgcatcctggtctgttcttttcctcctttgtgtgtttggcctctgtcatcttggagcctttctcagatgtgtggtgatcctcagctaccctttcatattttagagggaggcactaaacatggtgactacaatttgagcaaaggccaggaagagagatgtcacaaagtgtgaacaggaagccacacagggcggctgaagtgttggtaccagacagtggttcctcaggcaggggcaagcagctctgatttgaacccagtctcttgcctttgaggccagtgccttgaccaccatgtcagtgttaggaggaaacattgcttaatgttgaccagtcagacttctctaatttggtgtctgcaggtggagttttgtttttgattaagggactagtaaggctggaaaagaaagttgaaaattaatctgagacatacaccagggaagaacggctaacctctagtgtctacacagctcaaacaaaggaacccatcattatggtattcttttactgagagcgaaataaaatgtcaaattagctgagcaaa

SEQ ID NO: 260039 - DNA, 403 bp, Homo sapiens
catgaatgcatgataaaactgagtagttaaagttcattgaggaacaggacatttacaaaactggaaagcatctcctcaaaattgcttcagagagtagagatctattggatacttcctcaacttagtgattaaagttaatatccccagtactgtgacaagtcaacattatatgtttcttacatgatgcactgagaagagcccaacatcacttatttggtattcttgccaaaaatgcattaactaaatataataatgaagaaacatcatataaacccagattgatagaaattctacaaaacagttgccctgcaatcttaaacattgacaaggtcaagaaagaaaaggtaagactgaagacctgtattcccagtcttttagtagactgaaacacgacaactaaatg

SEQ ID NO: 260040 - DNA, 253 bp, Homo sapiens
acgttctcagatcactcactctggatgaagttagctgccatgtcgtgaggacactcaaatagcctacagagggcccaagtggcaagggcccgtgagacgccatcttgatgtcagctccagtcaagcttttgggtctctcagatgatgcagcccatcatctgcacctgggccaaaacctcccactaagctccccacaaattcctgacccattgaaaccacaagatagtcaatatttgttgtttaaagccaccaa

SEQ ID NO: 260041 - DNA, 427 bp, Homo sapiens
cagtcatttaaactttcacatagatattatactttaaccattttaaacatcattgcataccacttttctccccctcccccacccttgttttctattgatctatggaatacaaaacaaaaaataagatttcaagaaggacaagttactgaattaagaacattttatttgtctcctcttgtactgtagattttaaaatcgtctattttcctgatgcctcaacatcaccacaagcaagctgtaagcagcgggcccaggagaccaggtgcaccagtgggacaaggctggtcaccatcacagccttcccatcctgtcctcccctggttgtgacctagtgacactcaaacacaccagtaaaatcccttcaagccttttgcttgtgtgctccaccctgccccccattaaatacccttatgcactggtccatact

SEQ ID NO: 260042 - DNA, 573 bp, Homo sapiens
acttgagtattgggcatgttgtcccaatctcacagctaatacgcagcagggatttggtcaaatctgtgtgacaacaccacttcaccaccaattttagtatgaaaacctttaaaatacacagaaagttgaattctacagtaaactctcctacacccaccatctggatcctgtcattgaactatattatatttattacatatccatccatcactctatccatccatcaattcgccttgtttccaagtgaatacccaaagactacccaaaccagaaaaccagcaaaggccttctgcattcgcctggattaagttctgggagtagaggtgctattctacctcggtgatgcgaagaaaagccgcagcactgagcctgattgatgtgctttgcttaaagtttgcaaaattccataaacctgaaaattactgtcgattatgcaagatgacaattgcgtccaagcaggagtttcaaaaatcataaaagctagggggaagtccccatttctagactaaaattccgaagtcgagttccatgttttatattctaaataaaattgtggctatccaaggttatcgg

SEQ ID NO: 260043 - DNA, 1167 bp, Homo sapiens
ttttatcatttttcagagaagcaaaccgggatttagagaggttaagtaaattcctaaggtcatgataaccaaccagacctcaaatgaatctccagtaattcctaaagttatatttcataaggagttcaattttcttaaatgtgtagataattacaaataattctgtttctcaaatttctggacagaaatattacctgggtaatagttattttttttaacataactattgagggtctttcatactaaaatataaatatttaacatgatttgatatgtaagttcaagtattttatactctctgcagccttaaacctattggcttattttattagagggttggtgggattgagggatatgggagcaaagggagagagaggaaagaacgttgtcctcagaatggaagggaaacactttcctgtgctacccagagtagagatcagacaatgttaaattttgaagccatgtctgttcctgtcctgaggatccctaactaaattgtgttagaaaatcttgcagtttgcttttaatgggagatgtttctggcaggacatcaatagcttttgatagcgtcaagaagaaaataaagttacatgcagaagcataaaggggtaggatgaaagttgaggaatatagggacaaaagatgagggaaaggaatatcctaatacttggaagtttgagcatggaaagtagtctaaagacgacttgggaagttccaagaaaatgaaccaagaaaagaacctctgcaagaactatgagaattcccaacaattgggttggattgattcatattagtctattacttgggttaccttgagtgtggggattcttcttgcagttttaacacttgtactatggtctgaatgtgccccccaaaaattcacatgttggcatttaacccccaaagtgatgatctcaggagatgggacctttgggaggtgatcaggtcataaagatgaaaccctcgtgaatgggattagtgcctttataaaggagaccccaaaataattcccttaccccttttgccatgtaaggttatagggaaaagtcatctatgaacaaggaaatgaaccctcaccagataccaaatttgtgaatgcctggatcttggacttcccagcttctagaactataagaaataaatttctgttgttcataagcacccaaa

SEQ ID NO: 260044 - DNA, 167 bp, Homo sapiens
tcaagcttctaacgatgtacggggacatgtaaggttatagggaaaagtcatctatgaacaaggaaatgaaccctcaccagataccaaatttgtgaatgcctggatcttggacttcccagcttctagaactataagaaataaatttctgttgttcataagcacccaaa

SEQ ID NO: 260045 - DNA, 678 bp, Homo sapiens
agcttttccaaaatacactgcccctccttcctcaggaatctctggcacaggtatgagatcctggcaggtatgagagaaaggaaaataagagaatctgcctggtaaccatcagaggcaaggaattaacatattatctaaaactatgttaaaaggtcagagcccaccacagtggtgcatgcttgtaatcctagcgctttggaggctgaagcagaaggatcacttgagcccaggagatcaaggctgcagtgagccatgaccacaccactgtactccagcctgggcacatcaggcatcagtattattctagcaccccagttgacttcaatgagcagcaagggctgagaaccgctgcttcacagaagggagcatgtcctgggggatccaggaaggtctttccaggcctgatcttgttggttactttcatttcccgacaaagggctgctagatcctcctgtggctctcttggatcatccttgcgttttgcaaaatattgctttctttaaacattcaaatatgtggctcctctgaaactgtgaacatttctgaagatcatcatgaactgttggtaactgtaaaatccaaggaggcagagtcagaggaacaggtatctggagacatgggtggctgctgctcccagcatcaaaagcgttcatctgaagtcatcccgtgggtggaagc

SEQ ID NO: 260046 - DNA, 349 bp, Homo sapiens
aagtataaatcagaacgaaagaaattgcttccctagaacaaatccattgactgagatatgcagtgaaaggaatccaagctggctgggaagaaaatcacttggcccccgagataaatgtggtcaaggaatcctgactgacaacgtcagcaaaagcagaaagatttcgttgcagtttcggtaaaaactgccctcatcaaatgaactgaaaaataatcctttctccagcattttcaggaagagtttgtgaaggtttgatatatcttctgcaaatatctgacagaattcaccaacaaagattgtattgtattcaagcatctaatctggagattaaaatataataacctgcaaa

SEQ ID NO: 260047 - DNA, 321 bp, Homo sapiens
ccccaaaatgcatatgttgaacccctaacccccaatgtagctgtatttggatatggatatggtggctctaagaaagtaattaaggttgaatgaggtgttaaagatggagccctgatcccataaattagtatcttcataagaagagacaccagagagctcactcactctgaggaacacagaggaaaggccaggtgagcacacagtgagaaggcagctgtctgccacctacgaggagagccctcaccagacaccagctctgctataccttggtcttgaacttccagtctctggaactgtaagaaaataaatgttcgttgttta

SEQ ID NO: 260048 - DNA, 1104 bp, Homo sapiens
ccagagagagagttgggtcctgagagaaaggaaggttgtggtaattgacacccctgaccttttctcctcaatagcttgtgctgaagacaagcaacgcaacatccaacactgcttggagctctctgctcccagcctccatgctctgctcttggtaattgccatcggccatttcacaagggaggatgaggaaacagccaagggcatccaacaagtgtttggagctgaagccaggaggcacatcattattgtcttcactcggaaggatgatttgggggatgacttgctgcaagatttcattgaaaaaaacaaacctctcaagcagttggttcaagactatgagggccgatactgcattttcaacaacaagaccaatagtaaggatgagcagatcacccaggtgttggagctccttcgcaaggttgagtctttggtgaatacgaacggaggaccctatcatgtgaacttcaaaactgaaggcagcaggtttcaagattgtgtgaatgaagctgcatctcaagagggagacaagccacagggcccaagggaaaggcagctgcagtccacaggacccgagcagaatccggggacatcagaactgacagtcctccttgtggggaaacgcggtgctggaaaaagtgcagcaggaaacagcattctggggaggcaggcctttcagaccggatttagtgagcagtcagtaacccagagcttcttgtctgagagcagaagctggagaaaaaagaaagtttcgatcattgatgctccggacatctcatctttaaagaacattgactcagaagttagaaaacacatctgtacaggcccccatgccttcctgctggtgacaccactgggcttttacactaagaatgatgaggcagtgctgagcaccatccaaaacaattttggagaaaaattctttgagtacatgatcatacttcttaccaggaaagaagatttaggggatcaggatctagatacgttcttaagaaacagcaataaagctctctatggtctcatccagaagtgtaaaaacagatatagtgccttcaactaccgggcaacaggagaagaagagcaaaggcaggcggacgagctcctgga

SEQ ID NO: 260049 - DNA, 1675 bp, Homo sapiens
gttcttgcagcccttctgaagctcagcctggcaccggccccggcgccccagcccctggccaagcctctgctgtcatttctcctccctcctctcagtctgcagctgcgggacgggccgggctcctcagtttctgctgtgttgtgaccccacgaggcgctcagcacccagggaaggcgcgtgtgtccccgatgctggctcctccctgagccccgacggctctcgaggttctgagcctgtggcctgcacagggaacttcctctccgactgcatttatgcctctgtggatgtgaaggctatttctagaaatctcttcctttgcagaaacacccgaaaccctcctgccaggaagaccagggcctgggaagagggtcgctctccggccattctcccctcaccctcctcaccttcctcacatcctgtgccctgggggaccagcagctgcttccacccagaacaagcgggagcctgtgtcaggaaagcatgtcagagcagagctgccagatgtccgaactgcggctcctcctcctgggaaaatgccgctcgggaaaaagtgccacaggaaatgccattctgggcaaacatgtgttcaagtccaagttcagtgatcagacagtgatcaaacccctgaccttttctcctcaatagcttgtgctgaagacaagcaacgcaacatccaacactgcttggagctctctgctcccagcctccatgctctgctcttggtaattgccatcggccatttcacaagggaggatgaggaaacagccaagggcatccaacaagtgtttggagctgaagccaggaggcacatcattattgtcttcactcggaaggatgatttgggggatgacttgctgcaagatttcattgaaaaaaacaaacctctcaagcagttggttcaagactatgagggccgatactgcattttcaacaacaagaccaatagtaaggatgagcagatcacccaggtgttggagctccttcgcaaggttgagtctttggtgaatacgaacggaggaccctatcatgtgaacttcaaaactgaaggcagcaggtttcaagattgtgtgaatgaagctgcatctcaagagggagacaagccacagggcccaagggaaaggcagctgcagtccacaggacccgagcagaatccggggacatcagaactgacagtcctccttgtggggaaacgcggtgctggaaaaagtgcagcaggaaacagcattctggggaggcaggcctttcagaccggatttagtgagcagtcagtaacccagagcttcttgtctgagagcagaagctggagaaaaaagaaagtttcgatcattgatgctccggacatctcatctttaaagaacattgactcagaagttagaaaacacatctgtacaggcccccatgccttcctgctggtgacaccactgggcttttacactaagaatgatgaggcagtgctgagcaccatccaaaacaattttggagaaaaattctttgagtacatgatcatacttcttaccaggaaagaagatttaggggatcaggatctagatacgttcttaagaaacagcaataaagctctctatggtctcatccagaagtgtaaaaacagatatagtgccttcaactaccgggcaacaggagaagaagagcaaaggcaggcggacgagctcctgga

SEQ ID NO: 260050 - DNA, 539 bp, Homo sapiens
ggcgggcccggcccgggaaggcaggagttggtttttaaaggcaactggttttaaagccctttgtcgaagttatacggcccgcaagggacattctattttacttcacattcacctggtgaacacaccatttgcttagaatctaattctacaaggcttgtgtaatttggagggagtaggctgcggatccacttagatattcgagttggagaacacgaccttgatgcggccattgctcaagcaaaggacaaagttaatgaacttaccttcaagcttgaacatctaattgaacaaattgagcaaatagtcaaagaacaaaactatcaaagggaccgtgaagaaaattttcgaacgaccagtgaagatacaaatagcaatgttttatggtgggcttttgcacaaatattaatctttatctcagtcggaattttccaaatgaagtacctgaaagacttctttatagctaagaagattgtttaaaatattatcaataaggacaaataatctgcataatgtttgagttaataaatcaaaatacctgc

SEQ ID NO: 260051 - DNA, 531 bp, Homo sapiens
ggctcgactcctggtttgggaatgtttgtgatattccaacttacaatgatgagtgtcgaagttatacggcccgcaagggacattctattttacttcacattcacctggtgaacacaccatttgcttagaatctaattctacaaggcttgtgtaatttggagggagtaggctgcggatccacttagatattcgagttggagaacacgaccttgatgcggccattgctcaagcaaaggacaaagttaatgaacttaccttcaagcttgaacatctaattgaacaaattgagcaaatagtcaaagaacaaaactatcaaagggaccgtgaagaaaattttcgaacgaccagtgaagatacaaatagcaatgttttatggtgggcttttgcacaaatattaatctttatctcagtcggaattttccaaatgaagtacctgaaagacttctttatagctaagaagattgtttaaaatattatcaataaggacaaataatctgcataatgtttgagttaataaatcaaaatacctgc

SEQ ID NO: 260052 - DNA, 461 bp, Homo sapiens
tcaacctcccaaagtgcttggattgattacaggcgtgagccactgcgtctggcccattatttcagtttttatagttaatttatgtcttgtgtttctttagttttagcacccattgaagtttagtcttgcccagttttaaaatttgagcttttttccccccacttttttaaatctaccatgttggtttctgaattttgatgtgtcttttaattgacaatggaattttaatttttttacacaaaattgtactctgctttaaacagacctcaattataaaaattaatattcaaagtatatacaaatgttcagaaatacagattttctttaaaaattatattctagggccagatgctatggctcacacttgtaatcccagcactttgggaggctgaggtgggaggattgcttgaggctgggaattttagaccatcttgggcaaaatagcaagcccccatctctgc

SEQ ID NO: 260053 - DNA, 333 bp, Homo sapiens
tgctcccattgttatgataggctggagtttacggagacagttttaaggctgggagtttcccagacgcggcgccacaccatcctctcctcacctaggtttcccttcactgctcattgtgcccacacccagttttgcagaggattttctgtgaatgtgtagtgcacagacacgcatactctctttcctaagctcgggaacttaacccccagtaagcttaagctttcaggaaggaagaaagaaagaaaagtaggtattcacaaaagggttggggactccagacgtcagcattaaaggtaggtctaaaaagggattagcagaatagcctggacgaca

SEQ ID NO: 260054 - DNA, 1042 bp, Homo sapiens
tcgtgccattgcactccagcctgggcaacaagaccgaaactgcatctcaccaaaaaaaaaaaaaaaaaaattactaggaatatggcagagtaaaaatagactcaccaaaataacaaacatctgaatttttaaaaaatattcaagtagacaaacttcaattacggtaaacaaagatagcacctcaggctggattttagaactgtggaacagcagcaaagagaaaagctgtgcacaaacccagagaaaacaatggtagcagaagaaacagaaaaaatccaaaatgtgaagaaattggaattgtcagtaacagggctggaaaggataaaaaacacaaaggctattaaaaggaactgatcagggaaaaaaaataagtagattaaatgtgaggcatggtgccacacatctataagcccagctactctggaggctgaagcaggaggattgctggtgctcaggagttcaagtccagccaaggcaacatagtgagaccctttctcaaacaaatatatacatctggttagaattagatgaaaaaaagctaaaacattgcgatgaaacatattttaaaattacaacatcctttgatgaaaaaatggaatcgaaataatgaggtagtcagtaaaattaaggctaaatggaaagatcccgattaaaacatagatggaatagacaaattgattatggcaattccaataaccctaggtggttgttgttgtggttgttgttgttcccccgcccaactgccctttaaataatgggaaggagtgtaaatcggaggaagcctcagaaaaggaaacattaaagaagttactgtagaaaaatagacttttgcctacagactgagaggtttcggagttacttatttccagatttggtacttaaagacaaaatacccaaatacctacttgtcagtttcttaaaactggaaagaagtcttctggtgtatactgagatttgaaagaaaaaaaaaaagcttgaaagaaagaagagttatcctctgaagaataaaaaataaggataacctcaaactttaaactcaaac

SEQ ID NO: 260055 - DNA, 463 bp, Homo sapiens
ggcttttcaattaaaaagtagggcacagaaacatgagcacatttagggaaaggcaaattcatacaatatgtggacaaaattagatggaaatattatgttgagtcacatgaaattgtaatatttgattactattttttaccaaaaacactggcagttccatgtggattcacctaatatactcagtgaacaagcatttgtggagtgcctgttttgcaggtacaatccaagtacgaagaattagaaatgagacacagtctctaccctcaggctccttgtctatgtagagatggacatggaaagccagtgagaggtcgaataggaattataaccaaagtcttctgagtcttgtccctctcctgtgcattagctatggcatttgctcttaattactgggaatgtggcctctagatgtcacaatcacttagtagtccttgaataaataaaatatttaatatttgatata

SEQ ID NO: 260056 - DNA, 613 bp, Homo sapiens
caggaaatgactattagttgtacgtggccatgtgttatgaaatagtgaatactagttaaaactcctcattttatagataaggaacagatagatagacttgtccaacttcatgctaataaccacaaagggctatttttaacttatgaaggtacattgcctctgatcctatagctcagagtcttagctgtgcacaagacatacctgggataaagaaatcaagattggcgtaatgtgcacatcctgacatttcagttggatataaacaaaactttggaatttttcatttttagcagtgggtgattttttttctttttttcttccagtaactgtaggacagtgatttagagattccttatagggtataacttttttgtattataaccacttcatcaatagatgtatctgttgatcgtacttttgatttataggggatagaattgggttagtgcttccattttctgtccaagtaaagaagctaggatatttatagagtacaaaaagaaattgaaacagctggtacagatatttggcattggagagcagctctgaacaaaggtgaattatagtctagtggtcaattttgtggcctgttctttacaaagaattgaacctg

SEQ ID NO: 260057 - DNA, 449 bp, Homo sapiens
attcagaaatttgtgggtggaagtggggcaaatgacttaaatgagtggaagattgtgaaatctgtgtgggcagtcaggcattgttgagaaggaacttctccagtacctgccagaccaggccttggaggctgagtggtgaggatcaatctggtctgaacggaggggtcgattgaagaacgttccttagaactgaagggcctaactacaagcagatccccttctccgctgtttcacttaccatggtttcgctttctgccatttcagttacccctggcaaaaagcagtctgaaaatagatgagttcagtacaataagatactttaagaaagagagagaccatatttacgtaatttttattacagtatattgttataattattctctgaggaaaatgggcggactactgtatatagagccaaagaattcattaaatacacagcaaaataaata

SEQ ID NO: 260058 - DNA, 416 bp, Homo sapiens
tagtattgcattaatagttgaggccatggattttattgccagagatcactaaagattgtatcttgacattgtcacttaatgccttagaaccactggcacatttcttaacctctccacgtctgtttcctatctgtaaaatgtgattcatgatagttttttatattgagatgttgtgaggaataaacaatacactgtaatgtatgtgcagcaggtttataatttttagacatgtcttttcccctttacatgttgtaaaactaattcaagtttggggcctagatttagctaacagtagcatcacatgggctgatgtctggaatccttactggaaagacagatgcttagtgaatttagagatcacaactgcatttatgtgttaaggtttttaacttaacctcaataccctttgatttttc

SEQ ID NO: 260059 - DNA, 303 bp, Homo sapiens
ttttattcttttccaaatacttatgatggtgcttagttcattttcagacttctttctttctaatgtatgtatttatggttgatagactgccctcaaaaatactggttttgacatgttacattttcattacaatttggctttaagtatttttaaaaattcattatgatttcttaattgagcaatgaataattaagtattctatttccaaagatgtgaggactgtaaaaatataattttgctattgacttttaccttaactgaatttttgtcaaaaatataatctttctttttattttatttttt

SEQ ID NO: 260060 - DNA, 675 bp, Homo sapiens
  misc_feature (519)..(519): n is a, c, g, or t
  misc_feature (575)..(575): n is a, c, g, or t
  misc_feature (614)..(614): n is a, c, g, or t
  misc_feature (675)..(675): n is a, c, g, or t
caataattttgtaagcacctaaatctctgcttgaaatccttcaagttgtttccagtttcttgtctgaacgttgaccagtgttgtccttaccttcttctgcatgcttcttttcttgtaaatgctatttaactataaatttactgctagatcccaggcccacccttcttgtcttcttacttaagacatttcctgggatatcacatatctacggcttctgttatcatccatgtgctgataactcccagtttaacatttccagcccagacccctattgtgaactcccaaattcagacagccaaatccagactggacatgttcacatgactatcttatgtgtatcctgccccaactactattgctttacaccaaactattggaacagcccgtgggagattccctccaactggtagcatatttttcaaaacaactagaccccatttagaaaggctggcctctttgctcattttgtccataccctctctattatccgtaggcacttcacatctatgaacccctcangtatttcttctacagtctgcagacatgctcagccatatgtgacacttcatctcatnctttctatgtaggcctacatgcaactctctttaactgtnttctctctcatagatgctcccattagctccgccactctttgcctcaacacgattatgcccn

SEQ ID NO: 260061 - DNA, 425 bp, Homo sapiens
acaaattcctaaaaaaataaataaataaattaccaaaaatgacacaaaagaaggaaaagaaaatctaaatgtttcagtgtctgttaaaaaaattgaatttataagcaaaacacttgccacaaagaaaactccgggcagatgactgcaccagtgaattttatcagacatttaagggggacaaagtaccaatcctacaccatttcaggaaacagagcagggagaaatacttctatactcattttatgaggcaagcataatcatgccaaattatttttcctgataccaaaatttgacattttgcaagaaaattatagactgatagtcctcatgaatatatatatatatataaattcttaagtattagcagattgaacttgcaatatagaggattacataccatgaccaaggagagtgaacttaacatt

SEQ ID NO: 260062 - DNA, 267 bp, Homo sapiens
gagaagaaagtatatgcagtgaattttataagcatgatatttacaactagaagacatttgaaatagacaaatgaaataataaagcttcgtagtacattagcatagcattgtattttgattttacagtagcaatttcataaaaatgtatcggtatagaattctgagtttggaactttctccaggacacggtgttttttagtacactgtgtctaaacattgggtataaagaaaagcataaggaatgtgtttaatgagtagcattactgc

SEQ ID NO: 260063 - DNA, 189 bp, Homo sapiens
ttgtacacatttatggggtatatgtgaaattttgttacatgtatattgtctgttggtattgttaagactttacttgcaatattaactttagcatttttgtctgttttattatccatccctgactcattcttgagtttttcttttatatttatatgaatttttagtttgtaaaagtgataactgactgca

SEQ ID NO: 260064 - DNA, 184 bp, Homo sapiens
ctgctgtttcctccctgaacgtttcttctccctggttcttgttcacagcccctgatatttcctcccaggctctctcttctgcccacccagcaaatgtttttgttccttacagttccctcctaaatgttctctgttctctcaccgtgttcttcatgagtgatgtaataaattctcaaggctctca

SEQ ID NO: 260065 - DNA, 183 bp, Homo sapiens
ctctttctttctttctttctttccttccttccttccttctgttttttttgtttaaaaaatttcaatcaaatttttaaaatttattttattttaaaataaaataaaaatgaataaataagggctgggcatggcggctcacgcctgtaatcccagcgctttgggaggccaaagtgggaggatcac

SEQ ID NO: 260066 - DNA, 626 bp, Homo sapiens
ggtgctcagcttcagtgaggtaagctgtgagaagtactactcttctctcatacccagtagagagagaaaacttgatcctttttctcatgcccatacacaatgatggttttaagatcttgccatcgagtgggaaaacccctagggcctagagcagaggctgtctgctcccagattctccaaagccacagagctcctataaggggaaggaccaggccactctttgtacgggtggaaaagaatgcaaggagaatatccatggaaaaaaagagatttataatctctcttctcctactgagatcatcactccccacatcacaattcaattatggccttcgcccatgacctagatgacccaggtcacttcatatttcttccttaggaatttctgtgtgtgtgtgtgtgtgtgtgtgtgtgtgagagagagagagagagagagagagagagagagagagacagagtgggcagggagtggtgagttaagccacataaagggcagggaaaatggggcatgaaaaaggtcaacagaagcagaagcaggccttgggatccccctagagtttaccatcaacaattgctccaatcatcaaagcctctacctaggaaaagtactcacttgtcttggaggc

SEQ ID NO: 260067 - DNA, 394 bp, Homo sapiens
cccaaaatgttaggattacaggcacgaaccatgtgcacagcctgtattgtgtatgctagagccaattactaaatctttctgggccccaagggtctcttttgcaagaaggacatagcaacttctcccttccagagttctccatcagaaagaggattgagagggtatgttatagaaactgttcaactctagtgcaaggttttaggagtcttcgtttccttccagttatttgagaaatgtggcttcttcaagcaactggaatactgaaagcctttttgatgggaatcactcctccctaaccacttccacccacaccttctttggtaaaacatttttgagaaaaattggttttgatctgaattctgaggaccaaaacagcctccaaaaatcaagcaca

SEQ ID NO: 260068 - DNA, 672 bp, Homo sapiens
tacctgccctattgacatccaccctagagttcaggatatcatacccattttactgttcccctggcacaattcatagtaaggaaaaacagacaaggggaaagctattagattctcggtgctgctaaacaggacacacaaggacaccattttgtgatgatgatggtgctttatgcagcttccaccatttacaagattttcctgtggtgtggaacctctcatgataaagcaaaggaactagaagcttattccagtcaagatttctgatttatcttgtggtaagcatttgggaaggacatatctgcacatgacctgagactaagtactatacactgaatcagatgaaaattgctcttaggaagcttacaattttccaaatagttaggacaaaaacaaactctccttctctcttcctatatgtacatactgacatctttatcattactgtcttcctagggttatgattctgtatggtttctttggtgctgcattagacctgagctctgattgaaaattcttccacgctcgctacattccaaaactttatctccaatatgaatttccagatgcctcacaaggtctgagctccatctgaaggctttcccatgcttgtcacattcatagggcttttctccactatgaattctatgatgtcgaataaagtgtgagctctga

SEQ ID NO: 260069 - DNA, 726 bp, Homo sapiens
caaacccctctccacacacaaccgcggagctgcctgccaggcctgctcactgcagagccgccgctgcctgcgggacgggcaaaagccaagccgccaggtggacctcggggaagccgccgccaacactcacctcacaggaccaggaggttccatcggggcgctgccgcgaatcgcgccacttacagccctcaccccaggggcaggtttgcgcctgcgcaggtcgcagcctcggcctccaactcccagaatcctcctcgccgccggcttccgttcgcggactttggcccaggcgcgtgggcgctgccgagaggctgggagcccgggaaccggttcctggacttgagcggagcgagaaagagcgcgccgcctgcacgactggactggagcggccgggtgccctggaggcccctgggaattgcagtccttgcgcaggtggagagatgagaaaactcaagactcagaaacaataaaggttacagagatgaaattgacagagcctgaatttcaggttatgattctgtatggtttctttggtgctgcattagacctgagctctgattgaaaattcttccacgctcgctacattccaaaactttatctccaatatgaatttccagatgcctcacaaggtctgagctccatctgaaggctttcccatgcttgtcacattcatagggcttttctccactatgaattctatgatgtcgaataaagtgtgagctctga

SEQ ID NO: 260070 - DNA, 459 bp, Homo sapiens
cagcaaaacttctctaccccggcctcgggcaggtgcccgcccggggagggggctgtcgtccaggccaggtacaactccccttcccacccttcactccctacccaagggtctcgagaaaagagaagaggaacatcaagacccccctccacggcacgtgacgcgacgcaacgcagatgagaaaactcaagactcagaaacaataaaggttacagagatgaaattgacagagcctgaatttcaggttatgattctgtatggtttctttggtgctgcattagacctgagctctgattgaaaattcttccacgctcgctacattccaaaactttatctccaatatgaatttccagatgcctcacaaggtctgagctccatctgaaggctttcccatgcttgtcacattcatagggcttttctccactatgaattctatgatgtcgaataaagtgtgagctctga

SEQ ID NO: 260071 - DNA, 494 bp, Homo sapiens
tacctgccctattgacatccaccctagagttcaggatatcatacccattttactgttcccctggcacaattcatagtaaggaaaaacagacaaggggaaagctattagattctcggtgctgctaaacaggacacacaaggacaccattttgtgatgatgatggtgctttatgcagcttccaccatttacaagattttcctgtggtgtggaacctctcatgataaagcaaaggaactagaagcttattccagtcaagatttctgatttatcttgtgggttatgattctgtatggtttctttggtgctgcattagacctgagctctgattgaaaattcttccacgctcgctacattccaaaactttatctccaatatgaatttccagatgcctcacaaggtctgagctccatctgaaggctttcccatgcttgtcacattcatagggcttttctccactatgaattctatgatgtcgaataaagtgtgagctctga

SEQ ID NO: 260072 - DNA, 747 bp, Homo sapiens
caaacccctctccacacacaaccgcggagctgcctgccaggcctgctcactgcagagccgccgctgcctgcgggacgggcaaaagccaagccgccaggtggacctcggggaagccgccgccaacactcacctcacaggaccaggaggttccatcggggcgctgccgcgaatcgcgccacttacagccctcaccccaggggcaggtttgcgcctgcgcaggtcgcagcctcggcctccaactcccagaatcctcctcgccgccggcttccgttcgcggactttggcccaggcgcgtgggcgctgccgagaggctgggagcccgggaaccggttcctggacttgagcggagcgagaaagagcgcgccgcctgcacgactggactggagcggccgggtgccctggaggcccctgggaattgcagtccttgcgcaggtggagagatgagaaaactcaagactcagaaacaataaaggttacagagatgaaattgacagagcctgaatttcaggttatgattctgtatggtttctttggtgctgcattagacctgagctctgattgaaaattcttccacgctcgctacattccaaaactttatctccaatatgaatttccagatgcctcacaaggtctgagctccatctgaaggctttcccatgcttgtcacattcatagggcttttctccactatgaattctatgatgtcgaataaagtgtgagctctgattacaaatctttgaacattca

SEQ ID NO: 260073 - DNA, 966 bp, Homo sapiens
  misc_feature (751)..(751): n is a, c, g, or t
  misc_feature (754)..(754): n is a, c, g, or t
  misc_feature (790)..(790): n is a, c, g, or t
  misc_feature (794)..(795): n is a, c, g, or t
caaacccctctccacacacaaccgcggagctgcctgccaggcctgctcactgcagagccgccgctgcctgcgggacgggcaaaagccaagccgccaggtggacctcggggaagccgccgccaacactcacctcacaggaccaggaggttccatcggggcgctgccgcgaatcgcgccacttacagccctcaccccaggggcaggtttgcgcctgcgcaggtcgcagcctcggcctccaactcccagaatcctcctcgccgccggcttccgttcgcggactttggcccaggcgcgtgggcgctgccgagaggctgggagcccgggaaccggttcctggacttgagcggagcgagaaagagcgcgccgcctgcacgactggactggagcggccgggtgccctggaggcccctgggaattgcagtccttgcgcaggtggagagatgagaaaactcaagactcagaaacaataaaggttacagagatgaaattgacagagcctgaatttcaggttatgattctgtatggtttctttggtgctgcattagacctgagctctgattgaaaattcttccacgctcgctacattccaaaactttatctccaatatgaatttccagatgcctcacaaggtctgagctccatctgaaggctttcccatgcttgtcacattcatagggcttttctccactatgaattctatgatgtcgaataaagtgtgagctctgaaaaaaaaaaaaaaaaaaaaaaaaanaanaaaaaaaaaaaaaacacaaaaaaaaaaaaacccggnggcnntttatgggggggggagcgaaaaaaagagtgtgtcaaagagggcacatgggtcaatgaagtagtatgccagagcacacagtttttttagacaaaaggggggtaaaatatcgcgggcgcccacccatagggggagggaataatatgtcaaaacgcagggtacacaggtataag

SEQ ID NO: 260074 - DNA, 480 bp, Homo sapiens
cagcaaaacttctctaccccggcctcgggcaggtgcccgcccggggagggggctgtcgtccaggccaggtacaactccccttcccacccttcactccctacccaagggtctcgagaaaagagaagaggaacatcaagacccccctccacggcacgtgacgcgacgcaacgcagatgagaaaactcaagactcagaaacaataaaggttacagagatgaaattgacagagcctgaatttcaggttatgattctgtatggtttctttggtgctgcattagacctgagctctgattgaaaattcttccacgctcgctacattccaaaactttatctccaatatgaatttccagatgcctcacaaggtctgagctccatctgaaggctttcccatgcttgtcacattcatagggcttttctccactatgaattctatgatgtcgaataaagtgtgagctctgattacaaatctttgaacattca

SEQ ID NO: 260075 - DNA, 663 bp, Homo sapiens
gtctcagtggtaactcaaggtcttcaaataaatgtttatctaacctgacagttgcagttttcacccatggaaagcattagtctgacagtacaatgtttggattctccttgatattaccaatacattttccctgttatcttgcactgaatctttcctactgaacactttttctgcacttttcattgtaataaaaggagttcctgtccacaaccctaaaactcttctttatacttgtttcctacctgatagtatcaaaaaggaagattccttattaatctgtcagactatgttcccctgaaaatcatgttcccttctatgactggaggcattactgcagttggaagctcaattcttaataagtgagttctgctacctctaaattccattgaattctcagatataaagcaaaataatgtccttagagagagattctcccttcataaaaacagtcttagaaattggttttatgaatagccctctcctgtcatttgtccacacatggtcacacgttggctttggtttctagtaaagacaatcgtggccccttccccttgagaactggtaagtgcttatttagctcttcctggactaacggaccagtgaggagcctataaatacaccccaccagttccattttggccattggaaattaaaattggtttc

SEQ ID NO: 260076 - DNA, 881 bp, Homo sapiens
gtctgggaaatgcagtctagctgtgtgcctaagagaagaatggatttcagagggcagctaatcatcttttccacagcatgcaatcctaaactatagtattttcagagtagtatgatttagtatcagctgatatcttatccttcaatactagccttaaacctctgactggactttttggagcaactgagtcaagtgactttactttttaaaactctaggaaaaaatcatcaatgattcttgaatagttcaagtgaaattgtgaagtttaagaagtctgatcaacatggacagcaaatctaagctatcttgtccaaaaaagtgagactttaaaaaattatctgtttggttttagttaatgtggtgatttcagaatagaaatttcagccccacgccctgccccaaccttggcatctcagctccagtgatttgggaagttgggtttggaggtacctgtgattgaacctctgtctgattctcagcatttgtctcatccctctaggaatgattatcaaatggttcttttatatcactgtaaagctgccaccagaggagatttagaaatctcctttagaagttctcaaaaatagactagcatctcattttctgggtcgcttaaagtcaaaatcatgtccctaaagctattacaaacctatttctataaatttttcagggtaatcagattctttttcctagtggtacaactacttataaattataacattttaatcctaatgatactttaaaaggtgagcgcacgggcaatatttgaaagggatatgtgttccagagagggccaaatgttaagctgtgggagactgaaaccctaaaagcaaattggcaaagctaaatctatactattttgaaataaaatcataagaaaa

SEQ ID NO: 260077 - DNA, 420 bp, Homo sapiens
ggaggagaacagtggagagttggggagggagataaccatgggatgagagattccatttcactccaacaacacaccataggactcagggcagagagaagttctctcgcctaacctttttgagatttcccttaacaatgctcaggcagctgctggccccttgggatgccagagggcctagacatttcttctgtaaccacttccaagccagacagaccacccccttgataattttagcatttagtcaagagcgaaggctctgtagccagagttctagaatttaaatcacagctctatcactcacaagctatgtgatttcaggcaagtttcttaacctctctgggccttatctatacaaaaggtaaaattgttggtgtagagagtaaaatgaacccaatatgtgctgtgcttgcaacagtgcct

SEQ ID NO: 260078 - DNA, 493 bp, Homo sapiens
agttattgcatatagaattgcctttcctgtttcattgtcatgtttaggacatctttgggacagggaaaggaaactgctgctataaccttacctagttcactggtctggacaacctgtccattgctacctattttgcctcctgttatgactggaatgaaatgagaaccccaccaataagcaaaaagtttccacctttcatcctatctcctacttgcaatccctcagtagtgatattccagcacagctaacagcctcctatcagtaaagatgggaaaagtatcagaaagcttagcaaggcctggggtagggaaccaagtgtgggctaattctcctggtccttccgtaaacattaaggcagactaagtgaatccctcattctaagacaaatgttccctaaagaagtaaaattaaactcctattttccaaagcaattggacttttattgtactgtgtgctttattttctgagtgaggtgacagaactagagatgttt

SEQ ID NO: 260079 - DNA, 407 bp, Homo sapiens
atgaggtgaactatggggtaattttgtttgtgtagcctcatccacagccccaaggtaagaatcatcaaaagcagaatagatgttgctctatggggaacgcacacatgaacaatattatctcaagggaagggttgcccaaacagattcatctacatggcccaacaggttatactgctgagaaataagttcccttggagacgcaggcaccttttagaaaaatcccttttcattccccacttctttcaggcaaaaaaaaaaaggttttaaaaaatgtaaaagtaagagaaatggcatggctgttacacaataaagtgaacatacccaacagtacaggactgtatacttgaaaatgattaagatggtaaattttgtgtaatgtgtgtgttttttttttaccacaattaaaa

SEQ ID NO: 260080 - DNA, 446 bp, Homo sapiens
aacataaagtagaacggagaaagaagatgcaggcaggagcggggtcagtgcacagaatgcctgcacaacatggcatccagcgctgttgcccagggcggtcaccaatctgctctgaggcctgacacatgagaaaagagacagatgtgaagtggttgagattcatgttgtccatcagataagagtaaaccagttactcagacaagctttctgagatcacactgaaaactatacacttgcctagtaagtagtgcaatgaataatgtctgaggcaatattcctggcataaatgcagtggttagctttattcagctattttgaagacatcataaaatgcaattttatggcattgcagttcatcaaagtcacttctatgagagctagaacaccctggtgtaggtgcgtacttttctgcttatctaaagtaatctaagaagagcatttaaact

SEQ ID NO: 260081 - DNA, 2178 bp, Homo sapiens
ttgaacctatgatgaatgaaagaaatgaagtttcctatataggtggttatgtcataagtgttatatcataagtggtgttatagtatcattattacctactatcaggaataatttcttttcactctctcattattcttgtcactgttgaatgtctcaagagttgtgtgtgtattcagtttctatttccctctctgtctcatttactgactccagtctgactaatgctctaatatgctcttgagaagtcaccatgaactccatgttgctgagcccagtggacactttctgtcctcctacttaacctctctgcacagatagattccgtacagagagaaagttgatcacttcctctcttctcagcttctctgacaccaattctgtatttttcttctacccctttggctaatcttgatttttaagacactttgtgggctaacaaaacattctgtggaatgagttcaacatatattacaatttcccctttttaaaaatcatgttattctgtttcatttacagctcttcacattctgtattgatttttaaaaatattttaaaattgtttctctttcctccactttgaaagctttatgaaagaataatttctgtctattgcctaatactgtgtatcatcactgtgcttgacacgtagttggtaatctctaagtatttgagaagcagtgagttaattaatatttgcttttttgacttttttaggttatttaagtatttttgacatctctttttgggaatggggtaaaagaattgtagaggaactattaaatgaccagtgtaaaccattgtttgtaaatggttgtgtaatatgactttggaataatgcagttaatggttatcagtttaagtaatcactattcagttttgataagaaatgtgctttagtctttttctaaatcattctaggagatttgcccatggatttatacatagcaactatacacatatattttagatgaccagaaaaatttagtgcttcttcacagctgtcagctggaataattgcgtactcatacaacaggagttaggttagaactgctattatttagtatccttttgctattacctgatgtagtaagtttaacatctttgtaaaaatatgttttaagttctgggccattgattttgaagtgggaaataaatgaatgctgttgttttttcatgtcaagattaccaaaaagctctatggaaagttattttatagcaaacacaagggaaaggtattttccagaatgagttttttacaaatggatagtgatgttttctgtaatacttaagtttagaaacatatatcacatgacaagtccattgtttattcaaaaaacaaataggcatttgactcatttgggactgtaaaatcttcaaaaatatgccagaaaactaaaaaatgtagaaaagaggattttttttgttttgtttttagcccccagaccaccactttttatagtaacttattttctagtgtctcaaaaaataagggcttttaaggaaagagagtatttctcttaaagttaattttgatagatatttatctagatgctttcttttttcccttgccataatagctggcttgtagagagagttatgtttgaaaaggcttgccttttttccgtcgctctgagcaggattatgttagggcccaaatagtgactttgacaaaaaaaaaaaaaaaagggggagtatattagttttaagtttgacagcataaaacaaaactcaaaaataaaagtggcttaaacaaaatagaagtttatgaaagaagactggagacaggtaggaacgggtagtcattaaggaccagtttcctcttcttcctatcatcatctggcatggccagttgactttatggacaactgtgcctacaggaccttctgccattgcatcagtatccttaggtagcagcaaagaggaagtggatcaatgactccacccttcagttaagccaactacctataagtgactttcccagaaagtcccacacatttgcacccattagccaaaactcacacacatagtcatacctagctataagggaaactggaaaactaacctagatgaattgctactccaaatcaaattggggatccattattgaggaaggaagagagtgtgtattggataggaaaatagcattctcttctatagtgagagaagtaatagtttttg

SEQ ID NO: 260082 - DNA, 440 bp, Homo sapiens
gaagctgtgaagtagccttcagatttctcatgtgagtgcctgagtaggtcatgttgccattggctaaaatcagaaatgatggaacaggagcaagtttaaggggtggaccagatttatttatgcacctgccagatccacacactttccttgctttctggccacagaggccctagcgaccacccacacagggcacagttcccatggtcccgaagacaggtggctgtgcctacaagtagggttctgagggtttgctggccctgggtccttgtgtcacccaaggatttgaccaagcataccctcacaccgcaggattgttgccccagagacaaatgaggttgctgggcccgggtggccccacacgctcacgttgcccactcaggcaggcagtgtcttactacaaggatgtttgtcattcctgcttgctgggagggggagttgga

SEQ ID NO: 260083 - DNA, 554 bp, Homo sapiens
acctgaggatcccgagctctcttgtggggctcaagacacatggaggtgtgtcagaagcttcaggatgcactcaagtgccagcactgccggaagcagttcaagtccaaagccggcctcaactaccacactatggccgagcacagtgccaagccctctgacgccgaggcctccgaagggggcgagcaggaggagcgcgagaggctgcgcaaggtgctgaagcagatgggacggctgcgctgcccccaggagggttgcggggctgccttctccagcctcatgggctaccagtaccaccagcggcgctgcgggaagccgccctgcgaggtggacagcccctccttcccctgcacccactgtggcaagacgtaccgatccaaggctggccacgactaccacgtgcgctcggagcacacggcccccccccacagagagagcgtcgacgctctctctgtggggtcatgggctgggcccagggtccccaagctatgtgcagcctggggtttgtccactgcatccagctgcccagctgtggtgaggctcagtgcggcaaaaca

SEQ ID NO: 260084 - DNA, 5845 bp, Homo sapiens
ccccccgccccggcccggcccggcccggccgcagccccgctgggcgccgcagagatgacggatcctttctgcgttggaggccgtcggctcccggggtccagcaagagtggtcccgggaaggatggcagccgaaaggaggtccgacttccaatgctgcatgacccaccgaagatggggatgccggtggtccgtggtggacagacagtgcccggccaggcccctctctgctttgacccgggaagtccagccagtgacaagacagaagggaagaaaaaggggcggccaaaagccgagaaccaggccctccgagacattcctctctccctgatgaacgactggaaggatgagttcaaggcacactcgagggtgaagtgtccaaactcagggtgctggctggagttccccagcatctacgggctcaagtaccattaccagcggtgccaagggggtgccatctcagatcgcctggccttcccctgccccttctgcgaggccgcattcacctctaagacccagctggagaaacaccggatctggaaccacatggaccgacccctgcctgcctccaagcctgggcccatcagcaggccggtcaccatcagccggcctgttggggtcagcaagcccatcggagtgagcaaacctgtcactattggcaaacctgtgggtgtcagcaaacccattggcatcagcaagccagtctcggtcggcagacccatgccagtcaccaaggccatcccggtcactaggcccgtgccagtcaccaaacctgtcacagtcagcaggcccatgcccgtcaccaaggccatgccggtcaccaaacccatcacagtcaccaagtctgtgccggtcaccaaacccgtacctgtcaccaaacccattacggtaacaaagcttgtgacagttacgaaacccgtgccggtcaccaagccagtgacagtcagcaggcccattgtggtcagcaagccggtgacagtcagcaggcccattgctatcagcagacacacaccgccctgcaaaatggtgctgctgaccaggtcggagaacaaagcacctcgtgccacagggaggaacagtggtaagaaaagggctgcggacagcctggacacctgcccaattccacccaagcaggccaggccagagaatggggagtacggcccctcctccatgggccagagctcggccttccagctgagtgcagacaccagcagtggctccttgtcgccaggcagcaggccgtcagggggcatggaggcactgaaggctgcaggccctgcgtccccgcctgaggaggacccggagcgcacaaagcacagaaggaaacagaaaacacccaaaaagtttacaggggagcagccatccatctcagggacctttgggctcaaaggcctggtcaaagctgaggacaaggcccgagttcaccgctccaagaagcaggaggggccaggccctgaggacgcccggaagaaggtgccagctgcccccatcactgtcagcaaggaggcaccggcccctgtggcccacccagctccaggtggccctgaagagcagtggcagagggccatccatgagcgcggggaagccgtctgccccacctgcaacgtggtcacccggaagactctcgtggggcttaagaagcacatggaggtgtgtcagaagcttcaggatgcactcaagtgccagcactgccggaagcagttcaagtccaaagccggcctcaactaccacactatggccgagcacagtgccaagccctctgacgccgaggcctccgaagggggcgagcaggaggagcgcgagaggctgcgcaaggtgctgaagcagatgggacggctgcgctgcccccaggagggttgcggggctgccttctccagcctcatgggctaccagtaccaccagcggcgctgcgggaagccgccctgcgaggtggacagcccctccttcccctgcacccactgtggcaagacgtaccgatccaaggctggccacgactaccacgtgcgctcggagcacacggcccccccccctgaggagcccacagacaagtcccctgaggctgaggacccgctgggtgtggagcggaccccaagcgggcgtgtccgccgcacgtcggcccaggtggcggtgttccacctgcaggagatagcggaggacgagctggcccgcgactggaccaagcggcgcatgaaggatgaccttgtgcccgagaccgcacggctcaactacactcgaccagggctccccacgctgaacccccagctgctagaggcatggaagaatgaagtgaaggagaaaggccacgtcaactgtcccaacgactgctgtgaagccatctactccagcgtgtccggactcaaggctcatctcgccagctgcagtaagggggcccacctggcagggaagtaccgctgtctgctgtgtccgaaggagttcagttctgagagtggcgtcaaataccacatcctgaagacccacgcagagaactggttccgaacatcagcagacccacctcccaaacacaggagccaggactcattggtgcccaagaaggaaaagaagaaaaatctggcaggtggaaagaagcggggccgaaagcccaaggagcggaccccagaggagcctgtggccaagctgcccccgcgccgggacgactggcctccaggatgcagagacaagggggcccggggctccaccggccggaaggtgggagtcagcaaggcgcctgaaaagtgagcatggtgcgtggggcctggcccccatgcagccgccacaccgccctctgttcaaggcagggccagctccgggacctctgtcctccagttctccatcccccacccccgcctcttcatccgtccagtggggcagccagccactctcccttccctgaaggtggcccttcccctgttaaggctgccacagggcacacctgggttggggctccccaaggtgtgcccagcagaagtgcaatagccaggagggttgcccctcctcatgggaatgtgtctggggtcttggtgccacaggggctgcagcgcagagtaggcagatggcctttggccccccggctccgcttcctcaggccctgccgggtcccttccctggctaccccaaggctcaggcatccctggtgacctgtggttctgggctggtgagggcacctgagcaacctggcacgggcagccaccatcctggcctcacctccacccaacactggaactccagcacccccagctacctcccaggacagacccctgtctgaccactgccatgctgacctgacaggctccggcctgcccttggccacccacttggtccccttgcttctgttttctacctctccaggcctgcccactacccccacccctgctcctcctttgtcagtgcgatccctgctgtgctcaggccctgccccccaggcctgtctgtaattctcccagcttggggcaagggaggggttttgcttcttgtacctacagggcagcagaagcttgatgcccttcaacacagctgccagccctgggggtgtggggcccctggagtgtgctctcctccagtgttcagccttctggcactgcaggcctaggttggagcagcctcgtggagtagggacggactagttcgggccctggggtcttgctggggcccataggcatgtggggcaggaagctgggcagagctggcctggctctgagtggccactgggggaaaggcagccttctgtctgccaatctgggtaggcccagtggccaagctctcatgggagccccctccccacttttttttttaacctgcccccattgtttctggttgtgtggtcatttgatatgggaactgaaggccagccaggggaggggcttggccaaagtcacagcaggttgatggcagctccagagctgtctttgcccctttgtggccctgaggacggctgggtctataggtagggcaggggtcaggcagggagtccagggtgcctggaagaggtggccacagcctgtggctccctccctggggtcctgccttccaaccacggcattgcagggaggatgaggctcagagggggtaggtttggagggaggccattttccagggtgggtgggagtgggctgagggctcggccccactgaccctggacgatgagaattttgatgtttgcccgtgtgcgtgtgtctcctgggtgtagtggatgccagtcttgttgctgtgacaagtaacaaccttttttttaaattgttttttatacaaacactcgcaatccgacatttggtgctaagggtttcctggtgcagacggtgggcctgggggctgggctggaccagggcgtgggtctctggggttggggtcccttgctgctcagggaggcagtactgactgggcactgcctctgcccccagcacccaccctcccccattccccagggagaaggggccccactgggcttggcctgcagtagtagggagacaagttccaggagcactttggggactggggttgcagaacacttcctgtctctggcttcatccttgggccagaaggctccaaccctcagcagcccttgccagatgtgccaggagtgggtgtggagacccggactccccccacccacgcacacctcggcctgatgagaggatggaggctggggcagagatgggcgtgacccagcgtcagagggtcgggggaggcattccttcctgtgtcccagagcttcactggtggagctggaggagccggaggtggagggtggggtctggcagctgctgctggggcagcctcatgaggggaggggaggggaggggaggggagcaggcactgggcgggggcctaggtgcactttgtccttgccaccaatggcgggaggagggtggacctgaacacctgcagggtgtggtgcctgccccagcctctcaggtacttggcccttggggagaagagaagagggtctggtttttgctgggggtgagtttccgggacactcccaaagcccacagataatccctggtgtgggaagaggagtcctggataccttgatgtttagcactttaaccccctttgtctttaaggtaggcgtgggggctactgccagaagtggctgttgggtctgaccccctcctttctgccctccctctgccacatgctggtccgcagagccctcctcccaaggggtggggccctgggtggagctcagcagggtctgcccactccctacgctggcccacataggcctccaggagccctcagtgagagggaccagcatagctgacccccagagtgtggtgggcgccggccctgcccgaggcccagtcggggccctttctgcagatctacctctggctcagcgcacgccccctgccctgagaacaggaaagggcccggaagggctgactcaccgggccgacgctcacacgaaaatgggatgcactttatttgctggtgcaaaggcaggtgagggtgcctcctgtgtgaccgttggccctcctgcctggtggcgctgaagggaaggagccagtgagcctgaccccgggaggggccgtccccgggcgtcccgtgctttgggtttcttggtttgggttttttaatgccagttctcagtacataagtgcattttgaaagaggttccagctatcacttgtaaccatatatatatacatatatattctatctacaaagtgtttatttgcgagatgtttcaacggtgagttcgggccccgcccgccttgtgaccatctgtccccggtcctcgtccccgccccgcgccctggtcccgagtggcgtggggacgggccatcactgtatgtattaaaatgactgtatcaaataaatgtttattgatttttttccagggtttttg

SEQ ID NO: 260085 - DNA, 530 bp, Homo sapiens
gccctgaggacgcccggaagaaggtgccagctgcccccatcactgtcagcaaggaggcaccggcccctgtggcccacccagctccaggtaggggctgcctggcaggggctcagggcagctctagacggcgggtagatcccacagcacagggatgggggctgagtgtggagactggattctgtgcctggcgtctgggccacccagcagcccccacaagccttcgaggcccctgccttacccacaggtggccctgaagagcagtggcagagggccatccatgagcgcggggaagccgtctgccccacctgcaacgtggtcacccggaagactctcgtggggcttaagaagcacatggaggtgtgtcagaaggtaaggcagctcccggaaggcgctgggagggaggcgccctggccccaggcaggcttctcacatgtgggccatctgcagcttcaggatgcactcaagtgccagcactgccggaagcagttcaagtccaaagccggcctcaactaccacactatggccgagca

SEQ ID NO: 260086 - DNA, 326 bp, Homo sapiens
ggaaggatggcagccgaaaggaggtccgacttccaatgctgcatgacccaccgaagatgggtaagaggagtcagggccagagtcaattccagatggttctgggcagcaagtggtaggagtggaccattgccctgggcgtcctgtctccaggtacccagctaggcccctagagttcccaaggaccttaccagggtaggggttgccttggacatagcccagggtcctgggttcttgtcctcagctggccgcagcccctgcccccggtgccctcgtgttgggacagcggtgctcactgtgggcctgtgcagccgccggtggtaggcggt

SEQ ID NO: 260087 - DNA, 517 bp, Homo sapiens
gtcaccaaacccgtacctgtcaccaaacccattacggtaacaaagcttgtgacagttacgaaacccgtgccggtcaccaagccagtgacagtcagcaggcccattgtggtcagcaagccggtgacagtcagcaggcccattgctatcagcagacacacaccgccctgcaaaatggtgctgctgaccaggtcggagaacaaagcacctcgtgccacagggaggaacagtggtaagaaaaggtatgggggctcgtcccaggtcggggaggaacagtggtaagaaaaggtatgggggctcgtcccaggtcagggaggaacagtggtaagaaaaggtatgggggctcgtcccaggtcggggaacagtggtgagaaaaggtatgggggctcgtcccaggtcggggaggaacagtggtgagaaaaggtatgggggctcgtcccaggtcagggaacagtggtaagaaaaggtatgggggctcgtcccaggtcagggaacagtggtgagaaaaggtatgggggct

SEQ ID NO: 260088 - DNA, 5925 bp, Homo sapiens
ccccccgccccggcccggcccggcccggccgcagccccgctgggcgccgcagagatgacggatcctttctgcgttggaggccgtcggctcccggggtccagcaagagtggtcccgggaaggatggcagccgaaaggaggtccgacttccaatgctgcatgacccaccgaagatggggatgccggtggtccgtggtggacagacagtgcccggccaggcccctctctgctttgacccgggaagtccagccagtgacaagacagaagggaagaaaaaggggcggccaaaagccgagaaccaggccctccgagacattcctctctccctgatgaacgactggaaggatgagttcaaggcacactcgagggtgaagtgtccaaactcagggtgctggctggagttccccagcatctacgggctcaagtaccattaccagcggtgccaagggggtgccatctcagatcgcctggccttcccctgccccttctgcgaggccgcattcacctctaagacccagctggagaaacaccggatctggaaccacatggaccgacccctgcctgcctccaagcctgggcccatcagcaggccggtcaccatcagccggcctgttggggtcagcaagcccatcggagtgagcaaacctgtcactattggcaaacctgtgggtgtcagcaaacccattggcatcagcaagccagtctcggtcggcagacccatgccagtcaccaaggccatcccggtcactaggcccgtgccagtcaccaaacctgtcacagtcagcaggcccatgcccgtcaccaaggccatgccggtcaccaaacccatcacagtcaccaagtctgtgccggtcaccaaacccgtacctgtcaccaaacccattacggtaacaaagcttgtgacagttacgaaacccgtgccggtcaccaagccagtgacagtcagcaggcccattgtggtcagcaagccggtgacagtcagcaggcccattgctatcagcagacacacaccgccctgcaaaatggtgctgctgaccaggtcggagaacaaagcacctcgtgccacagggaggaacagtggtaagaaaagggctgcggacagcctggacacctgcccaattccacccaagcaggccaggccagagaatggggagtacggcccctcctccatgggccagagctcggccttccagctgagtgcagacaccagcagtggctccttgtcgccaggcagcaggccgtcagggggcatggaggcactgaaggctgcaggccctgcgtccccgcctgaggaggacccggagcgcacaaagcacagaaggaaacagaaaacacccaaaaagtttacaggggagcagccatccatctcagggacctttgggctcaaaggcctggtcaaagctgaggacaaggcccgagttcaccgctccaagaagcaggaggggccaggccctgaggacgcccggaagaaggtgccagctgcccccatcactgtcagcaaggaggcaccggcccctgtggcccacccagctccaggtggccctgaagagcagtggcagagggccatccatgagcgcggggaagccgtctgccccacctgcaacgtggtcacccggaagactctcgtggggcttaagaagcacatggaggtgtgtcagaagcttcaggatgcactcaagtgccagcactgccggaagcagttcaagtccaaagccggcctcaactaccacactatggccgagcacagtgccaagccctctgacgccgaggcctccgaagggggcgagcaggaggagcgcgagaggctgcgcaaggtgctgaagcagatgggacggctgcgctgcccccaggagggttgcggggctgccttctccagcctcatgggctaccagtaccaccagcggcgctgcgggaagccgccctgcgaggtggacagcccctccttcccctgcacccactgtggcaagacgtaccgatccaaggctggccacgactaccacgtgcgctcggagcacacggcccccccccctgaggagcccacagacaagtcccctgaggctgaggacccgctgggtgtggagcggaccccaagcgggcgtgtccgccgcacgtcggcccaggtggcggtgttccacctgcaggagatagcggaggacgagctggcccgcgactggaccaagcggcgcatgaaggatgaccttgtgcccgagaccgcacggctcaactacactcgaccagggctccccacgctgaacccccagctgctagaggcatggaagaatgaagtgaaggagaaaggccacgtcaactgtcccaacgactgctgtgaagccatctactccagcgtgtccggactcaaggctcatctcgccagctgcagtaagggggcccacctggcagggaagtaccgctgtctgctgtgtccgaaggagttcagttctgagagtggcgtcaaataccacatcctgaagacccacgcagagaactggttccgaacatcagcagacccacctcccaaacacaggagccaggactcattggtgcccaagaaggaaaagaagaaaaatctggcaggtggaaagaagcggggccgaaagcccaaggagcggaccccagaggagcctgtggccaagctgcccccgcgccgggacgactggcctccaggatgcagagacaagggggcccggggctccaccggccggaaggtgggagtcagcaaggcgcctgaaaagtgagcatggtgcgtggggcctggcccccatgcagccgccacaccgccctctgttcaaggcagggccagctccgggacctctgtcctccagttctccatcccccacccccgcctcttcatccgtccagtggggcagccagccactctcccttccctgaaggtggcccttcccctgttaaggctgccacagggcacacctgggttggggctccccaaggtgtgcccagcagaagtgcaatagccaggagggttgcccctcctcatgggaatgtgtctggggtcttggtgccacaggggctgcagcgcagagtaggcagatggcctttggccccccggctccgcttcctcaggccctgccgggtcccttccctggctaccccaaggctcaggcatccctggtgacctgtggttctgggctggtgagggcacctgagcaacctggcacgggcagccaccatcctggcctcacctccacccaacactggaactccagcacccccagctacctcccaggacagacccctgtctgaccactgccatgctgacctgacaggctccggcctgcccttggccacccacttggtccccttgcttctgttttctacctctccaggcctgcccactacccccacccctgctcctcctttgtcagtgcgatccctgctgtgctcaggccctgccccccaggcctgtctgtaattctcccagcttggggcaagggaggggttttgcttcttgtacctacagggcagcagaagcttgatgcccttcaacacagctgccagccctgggggtgtggggcccctggagtgtgctctcctccagtgttcagccttctggcactgcaggcctaggttggagcagcctcgtggagtagggacggactagttcgggccctggggtcttgctggggcccataggcatgtggggcaggaagctgggcagagctggcctggctctgagtggccactgggggaaaggcagccttctgtctgccaatctgggtaggcccagtggccaagctctcatgggagccccctccccacttttttttttaacctgcccccattgtttctggttgtgtggtcatttgatatgggaactgaaggccagccaggggaggggcttggccaaagtcacagcaggttgatggcagctccagagctgtctttgcccctttgtggccctgaggacggctgggtctataggtagggcaggggtcaggcagggagtccagggtgcctggaagaggtggccacagcctgtggctccctccctggggtcctgccttccaaccacggcattgcagggaggatgaggctcagagggggtaggtttggagggaggccattttccagggtgggtgggagtgggctgagggctcggccccactgaccctggacgatgagaattttgatgtttgcccgtgtgcgtgtgtctcctgggtgtagtggatgccagtcttgttgctgtgacaagtaacaaccttttttttaaattgttttttatacaaacactcgcaatccgacatttggtgctaagggtttcctggtgcagacggtgggcctgggggctgggctggaccagggcgtgggtctctggggttggggtcccttgctgctcagggaggcagtactgactgggcactgcctctgcccccagcacccaccctcccccattccccagggagaaggggccccactgggcttggcctgcagtagtagggagacaagttccaggagcactttggggactggggttgcagaacacttcctgtctctggcttcatccttgggccagaaggctccaaccctcagcagcccttgccagatgtgccaggagtgggtgtggagacccggactccccccacccacgcacacctcggcctgatgagaggatggaggctggggcagagatgggcgtgacccagcgtcagagggtcgggggaggcattccttcctgtgtcccagagcttcactggtggagctggaggagccggaggtggagggtggggtctggcagctgctgctggggcagcctcatgaggggaggggaggggaggggaggggagcaggcactgggcgggggcctaggtgcactttgtccttgccaccaatggcgggaggagggtggacctgaacacctgcagggtgtggtgcctgccccagcctctcaggtacttggcccttggggagaagagaagagggtctggtttttgctgggggtgagtttccgggacactcccaaagcccacagataatccctggtgtgggaagaggagtcctggataccttgatgtttagcactttaaccccctttgtctttaaggtaggcgtgggggctactgccagaagtggctgttgggtctgaccccctcctttctgccctccctctgccacatgctggtccgcagagccctcctcccaaggggtggggccctgggtggagctcagcagggtctgcccactccctacgctggcccacataggcctccaggagccctcagtgagagggaccagcatagctgacccccagagtgtggtgggcgccggccctgcccgaggcccagtcggggccctttctgcagatctacctctggctcagcgcacgccccctgccctgagaacaggaaagggcccggaagggctgactcaccgggccgacgctcacacgaaaatgggatgcactttatttgctggtgcaaaggcaggtgagggtgcctcctgtgtgaccgttggccctcctgcctggtggcgctgaagggaaggagccagtgagcctgaccccgggaggggccgtccccgtgtgccgcgtttggcggggccccaggcggctcccccaggcccgggtctggggccccaggctttcccctgcctcgcggccgggcgtcccgtgctttgggtttcttggtttgggttttttaatgccagttctcagtacataagtgcattttgaaagaggttccagctatcacttgtaaccatatatatatacatatatattctatctacaaagtgtttatttgcgagatgtttcaacggtgagttcgggccccgcccgccttgtgaccatctgtccccggtcctcgtccccgccccgcgccctggtcccgagtggcgtggggacgggccatcactgtatgtattaaaatgactgtatcaaataaatgtttattgatttttttccagggtttttg

SEQ ID NO: 260089 - DNA, 4608 bp, Homo sapiens
ccccccgccccggcccggcccggcccggccgcagccccgctgggcgccgcagagatgacggatcctttctgcgttggaggccgtcggctcccggggtccagcaagagtggtcccgggaaggatggcagccgaaaggaggtccgacttccaatgctgcatgacccaccgaagatggggatgccggtggtccgtggtggacagacagtgcccggccaggcccctctctgctttgacccgggaagtccagccagtgacaagacagaagggaagaaaaaggggcggccaaaagccgagaaccaggccctccgagacattcctctctccctgatgaacgactggaaggatgagttcaaggcacactcgagggtgaagtgtccaaactcagggtgctggctggagttccccagcatctacgggctcaagtaccattaccagcggtgccaagggggtgccatctcagatcgcctggccttcccctgccccttctgcgaggccgcattcacctctaagacccagctggagaaacaccggatctggaaccacatggaccgacccctgcctgcctccaagcctgggcccatcagcaggccggtcaccatcagccggcctgttggggtcagcaagcccatcggagtgagcaaacctgtcactattggcaaacctgtgggtgtcagcaaacccattggcatcagcaagccagtctcggtcggcagacccatgccagtcaccaaggccatcccggtcactaggcccgtgccagtcaccaaacctgtcacagtcagcaggcccatgcccgtcaccaaggccatgccggtcaccaaacccatcacagtcaccaagtctgtgccggtcaccaaacccgtacctgtcaccaaacccattacggtaacaaagcttgtgacagttacgaaacccgtgccggtcaccaagccagtgacagtcagcaggcccattgtggtcagcaagccggtgacagtcagcaggcccattgctatcagcagacacacaccgccctgcaaaatggtgctgctgaccaggtcggagaacaaagcacctcgtgccacagggaggaacagtggtaagaaaagggctgcggacagcctggacacctgcccaattccacccaagcaggccaggccagagaatggggagtacggcccctcctccatgggccagagctcggccttccagctgagtgcagacaccagcagtggctccttgtcgccaggcagcaggccgtcagggggcatggaggcactgaaggctgcaggccctgcgtccccgcctgaggaggacccggagcgcacaaagcacagaaggaaacagaaaacacccaaaaagtttacaggggagcagccatccatctcagggacctttgggctcaaaggcctggtcaaagctgaggacaaggcccgagttcaccgctccaagaagcaggaggggccaggccctgaggacgcccggaagaaggtgccagctgcccccatcactgtcagcaaggaggcaccggcccctgtggcccacccagctccaggtggccctgaagagcagtggcagagggccatccatgagcgcggggaagccgtctgccccacctgcaacgtggtcacccggaagactctcgtggggcttaagaagcacatggaggtgtgtcagaagcttcaggatgcactcaagtgccagcactgccggaagcagttcaagtccaaagccggcctcaactaccacactatggccgagcacagtgccaagccctctgacgccgaggcctccgaagggggcgagcaggaggagcgcgagaggctgcgcaaggtgctgaagcagatgggacggctgcgctgcccccaggagggttgcggggctgccttctccagcctcatgggctaccagtaccaccagcggcgctgcgggaagccgccctgcgaggtggacagcccctccttcccctgcacccactgtggcaagacgtaccgatccaaggctggccacgactaccacgtgcgctcggagcacacggcccccccccctgaggagcccacagacaagtcccctgaggctgaggacccgctgggtgtggagcggaccccaagcgggcgtgtccgccgcacgtcggcccaggtggcggtgttccacctgcaggagatagcggaggacgagctggcccgcgactggaccaagcggcgcatgaaggatgaccttgtgcccgagaccgcacggctcaactacactcgaccagggctccccacgctgaacccccagctgctagaggcatggaagaatgaagtgaaggagaaaggccacgtcaactgtcccaacgactgctgtgaagccatctactccagcgtgtccggactcaaggctcatctcgccagctgcagtaagggggcccacctggcagggaagtaccgctgtctgctgtgtccgaaggagttcagttctgagagtggcgtcaaataccacatcctgaagacccacgcagagaactggttccgaacatcagcagacccacctcccaaacacaggagccaggactcattggtgcccaagaaggaaaagaagaaaaatctggcaggtggaaagaagcggggccgaaagcccaaggagcggaccccagaggagcctgtggccaagctgcccccgcgccgggacgactggcctccaggatgcagagacaagggggcccggggctccaccggccggaaggtgggagtcagcaaggcgcctgaaaagtgagcatggtgcgtggggcctggcccccatgcagccgccacaccgccctctgttcaaggcagggccagctccgggacctctgtcctccagttctccatcccccacccccgcctcttcatccgtccagtggggcagccagccactctcccttccctgaaggtggcccttcccctgttaaggctgccacagggcacacctgggttggggctccccaaggtgtgcccagcagaagtgcaatagccaggagggttgcccctcctcatgggaatgtgtctggggtcttggtgccacaggggctgcagcgcagagtaggcagatggcctttggccccccggctccgcttcctcaggccctgccgggtcccttccctggctaccccaaggctcaggcatccctggtgacctgtggttctgggctggtgagggcacctgagcaacctggcacgggcagccaccatcctggcctcacctccacccaacactggaactccagcacccccagctacctcccaggacagacccctgtctgaccactgccatgctgacctgacaggctccggcctgcccttggccacccacttggtccccttgcttctgttttctacctctccaggcctgcccactacccccacccctgctcctcctttgtcagtgcgatccctgctgtgctcaggccctgccccccaggcctgtctgtaattctcccagcttggggcaagggaggggttttgcttcttgtacctacagggcagcagaagcttgatgcccttcaacacagctgccagccctgggggtgtggggcccctggagtgtgctctcctccagtgttcagccttctggcactgcaggcctaggttggagcagcctcgtggagtagggacggactagttcgggccctggggtcttgctggggcccataggcatgtggggcaggaagctgggcagagctggcctggctctgagtggccactgggggaaaggcagccttctgtctgccaatctgggtaggcccagtggccaagctctcatgggagccccctccccacttttttttttaacctgcccccattgtttctggttgtgtggtcatttgatatgggaactgaaggccagccaggggaggggcttggccaaagtcacagcaggttgatggcagctccagagctgtctttgcccctttgtggccctgaggacggctgggtctataggtagggcaggggtcaggcagggagtccagggtgcctggaagaggtggccacagcctgtggctccctccctggggtcctgccttccaaccacggcattgcagggaggatgaggctcagagggggtaggtttggagggaggccattttccagggtgggtgggagtgggctgagggctcggccccactgaccctggacgatgagaattttgatgtttgcccgtgtgcgtgtgtctcctgggtgtagtggatgccagtcttgttgctgtgacaagtaacaaccttttttttaaattgttttttatacaaacactcgcaatccgacatttggtgctaagggtttcctggtgcagacggtgggcctgggggctgggctggaccagggcgtgggtctctggggttggggtcccttgctgctcagggaggcagtactgactgggcactgcctctgcccccagcacccaccctcccccattccccagggagaaggggccccactgggcttggcctgcagtagtagggagacaagttccaggagcacttgtgaccatctgtccccggtcctcgtccccgccccgcgccctggtcccgagtggcgtggggacgggccatcactgtatgtattaaaatgactgtatcaaataaatgtttattgatttttttccagggtttttg

SEQ ID NO: 260090 - DNA, 725 bp, Homo sapiens
gctgtgtccagccctgcggcaggtgcctgcctggtcctgaaggctgtgtccagccctgcggcaggtgcctgcctggtcctgaaggctgtgtccagccctgcggcaggtgcctgcctggtcctgaaggctgtgtccagccctgcggcaggtgcctgcctggtcctgaaggctgtgtccagccccctgctgcaggtgcttgcctggtccagaaggctgtgtccagccctgctgcaggtgcttgcctggtcccgaaggctgtgtccagccctgctgcaggtgcttgcctggtcccgaaggctgtgtccagccccctgcaggtgcttgcctggtcccgaaggctgtgttcagccccctgctgcaggtgcctgcctggtcctaaaggctgtgtccagccctgctgcaggtgcttgcctggtcctgaaggctgacaggtcttcagctctcaggctatgcctggctcaggtgctcagcatccagtcccaggtcttcatcagcgcttttctctccccagaactggttccgaacatcagcagacccacctcccaaacacaggagccaggactcattggtgcccaagaaggaaaagaagaaaaatctggcaggtggaaagaagcggggccgaaagcccaaggagcggaccccagaggagcctgtggccaagctgcccccgcgccgggacgactggcctccaggatgcagagacaagggggcccggggctccaccg

SEQ ID NO: 260091 - DNA, 358 bp, Homo sapiens
gaggattcgaaatcacgtgccgcgacaagctagagttactcctccaagccaccaggtgtcactggtgtgccaaggcggcaacgaagccaagttttcccggtggatgcggacactggaaaccagcaatccttttagttccccaacctggttgcccatcagaattccttgagaaatttaaataataattcttggaaatcacttcagacccactgaatcaatcgaggcccagaagtgagtatctaaaaaaaattgttatatggaaattgtcattatttgggatgtgtgtgctgggggattgctgctgtatattatatctctatttaaataaatgtcccaggtgattctgtagttgcagcag

SEQ ID NO: 260092 - DNA, 207 bp, Homo sapiens
ataaaaatgggaaggaaggtagtaaggtaagatgagaactttttccagcagttctctttcttgtactaaccctagtaacattgatgttatctcaattttcttttcttttctttttttttgagacagagtcttgctctattgcccaggctggagtgcagtggcaccatctctgctcactgcaagctctgccttctgggttcacgccat

SEQ ID NO: 260093 - DNA, 437 bp, Homo sapiens
aagaaaatttcttgaaaagttctatttcttcaatcatgcctcccacaacggccaggccagcaccgcagagctgggccgcccgccgggacacggctccgcacacctccttcaccacgatgctgtcctcacacgtgctgtccaggcccagctgctgcagaatcctcctgacctggagaagggccagccgatcgctgcaggcaatagagcagggagtcaggacctgcttcccaggaccccgggatgtgcccagtgtgacccacagcctccccattcttagatgcccttacaggagggaggagaaattgacccaggcaatggctaggctggagcagaatgccttagaagccgagactcaagaaggtccaccacccctggaagttccatcaactttaaaaaataaagtgtgaatgcctctggtgttcagcatgttcatatct

SEQ ID NO: 260094 - DNA, 280 bp, Homo sapiens
gtgaaaataagaacaaagagacagagagaagagatgtgacacacctttaaacaaccagatcttgtgagaactcactcacttttttgaggacagtaccaagagaatgatattaaatcattcacgagaaatctgaccccatgattcatttccctcccaccaggctacatctccagtattggagattccatttcacatgagatttgagcagggacaacatccaaactatattatttaatgatatgagttttctcattagacgcacctgagaaatacaaccttc

SEQ ID NO: 260095 - DNA, 660 bp, Homo sapiens
accttttaaaactagtctcatgaaggaagaacagctagcctgtctttctatgtggacatccgatatatttgtccctatcttttctctggcaatgacactgccatttcttttgggaaactggctctcttccattccttgtcattctggtagaggccaccagttacagtatctgtgttcctcccttgccatggccccattgacttatccaggaacatggatgtgactcaagcaaggctgatccatggacctggaaaagaggaggtcttcctccttcttgggtgttacaaactgaagtgctacaaatgtagagccacctgaggcctctgtccatgccatggaggagggccatacatggtaagaaagaagttgaagctaacatccagaggaaagcagagttgagagatggaagagttgcaaaaagagtttgagagatggagcgataggttagtagatagatagatacctgatgacattcttcatctagataggcttgcattaggttccactcttggtatttgtggctacaataattcacctttgttcttatcttaaattgctttgttgtagacttgtagccaaaaaagtcttgactaatccactcacccattcagcacagaaaagtactcctgatgtgcgtcactttacaacaaagccatcctg

SEQ ID NO: 260096 - DNA, 416 bp, Homo sapiens
  misc_feature (2)..(2): n is a, c, g, or t
  misc_feature (7)..(8): n is a, c, g, or t
  misc_feature (10)..(10): n is a, c, g, or t
  misc_feature (13)..(13): n is a, c, g, or t
  misc_feature (18)..(18): n is a, c, g, or t
  misc_feature (20)..(20): n is a, c, g, or t
  misc_feature (23)..(23): n is a, c, g, or t
  misc_feature (29)..(30): n is a, c, g, or t
  misc_feature (32)..(32): n is a, c, g, or t
  misc_feature (36)..(36): n is a, c, g, or t
  misc_feature (40)..(41): n is a, c, g, or t
  misc_feature (62)..(63): n is a, c, g, or t
  misc_feature (66)..(66): n is a, c, g, or t
  misc_feature (69)..(71): n is a, c, g, or t
  misc_feature (75)..(75): n is a, c, g, or t
  misc_feature (78)..(78): n is a, c, g, or t
  misc_feature (80)..(80): n is a, c, g, or t
  misc_feature (82)..(83): n is a, c, g, or t
  misc_feature (236)..(236): n is a, c, g, or t
anggttnnantantttanantcncaccannanttanaagnnttccatttctccacatcctcnncancannngttnttncntnncttttaatgatcaccattctaactggtgtgagatggtatctcattgtggttttgatttgcatttctctgatggccggtgatgatgagcattttttcgtgtgtctgttggctgcataaatgtcttcgtttgcgaagtgtctgttcatatccttngcccactttttgatggggttgtttgtttacattatctttctgacatcatttaaaatattaaacgctttaatatatggcacctttaaaattgagtcagagccttttagtgaaagaatctgttttcctaaaatagaaataactttaatatttaatagcttcaggtttatacactccattttt

SEQ ID NO: 260097 - DNA, 367 bp, Homo sapiens
cctgaatttaaattttggcctctccagctacatgggggaatttcttatagataatattttgaagtatgtttttcaggttgtttccattcttctcatttctttcaagaatgctagtgagtcatagatttggtctctttacataagcacatattttacagagattttgttcattctttttattctttattgttgtcttattttggaaagccggtatttgacctcttagtctttttttatcagcttagtctgttctgctttgatatttgcaagtgcattatgaaatttttatagtgtgtcattcagctctatcaggttgattatgtccatttttttttttttttagagtctaactgttacccagagtgga

SEQ ID NO: 260098 - DNA, 461 bp, Homo sapiens
gcatatatgggtgtttgcactctatctttctgtctctatctagtgaggaaacttgactatcctatttttactttttaaattgttaacaaattaaaacttaaatgtttatattaatgtctacagttgatccaagtctccattcaagctgggaaagaacattatcatgctttcaattattcttttcctagcatctccctaaagaagtcatctggaattttaatacttgtttctcttgtttcttttacctttttacattatgttttaatgattttgcatccttgcctatcaattttactgatttctttggcccaacactattttttgtataacacatctttttcctggattcattattattttgtgggagtacttaaggaattctttcagataggctttatggctgataagttttctgagtccttacatatacaaaaatgtcttttacctggggtgtggggagg

SEQ ID NO: 260099 - DNA, 1306 bp, Homo sapiens
gtgctaatggcagttcaaaggtgagtgtttcctgtaagttgggccagcgcccagcctctgctcccccagaacctgggagggcagcacccaagataacctgagcaccccgttaccttggagccctgaggctgtctctgggccacccactcaaggtggcccccctacctgctcaaggctacatacagagggctgtcctgcccaaacagccacacccgagggccgacccagtgctctgtgtgccaagggagtttctggcagagccacctgataccccacgtgacagctggcctctcccccatcacccaggggctacccaggcagagagctgagaacacaggggccatcagcctcgctatcacctccacccccaagtgcttggctccccaagggacagctctaaaatccccagaatctcaggctggtgggtccagctgagcatcctagttttcactttctcctcccaaaaaggaaagaaccttggtcactaaattctacgccttctggaaatcactctgctaatgacttcctgaatgatcgactgagaccaacagctggcccagccctgcatggaggagtaagaaaccctcatctgtcagagttaaggggcctgaatgggtacaggtcacattcttggagctcaaggtgacaggccagagcccaggtccccaggacagtgcagcaccttgtccaggcgggcctcccgtttctggctccgggctgagcttcctggagaagaggaaggttcatctgaattgcagaaactggaagcagagagcccagttaggagctactacaactatccaggcaagaaagacagtggcttggatggggatgtggtattgaaagtggagactagcagaggtacttggaaatgtacatcttatagctaccaagacttgctgctggtgtgaatgttcaggtaaaagagagagaaatcaagaatggctctaggctgggtgcagtgactcatgcctgtaatctcagcactttgagaaccgaggcggatggatcacttgagctcaagagttcgagaccaaccagtctgggcaacacagcaagactctgtctctccacccctcaaaaaaaagaaaaaaggaaaggcatgactctgagggtaaattctaggaaggcatgtggggtgggaaatggggccagcggtgtgattaaagaatgtacatggtagtagagggatgcagatctagataatattgaaaggccaggacttggacttctgggaatgggaaacatgatagaattatctgtaattttccagaatcaatgactagttgtttttttaaaaaaagaa

SEQ ID NO: 260100 - DNA, 724 bp, Homo sapiens
tgtaatcccagctactcaggagactgaggtaggagaatcgcttcaacccaggaggtggagattgcagtgagccaagatcatgccactgcactccagcctgagcaagagaaagacttcgtctcaaagaaaaaaaaagtgatatgatttatgttttaaaaggttcatctgaattgcagaaactggaagcagagagcccagttaggagctactacaactatccaggcaagaaagacagtggcttggatggggatgtggtattgaaagtggagactagcagaggtacttggaaatgtacatcttatagctaccaagacttgctgctggtgtgaatgttcaggtaaaagagagagaaatcaagaatggctctaggctgggtgcagtgactcatgcctgtaatctcagcactttgagaaccgaggcggatggatcacttgagctcaagagttcgagaccaaccagtctgggcaacacagcaagactctgtctctccacccctcaaaaaaaagaaaaaaggaaaggcatgactctgagggtaaattctaggaaggcatgtggggtgggaaatggggccagcggtgtgattaaagaatgtacatggtagtagagggatgcagatctagataatattgaaaggccaggacttggacttctgggaatgggaaacatgatagaattatctgtaattttccagaatcaatgactagttgtttttttaaaaaaagaa

SEQ ID NO: 260101 - DNA, 665 bp, Homo sapiens
gtgacagctggcctctcccccatcacccaggggctacccaggcagagagctgagaacacaggggccatcagcctcgctatcacctccacccccaagtgcttggctccccaagggacagctctaaaatccccagaatctcaggctggtgggtccagctgagcatcctagttttcactttctcctcccaaaaaggaaagaaccttggtcactaaattctacgccttctggaaatcactctgctaatgacttcctgaatgatcgactgagaccaacagctggcccagccctgcatggaggagtaagaaaccctcatctgtcagagttaaggggcctgaatgggtacaggtcacattcttggagctcaaggtgacaggccagagcccaggtccccaggacagtgcaggtgagtagagcaagcaccgatctagggctaagatggggtctgaatgaccctgtaaggttccccacctgatttcccaggtgggaccctgaagtcagagagaggcctgagagttgcaggggggtgggggaccggtgttggtgttaatctgcctttacttcaaaacccagaagactcccaactattggaaagtgaaacctccaaaagcaaagccaccacccatcctccttccccactctgattcagacatgttttccctgcccca

SEQ ID NO: 260102 - DNA, 456 bp, Homo sapiens
gccccatatccttatattcacctgcctagctgactaagctggatgtctcaagaaacctcagacttgacatactgaaagccagagtcgtgattctcctgctacatctcccactgccttctcacccgctgcctgatcctcctccagtgctgcctgttttgtgaatggcataacctcaaacctcagttctgcacgccatcaactgggagtcactgtcagctcttcccttttctctaccgccttacatccagcccatcaccaggccctgtctacctcctaaacagcacctgggtccatccactccactcctccccatctccacagcctccacactagttcaggctgactttgccttttcctcaggctgctggaatcaccttctcattggtatggctgtatccactcttgcatctccaattgtcagggaggccaagggaaaagaaagtgtcagaaaaaaac

SEQ ID NO: 260103 - DNA, 208 bp, Homo sapiens
atgtcagtgactcttcactgaaaccccccaggtaggcatgcagtgacaatccagggctttcctggacacattgcaatcctaacctcagggtaaaagccatgtccctgttccgccacagcatggcaaaatcaattccagttggattaaaaagttacatgtttttaaaaaaatgaaaccgtaaaaatgtatgtgactcagataaagtaaa

SEQ ID NO: 260104 - DNA, 167 bp, Homo sapiens
agggcggtcttcagcacctcttgtaaagcagtattaacctccattacacctccagcagcaatgccttcctcggccatggcagtgggttacgggtgaacctgaatcttgaacgcacccaagcctccgcctccgcgcgactcggcggcaggagggaaagggcgagaact

SEQ ID NO: 260105 - DNA, 415 bp, Homo sapiens
ccctgtctcccaggattgttgactaagcagcccacattttcttcagggcagcccctctgctccatctgcaccccttccccgcacccatgcagttattcccctgcccagtggcctggtctccagggctcagtcagggtccccgcaaagactgcaggatggtttgggtggttctgggccaagctcaggtcctctctgcggtctttctgtcatctcacattgtcctgcagcctggggcagaggagaggtaaacccatggatccccacagatgaggtttgtactggcaaacaaagaaagcctgctgttgaggtaaattttttttcccaagtccagacagagaaacagccagtaactttttacttttggatggtattgaaaaataaaaaaagcaaaaattgtccattattttgttattta

SEQ ID NO: 260106 - DNA, 216 bp, Homo sapiens
cacataattctattaaagtaatgttgaatttggatttgttgtagaaaacttgcaaagctcttctaagagtaactaaaatcagtaaagaataggggaaaaaatccagagaaaatataagcaggaaaaccatagcagacagggtcagatggaatattagcggtttaggtgaagaacccagagaaccgcctgccctgtaaggaatgctgggtatttctc

SEQ ID NO: 260107 - DNA, 391 bp, Homo sapiens
atttaggcagaatgatcaatattgatggtttttttttccttaaattttttgctaagaacggccttcctgagtgcttaattggccttgaaatagtctaaattaggaaacttgaaatcttgaagtcatctaaattatgcaggtaattcaggtgagaggatcacttgaaatacttgtatgtgactagggccaaatctagttaaaaaagtgtatgttagttccttattccaagatatatcatgtatattttggatagctaattttaaagatatttacctgaattaagagttcttttaacaaagcataatgtggtaattcatcaaaagcctataataaggtaagcatattatttaacagtagactgccttgtttctgtttgctcatttgtttcttc

SEQ ID NO: 260108 - DNA, 672 bp, Homo sapiens
aatggtgccctggagattgtagtggtgatacctaaagcctggaaaaaggaggtcttctcgggcccgagaccagtgttctggcctgtcacagtggcgctacagtgcctggagctgcgctggtttttcctcggagtggagcctggtaaccgcgacttccccgccatgttctgtgtgttgctggctggagaagggtggttgacaaactccgacccagcacagtgtttctgtgggtcaaaactagaaaactatgtccaggctcggccgaggcggaaggatccgttcaggccaggagttaaagagctgcctgggcaacatggcgcgaccccatctctgtagtcccacctcagcttcccagatacttgaaccccaaggttcaaggctgcaatgagctatgatcccatcacagcactccatcctgcgagacggaggtaaaccttgtctaaaaaaataaactatccaagtgtacaacagggagggactgcttaaagaaaacatgataattgtatgttcaaatacttttaacaagtgcaaaatgtataggctgaaataaatagggctggccgggcacgttggctcacgcctgtaaattccaacattttgtgtgctcgaggcattccgatcagtagacatgggtgaaaccccatgtctactaaaaatataaaaattaggcca

SEQ ID NO: 260109 - DNA, 677 bp, Homo sapiens
ctcaggcagcggcttgagttccatgggagcactgtcctgctccctctgctgcctctttttagtcttggggctactataacactttcccttccccagccctgccaacctggtgggacattgggcttccctcttcctggggacaggcgggtcctggggacaagcctgtcctgtatcatacctgcagcgagactctttttttctccaggacctgcggagcagccaggcttcatgagttaaatgcagatctgaaccatacccagttgggattggggtacacactctactcctctgaaaactagctaggggttcgaacttggtgagagggagagtgggacagagccagaccagacaaggactgatcacctggaaaaacctgccatcaaagaccttgacgagtgctgggggcggtggctcatgcctgtaatcccaacactttgggaggctgagacaggtggatcgcttgaggccaggagttcgagtcccgcctgggcaacatggcaaaaccctgtctctactaaaaatacaaaaattagctaggtatgctatgctcctgtaatcccagctactcgggaggttgaggcaggagaatcgtttgaactggggaggtagaggttgcagtgagctgagattgtgtcactgccctccagcctgggtgacagagtgagactccgtctcaa

SEQ ID NO: 260110 - DNA, 900 bp, Homo sapiens
aatggtgccctggagattgtagtggtgatacctaaagcctggaaaaaggaggtcttctcgggcccgagaccagtgttctggcctgtcacagtggcgctacagtgcctggagctgcgctggtttttcctcggagtggagcctggtaaccgcgacttccccgccatgttctgtgtgttgctggctggagaagggtggttgacaaactccgacccagcacagtgtttctgtgggtcaaaactagaaaactatgtccaggctcggccgaggcggaaggatccgttcaggccaggagttaaagagctgcctgggcaacatggcgcgaccccatctctgtagtcccacctcagcttcccagatacttgaaccccaaggttcaaggctgcaatgagctatgatcccatcacagcactccatcctgcgagacggaggacctgcggagcagccaggcttcatgagttaaatgcagatctgaaccatacccagttgggattggggtacacactctactcctctgaaaactagctaggggttcgaacttggtgagagggagagtgggacagagccagaccagacaaggactgatcacctggaaaaacctgccatcaaagaccttgacgagtgctgggggcggtggctcatgcctgtaatcccaacactttgggaggctgagacaggtggatcgcttgaggccaggagttcgagtcccgcctgggcaacatggcaaaaccctgtctctactaaaaatacaaaaattagctaggtatgctatgctcctgtaatcccagctactcgggaggttgaggcaggagaatcgtttgaactggggaggtagaggttgcagtgagctgagattgtgtcactgccctccagcctgggtgacagagtgagactccgtctcaa

SEQ ID NO: 260111 - DNA, 852 bp, Homo sapiens
aatggtgccctggagattgtagtggtgatacctaaagcctggaaaaaggaggtcttctcgggcccgagaccagtgttctggcctgtcacagtggcgctacagtgcctggagctgcgctggtttttcctcggagtggagcctggtaaccgcgacttccccgccatgttctgtgtgttgctggctggagaagggtggttgacaaactccgacccagcacagtgtttctgtgggtcaaaactagaaaactatgtccaggctcggccgaggcggaaggatccgttcaggccaggagttaaagagctgcctgggcaacatggcgcgaccccatctctgtagtcccacctcagcttcccagatacttgaaccccaaggttcaaggctgcaatgagctatgatcccatcacagcactccatcctgcgagacggagagacggggtttcaccatgttggccaggctggtctggagctcctgacttgaagtgatctgcccacctcggcttcccaaggtgctgggattgcaggcgtgagccactgcgcctggccccttcaggtgggtattgaggcttcactacaatactagttccccgttgctgccgcaataaattaccacacacttagtggcttaaaacagcatagaggtattcctttacatttctgaaggccagaattctaaagtcagtcccactgagtcaaggtgggagcagggtcagtgcctttccaggctctgcgggagaatccgtttcctggccctggaggcggctgtactcctcagcttgtgctgcccttctcgaatgactcgcgttcctgctttcatcactacacctcccaccgtctccatcactgctctggtct

SEQ ID NO: 260112 - DNA, 403 bp, Homo sapiens
ggcatggtggtagtaaaagtcagatttcaagaggactgacaactgattaggtagtgaagtcaaggcactctgaagatatttgagagagaggggaaggcaaggcagtgatacatggttatggagggagggagaaagatcagaatttaagagaagcacacatattcatatcttggtggatgtcatgtttcccaccaattagtaataaccctgctttgaggattttgtggcatgctggtaagttatcattttaatgccctgaataccctcttccctaacttggagttcctatccttcattttgaaccctcagttagtaggcttatttgttgtaaatgaggactagaatttgaacattatggaaaattactttttgaagagaaacattacttttattattacaggcc

SEQ ID NO: 260113 - DNA, 390 bp, Homo sapiens
cagacaatgggtaggtatttccaggcacagaaaagcccatctagaatgtacaggtctaaaaaaatatcagaaacctgagaaatacgaggagaaacaggatgctcgatggcaaaagaggaacctaacacacacatctctgagacttgagaggaaaagcaacaggattcatactatgtattgggattaaaattcttcagaaggaaaaccaaagcagtaatactttttaagaagccttatcatattagaataatttagaatttttataggtagaaacttggccgggcatagtagcttatgcctttaatttctgcactttgggagatgggtggatcgcttgagctcaggagtttgagatcagcctaggcaacatagcaaaaccccatctcaaaa

SEQ ID NO: 260114 - DNA, 717 bp, Homo sapiens
  misc_feature (3)..(4): n is a, c, g, or t
  misc_feature (9)..(9): n is a, c, g, or t
  misc_feature (11)..(11): n is a, c, g, or t
  misc_feature (22)..(22): n is a, c, g, or t
  misc_feature (534)..(534): n is a, c, g, or t
  misc_feature (695)..(695): n is a, c, g, or t
  misc_feature (700)..(702): n is a, c, g, or t
  misc_feature (706)..(706): n is a, c, g, or t
  misc_feature (708)..(708): n is a, c, g, or t
  misc_feature (712)..(712): n is a, c, g, or t
  misc_feature (715)..(715): n is a, c, g, or t
ttnncctcncnaaatgctgggnttacaggagaaagccacagtgcctggtctggtatgtgcattttctgacttactcctcaccatcgttattttgatgcttctagtatagttcctacataggtttctgtatcgttaatcttatcaatctatatataacatgcactgtgtaggcaagcttctctcttcatctttataaatcccctagtgatgctccccttcccactaatctccttcaattgagattcaactgcacaggccagcccctgtcagatctgctgtgctaataccactgggaatatttgttttgtgtgcttttttctctttccatggattaggtacactttcatcattttcaaaggaagacctgaatagcaatgaactcattggtcaagagcagtggagttttggcatggaataccctgtaccctggacccaccacgatggagtaatgtggagactcaaggctgattcttagccaggccagtggcttcagaaagggccaggagcctgcagttacacagctccatctttctncccctccctccaccccctgccttttatttcttatttgttacagcctttcatgaggaacaacagtcagtaacacaaacattatattcatctctgctcattctcccctccagggaccaaacaagttttttttctgggcattgaaaatacgtctcaccccagcntttannnaggntnaatnagnca

SEQ ID NO: 260115 - DNA, 641 bp, Homo sapiens
cttcagctgagattaacttttaagggctttattaaactgttttagccactagcaacgatttcccttacacagatacatttagattgactttgcacatcttgaaaataagaaacaaatgaaaataccagagtatctttatatgtataagttgtgaaatttgaagtctgcattacttcttattggttcagttttcatgggattatttatgtataggagcagccaaggaaaagaccatagcagatttttgtaatgatggaatgagattcctggcctgtcaagccagtaggtgtgggactatggagaaagttcctaaattttagtccagttatttgaatggaatcttgaagagacatttactattcatagagcaacctgagctcgaactgtaattttgttctagttgggcagtgggggaagagaagagacttgaaactagtgttatatgatggacacgtcagtgctgaaaattcacggtgcctgaggtaggttaaaccttcctccaaccaatggtttccatgcaagctttttaacacagtgatgcctatcctatatttttactatttgcacatattacgagcgattgaaggatgttaggaagctctgacaataaaaatggttttctttaatgaaaaaaaaattct

SEQ ID NO: 260116 - DNA, 343 bp, Homo sapiens
cacaaaggagaaacaaagtcatgactttatgacaggtggtagttttgaacttggagcaaggtagccacaaattaggcttctatcttcccaaagaaactggagataggggtgccatatcccttgacgtttacatttcaaaaggatggctcccagacctttgagaaagacattcttgggttgtaaaactggcaagaaacttttaaaaatatttacatatatctcgaagggcagagaaagaatttataattataagtttatactctaagaaataagcattatataatagtatagatatatcctattacatttccagtattcaatataatattattaactatagtct

SEQ ID NO: 260117 - DNA, 552 bp, Homo sapiens
ttccagctgagttatgctcagtttttaagagcttatctttatattttcaaatgacatttagagatttcccaagcatactatgtcctttacatatacttaaaatagtggatgaatataagttagtcttctcttaatgaagtcggatatacttaaaaaaaattgttaataatgaacagcaatagaacaaagatttcaagggcaagtaaactctttgaaatatgtttaaaaatattaacctttttgccttcccaccaaatgatcttttttgtataatttgatttttttatattttgttttcattcacagtcaggcaggctatgcctgtctaggtgagattctaaagagcagaactgtctcattgtcatcatacgtctccactcatctactcaaggacatgttcttgatctctatatctgccaccagcagttcccaagttcttcccaatctgtctctcttatttactacatgtaagtttctgtgagctgaaaagccatcttgccaaacttgcaagaattttgttcaaaattaaactaggtttgaagataaaaaaaa

SEQ ID NO: 260118 - DNA, 479 bp, Homo sapiens
caggtgataatagctatgatggaagcacccacagaatgtttgaaaagatttggcaaaagtggggccacagtgttgcctttggcaacagctaggtgaagctgatcagcagccatccctttgggtaggtccatgctccatttctccactgtcctcaccaaggccagactaggtcaggcaaacaaggcccaagaagccaactttaaggaggcactcatctcccattgctagccttgtacttgcaaagccccaagagtgagtgcttccttaaaacatgcatcctgggcaccttcctagccttgccctagccctagtcctgaccctggtctccaacactccctactgcctccccaacagtgaggccatgtataaatggtcacatcctgcttgctctgttgtttgtctactgctagagttaagaggaatgtgaattttctggtatgcttgtctccatcaaaactgagtaaacaaaatataaacca

SEQ ID NO: 260119 - DNA, 826 bp, Homo sapiens
tatggttacaaatgactctgaatgttcttgtgactaaatctgtgtgtgctttcttaatgtaacactaccactgctgtcattactattggctacagtgccaggcattgtaccaagtacttatgagcgttgtctcatttactccttaatcctgtgtggtagctaatgttaggaaataatataggtaaagatcctgttttgcagaattaactggggctaagagattttaggtgacttgctacactactagtgagtagtggagccagcatttaaactttaggagagtgacttcagagcttgaatatataactagtatatttattacctctcatgttgttctttttgtacaaaaaagctcttctcccatcttaaaaacactaaagtcttacttccttcactggctactgcctaaaattttttgatcctgtttatagcaaaactcctccagagagttgaatgcattcgctattagcagtccttctcttcctcccattgtttcttactctgaccagacgttttcgcctaccactctactgtacccacgctcttatggtcaccaacagctaaatccagtgataaatttttaattttcagttctaatttttcttgacgtgttacttgacattgttttgtcacttcttcctttttgatatacttttttcacttgactttcgagggtccatattcttgatttttttcctttttgcagtaacgtgaccatagcacactgtagcctcgaactcctaagcttaaacaatccccctgcctcagtctcctgaatgactaggactacaagtgcataccaccatgcccagctaattaaaaaaaa

SEQ ID NO: 260120 - DNA, 609 bp, Homo sapiens
tatggttacaaatgactctgaatgttcttgtgactaaatctgtgtgtgctttcttaatgtaacactaccactgctgtcattactattggctacagtgccaggcattgtaccaagtacttatgagcgttgtctcatttactccttaatcctgtgtggtagctaatgttaggaaataatataggtaaagatcctgttttgcagaattaactggggctaagagattttaggtgacttgctacactactagtgagtagtggagccagcatttaaactttaggagagtgacttcagagcttgaatatataactagtatatttattacctctcatgttgttctttttgtacaaaaaagctcttctcccatcttaaaaacactaaagtcttacttccttcactggctactgcctaaaattttttgatcctgtttatagcaaaactcctccagagagttgaatgcattcgctattagcagtccttctcttcctcccattgtttcttactctgaccagacgttttcgcctaccactctactgtacccacgctcttatggtcaccaacagctaaatccagtgggtgcagttgggggttcctctacatcgtcctgcagcg

SEQ ID NO: 260121 - DNA, 437 bp, Homo sapiens
aatatttaccgtgtgtcagacactgtgataagtatttattgaaacgatctgctttgattcttctaggatgtttgtgctcaatactttatgtggattatccaatttaattcttagaccatgaagtaggagctattctattattcacattacagtagaagaaacagaggcacattttgtcccagttcacctagcctagttagtgacagagctagagtgaaacccaggcagtcttgatttcagtaagcactcctatatgcaccatgctatcctgtctcttcctaggcactgggaattgctttccatactttcactttactttcttgtattttgtttttaattttagaattggtggagtgttctggttattgaagtaactttaacgaatttgtaatataaaatgttggtaaataatcataaagtattcaagaataaatgtc

SEQ ID NO: 260122 - DNA, 237 bp, Homo sapiens
cttttcaccaaactggagtgagggcttgtgctaggttttggactctgatctgcctttgaagactcttccaaatgcaaagacttcatgttccttgtttattatggaaaaataaacaatgaaggtttgtataatattgagtatgtagtcaatgtataatatgggtaaacaaaaaatgtatgcacagaattatgaacaaagtcataaaaaatcaacaattaaaataaaagctataaaatg

SEQ ID NO: 260123 - DNA, 118 bp, Homo sapiens
tgagtgcaaaagccaatgcaatgacaaaagagaagggtggaaagaactgagtccctggtggtgtatttgagctactgaatcaaccaacgctgtgagggccttactggtagactctaaa

SEQ ID NO: 260124 - DNA, 550 bp, Homo sapiens
acacttgaagaggatcaatccatgtcatcatgtccccaatttcatagcaccaagtattttgtttattcacaaatgccctattatggacatctagcaaacaatgatacatcagaaaaggagatgtgcataaattttcatggaataaggttgtggaaaatgcactagaatcaacaaacatggggactaattcaactcggatatcatgtcttcagagaagtttctcctgccctcctctccctgtagaattaagtattcttccactgtgccaccctctaacttgtgctcatatcttcctctattgtagttatgtgttcacatccctgttgtttttgtaccggcttctcccaaagggagacatttagtcttattcttcttggtaactttagcacagacctggcagattgttgacactcaacaaatgtttattgactcaaatgcattcagttgaacattgacctttgatcaactctgggaaaagtctgcaaagctagttaggacattcagaaattcatttcatttcaatcctaactaaataaattattgaagtctc

SEQ ID NO: 260125 - DNA, 612 bp, Homo sapiens
cctccccagcgtgtctacaggtatcacgtcccaggcccccaggaggtaaggaggagggtgagagctcctcacatctgtggctccgtggaagaggacgcgtcctgtgcctccacaccacacccttgacattggctgttgtgatgctctgggtataatcagtcccagctccaactctttccatggcactgaagcctggataacacagtagatggggtctcagtctgtggcccaggctgcagtgaagtggaaggaggaaaagaatgggacctatttcacctggagtgtcgcatccaccaatatcaatgctgctgaaatgaaggagattctctctctctctttctctctagaggtggggtctctgtggcccaggctgtagtgcagtggggccatcatggctcactgtaggcttggccccaagcctgaagcaatcctcccatctcagcctcccaaataggcctgactgcagatgcttaccaccacacctggctaaattttctatttttattattttattttattttttgagatggattattgctctgtcgcccaagatcatgccattgcactccagcctgggcaacaatagtgaaactccatctcaaaaacaaaaaa

SEQ ID NO: 260126 - DNA, 391 bp, Homo sapiens
gcttgcctttttctaggtccctacattgaattgaggcaaagattcaaagtcaaagggcatgttgtcacaggaatagggcacactcgtgacaagagtgggaggatggtggtaaaggagcttatcaaaatctcagaagagagcacagagcctggaagttgtgtggattcaagggagcagtccttatcctaaatgtgtactcaggttccagaaaagcagagaaaagtgcagtatctcagctctggaactcagatacagtgagaagacagtcaaagagaattcgcccacattatatttgaacaaacagaacattttcaaagagcaacacgtgttaaataggaataagacagaaagaagcagcatatccactgtctaaaaccaagactttcataaa

SEQ ID NO: 260127 - DNA, 714 bp, Homo sapiens
aagagattctacagactcagctgcaacaattgccagggctcctggtctgggatccagtggggttctgctgggaggctgctgaattctgttcatggtcactgaaagggcaccctggtggcctggcggcaggactgggcttctgcctacactcaagcccaggtgcttcctgccactctgcccagtgagactgccttgatccacagctgcggtaggagacgaggaccgtgactgtctccttccagtctggggtaccaggcagggcccagacaggagaccaggacccaggttcagcaggggaaatggttggaaatgttgaaaaggcatctgggggtggggaggccaaccagagaggagcagcagcaggaaactgtcacccctccgcccccctaccagtggggttgctcccagggctggagaaacaaagggagggagcccagaacctggactgcccaagggagctggagccatgaagcagatggactcacagccagagctgccacccagatctggagatcaggaggaatacccagacttctcttcttcctctgccctccatcttcctccagaacctttcattgggtctaatcagaagccagttggcaagagggtctggagcatgtgatttgccctccaagatactgagcagaacacaggcaaggaacagatgtgacacaccaaacaaatgaccaggacacagacctctccagggctgcc

SEQ ID NO: 260128 - DNA, 671 bp, Homo sapiens
gaagggtggctcacttgaggtcaggagtttgagacccacctggctaacacggagaaaccccgtctctgccaaaaatacaaaaattagctgggcgtggtcgtgcacttctgtaatcccagccactcaggaggctgaggcatgtgaattgctgaacctgggagcggaggttgcagtaagctgaggtcgcgccactgcactccaggctgggtgacagagctagactctgtctccaaaaaataaaaacagaaatgaatgtgtgttaaagtgtggaccactgaccatgtctaaccaagtcaccaataggatttgttaaacatggatattctcacacttcagaactcttgaatccaaatcctcatgggtagggatggttgttcatgagaaatctcttattttgtggcatttcaatggccagaagctgcactggggagcttagtaaagctgtaggacttgttagtccccatcctggtgacctggctacttctttattgtgcactgaagtatgccacaggtgattggataagctttgggactgtattagttttctatttgctgctgtaacaagtcaccacaagtgtagtggcttgaacaacataagtttatcatcttatgattctgtatttcagaagtccatcatgggtgtcaccgggtcaaaatcaaggtgttggcag

SEQ ID NO: 260129 - DNA, 917 bp, Homo sapiens
gagagacagagttttgccatgtcacccaggctggtctcaaattcctggactcaagtgatctgctcacctcagccttcccaagtgctaggattacaggtgtgagccaccacaccgagtcgattttttacatctatgtactttctaagatctgagcattaaaatggataagtcagttcaggagaaagacattaatctaaataagtaactatttcctaaatgttagcaatttccttcatgtcaaaaggtcgtaagcttcaaacacataaagcaaaacatgtcaattcttgattatgactataaactgcaattaaattatccagccatcagcttgtaaatatttacttagttgatttgatccttaaatgttttataaataaatcacaataaatccaatgttacaagatttgattcagacaccttacagatttctagaacctaagtaaaatactatataacctttaaacaccagtccttgggtttactcaaaaacagtatttctcaaccattttttaacccacaatcttttatataaatataaaaattttaccctactgagagattcagagtccctaaggtggctgtcctgcatagagaatcatatattctaattagccccagtagccaagaaaatgctgtctaccttaactttctgaagtctgtaattctttttatttcaggtgggatatggctttacaaaacatactctcaataacaaagatataacatttcccaagagtgaacactttgggagtggttatttgtctaaaatactcaatttttaaaaatgctacactttctgcctctacaaatagtcacagcaataaaattacaaagaaatacaagaaaacatatttaatcaaccccactattactcttaagtcttcacagtcaaagccttattatatctctttaaaagt

SEQ ID NO: 260130 - DNA, 511 bp, Homo sapiens
gtctatgggtgttcttcctttggctttccagtggggcctgtggattgactagtttaaagaaaacaagtgtgaacaggggaacatttacatggctctagttttacatgactctagtgttgaccattggattttctcgtggtcagcagctgtgggggtgtgttgggttttgagtcagtgagatgagaaacaagtatactgtattgcagacaaccgcatgggggagagagaagttttaactaggccaaaggtggtgggatacaactaggtttcaagcaacttatgtcaggcctaaaaataaatgctgaagcaacaactatataacaaatttatacaagtggtattgaaggtgagagtaaagcagggtcttctgcttttagctccttattctttctacctgactctactttctttatacaatactagaagaatcaaggtctaaaaaataaatctagtatgaaggacctgagttgctttcttagccttgaattagtttggatcttactatttattt

SEQ ID NO: 260131 - DNA, 806 bp, Homo sapiens
agatgtttggggctatgtcgtagatatagtataggcataggaatcctaaggagcaggacatatttcagcctgaatatgacaaaaatcccacttattactctcctgagagcttcaagtgcctatatgacccaaaatacaatggaaagcctattggcgaaagtcatgggttgattgatctaaccctgagataaaatacttattaaaatattatcttttaatgggtttcagacaactgaggctaagccctttaattactttaaggaccatgctcactgaagcttttaaaaggtattttcaaaagcttaattgcccaagaaaataatcagtgtaagagtattaggttacccagcagaaaatgatgtcttctacatacccgtctacatcacaagaagggaggggtaaaaaaggatcaagatcttattcttctgtaagcctacatgtgcatgagtgttatgattttgagactactcttatatacatgtaatttgatcctcttatcaaaacaatatagagaataactgagcccaatctttttagtcatctcttcaacaaggggtaaatcagtcagtttctaaaactggtgggaggtctccataaacctgataacaagatcccaaaatccaaactgattgactgagttaattcctgatcatttgggttgaacttaagagttatacaagaaaatggtaggggacgaggaggttgtataaaggggaaaaaacaacaactgcaaaaagcccaagagcctgaatttagaccaatctatcatcttcctcctcttaaaaagaaaacaatttaaaagtttc

SEQ ID NO: 260132 - DNA, 343 bp, Homo sapiens
gcattttctaaatatatgacgtgtcttctgtaaacagagatagttttacgtttttctttccaatttggatgcctcttatttcctttttttaaatttttgtgggtacataatagatatatatattcatgaggtatatgagatacaggcatataatgcataattatcacatcagggtaaatgtggtatccatcatttcaggcatttatcctcttggcattacaaaaaatccaattatacactttcaatgtttaaaaatgtacaataaattattattgacagtagtcaccctgttgtgctaccaaacactagctcttattcattctatctatagttttgtacccat

SEQ ID NO: 260133 - DNA, 174 bp, Homo sapiens
aaccattctccccacactgatggcctttacagtgagcccttaattctcttctgctgactcactgagcattttaagaacccacgtgcagatgttcaatattcatgtctgtttgcatattttttatgtagcagctaaaagtctttattcattttactgcctgatttgaaataaaaa

SEQ ID NO: 260134 - DNA, 436 bp, Homo sapiens
ctatgagccttataaagactcatttagttatcttcacccttccttcttgggccagctcttcagggctctactcccaaggtgtagggtacttcccaagacttctgcccctggcaggctccagaccacagctctttctctctggctcaaggggttttttaaactgcaactctgtctttcagttgccctttgaagatctgcaaatgttccccaggacaaaaggagccttaaatatgaggctcactctcctgatttgtgtcttctcccagatcttggccaataaatccttatgacccttttgctcttcttgattttaaaacttaattatctattgcatctagcttttactagttatcatgaacaagagatctggtccgaattacctagtcctccattgccaaaaatgaaactcctatatggagacaacaacttttaaaac

SEQ ID NO: 260135 - DNA, 708 bp, Homo sapiens
caatgattttacacgtcctcttttcattagaagctaggctaaaaatagggaagaacaaagacatgtattgtatgatttatgtcggaatgtcttttattcttatatttttggttttgtgtcaaattcaggtgaaagaatgtcaaatgcctgtgtgtgtgttggcatctgaacttggcaaagaaggtgattgggtttggtagggctttattccagctttttcaagaattcctcacttttcaatactgaacagaacaggccattctgataaagaatccattacatacgtagaaaaattcaggctcatgaagaagctggggccagatttgtctgattcatgaaggttcttcagtttctagcagtttgtccttggagaagttatttaacctctctgagtctcgacctgctcacctataaaatggaggtaataagaggacattcctcataaggtctgattattatgtgtaaagtgcttaatatagtgtaggcaaattataagcacacatcaaatattagctcttatttttattacttatagacacataaatggacatgttaagaaaatatgattacttcttatcaatgtttgaaaattttacaatccaatcaacaaatgaattactcagtcttcaaactatgttgtctaattttattttgttattggtttctttaactttcttcttttgaggtgcaatatttttaaagctttta

SEQ ID NO: 260136 - DNA, 491 bp, Homo sapiens
tggagagggagcgcagctctggagacggcccccagggcttgcgggcgggcgggcgaggcagcgtggagagcggagagcgaagctctggagacgacccccagaggagattggccaagtgcggatgtgcgagtcctccctgcccgaggcgcaaactgtctcactccaaagggcgtccggagggttctgcggggcggctgtgcactgacacctgccccccacgtgggagtccgccggctcctggcccttgccggttggtgttgcgggtctgagatgacgcccccgcggtaggagcggggtttccctgatcaccgcttcttttgaccatcttttctggcagggccttgtatttttaaaatgtgtaaaggttaagctttctgagatcagaaaaataatatttagtgaaccatgtgatttaagtcactgtgtatgtgacatgaaatatttatacctaacccactagcaaatggctcgttaaacatatttgagattta

SEQ ID NO: 260137 - DNA, 166 bp, Homo sapiens
ctgaattcctaacatttctagttacatttctaattacattgatttcatgttaaatccacttatgtcagaatatattctgtataatatctgtctcttgaagtttgatgatacttgctttatggcataataaagatgcacttgaaaagtgtgtttatgcagttattgg

SEQ ID NO: 260138 - DNA, 382 bp, Homo sapiens
ggaggttgcggtgagctgagatggcaccactgtactccaggctgggcaacaagagtgaaactacctctcaataacaaacaaacaacaaaatgaaaaacaaaacagaacaaaaaaagaaagaaaccaaacccccccccccaaaatacatggtaggcactcagtaaatgtttgaatgtttgcagggtgttgaatgaatgagtgaatcattggtgattgtttctctctgaaaaataaatgaagaatgttttcatttgggcttgtatgtttcctctacattcagtgatgactgaaagagccaattaacttttaaagttgggctaaacaacctaggcctgtgactagaaagggctagatttggtttgtttaggagacaaaattgagg

SEQ ID NO: 260139 - DNA, 105 bp, Homo sapiens
gcaacagaaagttctaacgaggacccaggtttttagacagctagagtctccgtgtttcttctgattgtggtaggaaataaagccaggaaaaataagtctttataa

SEQ ID NO: 260140 - DNA, 166 bp, Homo sapiens
cacctgtgagcagtttatttaaaaagtacttaaaatatcaccagtaacttacccatttgaagcactcttggaattttgaatttacagtcagtccagtgggaaatgagtttcatgagctgatagaagttaccctcctttgctgaactatgaagagaggcatatttgt

SEQ ID NO: 260141 - DNA, 579 bp, Homo sapiens
gaaatcaatagatgtctacgattaatagaggaaattgtggaatagtcagatgcttgaaactttaatgagcagaaattttaaaaacacaatacagaaataatggtcttgcaacattaaagaggaaggacattgactctttggaaattgaccatggactcaagagtatgcagagtatcagagaaatttctacttaaaagttgtagagctggaggttccttataggggatttagatttcagtgaagagtttgatagaagtatttttcgtggtttaattaggcagaaggagctatatatgcagttaccacaggttgagcttccctaatctaaaaatccaaaacctgagatgctgcagaatctgaaactttctgagggctgacattatgccacaagtggaaaattctacacgtaagtacttaacacacactttgtttcatgcacaagatcattgaaaatattgtataacattcccttcagactgtgtgtataatgtatatgtgaaacataaatgaatttcctgtttacttgggtctcatccccaagatatgtgattgtgcacatgcaaatatttcaaaatctta

SEQ ID NO: 260142 - DNA, 134 bp, Homo sapiens
ggtacatgcctgtagtcccagctactcacgagtttgaggtggaagaatccgttgaactcaagaggttgaggctacagtgagacatgattgaaccactgcactgcaagctgagtgacagaacaagaccctgtttc

SEQ ID NO: 260143 - DNA, 446 bp, Homo sapiens
cttcagcagccatcttatggccatgaaatggcaagcatgagaatgaaagaaaatgcactcatcatgaaaggaggaagagcagaagaaatctgggtcactggtgatatcaatggatagctgaagcagtgctgctctggatggaaaatgccctgggttctccgagacttaacaccccgccttgtgaacgcgagcaagattattctctctgagcagctcttttcacatgtgataagcttggcaagttgccctggattgaattctcacccactgtcttcacccaacccagcagagaagaaggcttgtgactgtgtaaggtgaaaatggatataccatttctgggaagagaaaagaagccaattaaaagtggggcatgtcattacactgaccagaaatgaacgtacctttttagaaataaagaatctgtatattcctgtggctctgattta

SEQ ID NO: 260144 - DNA, 1033 bp, Homo sapiens
ggccctgtctctacaaaaagttttttagaattagctggacatagtgtcgtgtgcctatggtaccagctactgggcagctgacgtgggaggatggcctgggactgggaactcgagggtgcagtgagctgtgtttgcacctctgtactctcgcctgggtgacagagtgagactccgtctcaaaaaaaaccccaaaaaaccaaaaaacattaattccatctgcaaagtctcttttgctaggtcatttaacatacacaggcattaatactagggattagggcatggaaatctttggggcctatttttagtctacaacaaagtattttatcaagaaaaataattcccacttgagaaagattattggaagtcagctgtattagtcattttattatggcagtaaaataaatctgtgctagtttatattttttaagtaaattattcactctttgatactttgatactttgttgagctgtgtaaaattgctaatatttgattgtttccaactacaaaacaacagcaatttcctatagtttaacctagtaccagtaagttaaaacatacctcatgttaattacatctcacaattgatggagatatagctattttaacagattaaagagctaatgttctaggatgaagaattttttttttttttaaatcaagttctggctctatcacccaggctgtagtgcagtggcacaatctgggctcactgcaacctccacctcgtgggcttaagccatcctcccacctcagcctccctagtagctggactacaggggtgtgtgaccacacccagcttatttttgtattttttgtagagatagggttttgccgtgttgcccaggctggtctcaaactagtgagctcaagtgatcctcctgccttgacaaggtgctataattacaggtgtgagccatcatgcctggcccaaagaattttttcttcaaaaagttttgtatttaattggaaaataccttaataaaaagcattttcaaatcataagcagatgattataagcataatctttccaat

SEQ ID NO: 260145 - DNA, 815 bp, Homo sapiens
cccagccagcagaagaggatccgcagatgcccgcaggaaggggacgcattgccaggtccaccagctctcccacagacagctccaggcctcactgctgagtctgtgtcctatatacaatgtcatctgagggtggcaccgaacacctggctggcttgctggccacccaccaccctttcagccaccctggctgccctctggtttctatcgcgtctgttaaaaggcagacccctctggatgctttcctccactctttcaaagtgcccccaccctcacccttcaaacatcaagttgatggttgtaccatgagccacaggaacaataaacagcccggaagccactccactcaaggtctcgaggccctcccgacagccggccgcctgccctgccacggaggctgggcagcacagctgggggcttgagagctggttcaaatcctgtgtctgccccctgcgagctatgtttgctcaggcaagtagcttgccctctctggatctagtttccctgtcctcaaaagcatgggcagacatgggcaaagtgctggcttgcaattctcaataaattacagattatcagatcgctatttaactcaggcaacaaaaggaaaatacttgattgtgtggagagcaataactcttaaaaatggggtggccgccccataataagaaaagctagaaaaaaataaaccacagacgcagtgatttggcagggtgatatacggaggaaattctgccatcaggaaacagtattgtccataggttttcttcctactttcttcctttaattactaaataaaatcttcaatcactgaaaaatca

SEQ ID NO: 260146 - DNA, 4868 bp, Homo sapiens
atggccctggggacgacgctcagggcttctctcctgctcctggggctgctgactgaaggcctggcgcagttggcgattcctgcctccgttccccggggcttctgggccctgcctgaaaacctgacggtggtggagggggcctcagtggagctgcgttgtggggtcagcacccctggcagtgcggtgcaatgggccaaagatgggctgctcctgggccccgaccccaggatcccaggcttcccgaggtaccgcctggaaggggaccctgctagaggtgaattccacctgcacatcgaggcctgtgacctcagcgatgacgcggagtatgagtgccaggtcggccgctctgagatggggcccgagctcgtgtctcccagagtgatcctctccatcctggttcctcccaagctgctcctgctgaccccagaggcaggcaccatggtcacctgggtagctgggcaggagtacgtggtcaactgtgtgtctggggacgcgaagccagcacctgacatcaccattctcctgagtggacagacaatatctgacatctctgcaaacgtgaacgagggctcccagcagaaactcttcactgtggaggccacagccagggtgacaccccggagctcagataataggcagttgctggtctgtgaggcgtctagcccagcactggaggcccccatcaaggcctcattcaccgtgaatgttctgttccctccaggaccccctgtcatcgagtggccaggcctggatgaggggcacgtgcgggcaggacagagcttggagctgccgtgcgtggcccgagggggtaatcccttagccacactgcagtggctgaagaatggccagccggtgtccacagcgtggggcacagagcacacccaggcggtggcccgcagtgtgctggtgatgaccgtgaggccagaagaccatggagcgcagctcagctgcgaggcccacaacagcgtgtctgcagggacccaggagcacggcatcacactgcaggtcacctttccccctagtgccattattatcttgggatctgcatcccagactgagaacaagaacgtgacactctcctgtgtcagcaagtccagtcgcccgcgggttctgctacgatggtggctgggctggcggcagctgctgcccatggaggagacagtcatggatggactgcatggcggtcacatctccatgtccaacctgacattcctggcgcggcgggaggacaacggtctgaccctcacatgtgaggccttcagtgaagccttcaccaaggagaccttcaagaagtcgctcatcctgaacgtaaaatatcccgcccagaaactgtggattgagggtcccccagagggccagaagctccgggctgggacccgggtgaggctggtgtgtttggctatcgggggcaacccagagccctccctcatgtggtacaaggactcgcgcaccgtgaccgagtcgcggctgccgcaggagtcgcggcgcgtgcatctcggcagcgtggagaaatctgggagcaccttctcccgagagctggtgctggtcacagggccgtcggacaaccaggccaagttcacgtgcaaggctggacagctcagcgcgtccacgcagctggcggtgcagtttcccccaactaacgtgacgatcctggccaacgcatccgcactgcgcccgggagacgccttaaacttgacatgcgtcagcgtcagcagcaatccgccggtcaacttgtcctgggacaaggaaggggagaggctggagggcgtggccgccccaccccggagagccccattcaaaggctccgccgccgccaggagcgtccttctgcaagtgtcatcccgcgatcatggccagcgcgtgacctgccgcgcccacagcgccgagctccgcgaaaccgtgagctccttctatcgcctcaacgtactgtaccgtccagagttcctgggggagcaggtgctggtggtgaccgcggtggagcagggcgaggcgttgctgcccgtgtccgtgtccgctaaccccgcccccgaggccttcaactggaccttccgcggctatcgcctcagtccagcgggcggcccccggcatcgcatcctgtccagcggggctctgcatctgtggaatgtgacccgcgcggacgacggcctctatcagctgcactgccagaactctgagggcaccgcggaagcgcggctgcggctggacgtgcactatgctcccaccatccgtgccctccaggaccccactgaggtgaacgtcgggggttctgtggacatagtctgcactgtcgatgccaatcccatcctcccgggcatgttcaactgggagagactgggagaagatgaggaggaccagagcctggatgacatggagaagatatccaggggaccaacggggcgcctgcggattcaccatgccaaactggcccaggctggcgcttaccagtgcattgtggacaatggggtggcgcctccagcacgacggctgctccgtcttgttgtcagatttgccccccaggtggagcaccccactcccctaactaaggtggctgcagctggagacagcaccagttctgccaccctccactgccgtgcccgaggtgtccccaacatcgttttcacttggacaaaaaacggggtccctctggatctccaagatcccaggtacacggagcacacataccaccagggtggtgtccacagcagcctcctgaccattgccaacgtgtctgccgcccaggattacgccctcttcacatgtacagccaccaacgcccttggctcggaccaaaccaacattcaacttgtcagcatcagccgccctgaccctccatcaggattaaaggttgtgagtctgaccccacactccgtggggctggagtggaagcctggctttgatgggggcctgccacagaggttctgcatcaggtatgaggccctggggactccagggttccactatgtggatgtcgtaccaccccaggccaccaccttcacgctgactggtctacagccttctacaagatacagggtctggctgctggccagtaatgccttgggggacagtggactggctgacaaagggacccagcttcccatcactaccccaggtctccaccagccttctggagaacctgaagaccagctgcccacagagccaccttcaggaccctcggggctgcccctgctgcctgtgctgttcgctcttggggggcttctgctcctctccaatgcctcctgtgtcgggggggtcctctggcagcggagactcaggcgtcttgctgagggcatctcagagaagacagaggcagggtcggaagaggaccgagtcaggaacgaatatgaggagagccagtggacaggagagcgggacactcagagctccacggtcagcacaacagaggcagagccgtattaccgctccctgagggacttcagcccccagctgcccccgacgcaggaggaggtgtcttattcccgaggtttcacaggtgaagatgaggatatggccttccctgggcacttgtatgatgaggtagaaagaacgtaccccccgtctggagcctggggacccctctacgatgaagtgcagatgggaccctgggacctccactggcctgaagacacatatcaggatccaagaggaatctatgaccaggtggccggagacttggacactctggaacccgattctctgcccttcgagctgaggggacatctggtgtaagagccctctcaaccccattgtcctgcacctgcaggaatttacactccactggtctctctcattacagcctgggccgagctggttaggtgagctccataaaacccaaagggacttggtgtcaggagaggacatggagggggctgagtgacagagatggttcagctggtaccagagtagaaacaaggtgcatcctggggttggctttagaaactaaacttctccaaaaggacagggcagattgtaaacgtcgtctcaaaaatgaaatgctgccgggtgcggtgactcacgcctataatcccagcactttgggaggctgaggcgggtggatcacctgaggtcaggagttcgagaccagcctggccaacatggtaaaactccatttctactaaaaatataaaaaattagccaggagtagtggcgcatgcctgtagtcccagctacttgggaggctgatgcatgagaattgcttgaacccaggaggcggaggttgcagtgagctgagatcacgccactgcactccagcctgggcgacagagcgagattctgtctcaaaaaataaaaataaaataaaaataaaaaataaaatgctattctgagggtccctaagtgcttcatgaagtaaagttttcagaagtggggaaagacatatgaaaaactctgttcattttgcattccatgacgtctgaaatagctaataataagtggaatttatgaatccatgttgcatcctacctattattttattatttccgacagttatctaacacaggaggcataaactatgacacatgtaaacataagtatgctccataagcattaaaataaacagacaatcaaaagaagctagaggaaaagaatatgtactgtgtgtgtgctttcgtttatagaaattctaaaataggcaaaactaatctacggtggcagagagcacagcagaggtttcctggggccatgagaggagggttgactgcaaaaaggcatgggagaactttctgaggtgttggaaatattctatataacgattgtggtggtggttgcacgggtgcacagatttgtcaaaactcattgaactttacacttaagatgggtgcatttttattgtacataaatgatatctcaataaaagtgattttaaaaacagg

SEQ ID NO: 260147 - DNA, 4924 bp, Homo sapiens
  misc_feature (4354)..(4354): n is a, c, g, or t
atggccctggggacgacgctcagggcttctctcctgctcctggggctgctgactgaaggcctggcgcagttggcgattcctgcctccgttccccggggcttctgggccctgcctgaaaacctgacggtggtggagggggcctcagtggagctgcgttgtggggtcagcacccctggcagtgcggtgcaatgggccaaagatgggctgctcctgggccccgaccccaggatcccaggcttcccgaggtaccgcctggaaggggaccctgctagaggtgaattccacctgcacatcgaggcctgtgacctcagcgatgacgcggagtatgagtgccaggtcggccgctctgagatggggcccgagctcgtgtctcccagagtgatcctctccatcctggttcctcccaagctgctcctgctgaccccagaggcaggcaccatggtcacctgggtagctgggcaggagtacgtggtcaactgtgtgtctggggacgcgaagccagcacctgacatcaccattctcctgagtggacagacaatatctgacatctctgcaaacgtgaacgagggctcccagcagaaactcttcactgtggaggccacagccagggtgacaccccggagctcagataataggcagttgctggtctgtgaggcgtctagcccagcactggaggcccccatcaaggcctcattcaccgtgaatgttctgttccctccaggaccccctgtcatcgagtggccaggcctggatgaggggcacgtgcgggcaggacagagcttggagctgccgtgcgtggcccgagggggtaatcccttagccacactgcagtggctgaagaatggccagccggtgtccacagcgtggggcacagagcacacccaggcggtggcccgcagtgtgctggtgatgaccgtgaggccagaagaccatggagcgcagctcagctgcgaggcccacaacagcgtgtctgcagggacccaggagcacggcatcacactgcaggtcacctttccccctagtgccattattatcttgggatctgcatcccagactgagaacaagaacgtgacactctcctgtgtcagcaagtccagtcgcccgcgggttctgctacgatggtggctgggctggcggcagctgctgcccatggaggagacagtcatggatggactgcatggcggtcacatctccatgtccaacctgacattcctggcgcggcgggaggacaacggtctgaccctcacatgtgaggccttcagtgaagccttcaccaaggagaccttcaagaagtcgctcatcctgaacgtaaaatatcccgcccagaaactgtggattgagggtcccccagagggccagaagctccgggctgggacccgggtgaggctggtgtgtttggctatcgggggcaacccagagccctccctcatgtggtacaaggactcgcgcaccgtgaccgagtcgcggctgccgcaggagtcgcggcgcgtgcatctcggcagcgtggagaaatctgggagcaccttctcccgagagctggtgctggtcacagggccgtcggacaaccaggccaagttcacgtgcaaggctggacagctcagcgcgtccacgcagctggcggtgcagtttcccccaactaacgtgacgatcctggccaacgcatccgcactgcgcccgggagacgccttaaacttgacatgcgtcagcgtcagcagcaatccgccggtcaacttgtcctgggacaaggaaggggagaggctggagggcgtggccgccccaccccggagagccccattcaaaggctccgccgccgccaggagcgtccttctgcaagtgtcatcccgcgatcatggccagcgcgtgacctgccgcgcccacagcgccgagctccgcgaaaccgtgagctccttctatcgcctcaacgtactgtaccgtccagagttcctgggggagcaggtgctggtggtgaccgcggtggagcagggcgaggcgttgctgcccgtgtccgtgtccgctaaccccgcccccgaggccttcaactggaccttccgcggctatcgcctcagtccagcgggcggcccccggcatcgcatcctgtccagcggggctctgcatctgtggaatgtgacccgcgcggacgacggcctctatcagctgcactgccagaactctgagggcaccgcggaagcgcggctgcggctggacgtgcactatgctcccaccatccgtgccctccaggaccccactgaggtgaacgtcgggggttctgtggacatagtctgcactgtcgatgccaatcccatcctcccgggcatgttcaactgggagagactgggagaagatgaggaggaccagagcctggatgacatggagaagatatccaggggaccaacggggcgcctgcggattcaccatgccaaactggcccaggctggcgcttaccagtgcattgtggacaatggggtggcgcctccagcacgacggctgctccgtcttgttgtcagatttgccccccaggtggagcaccccactcccctaactaaggtggctgcagctggagacagcaccagttctgccaccctccactgccgtgcccgaggtgtccccaacatcgttttcacttggacaaaaaacggggtccctctggatctccaagatcccaggtacacggagcacacataccaccagggtggtgtccacagcagcctcctgaccattgccaacgtgtctgccgcccaggattacgccctcttcacatgtacagccaccaacgcccttggctcggaccaaaccaacattcaacttgtcagcatcagccgccctgaccctccatcaggattaaaggttgtgagtctgaccccacactccgtggggctggagtggaagcctggctttgatgggggcctgccacagaggttctgcatcaggtatgaggccctggggactccagggttccactatgtggatgtcgtaccaccccaggccaccaccttcacgctgactggtctacagccttctacaagatacagggtctggctgctggccagtaatgccttgggggacagtggactggctgacaaagggacccagcttcccatcactaccccaggtctccaccagccttctggagaacctgaagaccagctgcccacagagccaccttcaggaccctcggggctgcccctgctgcctgtgctgttcgctcttggggggcttctgctcctctccaatgcctcctgtgtcgggggggtcctctggcagcggagactcaggcgtcttgctgagggcatctcagagaagacagaggcagggtcggaagaggaccgagtcaggaacgaatatgaggagagccagtggacaggagagcgggacactcagagctccacggtcagcacaacagaggcagagccgtattaccgctccctgagggacttcagcccccagctgcccccgacgcaggaggaggtgtcttattcccgaggtttcacaggtgaagatgaggatatggccttccctgggcacttgtatgatgaggtagaaagaacgtaccccccgtctggagcctggggacccctctacgatgaagtgcagatgggaccctgggacctccactggcctgaagacacatatcaggatccaagaggaatctatgaccaggtggccggagacttggacactctggaacccgattctctgcccttcgagctgaggggacatctggtgtaagagccctctcaaccccattgtcctgcacctgcaggaatttacactccactggtctctctcattacagcctgggccgagctggttaggtgagctccataaaacccaaagggacttggtgtcaggagaggacatggagggggctgagtgacagagatggttcagctggtaccagagtagaaacaaggtgcatcctggggttggctttagaaactaaacttctccaaaaggacagggcagattgtaaacgtcgtctcaaaaatgaaatgctgccgggtgcggtgactcacgcctataatcccagcactttgggaggctgaggcgggtggatcacctgaggtcaggagttcgagaccagcctggccaacatggtaaaactccatttctactaaaaatataaaaaattagccaggagtagtggcgcatgcctgtagtcccagctacttgggaggctgatgcatgagaattgcttgaacccaggaggcggaggttgcagtgagctgagatcacgccactgcactccagcctgggcgacagagcgagattctgtctcaaaaaataaaaataaaataaaaataaaaaataaaatgctattctgagggtccctaagtgcttcatgaagtaaagtttntcatatgtctttccccacttctgaaaactttacttcatgaagcacttagggaccctcagaagtggggaaagacatatgaaaaactctgttcattttgcattccatgacgtctgaaatagctaataataagtggaatttatgaatccatgttgcatcctacctattattttattatttccgacagttatctaacacaggaggcataaactatgacacatgtaaacataagtatgctccataagcattaaaataaacagacaatcaaaagaagctagaggaaaagaatatgtactgtgtgtgtgctttcgtttatagaaattctaaaataggcaaaactaatctacggtggcagagagcacagcagaggtttcctggggccatgagaggagggttgactgcaaaaaggcatgggagaactttctgaggtgttggaaatattctatataacgattgtggtggtggttgcacgggtgcacagatttgtcaaaactcattgaactttacacttaagatgggtgcatttttattgtacataaatgatatctcaataaaagtgattttaaaaacagg

SEQ ID NO: 260148 - DNA, 4748 bp, Homo sapiens
atggccctggggacgacgctcagggcttctctcctgctcctggggctgctgactgaaggcctggcgcagttggcgattcctgcctccgttccccggggcttctgggccctgcctgaaaacctgacggtggtggagggggcctcagtggagctgcgttgtggggtcagcacccctggcagtgcggtgcaatgggccaaagatgggctgctcctgggccccgaccccaggatcccaggcttcccgaggtaccgcctggaaggggaccctgctagaggtgaattccacctgcacatcgaggcctgtgacctcagcgatgacgcggagtatgagtgccaggtcggccgctctgagatggggcccgagctcgtgtctcccagagtgatcctctccatcctggttcctcccaagctgctcctgctgaccccagaggcaggcaccatggtcacctgggtagctgggcaggagtacgtggtcaactgtgtgtctggggacgcgaagccagcacctgacatcaccattctcctgagtggacagacaatatctgacatctctgcaaacgtgaacgagggctcccagcagaaactcttcactgtggaggccacagccagggtgacaccccggagctcagataataggcagttgctggtctgtgaggcgtctagcccagcactggaggcccccatcaaggcctcattcaccgtgaatgttctgttccctccaggaccccctgtcatcgagtggccaggcctggatgaggggcacgtgcgggcaggacagagcttggagctgccgtgcgtggcccgagggggtaatcccttagccacactgcagtggctgaagaatggccagccggtgtccacagcgtggggcacagagcacacccaggcggtggcccgcagtgtgctggtgatgaccgtgaggccagaagaccatggagcgcagctcagctgcgaggcccacaacagcgtgtctgcagggacccaggagcacggcatcacactgcaggtcacctttccccctagtgccattattatcttgggatctgcatcccagactgagaacaagaacgtgacactctcctgtgtcagcaagtccagtcgcccgcgggttctgctacgatggtggctgggctggcggcagctgctgcccatggaggagacagtcatggatggactgcatggcggtcacatctccatgtccaacctgacattcctggcgcggcgggaggacaacggtctgaccctcacatgtgaggccttcagtgaagccttcaccaaggagaccttcaagaagtcgctcatcctgaacgtaaaatatcccgcccagaaactgtggattgagggtcccccagagggccagaagctccgggctgggacccgggtgaggctggtgtgtttggctatcgggggcaacccagagccctccctcatgtggtacaaggactcgcgcaccgtgaccgagtcgcggctgccgcaggagtcgcggcgcgtgcatctcggcagcgtggagaaatctgggagcaccttctcccgagagctggtgctggtcacagggccgtcggacaaccaggccaagttcacgtgcaaggctggacagctcagcgcgtccacgcagctggcggtgcagtttcccccaactaacgtgacgatcctggccaacgcatccgcactgcgcccgggagacgccttaaacttgacatgcgtcagcgtcagcagcaatccgccggtcaacttgtcctgggacaaggaaggggagaggctggagggcgtggccgccccaccccggagagccccattcaaaggctccgccgccgccaggagcgtccttctgcaagtgtcatcccgcgatcatggccagcgcgtgacctgccgcgcccacagcgccgagctccgcgaaaccgtgagctccttctatcgcctcaacgtactgtaccgtccagagttcctgggggagcaggtgctggtggtgaccgcggtggagcagggcgaggcgttgctgcccgtgtccgtgtccgctaaccccgcccccgaggccttcaactggaccttccgcggctatcgcctcagtccagcgggcggcccccggcatcgcatcctgtccagcggggctctgcatctgtggaatgtgacccgcgcggacgacggcctctatcagctgcactgccagaactctgagggcaccgcggaagcgcggctgcggctggacgtgcactatgctcccaccatccgtgccctccaggaccccactgaggtgaacgtcgggggttctgtggacatagtctgcactgtcgatgccaatcccatcctcccgggcatgttcaactgggagagactgggagaagatgaggaggaccagagcctggatgacatggagaagatatccaggggaccaacggggcgcctgcggattcaccatgccaaactggcccaggctggcgcttaccagtgcattgtggacaatggggtggcgcctccagcacgacggctgctccgtcttgttgtcagatttgccccccaggtggagcaccccactcccctaactaaggtggctgcagctggagacagcaccagttctgccaccctccactgccgtgcccgaggtgtccccaacatcgttttcacttggacaaaaaacggggtccctctggatctccaagatcccaggtacacggagcacacataccaccagggtggtgtccacagcagcctcctgaccattgccaacgtgtctgccgcccaggattacgccctcttcacatgtacagccaccaacgcccttggctcggaccaaaccaacattcaacttgtcagcatcagccgccctgaccctccatcaggattaaaggttgtgagtctgaccccacactccgtggggctggagtggaagcctggctttgatgggggcctgccacagaggttctgcatcaggtatgaggccctggggactccagggttccactatgtggatgtcgtaccaccccaggccaccaccttcacgctgactggtctacagccttctacaagatacagggtctggctgctggccagtaatgccttgggggacagtggactggctgacaaagggacccagcttcccatcactaccccaggtctccaccagccttctggagaacctgaagaccagctgcccacagagccaccttcaggcatctcagagaagacagaggcagggtcggaagaggaccgagtcaggaacgaatatgaggagagccagtggacaggagagcgggacactcagagctccacggtcagcacaacagaggcagagccgtattaccgctccctgagggacttcagcccccagctgcccccgacgcaggaggaggtgtcttattcccgaggtttcacaggtgaagatgaggatatggccttccctgggcacttgtatgatgaggtagaaagaacgtaccccccgtctggagcctggggacccctctacgatgaagtgcagatgggaccctgggacctccactggcctgaagacacatatcaggatccaagaggaatctatgaccaggtggccggagacttggacactctggaacccgattctctgcccttcgagctgaggggacatctggtgtaagagccctctcaaccccattgtcctgcacctgcaggaatttacactccactggtctctctcattacagcctgggccgagctggttaggtgagctccataaaacccaaagggacttggtgtcaggagaggacatggagggggctgagtgacagagatggttcagctggtaccagagtagaaacaaggtgcatcctggggttggctttagaaactaaacttctccaaaaggacagggcagattgtaaacgtcgtctcaaaaatgaaatgctgccgggtgcggtgactcacgcctataatcccagcactttgggaggctgaggcgggtggatcacctgaggtcaggagttcgagaccagcctggccaacatggtaaaactccatttctactaaaaatataaaaaattagccaggagtagtggcgcatgcctgtagtcccagctacttgggaggctgatgcatgagaattgcttgaacccaggaggcggaggttgcagtgagctgagatcacgccactgcactccagcctgggcgacagagcgagattctgtctcaaaaaataaaaataaaataaaaataaaaaataaaatgctattctgagggtccctaagtgcttcatgaagtaaagttttcagaagtggggaaagacatatgaaaaactctgttcattttgcattccatgacgtctgaaatagctaataataagtggaatttatgaatccatgttgcatcctacctattattttattatttccgacagttatctaacacaggaggcataaactatgacacatgtaaacataagtatgctccataagcattaaaataaacagacaatcaaaagaagctagaggaaaagaatatgtactgtgtgtgtgctttcgtttatagaaattctaaaataggcaaaactaatctacggtggcagagagcacagcagaggtttcctggggccatgagaggagggttgactgcaaaaaggcatgggagaactttctgaggtgttggaaatattctatataacgattgtggtggtggttgcacgggtgcacagatttgtcaaaactcattgaactttacacttaagatgggtgcatttttattgtacataaatgatatctcaataaaagtgattttaaaaacagg

SEQ ID NO: 260149 - DNA, 353 bp, Homo sapiens
ggctgtgtgacgccgtgcatgtgattcccaccatgtgctggtaacacggatgagagatgctaccatttatgctggcgtggttcttggtttaggtgtgctggcccatgtcatcgtcctaagcaccccggctgcaggcaccagtctctgccttacagtcgtgttgatggaggtgtcagtagattatgtggcctgcccaggttcacatgggacctgcatagtagagcaaaagtcagtgccctgaggtgtggactcagtgtctccatcctctttggagtcacacaggtgaggactgcagtcccgactcaggtctggggtggcctgggcgaaggagcacacaccctgcagatgttggt

SEQ ID NO: 260150 - DNA, 163 bp, Homo sapiens
atggtaagtaaaaaacacctgttccttgtgacagttatgaatgcatgtcatatgtacaacattatgaattatctaatgtcactgaactgtacacttaaaatgattaagatggtcaactttatgtgtattttatcacaataaaaaaattgaagcaataaaaccc

SEQ ID NO: 260151 - DNA, 394 bp, Homo sapiens
gttgggcagaagaatgtcagttaattgtgagaagttggtgaagagggaaaagccaagggaattaatttttccatctaattatgacctccttcgccacttacagtatgcaacacattttcctatacctctggtattgatgtctgttcctccttctgtttgagagtcacctctgaggatcataaaaaattgagataagtgatgtaaacttccacatgtgttatatgttttgtttatgttaaaatagcgaatatgccttgtgtagaattagactgcatgttataagtctgacctgttttatcatttacatttgaacttattgaaatgagaagtcatcttcagaagagactttgcacaataacatgtaataaaggtgttggcattaattcttaaatgg

SEQ ID NO: 260152 - DNA, 434 bp, Homo sapiens
tgttagtttctttcactcatagttgtagtctttaggctggctaattctatatttaacttcaaatcttcctcaggattctcagaaccatatattcttgctattaaaatacattcctgctttttcttaaaccataaactcctaagagtattttctctatgacatttatcataatgatttattcatagctggtgttctataaatgtttgtttaaaatttagcatgcgtttgttaagtgcctgttatgtgcagtgcgtggagttaaacacagaaaacaaagtaaaggaagtggaaagacatattctagctatatggtaggaaaattttgctcacttttgaagagatgaagatatatttaataagatagattagaatttataaaaataaaaagacattggcgccctgaaatatataaaatgaatatggaaaggaaagga

SEQ ID NO: 260153 - DNA, 401 bp, Homo sapiens
gagcgagactccatcttaaaaaaaaaaaaaaaaaaaaaaagaatatagagaagccagggcaatcagattcattgaaggataagggatagaatataagtaggagaatcaaaagagaattgccagcagggcgtggtgactcaaacctgtaatcccagcactttgggagcccaaggtaagtcaattgcttgagctcaggaggttgagaccagcctgggcaacatggcgaaacactgtctctacaaaaaatttaaaaattagctgggcatggtggtgtacacctgtagtcccagttatttgggtggctgaagtgggaggattgcttgaacccaggaggcagaggcagcagtgagccatgattgcaccactgtactgcagcctgggaaaagaaggagactctgtct

SEQ ID NO: 260154 - DNA, 418 bp, Homo sapiens
gctactactactaaattcgcggcgggctgacgaagcaatagagattacacaagatcggagtaaaatgttcataattgttaaagctgggggataatcacatgggaatttattatactattgtgtctattcttatgtatgcctgaacgttttcataataaaaagtttcaggctgggcgcagtggctcacgcctgtaattccagccctttgagagtccaaggcaggaggattgcttgagcccaggaatttaaaaccagcctgggcagcatagtgagaccctgcctctacaaaaaaatttaaaaattagctgggtgggctgggtgtggcggctcatgcctgtagtcccagcacattggaagaccgaagctggtggatcacttgagctcacaagttcaagaccagcctaggcaacatgacgaa

SEQ ID NO: 260155 - DNA, 430 bp, Homo sapiens
ccccagcaggcacgagggctgcagcagtctggttccccatcccctcctcaggggcctgagaacaaattggtttttttttcaaacatggacagtttgtcttgtaggccacccacgtgcaggtcctctccatgctgtggacgcagccagttgtgaagcacaatccctccgtgacttcgcttcccagcggtacctgcaatttaaagttatgtcccctgcctactctcaggggcacctcaaggggacaaggccctctagcatccccttctcggaggctgttacccaaggatggaaactcatgcttctcccatctctgtaatccatgcctgcaggcacagacttcaagttactgctgttatggttgagatttcaccaacatttggcattttcattttccaaaaataaaatgcattgactgcttttccaaactaca

SEQ ID NO: 260156 - DNA, 841 bp, Homo sapiens
tccccagaagatgtgccgtttgtcatagaagcactcacagcatttaagtgctaatcttcaaccgctgccttccctgacgcaccccggaaggcgtgttcttggcttgacacttctcagcccttccgcttcctacagtggctgtgacaccccgctaatcctcactggaaacatgtgctgcccccaccactcttctcactccagctctctttgtgaacacaccctctgtttcagaatcccacctccttgtcaccaaaatgtaccaaggaccattcctcttcgcgtcccttcctcccttctcaagaaaacccttctcctattaacaacaacaattaacagagtgccttaaaaggaaggcactgacctaagcgctttacatgcttttgttgttgttgttgttgttgttgttgttgttgttgttgttttgagatggagtttcactcttgttgcccaggctggagtgcaatggtgcaagtctcggtctcaccgcaacctccacctcctgggttcaagcgattctcccgcctcagcctcccaagtagctgggattacaggcatgcgccaccacgcctggctaattttgtgtttttagtagagatggggtttctccatgttggtcaggctggtctggaactctcgacctcaggtgatccgcccaccttagcctcccaaagtggtgggattacaggtgtgagccaccgtgatcggcctacatacattttatctaatcttcctatgacagtccttaggtaggcagaaatgaaaaaactgaggcacagaaacgcagcttggatgtggtaatgttgaaattcgaatctattgggtagctgactctaaatctggt

SEQ ID NO: 260157 - DNA, 508 bp, Homo sapiens
ctcatccacaactcgctcaggactttctagccccttgtgtggtaacaggttcctgaggactacggcataatcagatctgcaagctgcctttgtttccatcctgagtgaagggctcagataagtggctttgtgtagccctgggatgttttcatacagatgacagagttctcgacagatctggcctcttgtccatgttgttgagattggccgattcacttagatggtgtagagtggcttttggattgaaggttggctcctagggtagaaatagcaaatgcatacatgtttgcagacatccctgccagtgccccaagcttcagagactggctgcaaggttccctgggttgaaatgaaagacttttttttttttttaggtgcccaatagagaactgaaaattggagggaaacagaaaggtaggcatgaaggagaattgtttttccccatcagaaacaaagtgctttgggaaaaagtaaataggtgtcaatagttaacagcttaaatttaaaa

SEQ ID NO: 260158 - DNA, 385 bp, Homo sapiens
tccttgggggtttatatcaacattggtcttgacatttcgcctgttattatgtgtggctctttagagggtgaaataatattttcttttgcttgagaaaaggacaaagttcagacagagctcttggccccaaatggattttcctccttctctgctttccatgtgccatagctacttggagttccggagagccatttctgtggagcggacatcctctcagggccatgggtgcgatccggggctgcagacagccaccgtgtgctgtagacacaacctgcactccacaggttcactccgtcctctaaacaccatctgcttcccaaggatgaggtgaaatttcacttgtccaggatatacagccatggtaagggggtctaggattcatgct

SEQ ID NO: 260159 - DNA, 514 bp, Homo sapiens
ctggtgcccctggagcagaagtcctgatgtggtgatatcatttctatgccttcgaatagaaatgaaattcagagacacattttgaattactgtgaatctgataataaactttcatagcattgtctaacttaagtgactcaacaactgccttgtgaagtgggaaaggcaggcataagcctctccattttgaggaggaggaagctgagaactgaaaaagtttaaatgactttttgaatgccatagattgcataaatgtcaatattgggactcaaattcacatcttcagatttcaaatctggtgtgtcttttgttctaaccacgttgaacctgaagaagaaaagaccaaagcaaatacataatcaaatgggttatattctgagattacagtaagaaggggcaggagattaaagtgagattgacaaaattaaaaatattcagagggtattttttgctgtctaatgtgctttttttttgctgagtaatgatacatttaaaaccttaatgctcatttatt

SEQ ID NO: 260160 - DNA, 400 bp, Homo sapiens
aaggaaaagtaaaaagaaaactgaaactggggagcaagtgtgcagcgcagagacgagcgtgcctcccacagggtccctcgcactgagatagcaagtggacatcaaggcgaggcaggaggggccgggtggttttggtgctggaatgagagaggagagccctgggcctgggtgtgtctggctcagaagctgtttccgattttctcagcattcctctttcttcctgggccctgcccttcctcagatggggaatgcagcctcacctgccattgccctttgcctgcttccatggtgagcacagtcaacaaagcccaagcaactcagtggggatgccaatcacagggaggcgagtccaactccctacagagccaggccacccccatcccggccttcagggcttgga

SEQ ID NO: 260161 - DNA, 360 bp, Homo sapiens
ttctttctttcctctgttactattgcacatttcctttgctagagagccaagtcagaaactcttctgataaagttaggtatgccataactatgacattctctacaaaaaacatttttgtgcaagatctaaatattaaaagttttttgcagtggaaggccagaggctgtataagcacactaaagtttggctttttatccacttggatgttctctaaagacatagtttggaatgttgtaagattagctccattggtggaacatatgtaacaagttcctttatctttgtatacagctttttaaataccatatctgtctattataccaactggttaattttggttaatttatttaaacatggaaa

SEQ ID NO: 260162 - DNA, 418 bp, Homo sapiens
ctcctttgcaaattgttttgtgatttttttggcagaattaatgccaactgaaatttttatgagttcactatcaattctgtgaattattttagtttcttagtatttttttctggtatcaaatttttaggcattttagtgcatcattgttttaaaaataccaataaatgatagttatcatgtgctgttttgagcactatctgccaagctctgtactaagtggtttatattcattattttacttaatccataaagcaagccaagtggtaggtattattgttcccattttacagaatagaaagctgagtctcagtaggattaagtaactttccctaggttaagcattaagtaaacctaagagccaggatttgtgataaggtctttttgattcccactgtaccactggacctctgtagagaca

SEQ ID NO: 260163 - DNA, 466 bp, Homo sapiens
caataaatgtgaaaacctagatgaaacctggggcaaagcctgccgtgtattcccaaatgatttcccttccttctgggcacacagccctgttacacttcccattctcccatggattcatctgcagccaggtgcctaagttctggctaatgaaatgtgggtggcagttaagttcaccacctccaggcccagcctgtaaaagctaaccccgcagcgcccccatgctgtccgcagggaagaatgctggatacagaagcgccagtggaggactctgagctcttaatgctcccacaagatgggagagttctggctctcagagcccttccccagcccacgacggacaatgtcaagagcgggaaataaacttcattgtgttaagccactgatatttttgggtttgattggtatatcaattacctccctaatgtaaaatggatatgtttcttaaaaaaacaccagtattgttgca

SEQ ID NO: 260164 - DNA, 451 bp, Homo sapiens
tcctcagttataaaatgtagataatgattctctgtaggtaccaccaggctgtcaagagggtcaaatgaaatgatcagtatataagttctttcaaaagtaccaaaaacgtatcttgaaaggactatttgtaatctcattctcagtgctcacttccacacattccttcttttgaaagattaagaaaattaatccaacacaaccccctagtttccctttgttcaccccactccagccagcctgtccttctttttagttcctcatatgtgctatctccatcatgatattttcagttcaaggaataaaaattcccatgtcaaacagcttcaatgacaggacattttattttcccataataaggcatccatagatagagtgggtcccaggtaaagaatgtcaggcccatccctccacatcttttgggtctgacctcccctaagggtcactctcatcc

SEQ ID NO: 260165 - DNA, 341 bp, Homo sapiens
cggcacgaggctttcttttttaagacagggtctggctctgtcacccaggctggggtgacaagagtgagactccatctcaaagaaaaaaaaacaaccctgcaggaatgccacagccaccaccgggctccttgacttggcagaggctacggcctcacccaactccaaaagcaccgcaatggataatgctggcttaaagagtaatgggtaatttttctttctattttgaatactttgtgtttttctagggtttctagaagtgttcatgttatttgttagaaaataattttcaaaaagcctttatcctttcagaaaaagcagataaataaaaacgtttttgaggg

SEQ ID NO: 260166 - DNA, 847 bp, Homo sapiens
gtctgctcacctgaggagctccctgggtctgccagcttcctgcctggccaagcccttcccctgcacttgtaagacgacgactgagcgtggctgatcctgcccggtttctgggtggatagtggaacctgggggaaccagggtagaatcccttatgggaggcagccattggcctggccaggctttgggcgctgttggagacagggctgaatttttagccctgagtgtaggcacaggcgagagctggagcccaggcacttgttccctgtgtggctggctgctcatctctgatttagctttggctcaatttttgtcctaccccctgattgctactggagccagcatggtggtcacagccactggtgtcttagggccctggaagagaagacagcaatcccaggttgccctctcctctgctcagggctgatcctggcagacatggaggaggagataggcaggaggagatagggagaagacttgggagggagctgggtcttcatgccaaatgcaggaagaaacaagccatcgttcagttcatgtttgagctgcgtcagcccatgtgaaggcccccacacctctgggaagaactgcagggagcatctctctggtccccgtctccaaggtcggggaagcattttacagttttggaggtgatgcggggaagggccacagccaaaacttcatgtggcagtctagcatgccacacctcactggaatcccgcacgctagaagggagccgccttgtgagaggtgttccagtgaagtggaaccccaccagtaggtggtgggatgggctccagaacagtgtctggaacaggaactagtagagctcaacgtcttagattcctta

SEQ ID NO: 260167 - DNA, 631 bp, Homo sapiens
  misc_feature (383)..(383): n is a, c, g, or t
  misc_feature (396)..(396): n is a, c, g, or t
  misc_feature (414)..(414): n is a, c, g, or t
  misc_feature (513)..(513): n is a, c, g, or t
  misc_feature (538)..(538): n is a, c, g, or t
  misc_feature (555)..(555): n is a, c, g, or t
  misc_feature (558)..(558): n is a, c, g, or t
  misc_feature (561)..(561): n is a, c, g, or t
  misc_feature (568)..(568): n is a, c, g, or t
  misc_feature (572)..(572): n is a, c, g, or t
  misc_feature (582)..(582): n is a, c, g, or t
  misc_feature (585)..(585): n is a, c, g, or t
  misc_feature (600)..(600): n is a, c, g, or t
  misc_feature (606)..(606): n is a, c, g, or t
  misc_feature (614)..(614): n is a, c, g, or t
  misc_feature (619)..(619): n is a, c, g, or t
gggagagaactagttgacattttaaaatataggtctgaaacctacaggaaaatattggagtaaaaggagcacaggaaaagtgtgcagagcattgttacccaaagtgctgtaggaattttatacacatatgaatacaactcgcaaaacacacaaatatttttgcttccctggatcatttactggagtcttttacatacacattctgaagtataaggtatgcagaattttctaagcgtatcatagaattccattccaagaatacatttcaggaaaactattgtcaatcagggaaacattggtgcagaatagtaagaaaagaaatacccattaagactagtacttacggaggaggaggagccaagatggccgaataggaacagctncggtctacagctnccagcgtgagcgacgcanaagacgggtgatttctgcatttccatctgaggtaccgggttcatctcactagggagtgccagacagtgggcgcaggccagtgtgtgtgcgcaccgtgcncgagctgaagcaggcgaggcattgnctaacctgggaagccanggngtnagggagntccntttcgagtcnaangtgtgacggacgcanctggtnggtcactncccgnattgcgcttttt

SEQ ID NO: 260168 - DNA, 448 bp, Homo sapiens
gggagagaactagttgacattttaaaatataggtctgaaacctacaggaaaatattggagtaaaaggagcacaggaaaagtgtgcagagcattgttacccaaagtgctgtaggaattttatacacatatgaatacaactcgcaaaacacacaaatatttttgcttccctggatcatttactggagtcttttacatacacattctgaagtataaggtatgcagaattttctaagcgtatcatagaattccattccaagaatacatttcaggaaaactattgtcaatcagggaaacattggtgcagaatagtaagaaaagaaatacccattaagactagtacttacacagtggacgtgaaaaaactaggcagcaaggagttattaaaaagaaagcatgggctgggcattgtggctcatgccagacacaccgtaattccgcctgggtattt

SEQ ID NO: 260169 - DNA, 367 bp, Homo sapiens
gaatagtaagaaaagaaatacccattaagactagtacttacacagtggacgtgaaaaaactaggcagcaaggagttattaaaaagaaagcatgggctgggcattgtggctcatgcctataatcccagcactttgggaggccgaggcgggcggatcacctgaggtgagaccagcctgaccaacatgaagaaaccccacctctactaaaaatacaaaattagctgggcatggtggcacatgcttgtaatcgcagctactcgggaggctgaggcaggagagtctcttgaacctgggaggcggaggttgcagtgagctgagatcacactgttgcactccagcctgggtgaaaagagggaaacttcgtctca

SEQ ID NO: 260170 - DNA, 453 bp, Homo sapiens
ttaaaaaaaaaatctatcccaatccacttcacattcataaatctataatgaaaatattccttagtatttttttcacgtcaattctgcagttccagttagacctccctaggtctcatgttattgaatgtgatttggcatgggttttatagcctctcaacttactctggttaacactcaaataatcactaagcttagtcaaatgaaatccctgatgtatatgtaagactttgaaattagttatttaaacctttcataatctaatccatgccagtggattaacctggactagctgttaagggttgtcttgcaccaattatgcctgtttgtattttattggcctatgttgataagagaatatgtcatgtaattttaaaagaactaagaataatattttaggatttgacatactgcatttaaagtgggacccattgaataaacatgattaactcacac

SEQ ID NO: 260171 - DNA, 321 bp, Homo sapiens
tgaaacaatgtttttcataatgacggtagattgaagtagattttattctcctccatccttgctttatctactctgttctgtgtgggggtaacatacaggtccttttgctttcttcggggatgacacagccacctggccaaaactgatcaaacccctgcttctgtgggaggaagacccccaagaaccatcagagaccaaaggcaggtggatgagaatgttgggtggggacttgggaggccccaaatggtgatgtgttgatgagggcaacctgcctgccagtcatcctttagggactcagaggaccacaggagaagggagggt

SEQ ID NO: 260172 - DNA, 352 bp, Homo sapiens
gccagtatcaagacttttgtattctgtaaaatatattctctcctttgatgctaggttaatgaaaacaccaggattcttaagtaggggaaaaacatacacacatttatatgatgttgatgtgtcattaccaaataaaagcacacatattttcatttaattttaatatgtcattgcttaatgaaatacatgtttatatctttaaagaggtatttatcagccactcagagtttactaaacttaaagatgttcagactctggattagctaatttctctttgttactaagaggttgattatccttagtcagcatcctgaatcctatccctctccaattctgcaactcaataaaagaa

SEQ ID NO: 260173 - DNA, 392 bp, Homo sapiens
gtttcccatgtaatgtcaccaaattttttccattctgagaatccttcccgaggcactagcgcagttttaaaggcagaaaggggaccaatatttttatgacagttttttttccttggtctgaggttggagcataagaacgaaatagctctttttgttcattgtaccaagaaattccctcctggatctatcaagtgtgactgttcacatagcaaatagcttggacatatccagacataaacaccatatgaataaaacatgttgcaattgttggatatagttatgtgttttacaaagacaaggtgttctgttctacactatctgcagaagttcacagtaatcattctaaactgtgacactttatcttattaactgaataaaaatacttttaatta

SEQ ID NO: 260174 - DNA, 401 bp, Homo sapiens
ttattccagaccccacaggcaatgctaaattgttggaagaaatcgggagcacaacacagcatcccaaggctccttgctgcaaagtgttcaaaggcggctggcagtggcaatgggcttcacgaactacaatataaacacaattatcaaatcacagactgatcaaatgccagaaaccacacctcagataattccacctgcatacaaaatagagctattttatttcaaaatagagcataataaaacttaaaataattcaacatgaaacttaattttcttcatttctacataagaagcgagacaataccaaatcttcctgaagccagccagagaactgtgtgggtgtccagatgcagatatctggacacctaaacctgaaaggaaatgttgtcccctactctaat

SEQ ID NO: 260175 - DNA, 680 bp, Homo sapiens
cccttgaggctaaacgaaaggagacatatcagccattttgtcctcaggatctcttccagcccctgccttgttgatgagggtgttgcttgacttgaggccaggtgtgttaggaatgacacgtaggtgcttgcaggggattcggaggtaattgggaggtgaaaaaagaagtcaaaccagaatgcagccagataccagggagaacaccaactgactggcatgccaaagccttctgagcaggtcaccctggtttttgcagaattaagaatgatatcgctgtacacattaaagtattttaattggttgccaaggcgatacggcagaatcacagggcacagagcaggaatagaactctgcaggtctgtgttcaggaaaggtgttcgtctgtgatattaacgagctgcctggatatgagaaaggcaaagtggcagtaaatcttatctgggacttttgcttaataaacaggaatggcagagaaatggaggggcagaagagaaaacttcccttcccagctctctggagaagcaggagaggtaatcttctggattccaaatttctcctcagagtggtgaattcccacagctgagagaaagccgagtagattggtttgatgcataagggaaggaggaacagagggagagaacaatggaagaagacagcagtgttcttttcctattgagagg

SEQ ID NO: 260176 - DNA, 627 bp, Homo sapiens
cccttgaggctaaacgaaaggagacatatcagccattttgtcctcaggatctcttccagcccctgccttgttgatgagggtgttgcttgacttgaggccaggtgtgttaggaatgacacgtaggtgcttgcaggggattcggaggtaattgggaggtgaaaaaagaagtcaaaccagaatgcagccagataccagggagaacaccaactgactggcatgccaaagccttctgagcaggtcaccctggtttttgcagaattaagaatgatatcgctgtacacattaaagtattttaattggttgccaaggcgatacggcagaatcacagggcacagagcaggaatagaactctgcaggtctgtgttcaggaaaggtgttcgtctgtgatattaacgagctgcctggatatgagaaaggcaaagtggcagtaaatcttatctgggacttttgcttaataaacaggaatggcagagaaatggaggggcagaagagaaaacttcccttccagagtggtgaattcccacagctgagagaaagccgagtagattggtttgatgcataagggaaggaggaacagagggagagaacaatggaagaagacagcagtgttcttttcctattgagagg

SEQ ID NO: 260177 - DNA, 704 bp, Homo sapiens
gaagtttcccaaaggttacttttgcattagagaatttcgaaatacagattttaacttgtttctagtcctctttttttttatttaagacacaaaactacacagctttgatttttaggggaaaaggatgataactttggactatatctcacaaggtgacttttttttttctgttgtagttgatttctgagaattccagagtatcaggatgatgtagcaatttaaaaatagtaacacaaaattttatctctagtttttttcaaaaatctttttaaaactaaaatttgataagctagtactgagtagaatttggtgctcatcattcacacgtataaagtagatttcactcagaatttcacttacaccaacataacaattttacttttcctttttaaagcatagctataccttcagggatatgatggtatagtagggttattctctcaaagaagaaaaggcagtcagaaaatctttgttcatgagattagactgaaatcttcagtgattcagtgattactgaatgcctctatgtgccaggcactatggcaaaaatcagtgccaaagtaatttatctttatcatgtacaatgaggggttttagtgggttgtaacttaatatgatctaattgtgtgatgaggctactgagaaatctaatgcaatcttatgcttcattaatagaattagtattgtgtacagatctagggaag

SEQ ID NO: 260178 - DNA, 711 bp, Homo sapiens
gtttccccaaagtggaacctaagcagggtggcctgctgagttttatttaaaggggcaccttacagacacctcaagtgggaacccaaatatgggggcatgggtcagagtgtgaatgagtgtctgtgagtgtgagttgaactgagtgtgagaataccaacaggaggagaggagtggctaaaggtttaggggatagagtcaaatgtcagcgtaaatggtaggatcctggtcagagagcagctgaggaggcttcagggcaggggacccagatgggcagaaaggcgggtctggacctgcagctatgggacagtgtgcacaagtcaccaagtttaaatggaagggcgtcgggagattaagtgtaactttctacaaagcttcagaaaacaccatctatccaggaaaacacgtaggacacacagacacagttgctacacgcccagaatagctcctgccaacacatccctgtgttgtcacagggaaggtaacatcctcccaccccatccaccttgcagcttggcgggtgtgggaaagcacctcgctgggagagtgcaggatgctcccaggacccgccctggggtcacccgggtgcccagcttggcagaacaaggtccatgaggtgtggtggccatcacagacataagcacagggttgatggcgagggggcctgaacccaagactggctcacaccctcccccagcatctcctgcacagggc

SEQ ID NO: 260179 - DNA, 557 bp, Homo sapiens
cagagaatgcttaataaatgttaattgctgtctgactcctctgaatgtggtgtgtgaactgatacctttggatcctcatgcctcattctgtccctgagacttattctagatgtcacttcccctacttcacattatacacgaatgttctgaggacatttgagatggaatctagctcacattttcagcactagtttccaaggaacacaaagaagtccagtgacatgatccaggctctcagccttacagatcatcatgtagattaagtggccgaggctctttcctatgcagaaaccttcctacaaccaaggtaccccttgttattattgtcttcctgcaactttcataattgataagggaattagacaggtaagctaagctaggtattctcatttataatttttcaaagccacaagaataaccaggagacagggatgatgtctatggacattgctaccagaggactgatttgtaggttcttatggtgccacatcatgtaatccccttaatcttgattcctttattccttttgtttaccattttcctcagttcgcccaacc

SEQ ID NO: 260180 - DNA, 426 bp, Homo sapiens
caatgaaaactcccatatacctattcctggacaacagttaccaagattttgccatacttactatctcttttttaaaaaatccttttgaaatatgttaaaccaaattctgattatgaagcactgagacgttttaacacattttagtattaataatagttaaacatatatttaaaagaaaaattttaattggacatttgtagaatatctgaagtatgtttgtgaagtataatttgtaaaccagtacccaataataatcatagaagattcatgagaaaggtgtgtgaatgctttaaaaaagctattccaaatcccagctacttgggcagctgagatgggagaattgcttgagccccagagtttgaggctgcagtgagctgtgatcacaccactgcactccagcctgggcaacagagtgagagaccccta

SEQ ID NO: 260181 - DNA, 356 bp, Homo sapiens
taaaagagtctataataaaaaaagataattatgggtttgaagcatctcaaattacagaattccatagaattttggagcaaaaaacactctttcaaatctgctagtattctgaactttgaaagaattacagtattctaatgctttttagaagtgctgtaacctgagttcccaagtacaatgacatattttggttctgatgcatgaggaaatttttatcaattctgaataaatgaaaaaaaagtcaaatttttataaactcagttatattaaatttaaagaatttaatgttatctaagattttaattgtttcatgtttttaaagttcaaataatattttctcattttatttggagaaa

SEQ ID NO: 260182 - DNA, 233 bp, Homo sapiens
tttttagtagtgggtctatgttgcccaggctggtctcaaactcctgggctcaagcaatccttccacctcagcctcccaatgtgctaggattacaggcatgagccaccgtgcctagccccaagtttagagtatttttaaaaattactaatttaagtttctttgctaagaaaagagaacctaacatttgatgtaattttttcattattcctgctgagtagatagatattggacat

SEQ ID NO: 260183 - DNA, 428 bp, Homo sapiens
gccaactgggtatcatacctgtctctcaacccctcttctgcccaccaccctctctcagcctccctattccctgaagctagcatgccagggaggcaggtggcatacgtggtacaaggactgcatgcgcacattttggaatgaaacagtggcctttctttggaactcagaccatccagtgtgctctggctaaagacaggattgtagatctaagaagtccattgtactgattagtttcatctcagtttaagccactgacctaccaagagtatccattcaggaaatgtcaccccatggcctgatgtagtggtaggagactggaaatagctgagtgatgacggcatgtacactcagcattgcttagccttgggcaggtaccgaacctttctttgcctcggtttctcatttataacatgggaataatgatagta

SEQ ID NO: 260184 - DNA, 385 bp, Homo sapiens
gatgcagtattcatgaacatggatcatattcagagtcataaaacaaaccttaacaaatttaagaatcttgtatttgtatattttttgactagaatggaattaaactagaaaacaataacagaaagataacagaaaagtctctaaaccttagaaattaaataacacacttataaataaatccatgagtcaaagaggaagtctcaaggcaaatcagaaaatgttttgaactgaatgaatgaaaatacaaaatgtgtgagatgcagctaatgcaatactgagaaggaaatttatagcattaaatacctatgtaataaaagaagaaaggtctcaaatcagtacctaagcttacatcttaagcaacaagcaaataagagcaaaataaacc

SEQ ID NO: 260185 - DNA, 492 bp, Homo sapiens
tacaggaaattctgcctcctgaatcacttttttttttctctccggtcccatgaaattattaaaatttctaccagtttctttgtatctgagtgatgtcaactcttactccattctgagaatcaaaaatgccctgagggtggaaaaggagggttgcagaatatcctctcatctctctgctcagaatctactttatccagattttatcccctcaagacttagttgttccaagtctttctcagtgagagcactggtctaccacacactcctctgtcattgctggaacctgaaacaattttcctgggaatttgtactaagaaaatctaactgtaagtaagcaagcaagaagagaatgaaatcagttagcagtaggtactaagactgtaaaatccatagaaaggagaggttggagacaaagctaatattattatgctaggccaaagttacaagaaaaagaagacagtaaaataataaaatgatataatgctgcttata

SEQ ID NO: 260186 - DNA, 441 bp, Homo sapiens
aatcccagcgtgctgcgccgatggaacgagttgatgtgcacactaggtatagggatgacttcatccccaaacgaacgcagccgactctcggggaaacgcagtcgccgggagacgcgcgcggaacagtgtgttgccgcaagagtggaagaagagaaacgcagccagtggagccgctttccagcgtcattagcaaagagggaatcccgggcagggggcggggagagagaggaactaatgataattttaaatttttcgtcattcccaatggtcttgaagtcacctcccttaaaaagtagatataaaatactggcgaggcaatttcatttcaagtcaagtcggggaggagggcatccaggaagccagaattgatcgttgttgaaggttttgttttcggttttttttaaatctaaaaacaaatccaataataaaatttttaactgt

SEQ ID NO: 260187 - DNA, 539 bp, Homo sapiens
atgcaagttcttatgagccatgtttggtgtatgtgggcaccactccgcaattctatgtccgcaagagatgtctattccaaacactgtactttttttctactccaggatgccaattaaaattaagtaggtgtacatgtgaggcacaatccattggctggtcttgatttaaaccctggtcaaggtggtaagttagaaaatgttactctaggctagccactgtccaatggaaccatatttgtgctagtatagtagctattaagccatatgtggctactgaacacttgaaatgtggctaaggaatggaatttttaatttatttaattttaatgtaaatacctacttgtagttaccacctaccatattggacagcacagcactaggcctttgagacacattttctgagacacatgtttggatttgggattgtttactgtgggtgttctgaacacgccatacccagagttacagagttacagagccattatcatcacactattaagcctctagtctatccatgtagaggataggagaaaaaaaac

SEQ ID NO: 260188 - DNA, 436 bp, Homo sapiens
tcaagcatctagctcctggccactcggccctcctgttcatcctatgtgaggagcaggaaagagtgcagcaggaccatttcttgaggatggagcctgcacctggctagttgggttgtatacaataggctattatttctctcatatttgtggctgaggtgagattgcatgttcttagtttatatttccaagtacccactgtatgcctagcactgttaaggtagttgggtacaggagtgaacatgacaaacaaggccccttccctcgtggagcttacattctagtaggaaagacagagaatgaaaacttaagttgcactgaagaaaattaatgcagattaagagacagaaaatgacaggggtgaggccattttagacaggggtgaggtaggagcatctctgaagagatggcgtctgtaggaggcaggcgttaagtgagg

SEQ ID NO: 260189 - DNA, 393 bp, Homo sapiens
ctgttgaaatgtaagactaaaatacaacattgaatacaaaatcaaaattttgtgtataaaaaccagtatagtccattttgttatatttgttttttccctaacttggaaatatacatatttgtatatatagccttaaaattaatgtaaagttaggggagtagtggggaaagtaatgtgaaatgtctcagatttaagtagttaaataccagcaaaatcttttcattatccctcttattttgtgaggtgattaaatgtaacttaattgtatttaatttatatcttattccagcatgaatgaggaaaaactgaagtactatttatatttagaaattcatatcagttgaaattacagaaccaattccatacttacaataaatacttaatgtctaaatc

SEQ ID NO: 260190 - DNA, 432 bp, Homo sapiens
agccaatgggcggccacagagggaaccgtgacggtgcgtcagaaggccacgccccagcggagctgtagctgcccgcttcctgcactctctgccggctgacatgagttggcggctgaggctgtcgtggccgctgaggctgttgtggccgttcgtctgggtcctcccagccttgctttcttcgcggagcctgcggagaagccccgtcactcccgtgaggctcgacttcctagtctgtaaaacgaggatcatgccaccgccctttcccactgtcttcacccatcgaaatttagttctttaaattccagacccgagccggcgtctacaaagccttcccctctgcgcgcgtcgcttccagtaggaattcgactgttccttttataaaacagaagagggcgcccgcccttaaaaaataaaatacaggctgggagtggt

SEQ ID NO: 260191 - DNA, 175 bp, Homo sapiens
ctattctgttgtttttgttattttctaaagaaacaacatgcagagttcagaatcaaccactgagtattgttcattacctttgtagtttattagccaacagaaaatttttgtttatcactatgatggtaaaaattgttgtataactatctaacactccttcatacacacagacatt

SEQ ID NO: 260192 - DNA, 452 bp, Homo sapiens
atctttaccgtgcgacgtgttagagctgttttcacatgtgtatatatgtgtgttatttttaattcagtatttccattaaattgtaagctccccaaaggcaagatgaattttaatgatgtagttataaaatcacacagtcctagtagcatatgtgttgggaatatggttgttagctggtcgtggtggctgacgcctgtaatcccaacactttgggaggccaaggcaggtggatcacttgaggccaggagttcgagacctgcctggccaacatgacaaaactccgtctctactaaatttaaaaaattagctgggcgtggtggtacacgcctgtaatcccagctacttgggaggctcaggcacgagaatcacttgaatctaggaggcagaggttgcagtgagccgatattatgccactgcactccagcctgggtgacagagtgagactctgtctc

SEQ ID NO: 260193 - DNA, 310 bp, Homo sapiens
ccctttcttaccccaacctgcttcccctggggtctttatctcagtaaaagtcgccagctctcccctgagacctccttctcacacttcctgatggcctactctgtgctccacgtgacttcatacatgtcctgtgtactggagtcagagtcacctccaacgcgccttttagctcttagtgggttctttagttgaatctaggcccagattgagaatcgcctgtaatcctggcgcctgggaggtcggggcaagaggattccttgagtccaagagaatgagatcagcctgctcaacttaggagaccctatctcaa

SEQ ID NO: 260194 - DNA, 281 bp, Homo sapiens
ctgcataattgtttccaacttaagaggtttataaatagtcatccaataaaccctgttttatttactaaaagaacagatctttcttaccagctgtgaaacagtcattgacttctgctgtacttggccctggggatgtactgaatgtaatggtgacccaactccctgtggactctgcagcttatgatcttaaaaaaagagatgccaacaaataatttttgaagttaatataggtgggtaaaaagctgtagaggagaagtgtacaggcccacttatacatcgcg

SEQ ID NO: 260195 - DNA, 356 bp, Homo sapiens
taaaactattatttttggagaagcataactcaaagacctattagtgggaagcacccattttatgttcttatactctatgtaccaggacagagtattataatttcacccaagaaagtgaaaggcaaacaaaagaagaaaaagaaacataaagtttgacatacattattagtcattcttggagtaatagtaaatgtacaggaaccaaaaacacagagccaaaatttttaacaaaagtggctgtcagtacaacaggtaacaaattacttacctgaaagaagaatagaagagagaaagttatgaatggctggaatctcagttagcttgtaattggaaaactttcaactcaacaccaaata

SEQ ID NO: 260196 - DNA, 813 bp, Homo sapiens
aggttatctgttgctcattctgttcccctgcctgttcccctaaattcaattttcatcctaaccactgtaataaaatgacatcctaatagctaataatacttgcctttgttaaattgaattcttcttgccatatctgtaacacttgacactatagataactcttcttccttgactgttgtgtccttaaatcatccttgccttcaattacttttgtaagctcctcagggtttttctgatcatttgctctattattctgtacttttggaatagccatcacctctgtaacggtgaacctacatctggaaccccacaccctgacacacctaaacaacggtcttatctcctcaaccaacaacttggatgtgttacagttgccttaacatatttgaaataagattgatttcttgcccttttccttcaaaaataaaaacattttgcatcccaattccaatttacctgttttattttggccacatttcaagtctgaaaacattatatgtttatcagagatacattatttgtaatacagataagagttttggcattttagagggaaatctgccctgtttaagtacaaagtgaacctgttagtactaatgaacttaggaaagcctttctcttgaatgtagcagagctaataagaacttgatgtctacacttcttagagaaggaagcagcaatattcctggagtagtttctctcaaaaaactgtagtctttctgaaaaactctattaaaaaatatatgtggaactgaaaacccatgtaaatctcatgacagtgaaatgtattcctagtgctgaaacaggaacttg

SEQ ID NO: 260197 - DNA, 401 bp, Homo sapiens
agctgggggcatctggccaatttatttcccagcagacctgctgcttcccctgattccaatactttcttccccaacccaaaccaaggcgtctggcaatgttaaaaacatcaagaatgataaaacaagcattttaatgaagattattgatgtattcattggctgtttctttaaatgggtagagaactaataaaggatctaccccaaataaccaaaaatatcagcctcagcaccagcagaaattggaagcgttctggtatttatatgtgtttttctcagctggcagatttgttttaggaaactatttgcaaagcctgggaaaaatgtgctttctctgtctgttaaaggaacatgcaggttggttggtgctggttctccatctgacagttctgtctggtggcctc

SEQ ID NO: 260198 - DNA, 522 bp, Homo sapiens
ataattatattgatgaggccaaacaatgtcctctgccaatcatttctttccagtccccatatcttcttggaaaactaccccatcctttggttcttgaagagacctcaccagtgtctctcctggaaatgtatatctgtgttttgcagatactggtttaggttctgttagttcttggatgaaagcatcctggggaagcttaggctgcagcccagcatgcatgttgggacaggaaaagctagtaagagagagagtaagccatgtccctgatagctttctggtcccatccttttaagatgcttaattatctttcctacttttgagttttcatgagatgtccccttattcttcccgtaatttatataatcaaatctgaattttattgtgttacctttagccaaataaccgtaatgaaaagatgtaattctttttcttcttttttttttgttttttttttttgagtcttgctgtcgcccagacaggagtgcagtggcctagtttcagtaaataatgaaaaggaagtta

SEQ ID NO: 260199 - DNA, 453 bp, Homo sapiens
gaaggaggaatagaagagattttgccctctgttaacgggatgtgtccttacctctaataaccttcgtaacttttgcttaggtcattttcagaggtacactttgctgtgatagtaaccatgtattgaacatttgtgtccatccaaacacatgctaggtgctttgcatttgatcctcaagtgcaaccctctgagatggcgtgatgggagcccgaggctccaaagagttgggtaactttgctaagataatttctgaaggctgggacccaaaaggtggggatgtgttcaagcgtctcgtgtgactatgaaccaccagtccagtgcagggctttgcagactttttctgtgaagggctcagtagcaaatattttaggctttgtgggccacatcagatttctgttgtgtattcttctctgtgtgttgttttttcaacccttttgaagtgttaaaaaaaaa

SEQ ID NO: 260200 - DNA, 367 bp, Homo sapiens
gtttagtgtatgggcggtggtggacttagaatctggcaaaactggtttgaatgctggttctgccatgaattgaactttagtttccttctctgtaaaatggagccaatagtatctacttcacaagttataaggattaaatgggaaggtttttaaaagggcaaacaaagggccaggcatggtggctcacatctgtaatcccagcactttgggaggtcaaggcaggcggatccgtctctactaaaaaatacaaaaattagccgagcgtgctggtgggcgcctgtaatcccagctagttgggatgctgaggctggagaattgcttaaaccagggagaaagaggttgcagtgagccgagaaactccatgtca

SEQ ID NO: 260201 - DNA, 447 bp, Homo sapiens
gtcaaattcactctgaagctatcttaggtgtgtgatatttgagcacctatgtttatttatgtaatatagcactactataggaaattattttatggtttttatgtaactttttttgtgaaggaataagcatgcttatagtaatgcagctcgcaattttgttaaagagaagtttgactcttaaccaaacatatcagaatggaaccataattctaagtgactgactgctttgtttaatcacagatgtagttgcatggtgaggtgagactgatgattttgctgatcttctgcactgaactttgtgtcactattaaggcagaagaaatgacaggctttgtttttaagggcatctgcattgtaaaatagctgtcttaagaaaaatgtactgatacgaaatcagctgtattctgtgatttatgtgatttgaaaataaactgtcagtggccaaac

SEQ ID NO: 260202 - DNA, 530 bp, Homo sapiens
cgaggggatggcaggagatcaatcggacccagaacagaggcctgcaaggatgagcgcacttgatcccctcagagaaaaagccagagtgactcacaggagaaagacaaagcaaccaaagcttccagggtgtacaggaggtccaaagtcaccagaaggaagaagaaaacctgaaacagcgagagctggccaaacgctgctaagacctatgcaaataagacccacccacgctacctggaaatcgggcctgggaagtcagaaaacaaagcacatgcgtgcagggctgcacgaacggaggcggaggaggcggctccgagggagcagctgatcctgaaacagcagtggatccctgggagagcagcacagataaagatccaggcaataatgatgcttcctcctcttggacagccttttacagttctggccatggaacttcagagaaggtaggtctgatttggggggaaacaggagatcttgacgtgtagtaatacaagcttactggagtaaagttagaattttcaggtaagagaatt

SEQ ID NO: 260203 - DNA, 421 bp, Homo sapiens
cagtttgtaattaaaagtgttgctgtttgtattgttggagaaccagtgacattaatcatgctcctgctgcgagagccgagtttgcttacatcatgctggccaaggcctgccagactgccagatcagagcaggtgggatggatgatttctgggcaagtccaggaaggcccacatggtttttggtcattctttggtccattgtttttgttggttgggtcacttataattacacaaaaattagctaccacaaatcactttttaaaattgcacctgatcagatgtgttgtttacaaacatgcaaatgagtagttttccttcctgacatgatgaatttgccacaaaaacacaaatgatttttctagcttgctttatcattatttactcctccatttagaatagttgttgttatattttcaactggg

SEQ ID NO: 260204 - DNA, 457 bp, Homo sapiens
tgaacattttaaatagatgcagtttattgcatgcaaagtatgtcccaataagatgatttaaaaatattatcctctttgagacttgtactttgcttatgtgaaacaaaacaaaacaaaaaccctgttcttgtgcccaggagacacaccctgacacatctggaggtagagggtcatgctgtctgcaacttaccctcacaggctctgaaataacaataatagcagcatatttacagatttagagagagagaaatttgtggtaaaaatgttcataagtaaaactagataaagggcaaaaataaaagaaataatgaaactacgtcttttaaattttctctctccggccgggtgcggtggctcacgcctgtaatcccagcactttgagaggccgaggcaggcagatcacgaggtcaggagatcgagaccatcctggctaacacagtgaaaccccgtctctact

SEQ ID NO: 260205 - DNA, 449 bp, Homo sapiens
atgtcttttctagaggcatcagtggttaaatactgtttcctgcgggagtgtggggatgtttctcactgttttaccaccaacgatttaggctggataaggtatgaaaacttatagggcccaatgagaaacagaactgggtcctttcacacatgaaaataatattttatagacattgtgctttctctttttgtttctgttttaagtgacttacccattttaatgtgagaatatgccttactgatttagaaacatttttctttgcagacttgacaccatccttcacaatcaaacttcgcatggctaaaatgtcaaaccatggtgctaacccactctatcaaactatatagtactaactaaagagctataacacattctctactggaatgccatctccttcatgctttaaaggagagatgactagagtgaattaaataaaatgagaaaccttc

SEQ ID NO: 260206 - DNA, 439 bp, Homo sapiens
gagctcaatatagtcaagtgataggtggtcccttagaaggtcacttttataaaaagcctgtggctttcatcgtggggactctctcggctcactcccccagggaaggtgctgccaggtactgcagcactgcggagaggcccaatggcaaggagccaaggcctgccagtgacccaccagtaggcttggaaacaaacttccccttcttctcccaagctgagccttcagctgaagtcacagccatggctaaccatttgcaacctccagggcgactggaaccccgttaagccacacccagattcctgactcacagaaactccgaggtaataaatatttgtcattttaaaccaggatgttctgaggtaatctgatatgtggcaatggataactaataccaccaccaaatgtaaggtaaaaacattagatgctttgaggcaagagt

SEQ ID NO: 260207 - DNA, 513 bp, Homo sapiens
ctattaaaatattcctaatggaaacatgttaaaaatatgaagtgctaatactattttaatgcctaaaatgattatgtattaggatgggattttagccataattaaatagagcaattatttagctataagctatagcatgaggattaatttcctaatagacaagtatcctgccaactagttgactaagaatttagttgtggcctaccagtgtgcccaagtcttagattaatgaatttatatcataaaacccatgaatctttagtttcttttagatgcaaactattgaaagttgtccattgtgtctatccacatcaacagatgtaactttattatttttccctactcagagttattcctggagaataattatatttggataatttgagctatatttcttagtttctgttgccatatattatgtaatattctgtttctaattctatactattatgtcacaatctgcaaaatgtgagacaaaataaaaatgtaatttttcgaaatgtttagtcaaat

SEQ ID NO: 260208 - DNA, 451 bp, Homo sapiens
cccctgtcaatgggacatagggctggggctatcttctcattcacacctacatgcatcggttatcttcagttggggctcttccagccttaggaacaaatgaaacgtcccggagttgggaaaattacaacaactgctatataggtcagataaaagtggtgttttcataccaacttgggatctcttacagtagcccctgaccttaagacataaataaatacaaacaatctaacattttttttctcctaaattctctgttgacccacttactttatcttatggatgattttaagaggaaaatccttttacttccatttaaatttcattttaagttactttggttttacttttgttcatttggttttactttttaaggaaaaaggaagctgagaccaaaggggaatgttaccttctctgatttattcaacttctattttgcgtctaccttaaggtt

SEQ ID NO: 260209 - DNA, 436 bp, Homo sapiens
tcagagtgatggtcactgtcagtgaatagactttgagtgaagggtgtaattgcagcctatactggaataaagtggatgtttctgtatcggtgccaagtcggcccacacttagtcagcatgcagaaggaggctcaccgtgatgctctctctcctctgggagctttgccaattaagcatcctcacttgcagaggttataatgacagatcttgagatgagaaaaaatgataatttcactgtattatataatagtcttaacgttctgcatctggggcttttaccctatttgcatttgaatatgtgtttttacaattcgggtgccacattgtgggagggtatttggcaacatttggaacatagaaaatatatccagtgtctctccttggcaagaggaaaaaaaacatctgagaagtctcagagcttgttcactaatgcctt

SEQ ID NO: 260210 - DNA, 470 bp, Homo sapiens
tcccccacctccccaagaggttctgattcaatttgcctgaaaggttgcctgggaatcaaggcttttaaaagctgcccaggtaatcctaatgagcaatcaaggttgagaacctcttgtccatagggcctctctaccatttattgagccgctcatggggtcagaccttggacagcctgctttgcagccattctgcttggagtttgctttgtcagcttaagccatggcagagggaggaagagggagaaacttacaccatctaaggctaaaatcctcttatttaaattggagtctgaatttccaaatcaaaactggagattcacaagataaataagtgctagagatctgctgtacaaccttgtcccttcagttaacgatactgtattatacacttaaaattttgttaagaagttagatctcatattatgtgatcttatcacagtaaaataaaaattttttaaaccctcaaaaaa

SEQ ID NO: 260211 - DNA, 750 bp, Homo sapiens
agcaggggcaggaggcagggcggggagggcagaggggtcagggctgaggaggagaagcaggggcaggagcggtgaggaagaggggcatttggtcgaggttgggtcaggtaaggacacggtggtaggcaaaggccagggggcaggtggggtgcctgggaggtccgtggtcagaggacgggtgctggtggggcctggagatggcggtgctgcctccaccctcctgagcctggaggcctgacaattgcatccgaaaaatccacagccaccatcgtgtcagcagcacgttgaccatggctcacgacatggggacgggcattcttgccgcttcctcagaatattaacgacgtcctcccgggagcccctagcaccttgggcctgcccccagcctctctctcgtctttgggcagaactcgagtgctgctagacccttggccccgctcactgcgctgggccgcactgcacccatttcctcccagcaagggcggtccctggactcctctgacctgaactgcttccgagtttgcttctcagaaccaagaggggctggctctgcgccctgcctacctgtccaggggtgggggctgccctttgaagctatcaatctgggttttaagtgtggattcattattgacaacaccatgacattatgctgacatgaattatttgtatgtttttcaaattgtgctgtgataaccctggctgtcttcctgctcccatagtggataaaagcgtccgaaagaatgccgccat

SEQ ID NO: 260212 - DNA, 1122 bp, Homo sapiens
cgactaatggggacagccggagccaaggggctctcagggcagcaggagggccatgcagggccaccatcgtgtcagcagcacgttgaccatggctcacgacatggggacgggcattcttgccgcttcctcagaatattaacgacggtcccagcagaatgctgtatgaatattcatatggagctcaatcaagcctgggctggcggatggcacagggagaggcgccgtgacaggctgggcccgggtcccagtgggcacaccttggcagggtgtggccgtaagtctccgccagctccagccaggatctgcctccctcgggatgggacaggcctgggcctgttgtatggccacaggcagaagaggccgatgagtgacatgacatcaccacttagtgactgccctcgtcctgggagcccagatgctggggcggggctccttcctgaaagacccagagaagttcatctcaggtttaatgggggcactgctgcctcagaagccaggcagtgggtggtgaggtccctgtcctcactggggtctgcagccgaggaggactggccaccgaggcccaggccaggcacagggatgctgggtggccatggccagtcctcccgggagcccctagcaccttgggcctgcccccagctctcacgccgggagaggttttttcccactccggtggccgacgccctggtgaagggattcgcagaacgggagcacatggatttccagttcttcccagcgggcgcacgtaggccggcaccctctctctcgtctttgggcagaactcgagtgctgctagacccttggccccgctcactgcgctgggccgcactgcacccatttcctcccagcaagggcggtccctggactcctctgacctgaactgcttccgagtttgcttctcagaaccaagaggggctggctctgcgccctgcctacctgtccaggggtgggggctgccctttgaagctatcaatctgggttttaagtgtggattcattattgacaacaccatgacattatgctgacatgaattatttgtatgtttttcaaattgtgctgtgataaccctggctgtcttcctgctcccatagtggataaaagcgtccgaaagaatgccgccat

SEQ ID NO: 260213 - DNA, 1324 bp, Homo sapiens
agcaggggcaggaggcagggcggggagggcagaggggtcagggctgaggaggagaagcaggggcaggagcggtgaggaagaggggcatttggtcgaggttgggtcaggtaaggacacggtggtaggcaaaggccagggggcaggtggggtgcctgggaggtccgtggtcagaggacgggtgctggtggggcctggagatggcggtgctgcctccaccctcctgagcctggaggcctgacaattgcatccgaaaaatccacagccaccatcgtgtcagcagcacgttgaccatggctcacgacatggggacgggcattcttgccgcttcctcagaatattaacgacggtcccagcagaatgctgtatgaatattcatatggagctcaatcaagcctgggctggcggatggcacagggagaggcgccgtgacaggctgggcccgggtcccagtgggcacaccttggcagggtgtggccgtaagtctccgccagctccagccaggatctgcctccctcgggatgggacaggcctgggcctgttgtatggccacaggcagaagaggccgatgagtgacatgacatcaccacttagtgactgccctcgtcctgggagcccagatgctggggcggggctccttcctgaaagacccagagaagttcatctcaggtttaatgggggcactgctgcctcagaagccaggcagtgggtggtgaggtccctgtcctcactggggtctgcagccgaggaggactggccaccgaggcccaggccaggcacagggatgctgggtggccatggccagtcctcccgggagcccctagcaccttgggcctgcccccagctctcacgccgggagaggttttttcccactccggtggccgacgccctggtgaagggattcgcagaacgggagcacatggatttccagttcttcccagcgggcgcacgtaggccggcaccctctctctcgtctttgggcagaactcgagtgctgctagacccttggccccgctcactgcgctgggccgcactgcacccatttcctcccagcaagggcggtccctggactcctctgacctgaactgcttccgagtttgcttctcagaaccaagaggggctggctctgcgccctgcctacctgtccaggggtgggggctgccctttgaagctatcaatctgggttttaagtgtggattcattattgacaacaccatgacattatgctgacatgaattatttgtatgtttttcaaattgtgctgtgataaccctggctgtcttcctgctcccatagtggataaaagcgtccgaaagaatgccgccat

SEQ ID NO: 260214 - DNA, 369 bp, Homo sapiens
gccccagagtcacatttcctgttggggcccatcctgctcatatgcggcaccatcagacttctgggcaggcaagattacctgtgactctgtctgatggtctcgccatcaatatcactgagagtagctgtgtatggagtcccgaactggtacaggataaaacagggggctgaaaagggaatgaatgggcacagtttctctggcatcaaaagtcacatccagaattgatatttcctgttgagtaaaaatagaaatataagttgctcagtggatgttgagtgagccctattcatgtgccccactctgtgccaagcaccaggaaggagggaagggaaaaatgataagatgttctccccgttctccaggagttta

SEQ ID NO: 260215 - DNA, 419 bp, Homo sapiens
caagagtaggctctttcggaagtacttgcccgtattacactttaattttacaaaccaaacaacagcaattcaaccaatcaaacaacaaaaacaatccaaagaaagagacttggacataggcatcaaggaatcatttcactttataatttaatagaacactggtgtatcattcattaattctgaaagtgagaactaaatgtaaaataattttgtaaggtttgtgaattgttgcctaggtattctggtgatgtttactttagtgattttatcattaatgaaagcaatgtgtttttttagaaaacatattattagggttcataacgttgacattctgttgtgcaatcataatctcctgttttgttttagtcatagctctacagttgaatgaattcaaagctcacctccaggccttttgctat

SEQ ID NO: 260216 - DNA, 2877 bp, Homo sapiens
ccctggtcaagttctctccacctctctatctatgtctcagtttcttcatctgtaacatcaaatgaataataataccaatctcctagacttcataagaggattaacaaagacaaaatatgggaaaaacataacatggcgtcccataattattagatcttattattgacactaaaatggcattaaaattaccaaaaggaagacagcatctgtttcctctttggtcctgagctggttaaaaggaacactggttgcctgaacagtcacacttgcaaccatgatgcctaaacattgctttctaggcttcctcatcagtttcttccttactggtgtagcaggaactcagtcaacgcatgagtctctgaagcctcagagggtacaatttcagtcccgaaattttcacaacattttgcaatggcagcctgggagggcacttactggcaacagcagtgtctattttgtgcagtacaaaatcatgttctcatgcagcatgaaaagctctcaccagaagccaagtggatgctggcagcacatttcttgtaacttcccaggctgcagaacattggctaaatatggacagagacaatggaaaaataaagaagactgttggggtactcaagaactctcttgtgaccttaccagtgaaacctcagacatacaggaaccttattacgggagggtgagggcggcctcggctgggagctactcagaatggagcatgacgccgcggttcactccctggtgggaaacaaaaatagatcctccagtcatgaatataacccaagtcaatggctctttgttggtaattctccatgctccaaatttaccatatagataccaaaaggaaaaaaatgtatctatagaagattactatgaactactataccgagtttttataattaacaattcactagaaaaggagcaaaaggtttatgaaggggctcacagagcggttgaaattgaagctctaacaccacactccagctactgtgtagtggctgaaatatatcagcccatgttagacagaagaagtcagagaagtgaagagagatgtgtggaaattccatgacttgtggaatttggcattcagcaatgtggaaattctaaagctccctgagaacaggatgactcgtgtttgaaggatcttatttaaaattgtttttgtattttcttaaagcaatattcactgttacaccttggggacttctttgtttatccattcttttatcctttatatttcatttgtaaactatatttgaacgacattccccccgaaaaattgaaatgtaaagatgaggcagagaataaagtgttctatgaaattcagaactttatttctgaatgtaacatccctaataacaaccttcattcttctaatacagcaaaataaaaatttaacaaccaaggaatagtatttaagaaaatgttgaaataatttttttaaaatagcattacagactgaggcggtcctgaagcaatggtttttcactctcttattgagccaattaaattgacattgctttgacaatttaaaacttctataaaggtgaatatttttcatacatttctattttatatgaatatactttttatatatttattattattaaatatttctacttaatgaatcaaaattttgttttaaagtctactttatgtaaataagaacaggttttggggaaaaaaatcttatgatttctggattgatatctgaattaaaactatcaacaacaaggaagtctgctctgtacaattgtccctcatttaaaagatatattaagcttttcttttctgtttgtttttgttttgtttagtttttaatcctgtcttagaagaacttatctttattctcaaaattaaatgtaatttttttagtgacaaagaagaaaggaaacctcattactcaatccttctggccaagagtgtcttgcttgtggcgccttcctcatctctatataggaggatcccatgaatgatggtttattgggaactgctggggtcgaccccatacagagaactcagcttgaagctggaagcacacagtgggtagcaggagaaggaccggtgttggtaggtgcctacagagactatagagctagacaaagccctccaaactggcccctcctgctcactgcctctcctgagtagaaatctggtgacctaaggctcagtgtggtcaacagaaagctgccttcttcacttgaggctaagtcttcatatatgtttaaggttgtctttctagtgaggagatacatatcagagaacatttgtacaattccccatgaaaattgctccaaagttgataacaatatagtcggtgcttctagttatatgcaagtactcagtgataaatggattaaaaaatattcagaaatgtattggggggtggaggagaataagaggcagagcaagagctagagaattggtttccttgcttccctgtatgctcagaaaacattgatttgagcatagacgcagagactgaaaaaaaaatttactttgatctctgtttttgaattcttattatttatattttgcttactaccttttttgccttttgtccttttgtggagagggcgatgaattaagagtagtggggtgggtggcgagtaagtaaaatttcaaatagcattttagtgaatgcaattcagtagtcctgaagcctgacttaataaaacaaaattcatttatggttgtttcatgaaagttattagataggatcaagttttgtttgtatattgtttgccttgctctggttttgcttttgtgcttaggcaagtgcaaaatactctatggaaatcataattgtcatcttcttcatggtgttagggatatattgtcacatgatttcaataaatccttttttgctttaaaaaggaa

SEQ ID NO: 260217 - DNA, 2611 bp, Homo sapiens
ccctggtcaagttctctccacctctctatctatgtctcagtttcttcatctgtaacatcaaatgaataataataccaatctcctagacttcataagaggattaacaaagacaaaatatgggaaaaacataacatggcgtcccataattattagatcttattattgacactaaaatggcattaaaattaccaaaaggaagacagcatctgtttcctctttggtcctgagctggttaaaaggaacactggttgcctgaacagtcacacttgcaaccatgatgcctaaacattgctttctaggcttcctcatcagtttcttccttactggtgtagcaggaactcagtcaacgcatgagtctctgaagcctcagagggtacaatttcagtcccgaaattttcacaacattttgcaatggcagcctgggagggcacttactggcaacagcagtgtctattttgtgcagtacaaaatatatggacagagacaatggaaaaataaagaagactgttggggtactcaagaactctcttgtgaccttaccagtgaaacctcagacatacaggaaccttattacgggagggtgagggcggcctcggctgggagctactcagaatggagcatgacgccgcggttcactccctggtgggaaagagcaaaaggtttatgaaggggctcacagagcggttgaaattgaagctctaacaccacactccagctactgtgtagtggctgaaatatatcagcccatgttagacagaagaagtcagagaagtgaagagagatgtgtggaaattccatgacttgtggaatttggcattcagcaatgtggaaattctaaagctccctgagaacaggatgactcgtgtttgaaggatcttatttaaaattgtttttgtattttcttaaagcaatattcactgttacaccttggggacttctttgtttatccattcttttatcctttatatttcatttgtaaactatatttgaacgacattccccccgaaaaattgaaatgtaaagatgaggcagagaataaagtgttctatgaaattcagaactttatttctgaatgtaacatccctaataacaaccttcattcttctaatacagcaaaataaaaatttaacaaccaaggaatagtatttaagaaaatgttgaaataatttttttaaaatagcattacagactgaggcggtcctgaagcaatggtttttcactctcttattgagccaattaaattgacattgctttgacaatttaaaacttctataaaggtgaatatttttcatacatttctattttatatgaatatactttttatatatttattattattaaatatttctacttaatgaatcaaaattttgttttaaagtctactttatgtaaataagaacaggttttggggaaaaaaatcttatgatttctggattgatatctgaattaaaactatcaacaacaaggaagtctgctctgtacaattgtccctcatttaaaagatatattaagcttttcttttctgtttgtttttgttttgtttagtttttaatcctgtcttagaagaacttatctttattctcaaaattaaatgtaatttttttagtgacaaagaagaaaggaaacctcattactcaatccttctggccaagagtgtcttgcttgtggcgccttcctcatctctatataggaggatcccatgaatgatggtttattgggaactgctggggtcgaccccatacagagaactcagcttgaagctggaagcacacagtgggtagcaggagaaggaccggtgttggtaggtgcctacagagactatagagctagacaaagccctccaaactggcccctcctgctcactgcctctcctgagtagaaatctggtgacctaaggctcagtgtggtcaacagaaagctgccttcttcacttgaggctaagtcttcatatatgtttaaggttgtctttctagtgaggagatacatatcagagaacatttgtacaattccccatgaaaattgctccaaagttgataacaatatagtcggtgcttctagttatatgcaagtactcagtgataaatggattaaaaaatattcagaaatgtattggggggtggaggagaataagaggcagagcaagagctagagaattggtttccttgcttccctgtatgctcagaaaacattgatttgagcatagacgcagagactgaaaaaaaaatttactttgatctctgtttttgaattcttattatttatattttgcttactaccttttttgccttttgtccttttgtggagagggcgatgaattaagagtagtggggtgggtggcgagtaagtaaaatttcaaatagcattttagtgaatgcaattcagtagtcctgaagcctgacttaataaaacaaaattcatttatggttgtttcatgaaagttattagataggatcaagttttgtttgtatattgtttgccttgctctggttttgcttttgtgcttaggcaagtgcaaaatactctatggaaatcataattgtcatcttcttcatggtgttagggatatattgtcacatgatttcaataaatccttttttgctttaaaaaggaa

SEQ ID NO: 260218 - DNA, 1637 bp, Homo sapiens
ccctggtcaagttctctccacctctctatctatgtctcagtttcttcatctgtaacatcaaatgaataataataccaatctcctagacttcataagaggattaacaaagacaaaatatgggaaaaacataacatggcgtcccataattattagatcttattattgacactaaaatggcattaaaattaccaaaaggaagacagcatctgtttcctctttggtcctgagctggttaaaaggaacactggttgcctgaacagtcacacttgcaaccatgatgcctaaacattgctttctaggcttcctcatcagtttcttccttactggtgtagcaggaactcagtcaacgcatgagtctctgaagcctcagagggtacaatttcagtcccgaaattttcacaacattttgcaatggcagcctgggagggcacttactggcaacagcagtgtctattttgtgcagtacaaaatatatggacagagacaatggaaaaataaagaagactgttggggtactcaagaactctcttgtgaccttaccagtgaaacctcagacatacaggaaccttattacgggagggtgagggcggcctcggctgggagctactcagaatggagcatgacgccgcggttcactccctggtgggaaacaaaaatagatcctccagtcatgaatataacccaagtcaatggctctttgttggtaattctccatgctccaaatttaccatatagataccaaaaggaaaaaaatgtatctatagaagattactatgaactactataccgagtttttataattaacaattcactagaaaaggagcaaaaggtttatgaaggggctcacagagcggttgaaattgaagctctaacaccacactccagctactgtgtagtggctgaaatatatcagcccatgttagacagaagaagtcagagaagtgaagagagatgtgtggaaattccatgacttgtggaatttggcattcagcaatgtggaaattctaaagctccctgagaacaggatgactcgtgtttgaaggatcttatttaaaattgtttttgtattttcttaaagcaatattcactgttacaccttggggacttctttgtttatccattcttttatcctttatatttcatttgtaaactatatttgaacgacattccccccgaaaaattgaaatgtaaagatgaggcagagaataaagtgttctatgaaattcagaactttatttctgaatgtaacatccctaataacaaccttcattcttctaatacagcaaaataaaaatttaacaaccaaggaatagtatttaagaaaatgttgaaataatttttttaaaatagcattacagactgaggcggtcctgaagcaatggtttttcactctcttattgagccaattaaattgacattgctttgacaatttaaaacttctataaaggtgaatatttttcatacatttctattttatatgaatatactttttatatatttattattattaaatatttctacttaatgaatcaaaattttgttttaaagtctactttatgtaaataagaacaggttttggggaaaaaaatcttatgatttctggattgatatctgaattaaaactatcaacaacaagg

SEQ ID NO: 260219 - DNA, 3137 bp, Homo sapiens
caagtcatgccagtgcaaaattatcccatgccatgccatgattagtctcagaaacactaccccccagcagggtcttgggcagttttcctcattagcatgaccatttcatctgagggattatgcttggatacttggagccaggatgcaggcaggtaaatacagccattcaggagtgggacagcaaaggcagacctacctggaagcaggacccagagattgagcaagaacctgcgaaaggagggactgagtgctgggctgaggtcctggagcccagaagtggtcactagcaaattttgcttgagtagtaccaatatagtgattcctaagaagatggttggtggtcttagtgtgggtctttcatctcagtcattatattccatcactatttgggaataaaataagagcaatattttttttactgcaatttacttcccccacagcctgggaaatagggtgggaaggtatcacgtacatgtttatgatctggaactcattattctgagactttagcgtgcatcaaaatcattgcattgaagattcaaaatgttgatttctgggctccacctctactatctgcacttagagcaactactttagggaatcctgatgcaggtattccactgaaaactactgctgggaacagcagtgctccaagcaacgttcaatgttcttccttctcttgttatcttaggaactcagtcaacgcatgagtctctgaagcctcagagggtacaatttcagtcccgaaattttcacaacattttgcaatggcagcctgggagggcacttactggcaacagcagtgtctattttgtgcagtacaaaatatatggacagagacaatggaaaaataaagaagactgttggggtactcaagaactctcttgtgaccttaccagtgaaacctcagacatacaggaaccttattacgggagggtgagggcggcctcggctgggagctactcagaatggagcatgacgccgcggttcactccctggtgggaaacaaaaatagatcctccagtcatgaatataacccaagtcaatggctctttgttggtaattctccatgctccaaatttaccatatagataccaaaaggaaaaaaatgtatctatagaagattactatgaactactataccgagtttttataattaacaattcactagaaaaggagcaaaaggtttatgaaggggctcacagagcggttgaaattgaagctctaacaccacactccagctactgtgtagtggctgaaatatatcagcccatgttagacagaagaagtcagagaagtgaagagagatgtgtggaaattccatgacttgtggaatttggcattcagcaatgtggaaattctaaagctccctgagaacaggatgactcgtgtttgaaggatcttatttaaaattgtttttgtattttcttaaagcaatattcactgttacaccttggggacttctttgtttatccattcttttatcctttatatttcatttgtaaactatatttgaacgacattccccccgaaaaattgaaatgtaaagatgaggcagagaataaagtgttctatgaaattcagaactttatttctgaatgtaacatccctaataacaaccttcattcttctaatacagcaaaataaaaatttaacaaccaaggaatagtatttaagaaaatgttgaaataatttttttaaaatagcattacagactgaggcggtcctgaagcaatggtttttcactctcttattgagccaattaaattgacattgctttgacaatttaaaacttctataaaggtgaatatttttcatacatttctattttatatgaatatactttttatatatttattattattaaatatttctacttaatgaatcaaaattttgttttaaagtctactttatgtaaataagaacaggttttggggaaaaaaatcttatgatttctggattgatatctgaattaaaactatcaacaacaaggaagtctgctctgtacaattgtccctcatttaaaagatatattaagcttttcttttctgtttgtttttgttttgtttagtttttaatcctgtcttagaagaacttatctttattctcaaaattaaatgtaatttttttagtgacaaagaagaaaggaaacctcattactcaatccttctggccaagagtgtcttgcttgtggcgccttcctcatctctatataggaggatcccatgaatgatggtttattgggaactgctggggtcgaccccatacagagaactcagcttgaagctggaagcacacagtgggtagcaggagaaggaccggtgttggtaggtgcctacagagactatagagctagacaaagccctccaaactggcccctcctgctcactgcctctcctgagtagaaatctggtgacctaaggctcagtgtggtcaacagaaagctgccttcttcacttgaggctaagtcttcatatatgtttaaggttgtctttctagtgaggagatacatatcagagaacatttgtacaattccccatgaaaattgctccaaagttgataacaatatagtcggtgcttctagttatatgcaagtactcagtgataaatggattaaaaaatattcagaaatgtattggggggtggaggagaataagaggcagagcaagagctagagaattggtttccttgcttccctgtatgctcagaaaacattgatttgagcatagacgcagagactgaaaaaaaaatttactttgatctctgtttttgaattcttattatttatattttgcttactaccttttttgccttttgtccttttgtggagagggcgatgaattaagagtagtggggtgggtggcgagtaagtaaaatttcaaatagcattttagtgaatgcaattcagtagtcctgaagcctgacttaataaaacaaaattcatttatggttgtttcatgaaagttattagataggatcaagttttgtttgtatattgtttgccttgctctggttttgcttttgtgcttaggcaagtgcaaaatactctatggaaatcataattgtcatcttcttcatggtgttagggatatattgtcacatgatttcaataaatccttttttgctttaaaaaggaa

SEQ ID NO: 260220 - DNA, 2781 bp, Homo sapiens
ccctggtcaagttctctccacctctctatctatgtctcagtttcttcatctgtaacatcaaatgaataataataccaatctcctagacttcataagaggattaacaaagacaaaatatgggaaaaacataacatggcgtcccataattattagatcttattattgacactaaaatggcattaaaattaccaaaaggaagacagcatctgtttcctctttggtcctgagctggttaaaaggaacactggttgcctgaacagtcacacttgcaaccatgatgcctaaacattgctttctaggcttcctcatcagtttcttccttactggtgtagcaggaactcagtcaacgcatgagtctctgaagcctcagagggtacaatttcagtcccgaaattttcacaacattttgcaatggcagcctgggagggcacttactggcaacagcagtgtctattttgtgcagtacaaaatatatggacagagacaatggaaaaataaagaagactgttggggtactcaagaactctcttgtgaccttaccagtgaaacctcagacatacaggaaccttattacgggagggtgagggcggcctcggctgggagctactcagaatggagcatgacgccgcggttcactccctggtgggaaacaaaaatagatcctccagtcatgaatataacccaagtcaatggctctttgttggtaattctccatgctccaaatttaccatatagataccaaaaggaaaaaaatgtatctatagaagattactatgaactactataccgagtttttataattaacaattcactagaaaaggagcaaaaggtttatgaaggggctcacagagcggttgaaattgaagctctaacaccacactccagctactgtgtagtggctgaaatatatcagcccatgttagacagaagaagtcagagaagtgaagagagatgtgtggaaattccatgacttgtggaatttggcattcagcaatgtggaaattctaaagctccctgagaacaggatgactcgtgtttgaaggatcttatttaaaattgtttttgtattttcttaaagcaatattcactgttacaccttggggacttctttgtttatccattcttttatcctttatatttcatttgtaaactatatttgaacgacattccccccgaaaaattgaaatgtaaagatgaggcagagaataaagtgttctatgaaattcagaactttatttctgaatgtaacatccctaataacaaccttcattcttctaatacagcaaaataaaaatttaacaaccaaggaatagtatttaagaaaatgttgaaataatttttttaaaatagcattacagactgaggcggtcctgaagcaatggtttttcactctcttattgagccaattaaattgacattgctttgacaatttaaaacttctataaaggtgaatatttttcatacatttctattttatatgaatatactttttatatatttattattattaaatatttctacttaatgaatcaaaattttgttttaaagtctactttatgtaaataagaacaggttttggggaaaaaaatcttatgatttctggattgatatctgaattaaaactatcaacaacaaggaagtctgctctgtacaattgtccctcatttaaaagatatattaagcttttcttttctgtttgtttttgttttgtttagtttttaatcctgtcttagaagaacttatctttattctcaaaattaaatgtaatttttttagtgacaaagaagaaaggaaacctcattactcaatccttctggccaagagtgtcttgcttgtggcgccttcctcatctctatataggaggatcccatgaatgatggtttattgggaactgctggggtcgaccccatacagagaactcagcttgaagctggaagcacacagtgggtagcaggagaaggaccggtgttggtaggtgcctacagagactatagagctagacaaagccctccaaactggcccctcctgctcactgcctctcctgagtagaaatctggtgacctaaggctcagtgtggtcaacagaaagctgccttcttcacttgaggctaagtcttcatatatgtttaaggttgtctttctagtgaggagatacatatcagagaacatttgtacaattccccatgaaaattgctccaaagttgataacaatatagtcggtgcttctagttatatgcaagtactcagtgataaatggattaaaaaatattcagaaatgtattggggggtggaggagaataagaggcagagcaagagctagagaattggtttccttgcttccctgtatgctcagaaaacattgatttgagcatagacgcagagactgaaaaaaaaatttactttgatctctgtttttgaattcttattatttatattttgcttactaccttttttgccttttgtccttttgtggagagggcgatgaattaagagtagtggggtgggtggcgagtaagtaaaatttcaaatagcattttagtgaatgcaattcagtagtcctgaagcctgacttaataaaacaaaattcatttatggttgtttcatgaaagttattagataggatcaagttttgtttgtatattgtttgccttgctctggttttgcttttgtgcttaggcaagtgcaaaatactctatggaaatcataattgtcatcttcttcatggtgttagggatatattgtcacatgatttcaataaatccttttttgctttaaaaaggaa

SEQ ID NO: 260221 - DNA, 389 bp, Homo sapiens
gacttcctgtgattcttattggggaatactccattagacaagaatctctttgacataagccattctctacctgagatccctgtaaggctgtgatgggaccacataaccttaaaattattagaagactcattgtttactgagagaatatgcctagcatatgcttagatccttagaggaactctgtttcaaagggcttatgagacattaccttatatctttctaaggtacaaacaaaaggtctttggcttttgagtttgatctttgagctgacaccttttcttaatttgagaatcccctgctctatggagagactgacaaagagaaatagttttatatttgaatgtaacatcttggatctttaatagattatcttaaaattttcctgaaaa

SEQ ID NO: 260222 - DNA, 421 bp, Homo sapiens
ccaggctggagtgcagagtgcaatcacagtgcactgcagcctctgcctcctgggctcaagcgatcctcccaccccagactccagagtagctgggcctagaggcacacgccacctcagctagtttttgtactttgtggagagacagggtttcgctttgttgcccagactggtcttgaactcctaggctcgagagatccacctgtctcagcctcccaaagtgctgggattataggcatgaggttgcagtgagctgagatcgcgccactgcattccagcgtgggtgacagaggggagactctgtctccaaaaaaaaaagtataggaaaacggaagttgctctacaaattattaattttcaaatagttacagaaattgcataaattattaaatcctgaaattaacctattaatatttcttcggga

SEQ ID NO: 260223 - DNA, 354 bp, Homo sapiens
ctgtctatggaatggctcctggctcttgggcctcaggtgggaggttaaaggaaggtcttaaactgaatctctacatcttgtaggaatgatgtcattcttcttaaagaccagacaggcccagcagctgagtaattggccacaggtatcctatctacaacattagaagagaaaattgaattccagtgattttgtaaagtcctattttagtctttcctgtcaacagtcttactagacctgttcatcgtgactaaactgagtttctcatccttccacttccttcttgtccttttattggaaatatatctcaaagaggaaaagcaagtttaaaagccaaagttctttaaaaaaaaaaaa

SEQ ID NO: 260224 - DNA, 206 bp, Homo sapiens
gctttgtgttactttgtggggtcttgaggggtcttgaagattatgggataatgtaagtatagcacagagcctgacatttgcgatgggctcagtaagtgccgtccgttctcttgtactatttttcttctccttctccttcttcttcttctttgagagagggagagagaaaagaaagaaagaaaagaaaagaaaagaaggaaagaaag

SEQ ID NO: 260225 - DNA, 907 bp, Homo sapiens
cctgctacacaaatatgtaattaaccaatgaggactcatgacttgatagtgtatgtatgtaaagggatatatggacttaatcataagctgttgaggtgaaagacgtggatccacctgctttccaagaaaactcggccaaatttatttgcagctggatattgaatgggacttttctggttgtcttagaattctggctaaaggctcaaagctgacgaaagacagtaactgcaccaacatgatactagacacagccagtctggacttatcaaaagagcagaaagagaccaatgactcccagtccgtattatccatctctagaagactagagtcaaaagcgtgattaaagagtcattaagcggaggttctaggccatagggagattgctttgaatttcttgcagacaagtgtgagggactcagcatggtagaaggtagcctggcatcccactccaagactgaaagcttgcagagtaacaggagcacacaggttcagtgcagcagatgtggtgtggcttgagaattcttggaagagcttgatgagtgtttgctggagtttgggatgagggtgggcactgggaacacagagactggtaaatagtgtttggcaaatacaagtgcttgatgaatatttgttgaatgaatagatgagttcttcccccctggggaattcaggaggtgaaaggttggcttgagcacccaaaatggcaggatgagagaagagaagcactgatagcaacctgccctcccattattgacatggtaaaaggatgtgaatttcttcacatggctttgactatggaagagtagctgggcttgcattgtcatgacgggatatcagccaacagggtagcctgttgtgcaaagaaactatagcaagatattcgacgtggggggatcctctatgagat

SEQ ID NO: 260226 - DNA, 520 bp, Homo sapiens
gagaagagaagcactgatagcaacctgccctcccattattgacatggtaaaaggatgtgaatttcttcacatggctttgactatggaagagtagctgggcttgcattgtcatgacgggatatcagccaacagggtagcctgttgtgcaaagaaactatagcagtaagaggacacggggttaggcagaagaggggtttggggtggaggttgctgcaagaggtcagccagataatgtggccctgcatcatggaactgtgcaatgtggggtacactcaaggccctccaataactcacagatgtgccctatgaaaaagccagcatttggactctgccatagcagctggcaggatcatgctggcctgtctgccttattcaatagttaactacaggaagatctgctcctctttgtgtaataccctcttcccttgcaatggcatagggacatctagaatatagagaagacagagacaatggaggaagagtaaagaaactgactatatgccttcgtcatttcactgca

SEQ ID NO: 260227 - DNA, 383 bp, Homo sapiens
ttttgagacagggtctctcactctgtcacccaggctggagtacagtggtgcaatctcagctcactgcaacctctccctctggggctcaagtgatcctcccaactcaacctccagagtagctgggactacagatgaggttttgccatgttccccaggctggtcttaaaactcctgggctcaagtgatctgcctgtcttggcctcccgaagtgctgggattacacacgtgagccacagcatctggccagaagcaatttttaaataaatttagtaaaacctaagtgtacaatgtttttaaagtctagagcaatatacagaaaggccttcactttcactcatgccactcacccacacaacttccagtcttggaagttccaatcatga

SEQ ID NO: 260228 - DNA, 389 bp, Homo sapiens
ttccaagtaactagctgcagactctgatgaaagaaacatgtccttggtgcatacgtgtcgtagcctgcacctaattaattcctgctgtttttttaatactgtgactgtgttctatttgttatatgctcagggtaacaaatgagtttcagacgtccctgcgtcagctccttcctcagcagggacctgacgggctcactgatctaagaaaggaaatggaaaatgaaaatccaccccacaagtctaataagttggtgtagtcacttctgcatggggacatgcattccagatgataacctgttaaatcactgccagttaacagtgataacctgttaaactggcacagaacctggcacattgtacaaactcaataaatattcatggatgaatag

SEQ ID NO: 260229 - DNA, 765 bp, Homo sapiens
tgtgggcagcagacgatgccgactggaagggagggagagggagggggagggagaaaatggggctatgcctggcttaggggcaacctcgtactgagaggaggtgataccgggtcctaggtaggtagggctgatggtgcgcactccttaaagaggactatttagcctctcccccagtgcttcagccccacccgataattttattttatttcttatttataaattgtaatataatgattcccttgcccagcttgccaaggtgaggggctggggcatggcattaacactgtctgacacagccagccagtctgacatctgacgttttcctgcaaggtgggctaataaagggaaggctttcaggagcttactggaaaacacttccattcagagggtgattcacctccagagagggggataaaggtggccaacctgagttaacagcttacttccggctccccctccttcctcagcagggtctttgggacccttttcctcccttcagaaggggcatcccaacccataagcaacagagcccacaagagtcgtacccttttccaggctgctgtttccgtctcccatccagagaggaccagcatttcgctcctgcggctgaagggtccagggttgtcccaggtgggaaagactgtgcacacctcttctctgtttataggggctccagcaggggctcaggcccctatgagtactgatactcaaagcatctagtcccctattgttagccagtagtcctggtccccatcctaccttggt

SEQ ID NO: 260230 - DNA, 245 bp, Homo sapiens
gagaataaagagaatgggttaaagggtacaaacatacagtaggagagaaggaatagattaaatgcttgatagcagagtagggttactataatgaacaaaaaatgtattgtattaggcgatggacatcttaaataccctgacttgatcactatgcattacatacacgtatcaaaatttctcatgtacccaatacatttatacaaacaaacaaaaacaagaaaattaagcaaaaaaagaaaaaaaaa

SEQ ID NO: 260231 - DNA, 429 bp, Homo sapiens
ctacagttattttaattttgggtgttggatagactagggttcatattccatgcctgccatgctttttgtgaacttgggcaaaatagttagctcttctgagactcacttttgtcacctagtaaatgggttcagctgtagtactctatgtatttgtttgttttaagcattagatagtgcgtggtaaatgcttagcacagttcttagcacatagtaaatctttaataaatgttagaaaatataatgatcttgattctctgtcttccctccctagtagttgatttggggcacagtgtagcattatttgaattatcacagaataactttttacctttctgattttaacaggggagagtgtgtaaaggatgggagagggaagagagaaaaaagctgagtaaatgtgatcaactttacagtctttattccctgaac

SEQ ID NO: 260232 - DNA, 494 bp, Homo sapiens
ggattattctgcctacttctttctggtggttcttcccccagccttaatagttttattacatgtatgtactgaccgatccttagttacttgtatagtgatttaacttcaaatgagattatcacaatgcattaataatggcaccttaatttacaggatatataacttcagattatcatatagaggccaccatgctaggtgccggcagtgataagataaataagttttagtttctattttcatgaagctcatagtctgttagggaagaaagacatatagacacagttcaagaccagcctggccacatggtgaaacctggtctgtactaaaaatacaaaaattagccaggcgtggtggcaggcacctgtaattccagctactcgggaggctgatgcacgagaatctcttgaacccgggaggcggaggttgcagtgagccaagattgtgccactgcactccagccggggcaacagagtgagacttcaccaaaaaaaaaa

SEQ ID NO: 260233 - DNA, 691 bp, Homo sapiens
gagttttgatttaaaagtgtagagacaagggttcttatttgaactttctacctaattgtaatattgggaaatttattcaacagtcagatattatagagtattattgattaaaagcacaaaaaacttgagttagggaatttgggtttgaatctcagtgccggcacttattagcttaagtcactttcttgaggctagtcttctcatctgtaaaatgggaagagtgataattactttctgaaaatatgtgtaagtacaaagtgctatactttattctaaataatttcatgattcgttcatatgtgcaattttattactataaaattgttaataaatgtaaaatgattttttcatcagaaattatacttttcaattttatggctcagaaggtgctattgaattgataaactgcttagtggttaaataagacattgtaaaaaaacaaaatgcaattactgtgataaaggtgttcatataaatgactctttccatgcacaaaagtcaaaatcaaatgaaatgtaaaacctaagtttatgtacataatatgccatcagttatttgtggttaagttgtaacaaaacacaatcaaccacatgaaattaatgtgtaatttaattaatgacttgaatgcttttaagcgaatacattttaattttattaaaaataatgatcttgataattatattaatcaact

SEQ ID NO: 260234 - DNA, 426 bp, Homo sapiens
tcttttgcacatattctatacctgcttttcccattcatttcaataatttccaaccaaagaaggcagttctcagcctccaagggaatgtatgagtcattgggacagagtataaaaaaggtgacaaataagatggcttctgggtataagcgaagataaaaactaaaagcctatgccaattttgtgatcatcatagacacaaaatggtattctgtaactgcaggacacagaccctgaaaggactttaatagacttctggtcaagttatcttatgttggcattattgcagttcatatgtacatgtgtgtacatgagcgtgcctaactttttctttaatgtaactaacatgacttggtgttttagtcatcttggagaggctactcggagatccctgataagagtcactttcattctgcagttcatgtttta

SEQ ID NO: 260235 - DNA, 247 bp, Homo sapiens
taatatgtttcagtgtttaatgtcactttctttactgcctatgagataaactagtggaaaagtattggctcaaaaagccagcaggtctgctggtgttaccagtcatgttgcaattgtatttacctatcagaacgttgatctaaataataaacctaacatttccttctaaactgtcagtggaaagatatatttattacaatgtcctccatcgttgaggagagaggaggtttagctaaagtttaaatga

SEQ ID NO: 260236 - DNA, 276 bp, Homo sapiens
aactgtaaattaaagaatctctgcatctacctctaacctgtaagcccctgttttaagataccctgcattttggggccaaaccaatgtataccttctgtgtgttgatttatgtccttgcttgtaactcctgtctccctaaaatgtataaaagcaaactgtaactccaccaccttgggcctggggaccacttactcaaggcttcttgggtttgtgttttctccaggctgtggtcactcatcctggctcagaataaacctctttaaaatgttttacaga

SEQ ID NO: 260237 - DNA, 339 bp, Homo sapiens
aggacagcaagggaagccccagctcaaagaagtgactgggctagggcggccctccttaaagatgcttctgcctgcctgccgagtgtcactgttgagctcttccctagtgcagagctttgcactgctttcatttgtttttgttattcactctttcatgcaaaactgaaattgaactggatctgaagacactgaaaaatgtctgggtagggggctgcagggagcaggggttttcctgagagaatggaatgtcccatgagaaatttcacttaccatgagaggggaagtccatttcgtatgacatgatataacactgtcattataaactctccgttggtttcc

SEQ ID NO: 260238 - DNA, 550 bp, Homo sapiens
tctctccttgatggctacaaatacggcccacacacaagcataatataataattcctcctctttactgagatcctctgaggtcaggtccttcatttccatgaacaggtaagagcaaggcagttattgatcccaacatttttagatgaggaaactgagaagctacaatagtttggagagccagaagcagaatttaaaaccaggtctgtctaactccaaagcccacattctttctttgttagaaactgcctttattgcattaagaaaagaagccagaaggtggtgagaagcaaatggaaaggatggaagagaggagagacgaagcaacgcccatcgagacagcagacagggctaagtggatctacacagagaagcacttaacctcaccttcacatatttctagacaaagctcggagaaaaagaatcaagtgagtccacagcattgtagctaaatgcggggcataggagggcctgctcacagcaatggaaactagagcaaggtggaagagacagccacagattttatctaactgttcacactcaaatgaaaaac

SEQ ID NO: 260239 - DNA, 402 bp, Homo sapiens
caggtgcccaccatcatggctggctaatttttgtatttttagtagagacggggtttcaccatattggccaggctggtctcgaactcctgaccttgtgatccatccgccttggcctcccaaagtgctgggattacaggcgtgagcgcactcactttttaattatctgaacctctctccagaaaggaaactccctggggaaggactatcatcatcttcttcactactgtctactcagtgcccagacacagccccgcacagagaagacaccagaaaagattgtcggcctgcacaaaggcatctgagtaggagagagacagaatcaaagcagtgtttcagggcctggtgcagtggctcacgcctgtaatcccagtgctttgggaggctgaggcgggaggatcgctt

SEQ ID NO: 260240 - DNA, 217 bp, Homo sapiens
tcgcggccagtgcaggctttccagacggtggcagcgcccagcagccgttgcctcagctctttggtggcagccaggccaacaagggcagcaacgatgactaggatgatgagtgagcaaacagctccacactggtggacaggctgggtgcgcacccggtggtcctcaaaggctcgctgggcctgtaccaccgttataaatttgagatcatgagattata

SEQ ID NO: 260241 - DNA, 286 bp, Homo sapiens
gttggcattcactgttaaactgatagaatacctgatcattcccactaagccaaaggcatagggtaaaaatacggcaagagacccttctaaaatgtggcttctttttccacccacagaaacgctatattattataattcaaaacagaatatggtcaataaaatatttttatactaaacttttaatttagaatgaatacattaaaaaataaacagttgctgactgcgtaaaggagaaaaattcactgctgatacttacagttttttttttaagaaagcagcgattttg

SEQ ID NO: 260242 - DNA, 483 bp, Homo sapiens
actttggacttctttacccaaccagtcatcttgcacaaacagtaaactccctcaaaactttctgttcccatgggacccttgagaaaacaaaatgaaaaaaaaaaaaaaaaaagcatgattgaaatctactttcttcggtcaacatcctaacattgagcaatttcttcacatcttaaaagggactgtcctggcgtcagattaagagttagtgaactccctattgatcaaataactggaactagtagtaaccagagtcagaattccgagattacaaacacttgttccgtaatcatttcccgttcctccccatagcatcatgaagcccttattcatgttcaattcacctttggaaagcaatggtttctaaatttttagatcacatgtggtaaaaatttttgaacatgtccatcctatgtattctcatttataaattacatatgtattactctattctatgcatcaaaaacacatgcaccaaaaaaa

SEQ ID NO: 260243 - DNA, 228 bp, Homo sapiens
gtctcaaaaaaaaaaaaatagcttatatttccataaagtaaccggcagtacagaaataaacacaagcacagctgtcatggagattggtccccatgtcaataatttttcagttaaagacgtgtaaagccatgttgcattttcagaaccacaggcacaaatggaatctggcctggccctgtgttccagaagaaattaagtttaatgcagccaagtgtggtggcttacgcc

SEQ ID NO: 260244 - DNA, 645 bp, Homo sapiens
cccggctggggcacatggtgtgatcatagctcactgtaacttcacacacctgggcttgagtggttctcccacctcagcttcctgagtagcctaggactacagatgtgtaccaccatgcccagctaattataaaaaaattcttggccaggcacagtggctcatgcctataatcccaatactttgggaggctgaggcaggaagatctcttgagactaggcattcaagactagcctgggcaacatagcaacaccccgtctctattaaaacataataataacaatacaatttatttatttatttatttagttatttatagatggagtcttgctctgtcacccaggctggagtgcatagcctcagcttcccaagtagctgggactataggcacatgccaccaagcccggctaacttttgtatttttagtagaaatggggtttctactaaactcccaacactttgggagggtgaggtgggtgcatcatctgaggtcaggagtttgaaaccagcctggccaacatggggcctctggtttactttacacaattttgcctggcctggggctctcaccctctatccaagtatcttggaagcgttgtacggctaattccgttacctccgcccgctgatttccgcccccccgctccc

SEQ ID NO: 260245 - DNA, 558 bp, Homo sapiens
gctaaaggagtgcttgtaagaaatttttaattgaaaataagtagccaagtgaagaaggggaaaagagtaaggaaagaattcactgcatggaaagcagaaaataatgaaatagaacataggaatttataaataatcccagcactggtactttggacctgaaaataatgaaatagagaaaccattagcttaattgtggtaggttatattattttttcatacctttttttttcccttcatgcccttgttatagttgacagtggttattctttcctgttacactgatgttggccctggtcatatggaaggtgattggtcataacatgacatgtctgaccagaggccttcggtgttcttgtgtaatttttcttggcctcttatactcttgctgtgagaacttttctcaggtagttgctgctttatgtgtgggtcctgaaatgacatacatagaacagactgtaacagtccagctgagccatagccagcctgcagacctgtaagcaataacctcactaataaactaatctaacaagaaaaaaaagggaaaaagcagaaatttca

SEQ ID NO: 260246 - DNA, 6782 bp, Homo sapiens
gttgtcgtaggggcccggtccgtgagggactgctaaggaagaggctgcatggcgcggtagtcccccgagtggaggtcggctgcccctgggaaaccagagagtcggagggagtccatctggagcggccaagtaggtcggggaagggccgcgcctgacgtctggccgcaggtggtgactctcaaaaggaaataggatcatggcagcagatgatgacaatggtgatggaacaagtttatttgatgtcttttctgcttctcctcttaagaacaatgatgaaggctcactggacatatacgctgggttggacagtgctgtttctgacagcgcttccaaatcctgtgtaccatcaagaaattgtttggacttatatgaagagatcctgactgaagaaggaactgcaaaggaggcaacatataatgatttgcaagtagaatatggaaaatgtcaactacaaatgaaagagctgatgaaaaaatttaaagaaatacagacacagaatttcagcttaataaacgaaaaccagtctcttaagaagaatatttcagcacttatcaaaactgccagagtggaaataaaccgcaaggatgaagaaataagtaatcttcaccaaagattgtctgagtttccacattttcgaaataatcataaaactgcaaggacatttgatacagttaaaacaaaagatcttaaatctagatctccacatttggatgattgttcaaagactgatcacagagctaaaagtgatgtttctaaagatgtacatcatagcacttcactgccaaatctggaaaaggaaggaaaaccacattctgataaaaggagtacttcacatttacctacatctgttgagaaacactgcactaatggtgtttggtcacgttctcattatcaggttggcgagggtagctcaaatgaggatagtagaagaggaagaaaagatattagacatagccagtttaacagaggaactgaaagagtacgaaaagacttaagtactggctgtggtgatggtgaaccaaggatattggaggctagtcaaaggctacaaggacatcctgagaaatatggtaaaggtgaaccaaagactgaaagcaaaagttcgaagtttaaaagtaactcagattctgactataaaggtgaacgcattaactcttcttgggagaaagagacccctggagaaaggtcacacagtcgagtagactctcaaagtgacaaaaaactagaaagacaaagtgaaagatcacaaaatataaataggaaagaagttaaatcacaagacaaagaagaaagaaaagttgatcaaaaacctaaatcagtagtaaaggaccaagatcactggagaagatctgaacgagcatcacttcctcattccaagaatgaaataacattttctcataattcaagtaaataccatctagaagagagaagaggatgggaagattgtaaaagagacaagagtgtaaacagtcatagttttcaagatggaagatgtccatcttctctttcaaacagtagaactcacaaaaacattgactctaaggaagttgatgccatgcatcagtgggaaaatacacctttaaaagcagaaagacatagaactgaagataagaggaaaagagaacaagaaagcaaagaagaaaataggcatattagaaatgaaaaaagagtacctacagaacatttgcagaagactaataaggaaactaagaaaaccactactgatttaaagaaacagaatgaaccaaagactgataagggagaagtccttgataatggtgtttctgaaggagcagataataaagagcttgcaatgaaagctgagagtggtccaaatgaaacaaaaaacaaggacctaaaattgagttttatgaaaaaattgaacttaactctttctcctgctaaaaagcaacctgtttcccaggataatcagcataaaataactgatattcccaagtccagtggtgtatgtgattcagagtcttcaatgcaagttaaaacagtggcatatgttccctccataagtgaacatatcttgggggaagcagctgtcagtgaacataccatgggggaaaccaagtcaacgttattggaaccaaaggttgctcttctagcagtgactgaacccaggatcggtatctcagaaaccaacaaggaagacgaaaatagtttgttagttaggtctgttgacaatactatgcattgtgaagagcccatttgtggtacagagacttccttcccatctcctatggaaatacaacagacagaatccttgtttccatcaacaggaatgaaacaaaccattaataatggaagggcagcagctcctgtggtaatggatgtattacaaacagatgtgtctcaaaactttggcttggaattggataccaaaagaaatgataattcagattattgtggtatttctgaaggtatggagatgaaggtggcactttcaacaacagtgagtgaaaccactgaaagcattttgcagccttcaattgaggaagctgatattttgccaataatgctttcagaagataataacccaaaatttgagccttctgttatagttacaccactggttgagagtaagtcgtgtcatctggagccttgcttacctaaagagactctagattcttcacttcagcagactgagttaatggaccacagaatggcaactggtgaaacaaactcagtatatcatgatgatgataactcggttttgagcattgaccttaatcacctgagacctattccagaagccatcagtcctctgaatagtccagtgagacctgtagcaaaagttcttagaaatgaaagcccacctcaagttccagtgtataataacagtcataaagatgtgtttttaccaaattcagctcattctacctctaagagtcagtctgatctcaataaggaaaatcaaaagccaatttacaaatctgacaaatgtacagaagcagacacatgtaagaattcaccattagatgaattagaagaaggagaaattagaagtgatagtgaaacatctaaaccacaagaaagttttgaaaaaaattccaaacgtagagtgtcagctgatgtgcggaagtcaaagactatcccacgacgtgggaaaagtactgtgtgtttagataaagacagtaggaaaacacatgtaagaatccatcagaccaataacaaatggaataaaagacctgataaatctagcagatcttcaaaaacagagaagaaagataaagtgatgagcacttccagcttggaaaaaatagttccaattattgctgtaccctcttctgaacaagagatcatgcacatgttacgaatgataagaaaacatgtaagaaaaaattatatgaaattcaaggcaaaattttcattaatacaatttcacagaattattgagtcagcaattttgagttttacatctttaattaaacatctcaacttacacaaaatctctaagtcagtgactaccttacagaagaatctctgtgatattatagagtctaaacttaagcaagttaaaaagaatggcatagttgatcgtttatttgaacagcaactaccagatatgaaaaaaaaattgtggaagtttgtagatgaccaacttgattatttgtttgcaaagcttaagaaaatcttagtatgtgattccaaaagctttggaagagatagtgatgaaggcaaacttgaaaaaacaagtaaacagaatgcacagtattcaaatagtcagaaaaggagtgtggacaactccaacagagaattgctgaaagaaaaattatcaaaatcagaagaccctgttcattataagtctttagtgggatgtaaaaaatctgaggaaaattatcaagaccaaaataactccagtattaacactgtaaagcatgacattaaaaaaaattttaacatctgctttgataatataaagaactctcaatccgaagagcgctccttggaagtacactgtccaagcaccccaaagtcagaaaaaaacgaaggaagcagcatagaggatgcacagacatcccagcatgcaactttgaagccagaacgaagtttcgagattcttaccgaacagcaagcatcgagccttacttttaatttagtgagtgatgcacaaatgggtgaaatatttaaaagtttgttgcaaggttctgatcttttagacagcagtgttaactgtactgaaaaaagtgagtgggagttaaagactccagagaagcagctgctagagactcttaagtgcgagtctataccagcttgtacaacagaagagctagtttcaggggtggcttctccatgtcctaaaatgattagtgatgataattggtcattattatcatctgaaaaaggtccatctctgtcttcagggctttcattgccggttcatcctgatgtgttggatgaaagttgtatgtttgaagtgtctactaacctacctttaagtaaagataatgtgtgtagtgtagaaaagagcaagccctgcgtttcttccatacttcttgaagatctagcagtctctttaacagtaccatcgcctctgaagtcagatggtcatctcagttttttaaagcctgatatgtcgtccagttcaactcctgaagaagtcattagtgctcattttagtgaagatgccttacttgaggaagaggatgcatctgagcaagatattcatttagctctggagtctgataattcaagcagtaaatcaagttgttcttcttcctggacaagccgatctgttgctccaggctttcagtaccaccctaatctacctatgcatgccgtcataatggaaaagtccaatgatcatttcattgtgaaaatacgacgtgcaacaccatctacctcttctggccttaaacagagtatgatgcctgatgaattattgacatctttgcccagacatggaaaggaagctgatgaaggaccagagaaagaatatatttcatgtcagaacacagtttttaaatctgtggaggaattggaaaactccaacaaaaatgttgatggcagcaagtcaactcatgaagaacagagctctatgatacaaacacaggttcctgatatatatgaatttcttaaagatgcttcagataagatgggtcatagtgatgaagtggctgatgaatgtttcaaattgcatcaagtatgggaaacaaaagtgcctgaaagcattgaagaattgccttcaatggaagaaatctcacactctgttggggaacatcttccaaacacatacgtagatctaacgaaagatccagtcactgaaaccaaaaacttgggggaattcatagaagtaacagttttacatattgatcagttgggatgttctggaggcaatttaaatcagagtgctcaaatattagacaattctttgcaggctgatactgtaggtgcttttattgatttgacacaagatgcttcaagtgaggctaaaagtgaaggtaatcatcctgcattagctgtggaagacttgggatgtggggtgatacaggtagatgaagataattgtaaggaagaaaaggcacaagtggcaaacaggcctttaaaatgcattgttgaggaaacctatatcgacttgaccacagaatctcccagttcatgtgaagtaaaaaaagatgagttaaaatcagagccaggatcaaattgtgataactcggagttgcctgggactttgcataattctcacaaaaagagaagaaacatttctgatctaaatcatcctcataaaaaacaaagaaaggaaacagacttaactaataaggaaaagaccaagaaacctacccaagattcttgtgagaatactgaagctcaccaaaagaaagccagtaagaagaaggcccctcctgtgactaaagatccctcatcattaaaggcaaccccagggattaaggattcatcagcagcacttgccacttctacaagtctttctgcaaaaaatgttattaaaaagaagggagaaattatcattttatggacaagaaatgatgaccgggaaattttattggagtgtcagaaaagagggccatcatttaaaacatttgcatatttagccgccaagttggataaaaatccaaatcaggtctcagaaagattccagcagctaatgaagctctttgaaaagtcaaaatgcagataagttgctgaattcctgggactcttaactgatattgcatactacacagaagcttcaaattcctcatgttttaaatgagcactagagggaggtttatcacctttttggttaccagatgataatctatatttgttattactcagtgactctctaatttcacatcagcatgttcagcttgtgctagtcatcattctgatttgcttatctgtttttggtcaaaatatttatttttaaacatgttagaacttaccaaaatgaaagcaacagtgatgtattgaaatcttagttttgatattttaaagaaatgactttctagattaaaaaaatagttttgtagcattttaaacttagtgactatttagttcaattgttcatccattttttatttgcttttataattgcctccttgttttggtatattgtaaaataatttaaataatgtatttataaatatgtataattatgatgtaaaataccgtgtgtatatgtatgtatgtgtgtttctgtatatgcacacacataaacggctttgcctagccaaggattttttttatctgtataaaactttttgtataaagtttgctttcaataacagtaatgtataataaaaccatgtaaagttttgttgtaaaaaaaaaaa

SEQ ID NO: 260247 - DNA, 7050 bp, Homo sapiens
gttgtcgtaggggcccggtccgtgagggactgctaaggaagaggctgcatggcgcggtagtcccccgagtggaggtcggctgcccctgggaaaccagagagtcggagggagtccatctggagcggccaagtaggtcggggaagggccgcgcctgacgtctggccgcaggtggtgactctcaaaaggaaataggatcatggcagcagatgatgacaatggtgatggaacaagtttatttgatgtcttttctgcttctcctcttaagaacaatgatgaaggctcactggacatatacgctgggttggacagtgctgtttctgacagcgcttccaaatcctgtgtaccatcaagaaattgtttggacttatatgaagagatcctgactgaagaaggaactgcaaaggaggcaacatataatgatttgcaagtagaatatggaaaatgtcaactacaaatgaaagagctgatgaaaaaatttaaagaaatacagacacagaatttcagcttaataaacgaaaaccagtctcttaagaagaatatttcagcacttatcaaaactgccagagtggaaataaaccgcaaggatgaagaaataagtaatcttcaccaaagattgtctgagtttccacattttcgaaataatcataaaactgcaaggacatttgatacagttaaaacaaaagatcttaaatctagatctccacatttggatgattgttcaaagactgatcacagagctaaaagtgatgtttctaaagatgtacatcatagcacttcactgccaaatctggaaaaggaaggaaaaccacattctgataaaaggagtacttcacatttacctacatctgttgagaaacactgcactaatggtgtttggtcacgttctcattatcaggttggcgagggtagctcaaatgaggatagtagaagaggaagaaaagatattagacatagccagtttaacagaggaactgaaagagtacgaaaagacttaagtactggctgtggtgatggtgaaccaaggatattggaggctagtcaaaggctacaaggacatcctgagaaatatggtaaaggtgaaccaaagactgaaagcaaaagttcgaagtttaaaagtaactcagattctgactataaaggtgaacgcattaactcttcttgggagaaagagacccctggagaaaggtcacacagtcgagtagactctcaaagtgacaaaaaactagaaagacaaagtgaaagatcacaaaatataaataggaaagaagttaaatcacaagacaaagaagaaagaaaagttgatcaaaaacctaaatcagtagtaaaggaccaagatcactggagaagatctgaacgagcatcacttcctcattccaagaatgaaataacattttctcataattcaagtaaataccatctagaagagagaagaggatgggaagattgtaaaagagacaagagtgtaaacagtcatagttttcaagatggaagatgtccatcttctctttcaaacagtagaactcacaaaaacattgactctaaggaagttgatgccatgcatcagtgggaaaatacacctttaaaagcagaaagacatagaactgaagataagaggaaaagagaacaagaaagcaaagaagaaaataggcatattagaaatgaaaaaagagtacctacagaacatttgcagaagactaataaggaaactaagaaaaccactactgatttaaagaaacagaatgaaccaaagactgataagggagaagtccttgataatggtgtttctgaaggagcagataataaagagcttgcaatgaaagctgagagtggtccaaatgaaacaaaaaacaaggacctaaaattgagttttatgaaaaaattgaacttaactctttctcctgctaaaaagcaacctgtttcccaggataatcagcataaaataactgatattcccaagtccagtggtgtatgtgattcagagtcttcaatgcaagttaaaacagtggcatatgttccctccataagtgaacatatcttgggggaagcagctgtcagtgaacataccatgggggaaaccaagtcaacgttattggaaccaaaggttgctcttctagcagtgactgaacccaggatcggtatctcagaaaccaacaaggaagacgaaaatagtttgttagttaggtctgttgacaatactatgcattgtgaagagcccatttgtggtacagagacttccttcccatctcctatggaaatacaacagacagaatccttgtttccatcaacaggaatgaaacaaaccattaataatggaagggcagcagctcctgtggtaatggatgtattacaaacagatgtgtctcaaaactttggcttggaattggataccaaaagaaatgataattcagattattgtggtatttctgaaggtatggagatgaaggtggcactttcaacaacagtgagtgaaaccactgaaagcattttgcagccttcaattgaggaagctgatattttgccaataatgctttcagaagataataacccaaaatttgagccttctgttatagttacaccactggttgagagtaagtcgtgtcatctggagccttgcttacctaaagagactctagattcttcacttcagcagactgagttaatggaccacagaatggcaactggtgaaacaaactcagtatatcatgatgatgataactcggttttgagcattgaccttaatcacctgagacctattccagaagccatcagtcctctgaatagtccagtgagacctgtagcaaaagttcttagaaatgaaagcccacctcaagttccagtgtataataacagtcataaagatgtgtttttaccaaattcagctcattctacctctaagagtcagtctgatctcaataaggaaaatcaaaagccaatttacaaatctgacaaatgtacagaagcagacacatgtaagaattcaccattagatgaattagaagaaggagaaattagaagtgatagtgaaacatctaaaccacaagaaagttttgaaaaaaattccaaacgtagagtgtcagctgatgtgcggaagtcaaagactatcccacgacgtgggaaaagtactgtgtgtttagataaagacagtaggaaaacacatgtaagaatccatcagaccaataacaaatggaataaaagacctgataaatctagcagatcttcaaaaacagagaagaaagataaagtgatgagcacttccagcttggaaaaaatagttccaattattgctgtaccctcttctgaacaagagatcatgcacatgttacgaatgataagaaaacatgtaagaaaaaattatatgaaattcaaggcaaaattttcattaatacaatttcacagaattattgagtcagcaattttgagttttacatctttaattaaacatctcaacttacacaaaatctctaagtcagtgactaccttacagaagaatctctgtgatattatagagtctaaacttaagcaagttaaaaagaatggcatagttgatcgtttatttgaacagcaactaccagatatgaaaaaaaaattgtggaagtttgtagatgaccaacttgattatttgtttgcaaagcttaagaaaatcttagtatgtgattccaaaagctttggaagagatagtgatgaaggcaaacttgaaaaaacaagtaaacagaatgcacagtattcaaatagtcagaaaaggagtgtggacaactccaacagagaattgctgaaagaaaaattatcaaaatcagaagaccctgttcattataagtctttagtgggatgtaaaaaatctgaggaaaattatcaagaccaaaataactccagtattaacactgtaaagcatgacattaaaaaaaattttaacatctgctttgataatataaagaactctcaatccgaagagcgctccttggaagtacactgtccaagcaccccaaagtcagaaaaaaacgaaggaagcagcatagaggatgcacagacatcccagcatgcaactttgaagccagaacgaagtttcgagattcttaccgaacagcaagcatcgagccttacttttaatttagtgagtgatgcacaaatgggtgaaatatttaaaagtttgttgcaaggttctgatcttttagacagcagtgttaactgtactgaaaaaagtgagtgggagttaaagactccagagaagcagctgctagagactcttaagtgcgagtctataccagcttgtacaacagaagagctagtttcaggggtggcttctccatgtcctaaaatgattagtgatgataattggtcattattatcatctgaaaaaggtccatctctgtcttcagggctttcattgccggttcatcctgatgtgttggatgaaagttgtatgtttgaagtgtctactaacctacctttaagtaaagataatgtgtgtagtgtagaaaagagcaagccctgcgtttcttccatacttcttgaagatctagcagtctctttaacagtaccatcgcctctgaagtcagatggtcatctcagttttttaaagcctgatatgtcgtccagttcaactcctgaagaagtcattagtgctcattttagtgaagatgccttacttgaggaagaggatgcatctgagcaagatattcatttagctctggagtctgataattcaagcagtaaatcaagttgttcttcttcctggacaagccgatctgttgctccaggctttcagtaccaccctaatctacctatgcatgccgtcataatggaaaagtccaatgatcatttcattgtgaaaatacgacgtgcaacaccatctacctcttctggccttaaacagagtatgatgcctgatgaattattgacatctttgcccagacatggaaaggaagctgatgaaggaccagagaaagaatatatttcatgtcagaacacagtttttaaatctgtggaggaattggaaaactccaacaaaaatgttgatggcagcaagtcaactcatgaagaacagagctctatgatacaaacacaggttcctgatatatatgaatttcttaaagatgcttcagataagatgggtcatagtgatgaagtggctgatgaatgtttcaaattgcatcaagtatgggaaacaaaagtgcctgaaagcattgaagaattgccttcaatggaagaaatctcacactctgttggggaacatcttccaaacacatacgtagatctaacgaaagatccagtcactgaaaccaaaaacttgggggaattcatagaagtaacagttttacatattgatcagttgggatgttctggaggcaatttaaatcagagtgctcaaatattagacaattctttgcaggctgatactgtaggtgcttttattgatttgacacaagatgcttcaagtgaggctaaaagtgaaggtaatcatcctgcattagctgtggaagacttgggatgtggggtgatacaggtagatgaagataattgtaaggaagaaaaggcacaagtggcaaacaggcctttaaaatgcattgttgaggaaacctatatcgacttgaccacagaatctcccagttcatgtgaagtaaaaaaagatgagttaaaatcagagccaggatcaaattgtgataactcggagttgcctgggactttgcataattctcacaaaaagagaagaaacatttctgatctaaatcatcctcataaaaaacaaagaaaggaaacagacttaactaataaggaaaagaccaagaaacctacccaagattcttgtgagaatactgaagctcaccaaaagaaagccagtaagaagaaggcccctcctgtgactaaagatccctcatcattaaaggcaaccccagggattaaggattcatcagcagcacttgccacttctacaagtctttctgcaaaaaatgttattaaaaagaagggagaaattatcattttatggacaagaaatgatgaccgggaaattttattggagtgtcagaaaagagggccatcatttaaaacatttgcatatttagccgccaagttggataaaaatccaaatcaggtctcagaaagattccagcagctaatgaagctctttgaaaagtcaaaatgcaggtagttaatggttacactacaggagactagtaaaataaatgtttgacactgtagttgtgcagttaatggcctgttagtcattgaagatgtgaatagtgggtgagagacatccagttgagttcctgcttcagtcacaggttggaggatgattgctcgagcaggcatctaaggtgacctcatccacagggacgtgctcagagtgaagcctgctgcagttcagatcagcatggcatctctcctcaaccttctgattgctgatgagtctaagataagttgctgaattcctgggactcttaactgatattgcatactacacagaagcttcaaattcctcatgttttaaatgagcactagagggaggtttatcacctttttggttaccagatgataatctatatttgttattactcagtgactctctaatttcacatcagcatgttcagcttgtgctagtcatcattctgatttgcttatctgtttttggtcaaaatatttatttttaaacatgttagaacttaccaaaatgaaagcaacagtgatgtattgaaatcttagttttgatattttaaagaaatgactttctagattaaaaaaatagttttgtagcattttaaacttagtgactatttagttcaattgttcatccattttttatttgcttttataattgcctccttgttttggtatattgtaaaataatttaaataatgtatttataaatatgtataattatgatgtaaaataccgtgtgtatatgtatgtatgtgtgtttctgtatatgcacacacataaacggctttgcctagccaaggattttttttatctgtataaaactttttgtataaagtttgctttcaataacagtaatgtataataaaaccatgtaaagttttgttgtaaaaaaaaaaa

SEQ ID NO: 260248 - DNA, 235 bp, Homo sapiens
ttactcactgtgtgacctctgcccagcctgagaatgggcctcagacaccttgcactgccagtgcctaaagcctggtggctggtgagcgctcaacacggttgacatgaacattcaaatctcagggatcatctagataactcagtgttcaacatgatcttaatttctgtgttttccaatcaagttaataaatatctgtcttcgtaccaggaaaaattcaatattattttaaaggaga

SEQ ID NO: 260249 - DNA, 639 bp, Homo sapiens
tgctttgggaggccgaggtgggcggatcacttgaggtcaggagctcaagaccagcctggccaatatgatgaaaccccgtctctactaaaaatacaaaaactagccgtgcatggtggcgcgtgcctgtaatcccagctactcgggaggctgaggcagtaggatcacttggcagtaggttggcagaggttgcagtaaactgagattgcaccactgcactccagcctgggggacagagcaagaccctgtctcaaaaaaaaaaaaaaacaataaaaagtatgatcctccctttcataaagtccaattagggaagaaaaggcataataattgtaattaatataggcagtgaaaagtgccagcccagagggacagcttaggtgctgctgggaaggttcagataaggaagaaattacttccagcttttggaatgaacatattaagatggcaatatttagacagatgaaatggacatctcgacagaggagtcgatgtgaataaatacacagaggtgggaaagtggaaggtattgataaagagaaagaaatacttgagtgtgtgtgtgtgtgtgtgtgtgtgtgtgtgtacatgtagggggtacttggtggaacagtagtaggaactgtaaccagaaaatgggagagt

SEQ ID NO: 260250 - DNA, 260 bp, Homo sapiens
aaggtatggaaatgtagtccctcaggagagcagctggatgccctggggctgagggaaatctcctgggacacccttaacctaaaaagataaccccttgggacataaggattttatttcttcaaagctagttttcatcccttggagacacattgctggtcagccaatcgtttgctggtattgaggggaaacagtcacaaatgattcctgccccctagattcattcagatttgtgaagggagaaaaactcccaaaggacctga

SEQ ID NO: 260251 - DNA, 872 bp, Homo sapiens
attctaaagtcaaagaaaacttcaaacttatgtgaatatttaaaatcctaaaattgtgctcccggaaacagagttgtagcaataaaagaaacctttctagtcttgtttagagcttgtatactccagtagtttgtaaactgtcatttacagagccctattcctcagggatctgggggcatagggttgggaagcagggggtgccaggccatgcaaacctagtttcacccagagtatttcttctttcacatatttatacatgagccttttgaataaaattgtattgaaaatagttttgccattaaatcagtttgaaaaacactagtataaccttcagactacctctataaccttggtaactctgggcctccaattcctggtctgtaaaataagagaatggtgctatgatgcttatgtttttattttgaaccctcacctactttcaagtgaaaaaaaaaaaagaccccaagagaggctaagtggtttacccaggccacacagagttaatgacagaaccaagacaagaattgaaccaccaactttagttgtttttcctctctcacatcctttttttaaaaactcctacaaagtagatataaacaaactatgaaattatatggaaaaggtatatctatcatgaggtatataagccgcatgtaaaaatagaactataccgtatcataaatttgccttatttaagtctcgtgtgctagatgtaacatacattaattgaacattaacctaattttatattcattcttcaagtttataaaaatatttgggggaattgtttgcatagcccctttctcttttacaaagctatctatgagttgttttcttccttataaatttccacataatcagtggaagcattt

SEQ ID NO: 260252 - DNA, 531 bp, Homo sapiens
agtcaacaaaagtagagggtctcatctagcctgctgcagccatctcatgccatcacatccactgtggctagagcttagattctgctgaagtaaggaccagctaacattgaccatctcacctgactcgggagagaagaatctgttggaatttgatcacaagtgtgtgctgtcagatcgtcctagttcgggacacttttgtgtaaccagattttaaaaaccattttacgttattcatgcccttgatctttcaagctgtggaacatcaatttcctcctcttcactttcaccactgttcacaaaagtaggtaaacggtggccccttttcccctcccagtttctttgattctgtggacttgtgctgatagccactagagggtgtaccaggggtctctggagtctgggtctcttacagatggatttgaaaagtcaaaagtcaatcattgcagagccctcagaggtgaagagccagactgcagtgcagatgcaggaacagaattttagagctggaattaatcaaggagaattaccaca

SEQ ID NO: 260253 - DNA, 417 bp, Homo sapiens
agcatgtccaaacccattgcaagtaagctaaaaaccttgataaaaggttatatggaaggctaactaggataaacagtgtagagaagaccttaaatggagctaaaaaccatggcacaagaacttcgtgatgcatacataagcttcaatacctgatttcatcaagtggaagaaagagtatcagtgattgaagatcaaattaatgaaatgaagtgagaagaaaaggttagagaagaaaagagtaaaaagaaatgaacaaaacctccaagaaatacaggactatgtgaaaagaccaaatctatgtttaatagatatatctgaaagtgatggggagaatggatccaagttgaaaaacgctcttcaggatattatccaggacaacttccccaacctagcaaagcaggccaacattcaaattca

SEQ ID NO: 260254 - DNA, 680 bp, Homo sapiens
actataggtatttgtggtggcaaggagggttggtggggattttctacttgccttttctcagcaatgggaaggccctcctgaccccaggcaaatctgatccaggcagaggatatggggctccacgttgccctcctgaacttccaatcaccacgggtgcatctctactcccctgctgtatgtcagcactctcccttagctgtttattaattgccttggttcttgtttggggtggtgaatgccaggtgtctctagttagccatctttcttccataattcataatctgaagcatttttttttgttttggggtcttagcacatttgcacattgattttggtacagttgtaaatccctgcctagagtagggccaggttcatgaacatagtcaccatgtcactatgatttattgcatgtttcccaattgctaggcattgtgctgagggcttcattttctctacagaaagtgtaacaaatttcagagctacagagctgaagttaggcaccatgagttcaaatccttgctccttcttccactaactcttttctatagagataaactaatatgacaggtgacttctattgtgtaatccactgtgccagctgtaggttaaatgcttccatacatcccttatttgtgaaacaccttcatcaagtatgtggcattttcatttccattttatag

SEQ ID NO: 260255 - DNA, 663 bp, Homo sapiens
cagtgttcaaggctcccgaggtctgtctgcccagtctcagctctctttacatgtgtatccccagtcctctactctccccaacgtcggggacactgtacacatcacccccctcgatggggttctagcatttcattctatgacccacttccttctccttctcttcttccctccacaagcattcatggattgcctgctgtttgctaggcactggtgaaattgtgacaatcaaagaagaaatagtccctgaccacatggggcttatactccaaaacgagttttctctatggacatgttgagaacactgttgatgtgttgggttgggtcattttttgttatggggatctgtcctgtgcatggtaggctgcttggcagcatccctgccttctgtccaataaatgtcagtagtatactccctcctcagttgtgacaatgaaaaatgtcttcagatattgccagttgccctgtgggggccaaaatcatccctggctgaaaaccatttttctcatcagatgctaaattaactgcaccaataatcattttattacaactagttgcagagagagagaaaggcagggcttgaaaatgcagaacaaggggcctgctgtggtctggaggggagtgcaggagtggggaaggtcagggaaacttcccagaagaggcaca

SEQ ID NO: 260256 - DNA, 677 bp, Homo sapiens
gaaacatagagctgcatctctaatggaagttttagtacaagtttatatatttctttggtgtggcttcataacaaataatatgaagcaatcagactaatttaggctgctttttgacccacattctttgactttacaagatagttcttatactttactcaagttttttccttttaccacaaaactgttttgttggttattaccaaggaatgacctgtgttgaataattatgatttaagggttctgctgagacatttttgcaattttaaattgctaaaatctgaacacctacttttataatccactcaccttcatgtggattctattctattttgctacatattgaaatagaccacattaaaaggttaagagtcttccctgtttctttgtggtggtcactgataaggacacctgtatttcatatggtcaatgaaagcagtaaatgaagttcagttctggaaaggccatctcactgatgatttatgatatctggaagcacggagtccctaatttaggtcaaaacattagtgaaatttttaccactgtaaccaaaaatttattttctaatattcttttttagctttgaaagtcattacaaagatgcttacttgacaaaaagtggcaagaggacatcattttatattttaagagaagattaggttgctaattatcttgaagag

SEQ ID NO: 260257 - DNA, 366 bp, Homo sapiens
cgggacaaatctgacccagggaccgccccccccatcttcaggatccagggccctagagctctgggtggggggcagtgctaaggaagtccaggggtcctggaagaagcatggtctttagcctaaactaaacctgggagtgaatcccggccctgtcatttggggctccctgaatgccatatcccatctttctgaactcgtttcttcacacgtcttggggatgatgctgactttcatgctgatgcataggtgaggggatcaccttggctcataacccttaaccttgtagctgagcagctttgcttcaaaatgcattctgaaacttttttttgctttctcttttcttactagtctcaagcagactgcaga

SEQ ID NO: 260258 - DNA, 653 bp, Homo sapiens
caaatctttcctgacgtggttttgaaaccccacccttcgaactttcaaattatatattactgaaacagtcatgcagtcccgctggagactggatccaggttctgccactaactagctgtgtaaccagtcataatttaattaatcataccagcttggcaaatctttaacaatttagtttatcatctatgtcctttagtttcttttcatggaatgtgaatttacagacatacctcagaagtattgcgggttcagatccccaccactgcaataaagcaaatatcacagtaaggtgaatcacatgaatttcttggtttcccaatgcaaataaaagttatttttccactatactgcagtctattaagtgtacaataagattatgtctgagaaaataacagaaatactttaattaaaaatatcttaatgctagaaaatgctaatgatcatctgagccttcagggagtcataatcttttagctggtacaggccttgcctcaatattgatggctgctgaataatcagggtggtgtttgctaaaggttgtgatggctgtgacaatttcttaaaataagacaacaatgatgtttgcctcgtcaattgactgtttcttttacaaaagactcctctgtagcatgtgatgctgtttgatagcattt

SEQ ID NO: 260259 - DNA, 1944 bp, Homo sapiens
aacattttctggaattatttttccctaatatttttgatcctttgctgatgaaatccatggatatggaaaccacaggtacagaacccatgggtatggagggctgactgtattttttcttcattgtagggggttaattaatgccccagttgtgtcattctcatgcagagttagagaaaatggacaaagatatttcaaagcaaagaagtctagtaatgttacagaagatctggcagcacttgtcttccttgatggcttctttggatggcatccttcatttactgcgacagccgttcttcgcctttcaaacacttcagaattccctgacagattcctacaaagattccttcagctagggtggagcctgatgtttggttttctggggttcccgtggaatttcactgcacatctggaggcttatgccctggggagcatccagtacttctcccccaagctgggtgccaggcctcaggcagctggattcacccaggagcagattggacaagccatccatttacttgttcactaactatccagcactctggatgttgcaggcactgttctaggtgctagggaacaccctagtgtatgtatctgaccatgtacccgtgctctttttttttttttgacacagtcttgctctgtcgcccaggctggagtgcagtggcaccatctcggctcactgcaacctctgccttcaggttcaagcaattcttatgccccagcctcccgagtggctgggactacaggtgtgcaccaccacatccggctaatctttgtatttttagtagaggtggggtttcaccatgttggccaggctggtcttgaactcctgacctcaatcaatctgccaccttggcctcccaaagtggtgggattactggcacaagctaccactcccagcctacccgtgttcttatatctgatcatttctgtctgagtgtgtgtcatctattatttggtatttttgtttgtttgtttcttgaatttcttttattcagttaaagagatttcatcatcctataagacccctcaggtgtgagggggagcagagagagctggagaaacaaaacacattagccctgtggaaaatcacatgatttctaagaaagtaatggttatgattcttaggctttctctataggaagtgtttcattgtcattgttttgttaggttggtcagctcagaggtgctgaaggcagtgcttacatttttgcagcaggtatatatcgcagtgtggattgaaccaggggcttcctgctggccttgtattcttagtttgttaaagcaaatggcctctccaagtcacttcccactgaaactaaatcccagaggaagcggaatgaacatggttagaaaccacaccaggaacccacagaatacccacaccaggcttgatggattgctgtgaaacagacctggcagggacccatcaggacaggctatggctttctggaggcaatagtgtattctcccagccttactaaggctgttagctgcccctaaggtctttggagtagatgccccatttggtaggtgttccttggaatccgtagctctggcagccacaagtcacaaagggaggagcaaatcaagggacattacagagcaggaactatgtggaaagggatgaaaaaccaaaccggccccttccaagtctgcagccacccacccatcattttaaaatgagtggactcaggcacagcaaaatgaaaggaaagtcagcagacccaggacttaaacccaagaatcctcatgtctagtgcagtgcttttcccgtcctgtccacggaggagaagcctcttccacaacccatggaaccatctcaacagtttgagaaactgaggctcaatatttttcttcacccaaatagctggaccgttgattctggaaactgtgttacctgtttgtctccctgcagcataatataactgtgtgtgtacattc

SEQ ID NO: 260260 - DNA, 229 bp, Homo sapiens
ttcctgtttttttaaacttttccgtaattccatcttctatgagttactgaatcattttttctacccttactgataagaatacaaacaaaatatctgtttcataaaaatgaatccgtatttcaaatttgaaagccacatttacttttcctttaaaactacatgaactactttcagatctcttatctgtgccagccagcttgttgtttaccttctcacaaatgtgcctgag

SEQ ID NO: 260261 - DNA, 2290 bp, Homo sapiens
gaattccctcttaactcttgaagtaaataaataatctttgctggcaggactatgctgaatctccttaggcactctctaattagatgtcctaggtcctcccaattcttagtccttttatacctgtttttctccttctcttattccatttagtttttcaattcatacaaaactgtatccaggccatcacctatcattctatacaacaaatgtttcttctaacatccccacaatatcaccccttaccacaagacctcccttcagcttaatctctcccactctaggttcccacgctgcccctaatcccgcttgaagcagccctgagaaacatcgcccattctctctccataccaccccccaaaaattttcgccaccccaacacttcaacactattttatttttcttattaatataagaaggcaggcatgtcaggcctctgagcccaagccaagccatcgcaacccctgtgacttgcacctatacgcccagatggcctgaagtaactgaagaatcacaaaagaagtgaatatgccttgccccaccttaactgatgacattccaccacaaaagaagtgtaaatggccggtccttgccttaactgatgacattaccttgtgaaagtcctcttcctggctcatcctggctcaaaaagcacccccactgagcaccttgagacccccactcctgcccgccagagaacaaaccccctttgactgtaattttcctttacctacccaaatcctataaaacggccccacccttatctcccttcactgactctcttttcggactcagcccgcctgcacccaggtgaaataaacagctttattgctcacacaaagcctgtttggtggtctcttcacacggacgcacatgaaatttagttgtatccataaggcatatggaggagactaattcctcttccaaagacatgtaccagagtcctggagaggctgagggctggaggtggaagaaaggctctgacaggggtcagaatctgttcaggaaacatagcaaatgcctgatacttttaattagagaaaggtttgaatctccacattcatatatttgcagtccagtgacctttcagtttttttatgcccaaagtgtcaagcatgttaatgttaccattgactgcctccctgaaggtgcagctaccaggggaactgccaggacttcaaagcccacaaccaaaagccagaaaacactaccaagtacaagccccggacactggacccagagcacaccctgggcatctgctctgagatcctctccctggacagagacagctgctccttcagaaacagaggagaccctgaacacaggcaggcctcctgagcttccagccagggccacagccacatggttcagtgcctcccacactctcccagccttggctaccaggagggtggccagaactcagtggttgacagctgacagacagacgtgggcttccatatcgtccgtgccctgggctcagaccatcagtgagaaaaaacctggagggtctctctgggaaactcgttcttccccaccgactactgcagggaccgaggaagccatgaacactacaagccttttggcgcctgctgctgagataatggccacacctggcagcccatcccaggccagccctacctcgggagcattcacccatggcacacagactccgagtccaaccaaggcaacagcccccagatatccacaaacaggtgatctctctgcagagtggccattcactgctggtgaagagccagtcctggtcccaagaccccatcaagtttcaaggtgtcctcagccactcttcaaggtgggagctatggcagctgctcctctcaccctggctattcagaggctcaacccatgcctgatggagctgtgccaattcttccagcaatgcctctgcatgagccagaggagtcccaggacagaggacatgagatactgtcttgaatactattcctggtttctgaagaatgcaacatatatctgtcagagggtgaaaagggtgtcccactcgcacaccttaaagcaaaagtgccttgagaatatctgcaagtctgtgtgaggccttgaaaataacactagggcataacaattacttcaggggatacgccatccaccctggctcttgtcccaagtgggctacatttgaagaattcacccaggctccagctagatcatcagttaatttaaagtggttattcttggaagtagcattttttttccctctcctgtgaatctgtgcaaaacattgaaggtagaagttttcttgttaaaaaaaaaggaattc

SEQ ID NO: 260262 - DNA, 706 bp, Homo sapiens
caccgtggtagccaagacagtcttgacctcctaacctcgtgatccacccacctcgtcctcccaaagtgctaggattacaggcatgagccaccgcatgcggcctccataaactttttttaaacatcaatgatttgaccattgttccactcaaacattaccataaatttgatgttcattcttgcttcaattttagcagaattcatgttactgagagaggtgctcctttcaaactgatgtcttgcccttcttagtgcctcaaactagatgcccttcagacatgttataacaagttagtatgagttttttttggtgcaaacatcttttaaatcaatgcatagtttttttgtaatatgcattttctatgaaatttttgaggtcccctcataattatctcatggcatctttctatcttaatgaactaggaggtttgtgagtgtgagacctatgacttacagtccaaatgttccctttgtgattagtacaacacctggcacattataagcattataatattttcagagaataaagagtttagcttaaaaatatatcttttttcctttgataacaagcatttactctaaaaaagaaatgtgttccctcctgacattgaaatggtgttttgttgaagcagcagccagttgagaaatacaaaaagtgggtaacatcttcattttgatgtgtgtatgtctgtagtaaattgtcattt

SEQ ID NO: 260263 - DNA, 431 bp, Homo sapiens
agcactataggatgactatagttaatgatatattagtttcaaatagttagaaggatactgagtgttcccaacacaaaagaatgataaatgttttaagatgacggatatgttaattaccctgatctgatcactatacatggtgtgtatagaaacatcactatgtaccctataaatatgtaaattattatgtgttagttaaaaaacaacaataaatatttagtaaagatgatatggttttgttgtgttcccacccaaaatctcatcttgaattgtaatctccataatccttataatccctgagtgtcaaggatgggaccaggtggaagtaattggaacatggggatggtttcccccatgctgttctctttatagagagtgagttcttatgagatctgatggttttataagtgtctggcatttcccctgcttgc

SEQ ID NO: 260264 - DNA, 384 bp, Homo sapiens
agcctcccaaagtgctaggattacaggcatgagccacttgcctggacaagaccctgtctaaaaaaaaaaaaaaagacaaagttgcagtcagtttggagccccccatgcttcctgtagtggatgatgagacctctgcttttttgctacacatgatgtgatctaatataaatcacatagtcgttctgcattaatttttttcacttgtacatttcagtaataatgtgattgaagaatgctacccttttgtgtctgcggccaaattgatttttgacaagggtgccaggaccattcaatggggaaaggatggtctctcaataaatagtattgggaaaactggatatccacgtgaaaagaatgaagttggagctgaggagtgggagagga

SEQ ID NO: 260265 - DNA, 401 bp, Homo sapiens
ttaatgctgaattataattgtatttctctagaaaccaatatgcaatgcttgtcaaccctgtgggagtgttttcagtcaaggttttctagtttctgagtcctcaccaacaaacctgttaggtggagatgtgttatacaatgtaaagagagaagcatttttatttccctggccttagacttcctcctttccctaatggaaattcatcttgattttaaatcctctgaagaggaagcaacccttaaagatgtctcaactcatctcccagcctcacatgccaatgagattgaattgctactgtgtgtggagcctgtagttattgcctggaaaagaataaatctttcctgatagtagctcagtatgccctctcacaaaatgcagagcaagaaattaaacctgagaaa

SEQ ID NO: 260266 - DNA, 396 bp, Homo sapiens
cacatgactacaaaatgtgttacatgcattaaaggaagtaacataatatataacagaacacaaaggtaagggcaaataatcttaggaagatcagggaaagcctcacagaggacaattgagatagttcttgaaggataagcaggtgatccccaggataagcggagtaagggaattcacggcagaggaacaacatgcacaaaggcaaaaaagaagaaaatcataaggtgggtgcaaagaattaattatgacaacaaaagcttatagccactgaacacttcctatgttacaggaactgtactgagtgctctatatacatcatctcacttcatccactcagcaaaatagaattatcttcacttttcaaataaggaaactgaggcttagcaaagttaaaaa

SEQ ID NO: 260267 - DNA, 470 bp, Homo sapiens
gacatgctttttaaaattcaccgtcttagcagcaatttgagtttgctcgatgattttatttttgcagggtgacttggagtggattcactgtctttgtaatgaatgcccttgcagttattttttatggttgtaataactcaatatgaatttaaaaaccttttctcaggaaaacacttttgtgttacatgtattataaattttgttctgttaatatttttttgtcaaacaattgtgtgtatatgtgtatgtgtgacacagagagagagagggagagagagagagatgtacatgtacttataagctggaaggacatgtatcaaaataacaaagagttacctctggttattacccccaaccctttttcatataaaaattaattattattcagtgcttcctttagtggttaaatacaacttcagtgcttttttttttcatctttgtatatttttgtattctctacaatataaaag

SEQ ID NO: 260268 - DNA, 836 bp, Homo sapiens
gggcagggcccccagggaggacagccacgggagctcaggcagcgtccccgccggcacctgcctctttgtgcagcggcagtcagggccctcggcaatgagctgaactcgcagtgcggttacgagggcaaatatgctccttgagggccggcgaaactcagcagcccgaggaaggctactgatgtgcatttcatagccggctgcgaatttaggaaaacagactttgcttctcgtcactcagcctacgtgaccaggttcagacacagtctgcagccgcccgcctcgcacccccactctgcagtgcggtatgtggggagctcagggcacagcaggccaggcctccccgtggacgtccaggaaccagaaccaaactgcccagggccccagaggggaagatgtctcagcagacggacagccgaggctcacatggcaagctctggcagcctgtcggtcccaggagagagggggagatggcagacgggaaaagaagccacctgctgggatgctgagactcgcttgcaggagcttttggaactggctgaggtcacagctggaaccactgtggccagctggagtctgcacagcccgagtttccaccccagggtcccagtaactccgcccaaatgtgcacacgagacctatgaggagacataactttccagaacccccttttcttccaccagccacttactcatccaagaacccacccccgaaccttccctaatagaaacactgcattaaagccagcgcggggagacagacgtgaactgcgcccctgtctccttgtgggttggcctagaataaaagcttttcttttctcaaaaaaaaatggtgtcata

SEQ ID NO: 260269 - DNA, 444 bp, Homo sapiens
gcttgaaatgcatatgcatagtactttccattagttacagaaaatgccaatattctttacttgaaaatgggacaaggaaagcaacagagtttgagggcctaaatcccacttatgccagccctgagtacttcctatatgcttgtggtcaagcccagcctcatctctcccagcttctcttcacacactggaagcctcacccaatccaaaccctgccaccctaccctttctcacttctgtgagcagctaggtggccgagtggtgagcgtgtcctaaatattcatccagagccgagtttgaattctggctctgcaatttattgtcactagtataacctcgggcatgtctataataatacctacctatgaggattgtcatgaggtttcaatgaaatcatgtatatgatgtgtttaacatagtgcctggcccataatacgcacttaaagt

SEQ ID NO: 260270 - DNA, 413 bp, Homo sapiens
ttcccatgcctatttacttctctacatactagaatatagtacccccgttgtcccgttttctctttcaaagcctctcttgcaactaggagtatccagcatatgaggggaatctgctgagacaatctgggaaagacttacctcactgacaagaagaaagcacttttcaaaacaggctgtttctacctgaatatgattgtgaggaagcatgatgtctagagcttgcagccatgataggggtaccaaacgagctgcagagacagtgatccagagccctgacattgtgaagctgctgaactaaccagccctgggctcacccacctctagaattcttgtaagataattacatgtccagagctttttcaagcacccatatctgtaaaaaaaagtttttaaataaagtttcttttgttgta

SEQ ID NO: 260271 - DNA, 527 bp, Homo sapiens
cactgtgaccttgaccaagtacattccattgtggacctccgatacaatgacggagttggaacagaccactctgcttattttaagtaaccaaatcattttcggaaaagaaaaaagatcttatggaaaaaccccgtacataaaagagataatagcagtactgccttcccttggccatctgaccgctctaacatccttctgcagaaccttaggctctgaagagtttgtagacttccagcaaggaccacgcatgcgcaagacagcaagtccggcgcatctgagagcagcagaacagggccacgcgaaaagctccttcggatctaccagaaagctccttccttggcatttgggagaagagtgggtcataataaaatgtccggtttctttggaaaagttatattccagtctcaaactattaccttttgaaaggacatttattagagttttttctcattataacagtaatatacgttcattgtagactctttggacagtatgggaaagtataaagaagacatctaaaaaccgta

SEQ ID NO: 260272 - DNA, 474 bp, Homo sapiens
caggatgccgctgatggagtacgacgagccggccgaatccgtgctcaccgaggacacctgcgtcacggagccagtggacactgcgcggagaaagacgggcggtcagggccgcagagggctgagggcggcggaccggctgtcaccgcacaaccttaggctctgaagagtttgtagacttccagcaaggaccacgcatgcgcaagacagcaagtccggcgcatctgagagcagcagaacagggccacgcgaaaagctccttcggatctaccagaaagctccttccttggcatttgggagaagagtgggtcataataaaatgtccggtttctttggaaaagttatattccagtctcaaactattaccttttgaaaggacatttattagagttttttctcattataacagtaatatacgttcattgtagactctttggacagtatgggaaagtataaagaagacatctaaaaaccgta

SEQ ID NO: 260273 - DNA, 523 bp, Homo sapiens
ctcaacggccaaacgtgtgtcccagaacaacatctgaggcggctaagagctcaaaagggctccaggagaacaagcacaagggtcagttgttgtccaagcgtgagcaactttcattcacgccctgctatacgctagatgctagtatgtagtctttaataatgatagaggaagatagagtgtctgatcttgagaagccagtaaatcgctaaggtagcatatcgggaaatagccacttcaatcctggctggaaagtagagagcaaaggccaggagagaggagtgtactaggaaggtaaacaagcacagatggtagaaaaaattatactgcacgcagaggaatgtggacttcattccacataagtgagtaacatcatgtaccaataagaagagaaactgggtggctggaaacatgaatataatggaaagttttcatttgtatacttaagctttttgaattttgaactgtgaaaagtattacttgttcaaaaaattcaaaaataaaattatttaaaaatccaatgcaa

SEQ ID NO: 260274 - DNA, 2604 bp, Homo sapiens
  misc_feature (387)..(387): n is a, c, g, or t
  misc_feature (2597)..(2603): n is a, c, g, or t
attctctttcctgtgaacctccagaacaatttgcttgaacttctcttgtagaacaaaccttattccagcatctatcagagacaataagggtcttagaatctagaaaacagggtcctgggagggcacagttcccacacgtctatttcttccacaggacctgcacgctgccttgctgttggagatctgtgcagtaggcagttgtggaattaaaagcaacaccccatgtcgctgaatgttcagggatcacaggccactgccgtttcccacccactcccagcctccggggagtcttagcctgtggagtcccaggaagcacatggaaaagagagccttggaaccagagtggagtgacagctaaggggtgctggaggcccctgtgaccttgancatgcacaatgcccagaccagctccgactttttcctctccttcacatatttaaatggagtcgatattggggtcagcttcatgcacggagccttcttcagctttagaggtgaacagccccccctcccagcccccccagcccgtcgtccctgctaagcccgtgcaatgcgtccatcatgtgtccactcaacccagctgcccaggacggggcaagatgtccaagctgctgaacccagaggagatgacctcgagagattattacttcgactcctatgcccactttgggatccacgaggaaatgctgaaggatgaggtgcggactctcacttaccggaactccatgtaccacaacaagcacgtgttcaaggacaaagtggtactggatgtggggagtggtactgggatcctttccatgttcgctgccaaggcaggggccaagaaggtgtttggggtgccctcacccttcctcaaggcgtggccagaggcgtcagaaactccctcagtgcccctttgcgagtacttctcaagggaatggtccctgcccgaggcctgggggtagtctgaggggcccccaagtgtggagatcgaatgctccagtatttctgactactcagagaagatcattaaggccaaccacttggacaacatcatcaccatatttaagggtaaagtggaagaggtggagctgcctgtggagaaggtggacatcatcatcagcgagtggatgggctactgtctgttctatgagtccatgctcaacacggtgatctttgccagggacaagtggctgaaacctggagggcttatgtttccagaccgggcagctttgtacgtggtagcgattgaagacagacagtacaaggacttcaaaatccactggctactgggaaataaatggccagcagaaagaagaaaaaaaaatctaatcccttgggtgatctgtgctctgaatgattgaaggtggggcagtccagctgaggagataagacccaaattaacccatataaagggtgggagaatgtctatggctttgacatgacctgcatccgggacgtggccatgaaggagcctctagtggacatcgtggatccaaagcaagtggtgaccaatgcctgtttgataaagatacagcgcaacgactacgtccacgccctggtcacctattttaatattgaatttaccaagtgccacaagaaaatggggttttccacagcccctgatgctccctacacccactggaagcagaccgtcttctacttggaagattacctcactgtccggaggggggaggaaatctacgggaccatatccatgaagccaaatgccaaaaatgtgcgagacctcgatttcacagtagacttggattttaagggacagctgtgtgaaacatctgtatctaatgactacaaaatgcgttagcacacgtgggaagctgcagagagcaacgagaaaaggaactctcacctcgatctgccgtgccgtcccaaagaataccgtttgcaggactacacacttgaaaaccagagttttcaactctgccttgaagattggtgaactccccagggctcccgtgggctctgccactggacagaaggcctccagctcctccgctctgccctggtagcccttcacgaaggctttgtgttgccaacaaagagcgacctggcgtgctgtggctgggccccgagggtggaaacgtattcgcgtctccccgtctcctccttaactgtgactctccgggtcttctgagttttgcatgctgcgggtgtctaggacagattgcttccactagaacctggagacatagcatctttgatagcataagccagattatctgtgtgtgcggtggtgtgcgtgtgcgtgcatgtgtgaatgtgagcagcatagttgatatttacccacaaacacctgtatatgcgtgcatatacaaccaagtgggtagacctaggtgttctctcagaggggtgtgtgtgtgtgtgcgtgcgcgtgtgcctagaatatatattactctcagaggagattctgttgcttttgaataggaatttgttttgtgattagttcgccccttccccaccccttaccagatgttaagcagctatgaaacattctctgtactagttctggtctccttttgactggactgtggctctgaaccttgagcatagtaccacggactccgtgggcgctcaataaacacacatgagaacaaaannnnnnna

SEQ ID NO: 260275 - DNA, 365 bp, Homo sapiens
gatggctcagctgctgtctgtgggcttcacttccactcatgacatccagagtttcctctggttccagcccattttatgcaaggattccactttcttcatgagagcctaaaatgtgtcaatctagtgtaaacactttcccttctgcacagaggagaatctggctactgggaaataaatggccagcagaaagaagaaaaaaaaatctaatcccttgggtgatctgtgctctgaatgattgaaggtggggcagtccagctgaggagataagacccaaattaacccatataaaggtaactaaaacaccaggcattgcaaaacagtgcaggcattaaatgtttgggaatgaatctcaattcaaaaaacat

SEQ ID NO: 260276 - DNA, 2375 bp, Homo sapiens
  misc_feature (2368)..(2374): n is a, c, g, or t
agttggcggctgcctccggccggccggactttgcgagcagcctggagaggatccgcgaccgccgccgccgccgccgcggaggcttcggggctgcttccctcgagcttagcccgcagcgcgggtggagaggggcggggagggggtcgggggcacgagaagaacttgaaaccgtgtgaaggaatccggagcagatgagaagggaggaaaataaaagaaagtggagactgcagaacagactccgctgtggctgactgtgccggccgacgctccagctgaggggctgggttggatttttttttttctcccatcctctcgctctctcttttaaagcgacaccagctctctctcctcctctactatctcggtatcaccaaacccttgccggctcttatgggcatgaaacactcctcccgctgcctgctcctgaggaggaaaatggcggagaacgcggccgagagcaccgaggtgaacagccccccctcccagcccccccagcccgtcgtccctgctaagcccgtgcaatgcgtccatcatgtgtccactcaacccagctgcccaggacggggcaagatgtccaagctgctgaacccagaggagatgacctcgagagattattacttcgactcctatgcccactttgggatccacgaggaaatgctgaaggatgaggtgcggactctcacttaccggaactccatgtaccacaacaagcacgtgttcaaggacaaagtggtactggatgtggggagtggtactgggatcctttccatgttcgctgccaaggcaggggccaagaaggtgtttgggatcgaatgctccagtatttctgactactcagagaagatcattaaggccaaccacttggacaacatcatcaccatatttaagggtaaagtggaagaggtggagctgcctgtggagaaggtggacatcatcatcagcgagtggatgggctactgtctgttctatgagtccatgctcaacacggtgatctttgccagggacaagtggctgaaacctggagggcttatgtttccagaccgggcagctttgtacgtggtagcgattgaagacagacagtacaaggacttcaaaatccactggtgggagaatgtctatggctttgacatgacctgcatccgggacgtggccatgaaggagcctctagtggacatcgtggatccaaagcaagtggtgaccaatgcctgtttgataaaggaggtggacatttacacagtgaagacggaagagctatcgttcacatctgcattctgcctgcagatacagcgcaacgactacgtccacgccctggtcacctattttaatattgaatttaccaagtgccacaagaaaatggggttttccacagcccctgatgctccctacacccactggaagcagaccgtcttctacttggaagattacctcactgtccggaggggggaggaaatctacgggaccatatccatgaagccaaatgccaaaaatgtgcgagacctcgatttcacagtagacttggattttaagggacagctgtgtgaaacatctgtatctaatgactacaaaatgcgttagcacacgtgggaagctgcagagagcaacgagaaaaggaactctcacctcgatctgccgtgccgtcccaaagaataccgtttgcaggactacacacttgaaaaccagagttttcaactctgccttgaagattggtgaactccccagggctcccgtgggctctgccactggacagaaggcctccagctcctccgctctgccctggtagcccttcacgaaggctttgtgttgccaacaaagagcgacctggcgtgctgtggctgggccccgagggtggaaacgtattcgcgtctccccgtctcctccttaactgtgactctccgggtcttctgagttttgcatgctgcgggtgtctaggacagattgcttccactagaacctggagacatagcatctttgatagcataagccagattatctgtgtgtgcggtggtgtgcgtgtgcgtgcatgtgtgaatgtgagcagcatagttgatatttacccacaaacacctgtatatgcgtgcatatacaaccaagtgggtagacctaggtgttctctcagaggggtgtgtgtgtgtgtgcgtgcgcgtgtgcctagaatatatattactctcagaggagattctgttgcttttgaataggaatttgttttgtgattagttcgccccttccccaccccttaccagatgttaagcagctatgaaacattctctgtactagttctggtctccttttgactggactgtggctctgaaccttgagcatagtaccacggactccgtgggcgctcaataaacacacatgagaacaaaannnnnnna

SEQ ID NO: 260277 - DNA, 7931 bp, Homo sapiens
cgaggccgccgccgtcgcctccgccgggcgagccggagccggagtcgagccgcggccgggagccgggcgggctggggacgcgggccgggggcggaggcgctgggggccggggccggggccgggggcggaggcgctgggggccggggccggggccgggcgccgagcggggtccgcggtgaccgcgccgcccgggcgatgcccgcggggacgccgccggccagcagagcgaggtgctgccggccgccaccatgaccgagggcgcacgggccgccgacgaggtccgggtgcccctgggcgcgccgccccctggccctgcggcgttggtgggggcgtccccggagagccccggggcgccgggacgcgaggcggagcgggggtccgagctcggcgtgtcaccctccgagagcccggcggccgagcgcggcgcggagctgggtgccgacgaggagcagcgcgtcccgtacccggccttggcggccacggtcttcttctgcctcggtcagaccacgcggccgcgcagctggtgcctccggctggtctgcaacccatggttcgagcacgtgagcatgctggtaatcatgctcaactgcgtgaccctgggcatgttccggccctgtgaggacgttgagtgcggctccgagcgctgcaacatcctggaggcctttgacgccttcattttcgccttttttgcggtggagatggtcatcaagatggtggccttggggctgttcgggcagaagtgttacctgggtgacacgtggaacaggctggatttcttcatcgtcgtggcgggcatgatggagtactcgttggacggacacaacgtgagcctctcggctatcaggaccgtgcgggtgctgcggcccctccgcgccatcaaccgcgtgcctagcatgcggatcctggtcactctgctgctggatacgctgcccatgctcgggaacgtccttctgctgtgcttcttcgtcttcttcattttcggcatcgttggcgtccagctctgggctggcctcctgcggaaccgctgcttcctggacagtgcctttgtcaggaacaacaacctgaccttcctgcggccgtactaccagacggaggagggcgaggagaacccgttcatctgctcctcacgccgagacaacggcatgcagaagtgctcgcacatccccggccgccgcgagctgcgcatgccctgcaccctgggctgggaggcctacacgcagccgcaggccgagggggtgggcgctgcacgcaacgcctgcatcaactggaaccagtactacaacgtgtgccgctcgggtgactccaacccccacaacggtgccatcaacttcgacaacatcggctacgcctggattgccatcttccaggtgatcacgctggaaggctgggtggacatcatgtactacgtcatggacgcccactcattctacaacttcatctatttcatcctgctcatcatcgtgggctccttcttcatgatcaacctgtgcctggtggtgattgccacgcagttctcggagacgaagcagcgggagagtcagctgatgcgggagcagcgggcacgccacctgtccaacgacagcacgctggccagcttctccgagcctggcagctgctacgaagagctgctgaagtacgtgggccacatattccgcaaggtcaagcggcgcagcttgcgcctctacgcccgctggcagagccgctggcgcaagaaggtggaccccagtgctgtgcaaggccagggtcccgggcaccgccagcgccgggcaggcaggcacacagcctcggtgcaccacctggtctaccaccaccatcaccaccaccaccaccactaccatttcagccatggcagcccccgcaggcccggccccgagccaggcgcctgcgacaccaggctggtccgagctggcgcgcccccctcgccaccttccccaggccgcggaccccccgacgcagagtctgtgcacagcatctaccatgccgactgccacatagaggggccgcaggagagggcccgggtggcacatgccgcagccactgccgctgccagcctcaggctggccacagggctgggcaccatgaactaccccacgatcctgccctcaggggtgggcagcggcaaaggcagcaccagccccggacccaaggggaagtgggccggtggaccgccaggcaccggggggcacggcccgttgagcttgaacagccctgatccctacgagaagatcccgcatgtggtcggggagcatggactgggccaggcccctggccatctgtcgggcctcagtgtgccctgccccctgcccagccccccagcgggcacactgacctgtgagctgaagagctgcccgtactgcacccgtgccctggaggacccggagggtgagctcagcggctcggaaagtggagactcagatggccgtggcgtctatgaattcacgcaggacgtccggcacggtgaccgctgggaccccacgcgaccaccccgtgcgacggacacaccaggcccaggcccaggcagcccccagcggcgggcacagcagagggcagccccgggcgagccaggctggatgggccgcctctgggttaccttcagcggcaagctgcgccgcatcgtggacagcaagtacttcagccgtggcatcatgatggccatccttgtcaacacgctgagcatgggcgtggagtaccatgagcagcccgaggagctgactaatgctctggagatcagcaacatcgtgttcaccagcatgtttgccctggagatgctgctgaagctgctggcctgcggccctctgggctacatccggaacccgtacaacatcttcgacggcatcatcgtggtcatcagcgtctgggagatcgtggggcaggcggacggtggcttgtctgtgctgcgcaccttccggctgctgcgtgtgctgaagctggtgcgctttctgccagccctgcggcgccagctcgtggtgctggtgaagaccatggacaacgtggctaccttctgcacgctgctcatgctcttcattttcatcttcagcatcctgggcatgcaccttttcggctgcaagttcagcctgaagacagacaccggagacaccgtgcctgacaggaagaacttcgactccctgctgtgggccatcgtcaccgtgttccagatcctgacccaggaggactggaacgtggtcctgtacaacggcatggcctccacctcctcctgggccgccctctacttcgtggccctcatgaccttcggcaactatgtgctcttcaacctgctggtggccatcctcgtggagggcttccaggcggagggcgatgccaacagatccgacacggacgaggacaagacgtcggtccacttcgaggaggacttccacaagctcagagaactccagaccacagagctgaagatgtgttccctggccgtgacccccaacgggcacctggagggacgaggcagcctgtcccctcccctcatcatgtgcacagctgccacgcccatgcctacccccaagagctcaccattcctggatgcagcccccagcctcccagactctcggcgtggcagcagcagctccggggacccgccactgggagaccagaagcctccggccagcctccgaagttctccctgtgccccctggggccccagtggcgcctggagcagccggcgctccagctggagcagcctgggccgtgcccccagcctcaagcgccgcggccagtgtggggaacgtgagtccctgctgtctggcgagggcaagggcagcaccgacgacgaagctgaggacggcagggccgcgcccgggccccgtgccaccccactgcggcgggccgagtccctggacccacggcccctgcggccggccgccctcccgcctaccaagtgccgcgatcgcgacgggcaggtggtggccctgcccagcgacttcttcctgcgcatcgacagccaccgtgaggatgcagccgagcttgacgacgactcggaggacagctgctgcctccgcctgcataaagtgctggagccctacaagccccagtggtgccggagccgcgaggcctgggccctctacctcttctccccacagaaccggttccgcgtctcctgccagaaggtcatcacacacaagatgtttgatcacgtggtcctcgtcttcatcttcctcaactgcgtcaccatcgccctggagaggcctgacattgaccccggcagcaccgagcgggtcttcctcagcgtctccaattacatcttcacggccatcttcgtggcggagatgatggtgaaggtggtggccctggggctgctgtccggcgagcacgcctacctgcagagcagctggaacctgctggatgggctgctggtgctggtgtccctggtggacattgtcgtggccatggcctcggctggtggcgccaagatcctgggtgttctgcgcgtgctgcgtctgctgcggaccctgcggcctctaagggtcatcagccgggccccgggcctcaagctggtggtggagacgctgatatcgtcgctcaggcccattgggaacatcgtcctcatctgctgcgccttcttcatcatttttggcatcttgggtgtgcagctcttcaaagggaagttctactactgcgagggccccgacaccaggaacatctccaccaaggcacagtgccgggccgcccactaccgctgggtgcgacgcaagtacaacttcgacaacctgggccaggccctgatgtcgctgttcgtgctgtcatccaaggatggatgggtgaacatcatgtacgacgggctggatgccgtgggtgtcgaccagcagcctgtgcagaaccacaacccctggatgctgctgtacttcatctccttcctgctcatcgtcagcttcttcgtgctcaacatgttcgtgggcgtcgtggtcgagaacttccacaagtgccggcagcaccaggaggcggaggaggcgcggcggcgagaggagaagcggctgcggcgcctagagaggaggcgcaggagcactttccccagcccagaggcccagcgccggccctactatgccgactactcgcccacgcgccgctccattcactcgctgtgcaccagccactatctcgacctcttcatcaccttcatcatctgtgtcaacgtcatcaccatgtccatggagcactataaccaacccaagtcgctggacgaggccctcaagtactgcaactacgtcttcaccatcgtgtttgtcttcgaggctgcactgaagctggtagcatttgggttccgtcggttcttcaaggacaggtggaaccagctggacctggccatcgtgctgctgtcactcatgggcatcacgctggaggagatagagatgagcgccgcgctgcccatcaaccccaccatcatccgcatcatgcgcgtgcttcgcattgcccgtgtgctgaagctgctgaagatggctacgggcatgcgcgccctgctggacactgtggtgcaagctctcccccaggtggggaacctgggccttcttttcatgctcctgttttttatctatgctgcgctgggagtggagctgttcgggaggctggagtgcagtgaagacaacccctgcgagggcctgagcaggcacgccaccttcagcaacttcggcatggccttcctcacgctgttccgcgtgtccacgggggacaactggaacgggatcatgaaggacacgctgcgcgagtgctcccgtgaggacaagcactgcctgagctacctgccggccctgtcgcccgtctacttcgtgaccttcgtgctggtggcccagttcgtgctggtgaacgtggtggtggccgtgctcatgaagcacctggaggagagcaacaaggaggcacgggaggatgcggagctggacgccgagatcgagctggagatggcgcagggccccgggagtgcacgccgggtggacgcggacaggcctcccttgccccaggagagtccgggcgccagggatgccccaaacctggttgcacgcaaggtgtccgtgtccaggatgctctcgctgcccaacgacagctacatgttcaggcccgtggtgcctgcctcggcgccccacccccgcccgctgcaggaggtggagatggagacctatggggccggcacccccttgggctccgttgcctctgtgcactctccgcccgcagagtcctgtgcctccctccagatcccactggctgtgtcgtccccagccaggagcggcgagcccctccacgccctgtcccctcggggcacagcccgctcccccagtctcagccggctgctctgcagacaggaggctgtgcacaccgattccttggaagggaagattgacagccctagggacaccctggatcctgcagagcctggtgagaaaaccccggtgaggccggtgacccaggggggctccctgcagtccccaccacgctccccacggcccgccagcgtccgcactcgtaagcataccttcggacagcactgcgtctccagccggccggcggccccaggcggagaggaggccgaggcctcggacccagccgacgaggaggtcagccacatcaccagctccgcctgcccctggcagcccacagccgagccccatggccccgaagcctctccggtggccggcggcgagcgggacctgcgcaggctctacagcgtggacgctcagggcttcctggacaagccgggccgggcagacgagcagtggcggccctcggcggagctgggcagcggggagcctggggaggcgaaggcctggggccctgaggccgagcccgctctgggtgcgcgcagaaagaagaagatgagccccccctgcatctcggtggaaccccctgcggaggacgagggctctgcgcggccctccgcggcagagggcggcagcaccacactgaggcgcaggaccccgtcctgtgaggccacgcctcacagggactccctggagcccacagagggctcaggcgccgggggggaccctgcagccaagggggagcgctggggccaggcctcctgccgggctgagcacctgaccgtccccagctttgcctttgagccgctggacctcggggtccccagtggagaccctttcttggacggtagccacagtgtgaccccagaatccagagcttcctcttcaggggccatagtgcccctggaacccccagaatcagagcctcccatgcccgtcggtgaccccccagagaagaggcgggggctgtacctcacagtcccccagtgtcctctggagaaaccagggtccccctcagccacccctgccccagggggtggtgcagatgaccccgtgtagctcggggcttggtgccgcccacggctttggccctggggtctgggggccccgctggggtggaggcccaggcagaaccctgcatggaccctgacttgggtcccgtcgtgagcagaaaggcccggggaggatgacggcccaggccctggttctctgcccagcgaagcaggagtagctgccgggccccacgagcctccatccgttctggttcgggtttctccgagttttgctaccagccgaggctgtgcgggcaactgggtcagcctcccgtcaggagagaagccgcgtctgtgggacgaagaccgggcacccgccagagaggggaaggtaccaggttgcgtcctttcaggccccgcgttgttacaggacactcgctgggggccctgtgcccttgccggcggcaggttgcagccaccgcggcccaatgtcaccttcactcacagtctgagttcttgtccgcctgtcacgccctcaccaccctccccttccagccaccaccctttccgttccgctcgggccttcccagaagcgtcctgtgactctgggagaggtgacacctcactaaggggccgaccccatggagtaacgcgcccggccccgatgcgaatcaggcctccccctccg

SEQ ID NO: 260278 - DNA, 490 bp, Homo sapiens
atagagctttgggttttgcaaaagggagggtctgacaacacatcccctggttgcatgtttgctgaaatagataatcctaagaagacttaggtggggtttcctgaaattgagggcatggaaatagaggaaaggggtaggattatggaggggaagggaggcaggcgtcttcctgtcagcctagtagacaccatgaaggtagccaggcgagggccatcttgaaaaggtcccacccaagtgctttccagggtgtattagtctgctaggggtgccataacaaagcgccacagattgggtggcttaaataatagaaacttattttctcataatcctggaggctgcatgttcaagatcatgatgttagcagggttggtttattctgaggcagctctccttggcttcttgacagccaactccctgtcttcaaacggtcttccctctgtgcatgtctgcatcctgatctccccttcttataaggacatcagtcatattg

SEQ ID NO: 260279 - DNA, 675 bp, Homo sapiens
aaaaaaatgatactttccaggttcgcttgggtccagatctgtattcccagggctcatagagatattggcaaactgacagatttcatggctcaagaaacctaaagacacctacttgaattcctttggttggcagtcaaatgttaactagtgtgttttcaagcttctattcttaggcatgttacttccttttggaagtcaaaaccaaccatcttttaagtaagagggctaaccaaatatgtgccacactaaagcaaacaaattcacaaaagagcgcttataattcccttaatgtttgacttgggggaagttgacctcaataactagaaaaccaaataattctgagcaaatatcaaatattgtcttatgcataatcaaaagattcagtgagaatcagctgaaggagttttaagacattctcagaggaagtgctataagtcagttctagtttagaaatagctagttttgatagatcttacttcagtctcaaaaattattagttagtcattaatgatgcttctatgggtttctctacattattttcccaacaaatacatgtaagtttcctgggtaagagtcacactacaagtgtctgattcctctcaacttgtggtgcaagactgatgtattatattatgatgtatttattatcatgtataataaacatgaaagaaccca

SEQ ID NO: 260280 - DNA, 663 bp, Homo sapiens
agagagccaaaccatctcacaaagtatcttctgaatgttttgccagtattatggtctgtggagaatgtgtctatgtccactttgagcccccagtgggaaatgggagtgcagatcttccctgaggctgtgaagtgggggcagcagtggcctagggagggtaggtggcaccaaaactgcactgagtagcagcctggctaaggctggtgaacaccaccaagctgaactgcagcatgcagactcccagaggggtgagtcatttgagggagagctgctgagaaagggggctgaggcctctaccagaattcagcaaggcagaggaggcactcagggaaacccattacaactcttatgtcatatatcgtaatttttaacaagtattttttttaacaaaaacaggatcacaatacactgttctgaaatattctttggcatgaagcagcatactggcaatgttttctatattactaaatggagaatatttagtaataaccctgctcaataatattctataaaaccacatagtggttttataagtcgcatgccggttactttcctaattgcgccatatcacaggaggctccatttcccaggctccctgtgccaacacacttcctgctaggttcaaccaatggaaacactgcagaaaatgagtgggcgggagga

SEQ ID NO: 260281 - DNA, 217 bp, Homo sapiens
tcttattaatttaatagtttctaaagagaaatttcattaacaaattaacaggaacagctacaaaatttgcagtgttcagtgcaaaattaacatataggacatcttactcaaaaattatttaaaacttgatacgaatgacaccaaagaattagccaagtgatgggcccctgcaaatgagcagatcacataaatctatccctgaacatcaattagttat

SEQ ID NO: 260282 - DNA, 556 bp, Homo sapiens
gcaacttagattggcagctgttaagcaaattggaggtctgaagagcaattttctggcaatatcaagattagctattaatatgtattaacagactgtaaaggattcatggaatttcactttgagaactgatgattgagcgtcgcttttacatgagcgggttctgcagtgaacgccaaacacatttgtcatctgtgtggtgccataacattcctatgaaatagaaaaaccatctttgctaccttccatcaacctcagaggagtattttgacaacacatgtagatttatgatcaatggaaattataaaactaaaaagaagtgagtgacccattttattatccagaatagggaacgtgggataggtccccctgggctggcctgatttcagagctcattaaagaaaagtgaggcaagaactgggaaaagtctttgcatttttttctttaaaggccagtgaccctactaaaactaagtggtagaaactaaatacattgatttcaggatacaatttttacagaaaatcagtgtctccctgatctcattcaataaatactgaac

SEQ ID NO: 260283 - DNA, 430 bp, Homo sapiens
attggctttcctttcttttttctttttttctgttttcttcaaataggaaattccttgatattttaaagcatatctgtgtatcttgaccaaagtattgtgtgaaaaacatttttattacaaagatttagctaacattttaaatataatgaaaaaatatttcctcaaaattgggttgggggattggcctgaaaacttacatctcaacaagaagaggtgtacagtaagagcataacaaataaaatatcttaatttgatcacttaagattttcttcttttttttttaaattttttttgagatggagtctcactctgtcacccaggccaggaaatcacttgaacccgggaggcgaagtttgcagtgagccaagattgtgccactgcactccagcctgggcaacagggcgagactctgtcaagagaaaaaaaaaaa

SEQ ID NO: 260284 - DNA, 659 bp, Homo sapiens
gggatattattccctcaacactgggaggattggcatccctttaggaccacagctcctgccgagtgcccttcatccacagctgtgtctctccccagaatctgggatctttgtctctctttactcctttaggctaggggtagtaatggctccctggtatttctagtcccagggtgtttcatcagctcttaggcattccccactgacctctgtgtatgcctctgtcaatagaacaattaaactccttcacttgaaacctttaaatgtgcatctgcttcctgccagaaccctgtaatgaataacagttctatgattttattcctgttttacagataaaaaaatggggactcaggagtccaaatgacctgcctttaaaaagtcactggtagcaaagggtgaagctgctttgagaccatgttttcctgatccaggttttgtaattgatcaactcaatcccttgatgcccaccaatccctactggacatcaagagtgagagtcacaagcagatgtctctcaaatgggaactggctgtcacatatggttagtttgatttgttccaggttttaaaaatcagagaatttcacagaattctagattttttacttctactgaaaaaccagaaaatctggaagcaatgacattatattcttttgtggagtca

SEQ ID NO: 260285 - DNA, 655 bp, Homo sapiens
ctcagtgaaaactttctaaactttaaaataagccatctatactctcaaacctgctgttttggtcacaaagcttcatctgttgttttgtttctgttcggggctgatttgaatgaactgatgaacttaactaaacacagcagagaattgctcaatccctttttactttcttgctaattaaattttgaatgtctgctgtggaaaagggaggtgggaagattttagaactccaattaattgcagatgcttaatcacaccagctgaaagctggcaagccaccccataatttacatagtctgtccactggacagctgtggctgggaatgggcagggatgggtggggtgcaagccccttcaccccagtgctggcgtcgtagtgcttgccataacagacatttgtgaaaacctttcaccctccccattgctgtcttcacttttcctggcctctgtatattcctctgatgcatttcttagggtccttaagcctccttggctattttgcaattcagtacgtttgttgtaggtgtggctcaaaattaaagagtagagacagaaagacaaggatggatcaagttggtttttttttcctttgtagtcctttaaatactaatttttttttttttttttacctaaataattgtcagaatcttcagaaagg

SEQ ID NO: 260286 - DNA, 906 bp, Homo sapiens
aggattggtcaacaggaagctggtggtcagttaggcaatcatgtccagggagggatctggtgtctcactgtccagaggcagtgaactggtgagtttcagttccataatactatctggggagcttgctggttggtttcctgagaaaggaactcagataagacaaacgtcactttctcaagttttaagactggaaaggtcaatttctatgtttatccaaaataaaccataaacatcagttctatgagacaattgcgccagtttcacttccagcacagaagcctcaatttatttttttgccataaataccaaagaagttataagacactaagtgctgaaaggcaactagaagaaggtgtgcttttcaaaagttgactattatttagcagttttaggttaatggcaaaattaaatggaaagtagagattttccatggaccctgcctcccacatgtgctcagcctccccaacatcttgcattggggtggtacatttgttacaactgatgaacctaaagggatatgtggttgtgtttatttttcaatggatgaaactcacatataacaatgatcgccaaaatacaaaattgacatttaatctttaggatgtttgactaatctgtttctcccattctaacattggcttttaatctttaaggaaccagagagaaaagaaatatgacccaagctgcttctgaaagtctggggaacaactggtacactacagaggctcacatcaggagaagaaaaaatcccttcagctactggagtctgagctactttggggtactctttcttccaacttttccccttcctaacccactcctcccagaacacaaagaagaccagacagatggctgaactcctcacacccaattggaccaatccacgctgcacacacgaccaatcca

SEQ ID NO: 260287 - DNA, 447 bp, Homo sapiens
taattcacactttaactttagcagaagggtaatagtgaattaagatgaccatctcaaaacccacatgctgttttataattttgagaaccaaagggataaaaagatttcatcttaagttcggctctgaagtggtaatgatgcatgaatcctcctttatcctttatactacctattcttctcaactgtttagaatatattgcaaattttcaataaacttaaaggtttacacttgggataggaaataaaacagtttgacaacagaatctttatacagtgaatgataaaaaaaaaaaaactaggaaatctgtactcatgatagtacttactaaatgaaaattcaagtgaagcccaggtctgaaaaatacttgagcagaggaaagcaaaaacctttaaagtaattaatcttgcttaagctgcaaacataaatgaaacttcacttgggtcatt

SEQ ID NO: 260288 - DNA, 422 bp, Homo sapiens
cctaaccctgccgcaactaagactgctcttaaccatccagttaaagagagaaagggcagagttttatagtcagctgttgaatatttctgctgagaaataataactcactattttgcccaggccagtcttgaactcctgggctcaagcaatcctcccacgtcagtccccaaagtgctgggattatgggtgtgagccactgcgcccggcccagatggacttctcaatcttcttgttatttcctaaacttagaagtggggcccatgggtttgacacccctgccagggtttctggggagcttcaggcaggcctgtggcctgaacgctgtcctgtacttcacctgcacccagagtccctgactcccacccaagttccctgtgtcccccccacactccttccatgcttctctgaggcacaccagccat

SEQ ID NO: 260289 - DNA, 671 bp, Homo sapiens
gggaaagtccctaccatggttatctccagcaagggccaaataagtccccttcggggtcagaggagcccaaccacaaggccagaagcagccagtgtagccactgtctttttttgctgtcagtgggcagcatctctaggacttattttcccagggactcccttgcctgctcatttctggctgtctgcctattctaacacccccatgactcttatcacatagctgaacataaggacaaggctaagcaaaatcttctgctcttgctttcaattttccttgggaaacaaaggaaaatcatggcaaagctacatgattaattgctaagtataccgagcagaaactagagagctttaggagcccaaagacccacggacactggaaaatataaggggaacatttttcaacagtctactacatggatttaagggtaaaatgatataatgtttggggtttgcttaaaaactctccaaaaacataaaaagcgggaggactgatgtaacaagattggcaaaatgttgctagctattaaagctgggtcttaggtacctagaagtttataatgttctctactttggaatatatctgaaatttttcattataaaagggtagatttttacatacactgtgtatgatgcccatcttaaacatttggcacgttatattgtttaatcttt

SEQ ID NO: 260290 - DNA, 2890 bp, Homo sapiens
atggagccgggaaagggaagagctcagcggacaaggcaagtgctgcttttctttgttttcctgggagggtctttggtgtgttctgagaccgggagctattccatagcagaggaaatggaggtcggtacctttatagccaacgtggtgaaagacatgggtttggatgtggaagacctggctgcaagggggggccagagtcatctttgacgactataaaccttatttgcgattggatccacagaatggcgacttgctcttaaacgagcagctggaccgggaggcactttgtgatctcacagagccatgtatattgcatttccaggtgttatttgaaaatccgttgcaattttttcgtgctgagcttttggtcaaagacataaatgatcacactcccacgttcctaaacaatcatatgcttctaaaaatctccgaaggtgctactctaggaaccttattccaaatagatagtgcgcaggacttggatgtgggaaagaatggtgttcaaaactatacaataagtcccaatccccatttccaccttaaattacgggatagcgatgagggcagaaaatatccagagttggtactggaccaatccctggatcgagaaaaggtgtctgagtttagtttaacgctaacagccgtggatggcgggtctccgcccaggtctgggactacactgattaacgttgtggtcctggacatcagtgacaatgcccctgaatttgagaagccagtctatgaagttcatgtacctgagagcagccctctggactccttgatcatcaaagcgtctgctacagatttagatgcaggaataaatggagaactgtcttattcattttcccacgtctccagagatgtacggaaaacatttgaaatccatccaatttctggcgaagtctatttaaaagcccctctagatttcgagattattcaatcttatatcataaatattcaggccattgaaggtgggagcctttctggaaaatcaagcattttagttcgggttgtagatgtgaatgacaacccgccagaaatagccatgacatctcttaccagccccataccggaaaactcttcacctgagatggtggtcgctgttttcagcatacgagaccaagacgctggagacaatgggagaacagtttgctcaattcaggacaacctcccctttgtcttgaagcctaccttcaagaatttttacgctctggtaacagagcacccactggacagagaggtcagaaatgaatataacatcaccatcaccgtgaccgacttggggacacccaggctgaaaaccgagcacaacataaccgtgctggtctccgacgtcaatgacaacgcccccatcttcacccaaacctcctacaccctgttcgtccgcgagaacaacagccccgccctgcacatcggcagcgtcagcgctacagacagagactcaggcaccaacgcccaggtcacctactcgctgctgccgccccaggacccgcacctgcccctcacctccctggtctccatcaacgcggacaacggccacctattcgccctcaggtctttggactacgaggccctgcaggagttcgggtttcgcgtgggcgccgcagaccacggctccccggcgctgagcagcgaggtgctggtgcgcgtgctggtgctggacgccaacgacaactcgcccttcgtgctgtacccgctgcagaacggctcggcgccctgcaccgagctggtacctcgggcggccgagccgggctacctggtgaccaaggtggtggcggtggacggcgactcgggccagaacgcctggctgtcgtaccagctgctcaaggccacggagcccgggctgttcggcgtgtgggcgcacaatggcgaggggcgcaccgccaggctgctgagcgagcgcgacgcggccaagcacaggctggtggtgctggtcaaggacaatggcgagcctccgcgctcggccaccgccacgctgcacgtgctcctggtggagggcttctctcagccctacctgcctctcacggaggctgccccctcccaggcccaggccgactccctcaccgtctacctggtggtggcgttggcctcggtgtcgtcgctcttcctcttctcggtgttcctgttcgtggcggtgcggctgtgcaggaggagcagggcggcctcgatgggtcgctgctcggtgcccgagtgtccctttccagggcatctggtagacgtgagcggcaccgggaccctatcccagagctaccagtacgaggtgtgtctgacgggaggctcaggggcaaatgagttcaagttcctgaagccggtgattcccaatctcctgtcccgcgacagcgaaatggagaaagccccacctttctgaatggcgtggaatgcaattagggatctgattatgatgcagaacttttagaatgagtctatttctttgaaatcttattcattgttatgcagagtttttcattttgggtaactgcattttactcaagagttttcagaagttacaagaatttaagtctattttttgttgttttaaccgtgaaaaaattgagagccggaatttgcttagtcattgttttgaaatacaacctcaaataatatattcacaaacacattattttcccttcaagtttaatcgcacactgggctcattcatattttctgagtgttctgactgtggatcctctatccaaagcagtttttatataattgagaatattattatagaggtaaatgcatgatatgaataaaaacataattgcttgttatctggttaggttggtttctgagatgttatctaatttaggtttctttcttaaaaacctataatcttttcattctacttttctggcaaacattgcagagaatttttcctgtacttagggtt

SEQ ID NO: 260291 - DNA, 713 bp, Homo sapiens
agattgatacttgcttttttctgtgaaacagttctcctagataccaaaatcctcaggatgaatttttgcatttgtaaataacaatttatctttgtaaattacattttatttatttagagttctaaaattgagggctgaaatgaatgacatgtaatagaagacaaaactgtaccaatacgctgttaaccaatcagactgtccaggtattctcatttcataaatatgtatacacacatataaatacacagagtagtgttagctgatgtgagtgataacagcgaatcaccattgagatggtcatttggatcatgtaaacaaaccgtgtcatgtctctgatgggagcggtgggtagtgtactgttaggtggacaggtcttttaacatgctactatttgtaaaagtttccgttgccataacagttcatgtagtagtctgtgaaaattcgaagctgtctgtcaagctgctaatatacaagttgtcatggtaccatgtaacttaaattgatgaatttctatgcaatttactattctctgaagcctatgaatgcagcctcatctcattttcagttaagggtactttatgtataattatgtcattgctgccttttatgtaggaaatgtaaaaaagttttaaaaggcgaaaataacattacagatttcatttttatacaggttacaatattaaacatgaaactaccaaattccaagaatagta

SEQ ID NO: 260292 - DNA, 240 bp, Homo sapiens
ccatcacaatactgaaactactcatggtagttttctgtgacctaattgcaaattttagtggatgttttttatttcattcttccatttattcaaaaattagttgagcactttattccaggctcttggaaataaattggtgaacaaaatagtcacttatgttttcatgggcttacattttagaaggcaaaacagtaaacatgatgtgtaaattaactgttatgaaagagaaaaagtatagca

SEQ ID NO: 260293 - DNA, 329 bp, Homo sapiens
tggcaggatctggcataagagccctcagacatcaaggacttccctcccacccaaatacccattgccaagggagcctggttgggggtgtctgggtcaggcctgtgtgtgtctgagggcatgaaggaggtaggaaggtgctgctggtggtggatggcttctgtccagggtaggagctaacacagagataggtctgaatggtgaaactccctttggcctggcctctcaatagtgtgggttaggctgatcttgaactcttagcctcaagtgatccttcctcctcagcctcccaaattgcctggacaacatggcaaaacctcatctctaaaaaa

SEQ ID NO: 260294 - DNA, 382 bp, Homo sapiens
gatgaattgtactttggtgtgatatggggcatattaagctagcagaagttataaggcagatgtgcctactggcttttcacttgaatttataacagtggacttgaaagtttcgatctatttgtatctctcctctgctgtcacagaagtcccattttagccaacctgctgccttattttttaagatggagcctccttacacacacacacacacacacacacacacacacacacacacattaataaactaatacatgttcttttcaaacaaacttaaacagtgcagacatgctgcattagtttccatccaatagcttggcgtgggtgcctgggaacagctctacctcaggaggaaggtgctgggctttgtggctgcccttaacca

SEQ ID NO: 260295 - DNA, 360 bp, Homo sapiens
tctcacgccggaatgcccgataacaagaccgtcccgagagactccgcaaaagccacaaccttgcacactggctaggcaacctcacaccgaaaaataccggaggactcccgccagcggcgcccgtccgacctccggcgggcggcgccctctcacccgtcctcctggccgcaaaatgaccgcaaacagggacgccgccctctcatcccaccgccaccccggctgcgctcagcggccgcgcacccccacgtttgccagcagctcccagaggcggtcagcctttgggtttgacgacggcaacttcccgggcctcggcgagcgcagccacgcacccggaagccgcctcggggcgcgacgccgagc

SEQ ID NO: 260296 - DNA, 365 bp, Homo sapiens
tttatagaaaatttggatataggaaaggtcaaaggcctataaattctgccactagagcagtttttctcagctatttttttcttctttttaaaccataacccattcaaaatatgtatatttacatttaaaaagtttcatgaaacagtgcttatctttactaggagcaatgctcccaatgctcccaatacttccaattaaattcatttgatttcaagtatctaaattgatttcatgacccacaatttgaaaaacactgatctagagagaatttgttaacactatatgtatatatttgtttgtatgttctcttaatcacctatgtattaaatgttaaagcaattaaaattttaatattcatttgcctc

SEQ ID NO: 260297 - DNA, 468 bp, Homo sapiens
cctttaaaccttgctctacttgtccctggcagttgacaaaagagcctggccctgcacgtccctccctggcccccgcatccttccctttgatgtcagcaagactgatggttgagttgcctttcttgcagatgtacacttattcatgctctgagtagatgctaattgctagtgacaaaaatatgagtaagataggaattttggcccccagaatcttacttgtaaaacatatgggaacctgacatggaaaccacaggaatgtcaggcctccagggcaggaatttttgtctgtctattccctaatatttacctgtcccctaaaacagcaccagcacatggtaggtacttggtcaatatgagctgttaatgaatgatattgtatatgggctttatcattggctgggtttactctaactgttctctgtttttatgtttttattttgttctgttttgtttttcagatggagtctc

SEQ ID NO: 260298 - DNA, 694 bp, Homo sapiens
ggcttgtagatggataactgagttctacaggtagggatttgtctaggtcttaagcttgaggtaaccaaaagaggattagacttggattttcaagcctgtgtaaagcatgcactcataccctgtcctcagtgggatttggacatctttgctactggttgctggggggaagatgctgtgggtggaaaatggtatattagccaagtgactctcaatggaccattcatatattttctactccctagtaaatttatcttaacatattaagaaaacaaaatggttcgtaagtggttgtgcttttaaaatttatggatttagcaacattttacagatttcacttgtatgactgagttttcgctagttagatgaattgttaaaaatcttaaagaaacgaatgtatcctatagtaatataatttgaaaacaaattgtttttagtgttttgaatgaagcactgccaactcctcagcatagatcctcagacatacttttgagtaaggatgcgttattagaccctattactgaaaatatagttgaggctttaatatgtatattaatataaagcagaatgaaaattttcctctttttttttttgtattccattgtataaatataccacaatttatttcttctcctggtgacagtcatttcagttattttcagtttgggactcttatgaataaatctacgatgaatag

SEQ ID NO: 260299 - DNA, 724 bp, Homo sapiens
  misc_feature (70)..(70): n is a, c, g, or t
attaaggcttgttatgaagagaagtttaaagaaataaaggtatttatttcatcttggtatttgaatgggnaaactcccagtagggtaaaaaaaaagaattctgccagagaaatgatgaagtgaaacctcaaacaatttgggcttttgagtgcctactgtcatccagccacgaaatgaagcattttacataagtaatttaagcccagtgatgcaggcagtaagtattatctccattttaagatgaggaaattgagacagacgagattacctaactctctcaaggtttcaccacagagctgtggttcaaacccatgtgttctagttttattacagttaagaaactgcaagagtttgccaatttgtcaagtgccagtccaagataaatggacactctgagtatcaaaaaaatacataatctgcagatcaaaacacgaagatacaaacatctaagagtcaccatggaagttgcggggcatccagtggtttttctgaaaatccatgaaggaaaagaataaagcatttttccagcctttcttctacaaactatatttcagggaaaccaaatatttgatgagggaattctttgtttagaaggattttagctaataaatgcagaggccctgtctcaaaaaataaataaataggagtttgaggccatgttcacacatcactgcagtccagtctggtaaacagagcaagacgctgagtctttaacaaaaaaaaa

SEQ ID NO: 260300 - DNA, 1588 bp, Homo sapiens
tgctgaggccccaaaacagaaaggaaagctcaccaccagaatgtgccttttccttatcaaaaagaattgctgccccttacaggacaggaggactccaattgtgaccaagttggagcagccttgagccacaactcagacttattttcattctctgctcattggccattaggaacccgatccttatgacctgcagtgacctgctgctaccagaactgactcgcttcaaagtgacggatgaaacccatatggagatattcctggggtgggtaggccagttggaagacagagtgtttacacctgagagaggacttgagcatatctgaaccttttgcaccattcagtaaagagaaaaggggagctcagaattttactcagtcacgttgctcactgctgcgcactcctgcagacgcatcccagtggactctgcgctgcatccccagagtacagcgagtttcccgcctcccgttagagatccaacacatattttttttgaaagaagaaactgatggaagacaggaagcaaaaaggagaggaaggaaagggataggaaggaggggaaggaaagggaaaggaaggaaaagaaaggaaagtgaacttgaaatcctacaaggtctcaaagtcaaaaaacatgattgctgttttagagaattgaagatccttcatcttcaagaatctgaaatctaccatgatcttcacatgtagccaaacacaatgggatgtagtcatttaagagtgctgtgaaggcagtgaaaagcagttgaaataccattagttaacagattgcccaatgaagtcgatgacaactgtgataacaagttactcactatcacagcgtctccaagagatgaacagtggatgatgcttccaaagcacagatgtccctctcctcctcaaccttctctccccagaaagatgtcaacactgtggagattgtgctatgaagatacctggtgtggcattgcaatagatgaaatattaagggcaattcaacaattttctgaacaaatacatggatttaacttgaagttgaatttaatttgacttcaagaaaaattatatttctggtcctcctatgatcatgcactaagaattatttaactgcagatacaattgttacctttagagctagaaggcctcattttagaattaaaatgaatggcaacccagacagataaagtcgagtcgtgatcatcccactgcggaggcagagccagtgctggccatcccccgaccaccccaacacactccaggtctcacacatttaatctctctctctgccaagggaattttttctttccatttattcttagaaacaactaagggagttttaagttaaatacatgctgccaaattgaatccaaggaaactaaagtcaaatatattagcaaacacttaatgtcctctccattttgacatttctccctcaattcctatttctgagtaaaggctgttcagatgaataaaaacatattttcagaaatctgagctcataagacctataggtctgtgaagtcacagaccgtgcactgtcagcagtcagcaattctgctgggttgaattggcatgtttcaaactatgtatttttgtt

SEQ ID NO: 260301 - DNA, 894 bp, Homo sapiens
gtgagggttagtgattggttggggtttctattttaacgacggcggctgctgagggaaaagcagttgaaataccattagttaacagattgcccaatgaagtcgatgacaactgtgataacaagttactcactatcacagcgtctccaagagatgaacagtggatgatgcttccaaagcacagatgtccctctcctcctcaaccttctctccccagaaagatgtcaacactgtggagattgtgctatgaagatacctggtgtggcattgcaatagatgaaatattaagggcaattcaacaattttctgaacaaatacatggatttaacttgaagttgaatttaatttgacttcaagaaaaattatatttctggtcctcctatgatcatgcactaagaattatttaactgcagatacaattgttacctttagagctagaaggcctcattttagaattaaaatgaatggcaacccagacagataaagtcgagtcgtgatcatcccactgcggaggcagagccagtgctggccatcccccgaccaccccaacacactccaggtctcacacatttaatctctctctctgccaagggaattttttctttccatttattcttagaaacaactaagggagttttaagttaaatacatgctgccaaattgaatccaaggaaactaaagtcaaatatattagcaaacacttaatgtcctctccattttgacatttctccctcaattcctatttctgagtaaaggctgttcagatgaataaaaacatattttcagaaatctgagctcataagacctataggtctgtgaagtcacagaccgtgcactgtcagcagtcagcaattctgctgggttgaattggcatgtttcaaactatgtatttttgtt

SEQ ID NO: 260302 - DNA, 1079 bp, Homo sapiens
tcttgggaagcaaatgctgagttttggaatgttctgcctgggaagagtgtttttgtacggctgaggccttacgccacatggcaccggttgaacagcttgttaatgctagcaatgtgatttatgttgaatgcctaattctgctctggagaactggaatctgagtatctgagttcagccatataaatgcttcaggtctgcaggactggctcccaacaagaaccctggacacaaaggctcaggaaaagcagttgaaataccattagttaacagattgcccaatgaagtcgatgacaactgtgataacaagttactcactatcacagcgtctccaagagatgaacagtggatgatgcttccaaagcacagatgtccctctcctcctcaaccttctctccccagaaagatgtcaacactgtggagattgtgctatgaagatacctggtgtggcattgcaatagatgaaatattaagggcaattcaacaattttctgaacaaatacatggatttaacttgaagttgaatttaatttgacttcaagaaaaattatatttctggtcctcctatgatcatgcactaagaattatttaactgcagatacaattgttacctttagagctagaaggcctcattttagaattaaaatgaatggcaacccagacagataaagtcgagtcgtgatcatcccactgcggaggcagagccagtgctggccatcccccgaccaccccaacacactccaggtctcacacatttaatctctctctctgccaagggaattttttctttccatttattcttagaaacaactaagggagttttaagttaaatacatgctgccaaattgaatccaaggaaactaaagtcaaatatattagcaaacacttaatgtcctctccattttgacatttctccctcaattcctatttctgagtaaaggctgttcagatgaataaaaacatattttcagaaatctgagctcataagacctataggtctgtgaagtcacagaccgtgcactgtcagcagtcagcaattctgctgggttgaattggcatgtttcaaactatgtatttttgtt

SEQ ID NO: 260303 - DNA, 635 bp, Homo sapiens
tgctgaggccccaaaacagaaaggaaagctcaccaccagaatgtgccttttccttatcaaaaagaattgctgccccttacaggacaggaggactccaattgtgaccaagttggagcagccttgagccacaactcagacttattttcattctctgctcattggccattaggaacccgatccttatgacctgcagtgacctgctgctaccagaactgactcgcttcaaagtgacggatgaaacccatatggagatattcctggggtgggtaggccagttggaagacagagtgtttacacctgagagaggacttgagaattttactcagtcacgttgctcactgctgcgcactcctgcagacgcatcccagtggactctgcgctgcatccccagagtacagcgagtttcccgcctcccgttagagatccaacacatattttttttgaaagaagaaactgatggaagacaggaagcaaaaaggagaggaaggaaagggataggaaggaggggaaggaaagggaaaggaaggaaaagaaaggaaagtgaacttgaaatcctacaaggtctcaaagtcaaaaaacatgtaagtcaattatcacagaaaataaaagaactgctacaagggcaagttactggg

SEQ ID NO: 260304 - DNA, 547 bp, Homo sapiens
aagtcaccagagctacgggcagagcagtgaatccagtctaggtggaaaaatgactttaactcccatcaattttacatttccacttacacatgtgtgttcctttgatgataatgcagacagaattaaaatgttgtctatagtagtatttcttttaacatgaggaaattggtgtcattataaatttcttttgtgatgtgtagaatggaaatggagctccaactgaactattgcaggctaatgattatcctaccattgtaatttatatttgtataagaatctagactagcgttactccctacggcaaaccctgtctcagataaaaccactaatccattgatttttgttgttgttatctacttcatgttggtaatcttttttattcatcccattctctgattttcctgttcccaggatccaatgctcttacgtatacaccattctcagtcattttgttgatttatatcctcttctctattcagttttgaaaattctattttaagatgccaaatatgtatatatattcatttcccatttctttttctactac

SEQ ID NO: 260305 - DNA, 448 bp, Homo sapiens
aataactgtccagtagctggacaagagagactcataatatggcagttgaagccaaagcattaagcaaaaacagttattaatattaacaggctcactgtagagagaagccatagttgtcaggggaggcagaactgcccaggaaacccatctttgtccttttgtctacacaggttggggcaaaagcagcagttatttgaactcagcaaacctgtgttccatattgaaggcctgcataagtcagggaccagggatgtaatgaagaccagacatggactttaggagcacaaagtgtagagataaaactgcactcataatgtaagctaatgggaggcaggaacgatggaagcagcaaagactcgctacagtgggaggagttatgagagacttcccagaagatatggcatctgagctgattcttaaaagttctgtaagaggccaacaggcagag

SEQ ID NO: 260306 - DNA, 470 bp, Homo sapiens
tgatctgcccgcctcggcctcccaaagtgctgggatttacaggcgtgggccaccatgcctggcctgtttctggaaactttaaaacgataatctacctgggattgatttgtttgtatatgtctcttgctgtgtaattggataaggcttattttcattcgtggcatatagataaccaattgacctagcttcatgtattgaaaagaacttttttcctaactttgtcataaaacaagtgtctatatataaaagtgtgtgtatgtcttcgctattcatgcttgttttgcatttccatggaaagtttataatcaagcttgttaccccaaaaaatcaaaaaatccactgggattgtattgactcttaattactttttctttctttcttttttttttttttttttttgagacaagagctcattctgctgcccaggctggagtgcaaatggtgcaatctcagctcactgcaacctccac

SEQ ID NO: 260307 - DNA, 377 bp, Homo sapiens
ctgactcagttagcaacttcttagcatatcaatgtctcattttgtttctctggcaaaaagctcaaatattggattgcctgattcaaaactgacccctaggcaacctcagtttttccaggagagtacagtgaatatctgtttattcccattcctggaaagcagtaactgtcattttctgggctcacacagcctgcacatatagcctggttataattctttctctgagaaatgggggagccctgttaagacagccaagctggtctccagacttagagatccatgagccattgcttctaccgcatgaatcagtggaaatatcaacctccctgagatggtaaatgtcaagacctgtggataaatgttgaaaaatcagaaaa

SEQ ID NO: 260308 - DNA, 344 bp, Homo sapiens
tccttatttttggagtcatgcaaacatagtgagagactttgatgtagtgcatatccaacttctacatcttcacacacatatatattatacataaagattaaattttaaaatattttgactacatagaaatgccctagttctggcacactttcttggaataaaatgacccctttcaacttgtaagtgtaaaaatgttccaagtagtttcccattttcccttataacatccttttctcttggatgttaaggattatgctacagtaatataaacaataaaagaacatctatccagcatctaccaataaaataaacatttacccatcatctaccaataaagcatacat

SEQ ID NO: 260309 - DNA, 788 bp, Homo sapiens
atgcagatgtttactgtgtcattgttgctgtcattgctactgaggagtactgaccagaatcatctgcaactcttagttggcagagaggaccactatggcgggtagctcttttctttcctgccattgtggggatgattccaggccaaagatgatggagaagtatggaaatcatctgaaaggttgaagcttggcacgtgaagccattcatgactttgtaaggcagttttgctgaaggccagttctgccctgggagggacggaggtgaatcctcctgagtacctgtggttttcttacttcctgctgaatttacctaagtgcctgttgtttgcttgctgtggaggctttctggtatttcatttcaggtgcagatgccttcactttcccacaaaaaaaaccccaacaaaacctaagaccttactgcaactaagtctccaagtactttttaacccaatgggatgaacagcctgtggtctgctcagatcaccctgagtgcgtgtgagaaggcctggctttgccaggaaatccaggaaggcagggccgggctgtgttggaagctggcttagctggtggggcagccttatttcaattaaaagggcattgactgggagcagcagtcctggagtttgttgcatttcctattgccctcaaaatgagaaaccaggaaaatagcagattggagccttcgagaaggcagtaaatggctgtttttattgacaaaaggaaaacattttactgccatctcactgatggcatctcactgacttaaaatgaaggcaggttgtagtaaa

SEQ ID NO: 260310 - DNA, 548 bp, Homo sapiens
aatttccattaaaagtagaaattttaatttgaataataaacattaaggggttttactttaagacagaaatgggaaactctttcattattaaatacgaattacaaaaaatttacaggaacatcaacacaatttccagtaaagtatacgatagtcagagtgcactggttgaccatagaaaatatttttcaaatagctgaatgccaggtaaccttaaaaggaaaccagaaaaatgttatggcaggggaagctcatggttgaataaagctttaaatagataagaatataatagatcaatgatgattaccaaagaacataaattacactatgtggacaatgcacagaaaggcagatgaaaaccaagacaacaagagtaatgttaaggctacccgtgtatcactggattctgcatgaagatctgtggaacctgttacaagaaaatgtctattaaattcattgaatcaaagaatgttaagaaagtctagaaaggagttttgagtttctgagtccaaccctcatattttactgataaagacttggaagtggccgga

SEQ ID NO: 260311 - DNA, 875 bp, Homo sapiens
agacagtgtaaatgtgtgaaggcctgacacttacacatacattgcttttttctctatgtaaggtggcagttgctggagtaccagggcaccaagtggaggatgtggtagacagcctctaagatgcgccccctgccaatgatctctgcctccagggaggagctagaaggcagagagaaagccactcaggacttcccatcccagaagataaaggtgaggaaagcagcagcagcagccacaggccagtattccagagcagctttgggttcctgtcaagacctgctttgagaaggaggtggctgtggggctggagggctgggcctgttcctgagctggctgctggcagcacagcaatgaggcaacattgagaactgcgacacgaggcccagtcctgctactaaaccaactgtgtggacttgcatagtcacttcacccctcgggcctccatttctccactttggaaagcagtgttgggacgatgttaagggtttgcaaccttccaacatgaagacttatttttaaaagcaaaacatttcaaagagtccacatgacagtagtgttcattttggcatctgttgatttaacaaatacaaaattaggctgggtgtagttgctaacgcctgtaattccagcactttgggagaccgaggcaggaggatcacctgaaatcaggagttcgagaccagcctggccaacatggtggaactccatcactaccaaaaatacaaaaattagctgggcttggtggcacgtgcctgtaatcccagctactcgggaggctgaggcaggagaatcatttgaacccgggaggcagaggttgcagtgacctgagattgcaccactgtactccagcctgggcaacagggcaagactccatt

SEQ ID NO: 260312 - DNA, 527 bp, Homo sapiens
gagaatttatgcaagatgttttgcatgtgaccaagtttgttatgatcagaagaaaattaaattataagtctttctaaggactgagctttggcattaaaaatacactaataaaaaactgaaaaatgtggttccctatgttagaacaacaaggctttcttaaagtattgctttacttttcataaaattgcaagaggttttgagttttaattctgaaatctgttcccttaacagccatcttctaaactacagacaatttccatttctgtcaaatatttttctgagatctatttaatttgcccagtttgaggatggagattcagctccccttttttcttgcctaaaaaggcacaacatcttggctgaggtgatagcttttcttcaaccttttgtcaactcttgtaacttttcttctgtggttccaactctgctgttatgttctgatgctaaaatatatgtcctgaaaaatctagaaaaacagtgttttactccaatataacttgaaattaataaaagtctgattgtcctga

SEQ ID NO: 260313 - DNA, 460 bp, Homo sapiens
cagctcccttccatctcagcccttagacccttccaattgggcatggaactctaccttcactgagagttctaccagtgacttccaaatgcaagatactcagtgggagaggctggtggcctcggttcctgctttgtactctgatgcctatgacatattccaaatcatagaactgtacaatcttcctgatgagaatgagatatccagctcttctttccactgtctgtatcagtatctctcacccacaaagtaccaggtaggaggacagggttcctctctcagcatctttgctggtccagctgtaggcctatctcctgcacaaacctggcccaatatgacaagccaagcctttgaagcctacagtctaacagatagcctggaattccagaaaacctccaatatggtagacttgggatttctctgaccagagtactaataaatatagatcatttagaaaagtggt

SEQ ID NO: 260314 - DNA, 779 bp, Homo sapiens
cagctcgggcttggccaaagcccttggtcagctcggcaatttgcctgtaaagtgtggctgggcctgagcctgctggctctgagctcggagaaggagccgccgctgggttcagttataagagaactgcaagagcccagggtaaatatcctctcggtctccggacgagggggctggggagaaagggaacggctgattgctttgcattttatgatgggaaagacacctgctttgtagaaagggctgatacgttcctagtagcacctggcaagtttcctgcccagccctgaagcctaacagccgccttgcgattgtgtccgcactgacaccttggcctgtatcctggaccgtcggggtcaagtttgagcagcattaataaaaactttaaaagcacctcttagtacttaagtgacacgataaaatgcatattacaacatctgacttttgtctgtgtagattttgatgcagaaaagggaaggtggggagaggggatcctattggccacagcaatgaacgttctttccttctcaagtcagtataggccatatgctaatggggcgttaggcaattagctagcgcttcctctactaagagcaggcataagtgcctttcatttgagtagcatatattttataaattcaaactgaggagcacattgagtggaatggtacgtgtcattatataaagaagttggtatcgcgatgctatctggctgcatgttcttattattttacagtttaagaaatgtagaggaatcagacattaaaaatgtgcatacatgc

SEQ ID NO: 260315 - DNA, 544 bp, Homo sapiens
ttccagaggaaacttaagagacatcttagaatggtcaggggtagtgggctggtatttgagcagaggttgcagaatttgagaaagttacagctgaggttctttgttagtggcaagtctgctaagccctgggctatgctaacagctctgcctcatgctctttaatctttgagtcagacctatgagatacaggtgtagccccattttgtagtcgagagtgaggctcagatgtgaagcgactggctgaggttaaacttgatagtctgtttttacttattttctggccctcttcttgttgccatataattaggatgagtagggtaagcttgaactttttcgagtttttttctttttttccttcctggaaaatactgatttgactggctctggaccatgaaagtagctgggcctaaaaccaaaccagacatcaaaacgtggtaaggaccattcactaagacagccatggtagcatgctcagtgccagccctgtctccaggcccattcttaagatctcgggaaaagtcaccagatgcttgggctctaagta

SEQ ID NO: 260316 - DNA, 453 bp, Homo sapiens
gcccagggagagaggacggaaattcagcaaggacgtagaagagagtgcttctaccttaatcatcgccctgaggaccctgaggccaaagacaccagagctcctcactttcatctacagtttcagaagccagactctaacagatgagttggaaagatgcctttgaagggctcggtaatgatggctcaatgaggagttttcatttataaatgtgactcactgtggccaggccacggagggtctggagcagggcagacacaacagcaccaccctccaattaatggatgtgcaagaaccgctgtgggactcagatttgggccaagaaccccaaatcatctcccgtggctcagccctgagagccacccggtactctcggggcaacaggaaactaatgagctcctttctgttctggttggttttgttttgttatgttccccagcaacagaaggcatttct

SEQ ID NO: 260317 - DNA, 452 bp, Homo sapiens
agtttgtgttgatttggctagaaattattaaagttggtattctgtgaaattttgtttgagtggttctttgtttggttgagcgggttcagatgaggctgagaaaacaggaagattgtgcttggaagagggggagaaggcttccttaggccaaggcaggtcagtcattctataaggagagtctctatacaggatgtttctgcttttaaaaatatggtctgatatgcaaattcacttatctagtgcaaatgattctggcaaaggtttctactttcttgattcaggaataagacaaaagagttttccaccccatagtacacaacaaaaaagaggcattataaaacttttcagaactactaaagtggtatgattttatgatttcttgttgaattcagcatttgaaaacagaagaaatgtgaaaacagaggaaaggtgcttagcataggaattaactt

SEQ ID NO: 260318 - DNA, 433 bp, Homo sapiens
tctctgatgtcaacagggtctgcccaccctgccatctttagtgtggcttcctgcatcgccgatcgaccaagtggcagacctgagggcaaaaggaagcctgatattggagtcagccccctttggaagaactttccctacagcccacctagtaacttctgatgatacctccttggcctgatttaattcagtgcaccaaaaatattatcatttcaacacaaaaccaatgcaaacaaagaatatgcccctaaatgaaatggtgggatctagtttaatttttatcaagagaccttcctgaagccaagggccctggaaatggctgagtttccctgtggcttggagcagagggaaaaagtggaaatgatacctgtgttaagtaacatcaagcacccaggtccactggcatgtctgttaataaaaaaattttttaatgttt

SEQ ID NO: 260319 - DNA, 195 bp, Homo sapiens
ttgttttttggtgcaccacaataaaatttcaagcagctttcaactattataacctctactcaccacaacctttgttatgcttcatataatccctggcatattttctggctcctactgagtgaagatatgcctgagtctttaaaacctcaaagttcttaataaacataatgagcactcactgaatgccaagacttg

SEQ ID NO: 260320 - DNA, 484 bp, Homo sapiens
gcccattgggaatttcactccccatggtctgaggtagtgggattgtaatccggcagcattgctaatttttctactaattttacaggctttgccacactgtgactgtcaggaggttcttacttgcagaaggagatgcttcaggtacatgtttgtaccagagcattagtaaggctgcatcacagagtgagatgtgcatatcttcaggctctaaagacttaagggaagttcttcgaagctgacagtgaggcctttatgctttcaccatacgtataaaatcagtgtttctggattggaccccaaaaattcattagttctctgctctcagacaagacacttctcccagtggagcttgtttttcactgcctatggagagacaggtgaacaaaatgattccgtgtcttgacctatgacctctgtatcagagaatgactcagtagctactgtgaataaataaacccctaaatccaaagggctcaacacagca

SEQ ID NO: 260321 - DNA, 689 bp, Homo sapiens
acagaaatcagaatcctttgctggactttatagatgatttggtgcacttgttactagccttcttgggtcaaagacacattggaggacctcagaaaaggcaaggaaattccattttgaagaaaacataagactgcctgacacaacaatgtgcatacaatttcagaacattaatggaggccttagagctcattcacagatctatgctaagggctccagaactcccccagtcccctcggtgtgtgtgaatgactaagtcaaatccaaagtcagagcagcttgcagcataaactggcctccaggttcccagtcccactactcttgatcatgatgtcagctctctacagagctctgagataaggggacactgataattcctgaagtgattgtactgattgaatagcatcttcaaaatttattctacttggaattgcaaaatgttaccttatttggaaaaacggtctttgcagacataatcagttaaattaaaatgaggtgatactggattagggtaggtcctaagtccaatgtctggtgtcctttgaagatggtcatgtggagacacatgggaagaaggccatttgatgactgtcactgtgaactggcatcatgtttagggatcatggtgaggaagagattggaatagtgccaggaatgtcaaggctcactggaaaccaccagaagccagaaca

SEQ ID NO: 260322 - DNA, 537 bp, Homo sapiens
  misc_feature (360)..(360): n is a, c, g, or t
  misc_feature (497)..(497): n is a, c, g, or t
  misc_feature (500)..(500): n is a, c, g, or t
  misc_feature (528)..(528): n is a, c, g, or t
cgagtggatggcaacagcatttggaaggcggaggacatggaattcatgtgtcaggagccaccttccgagcctccagtaccacgtgtcagggccacatgagctgggcctcgtgggcctgatgtggtgctggggcctcaggggtctgctcttcttctctttcagaatctggggctccaggctatgccttggctggactgaggtctgggggtgcacttattatccctggggacacctgctgaagcttctccctgacaagctgtgtcactgttggatgagataatccaggcccaggttcccagggggagggaaaatggagaaaatataaaaagatgtgaaaaaggaaaaaggaaaggtaataancaaacaaccaaagtgataaatggatagttaagggaggttgtctgaacagggattataattagtttacatacatactccttaaacagataaatacattacacctttcaaagatagagctaggaaaggcaaaaatgaanctnaatgaaagcgaaagggaaaataaagaanaaccaataa

SEQ ID NO: 260323 - DNA, 241 bp, Homo sapiens
tccaaggttgctttgcgaggaataggtggggcatcaggaagaagccagttgcaggcaaggcctctgctgatgctgcttttttctcctgtacccatccatgggagggagctgtgagatggcctggcagaacccgctcttggaccccacagaatgagaggctcaccctgcacaggaacatcctggggcagcaggctcagcacattttaaattttgagtatgaacaaagtaaacttcagggtta

SEQ ID NO: 260324 - DNA, 188 bp, Homo sapiens
gatcccaaggcacatacagggtgggagaaggtgcactcccattcccaagggagccaaggcagcactgaactcggagagtggctctcggttagaccaggaggtgaagatactgggggaggaggaggctggctgatgatcccagggttagaccaggaggtgaagatactggaggagaaggctggctgatg

SEQ ID NO: 260325 - DNA, 683 bp, Homo sapiens
cttgaagtaaatgagatttgaaaacttaaagctcaaaaatcacttaaagtaaatgaggtatttggagattagagcggctgaagtttcccaagcattctgctagtgttactctattttaaaaaataccacaaacccattgatttaaatataaaagagaagtggctaaaggtataatcctcgttactttatagtcataccttataactgactacctcttacttgtaaatagatagccaatgtgtgaagaatagtttaaaaagcaccattatatcagtgctgacaagcagaatactgaaagagagcggggaaaggccgaaactatccccaaagatgttgctttaaatgatcatgaaaagtccagatagagatgataactgttttttgacagattccaattttaagagttcaaagtaaattctattatatatttttagcaagtttacttccccctttattttgaaaaacagctttatacgttcctgactataaaaatgttgcccaaaacagaaacttaaaaagaatactggataaaaaagaagtattacctgtaaaccccagagttaacttttgttggtataattgaacatttataaaaattcctaaagcatgggttttgagatttgtttctgtgcctatctttgttcacccccttgtggccatgatatgaagtcaagagctaggca

SEQ ID NO: 260326 - DNA, 428 bp, Homo sapiens
cccaccacactccatgaattctaatatgctcttggagtgagggatatagccgtccttgttctagcactgaaagtggaatcctgggaaacctttcagtcctgggcaaaccaggccaggtgcttacgctaaccccagatgaacctgatgaagcctcttctctcatcagttgagagtcactggcctaaaagaattgcagatgagttaatgaaggctggaggaaaagtacagagccctgggcagagagctgtgtacccactatcatttcttcattctacaggacagtgtcaagggagctagaagaggacacactgtgatttgtagtcctgcccaagtgctccttgtatgccttgtgctccaagtatcccttgtgctcctactgtgtcctgcagtaggagcacaagggatactactggagctgggaaggactc

SEQ ID NO: 260327 - DNA, 444 bp, Homo sapiens
gttgctcagagtccgaaagcttttcccagcccagtgacacccggaacccgtgaatcgggtggcacgttgaatcaacaggcttcctggcatcccgtccttctctccgcaggtttttaaaactgggccacgcaaaaggattggggatggaagggacctggggcttctgagccaggatcaggtgatcgagttgtttgttctggggatatgaatcctgtggagctttcagcagctcggccatcaggctagagggcgatgccaaattccagctctttacatattgctgaataatacaaatagaactttttgtagatggttgcatccttcatccctttctaaagatcgaaggtcttgtagaagtcctaaagcccgtccattctctatagattcatttcctcaaacgtttgccagaggcctatcatgaacatcaaaattagttattaagtc

SEQ ID NO: 260328 - DNA, 414 bp, Homo sapiens
taaaagttgggttgagggtatcttggaagagagagaatataggaaaacaccccctgtttgtgaaagtagctaacagtggcacacacaatcactggcaaatcccaaatatgtattttacagaaaggtaaggcaagggaatcagtgactagagagcgttgtaaacagattttgaggtttttttttttcaatgagaataagtagataagatcctcttaaaaagagctcatgttggaaagagatagctgacaaattgttttcctatcttaatctgaatctagatgtaaggtggtaaggacatgccttgtgttaatggcataagagttttttttttaactgccaggtatgataagtaatttagaacaaattattgggttactttgattatgatgaatttgtgggttaagggcactagta

SEQ ID NO: 260329 - DNA, 179 bp, Homo sapiens
agcatctccaccttctgcatgctgaagttatgtcacaggaggagggcctcagcacacgatcaatttttcttttggtccattggcagcttctgtctcagaatttttgtgtgtgtatatttgtagaaaataaagaggtacggtcaaggctacagccactactgaccattgctgccaccatc

SEQ ID NO: 260330 - DNA, 217 bp, Homo sapiens
ggggctgagctacaatcaaagggggcactccaacactcacctggaaccctaatgaagctacggaggtgttgggggtgggcagggatccacgggcgggatggtaaagagagggagaagtgcaaagctaggtgccagagtaggagtctctgccccaacttacttctccatcgtgcctaggagggcaatttagataattcattgtgtcatacgtgtgttc

SEQ ID NO: 260331 - DNA, 701 bp, Homo sapiens
ctggcatcttctgcccccagtccactctgctgcccatcttggccttcactggcatggattccggtcactcagccctggggcttggctcccatcccttagtcacagagcacacgtgcacctcagccccttcttagacatgctgccaaattttgaccaacgtctagcactgcctttgggttcaccgaagatacatactgttctgttgtccatctgaatggcggtacagagcagggtgtgaggcattgcctgaggacaaactgtcatccgaataggcaagaattctgcttagggtgtgtcaaagagcaaaccaggactgaaaattcactgtgtaattagtgcagtaatgcagggtgcaatttaactccttctactttctagctctcaaaggtagtggatgaaattctgccccaagaacaaaaatacctgaaaactagtgtccaccaactatgcagagaggctcagaaaatatttggggtcatattctctttatctttcttgtctcccataagaaagcaggcctttgtctgaaatccccactgcacacccatccacagagacagaagtccctggacatcaagccacgagggaggggacagaagggatgagaatgaaacatgccccactttcttttccactcaccacgcagatcctactccaacctcactacactcaggctcttccctgctatgaatctgcttcct

SEQ ID NO: 260332 - DNA, 687 bp, Homo sapiens
gccagaagcaggaatagaatccatctctgttgaggtccctgagggcaaggcaagtagctcctcttgacgtgtgtcactggataaacagaactctagtaaagagtttgctcatttttaaaagtgagaagagttgctcagttgttctaaaaatattgtgtccttattaccattgcctttggaatatatttgttctgttatttatctcagaaataattctacctctagaatacatgcaacacagttctatagcagaagtaataatacacaattgcagggtcacgttcatgtatagaaaaccgaaatctgtatctatggcatgcaattgatgaatgtcctctccacatgaattttattggcaaatagtaataattgatagctgggcagttctctacttttccaagcattctcatcttttttttttttttttattctcagagaaatatgtgaggtctttgggcaggtggggctttgttcttccattctacctgtaaagaagccaggactgaaggagctttttacagatcatggagccagtcttggattaaagagctttacagatcatggagccagtctgggaacctcagtgagactttgcttcctctacacaaagcttccctcattcatgtaaagcaaatcatagaatttcccttgctttagaaatatattaagctcttaaagataaaattc

SEQ ID NO: 260333 - DNA, 668 bp, Homo sapiens
ggcaagaacctcacctgtcttattcctcatcagcactagagaaatggttagcatataatatatacttcataaaatttattgaataagtgaattaggctactctgagacttaaataaaattaccacacacatgcatgcacatgcactcatatttaataattgactgacccaaattcatttattaatgtttgaagtaatagtgttaaaaaggttgtaattcatggatgtattaatcaactgattataatgataatttttctaatagaaaagctaagaacaggcaccaccaagaaagtgaatttgaacatgagagagatgtgtgatacctgagctaactctgtgtatagtacaaattttagatcttcattcttggaatgctgtatctagaacatccttcaaatatgattggttctttgttcatttgtttgcttgatgaagcaatattaacttcacttgatgaagtaatattacccagatgtcaaaaatgataagaacaaaaataattctatggcctaccctcgttcataaagatgaatagatcctaaataaaatgcatcctacacaacgcaatagtcaattgatgaatcatctattagaataaatagagtttactccctggaaggcaaagatgttttaattagaaatctattaccataaaacatagaatcc

SEQ ID NO: 260334 - DNA, 419 bp, Homo sapiens
gtcagagtgtgggtggggaggaggaagagcattaggaagaatagctaatgttgggctgaatacctaggtgatgggatgaactgtgcagcaaaccaccatggcacacattacctatgtaacaaacctggacaacctgcacatgtacccctgaacttaaaattttaaaaaataaataaattgcccaaagtcatgcattgtgcaaatagtgaagctggaatacagattcaaatagtttgtcaacaaaacccaatcttaaagctatattgccaatcttggtcatacaattttatacaaaaaatatttgctgaagtcttatgtggcagactctgtgctagctattagtgtctcaacaacaaaaaatatatacaggtaccatctatgcctttaaggagcttaaagtgcaatgcatatacgatgca

SEQ ID NO: 260335 - DNA, 446 bp, Homo sapiens
  misc_feature (148)..(148): n is a, c, g, or t
ggagagactggggaggtcgagctgtgcgcgtggacacagcgcgcagagcgcgcggtcttttgcgcgtttgtgcgggccgcagccgcacgttggcaccgatggaactggggtcagtagagtgacagccaccagtccgcatgaactgggntaaaatgagcaacttctttaaccagaactgaccttgaagacaaatggctaaaataaaacatttgctgaattcactgggcgcatcttacaagtaatttttggattctgcattgactacctacaagtgccttctgggtgcaagtccacaggcaagatttgttctgcaaatcttccatgaccaaggtcacctctttggattggcagacccagggagtccatattgggaagataaattcacacttcaccccttgttgagatctccagccttgctcctctgataaccaggtcctacaggtatg

SEQ ID NO: 260336 - DNA, 2265 bp, Homo sapiens
  misc_feature (74)..(74): n is a, c, g, or t
accttcattgtaacccactcaaccctggattcttttcgcagaatgggcctgaaagtcattcagcagaacgtgcncaagttcctgcagctccgtttctggggctggtggaagctgtacaacaaggtcaagccactcctgaatgtggctcggcaagaagaggagatgaaggccaaggaggaggagctcaggaaagccatggcccaaacccaggagttggtaaacaaggtcaaggaactggaggagaagacagccacgctcagccaggagaagaatgacctcaccatccagctgcaggctgagcaagagaacctgatggatgcagaggagcgcctgacatggatgatgaagaccaagatggatctagagagccagatctcagacatgcgggagcggctggaggaggaagagggcatggcggcctcactgagtgccgccaagcgcaagttggaaggggagctgagcgacctgaagcgggacctagagggcctggaaaccacgctggccaagacagagaaggagaagcaggccctggatcacaaggtccgtaccctgacgggggacctctcactccgtgaagactccatcaccaagctccagaaggagaagagggccctagaggagctgcaccagaaaaccctggacgacctacaggctgaggaggacaaggtgaaccacctgaccaaaaataacagcaagctgagcacgcagatccatgagctggaggataactgggagcaggaaaagaaaatccgggcggaggtggaaaaggctcgtcggaaagctgagagtgacctgaagatgaccatcgacaacctcaatgagatggagcgttccaagctggatctcgaggaggtggtgaaaaagagggatttggaaataaactctgtcaactcgaaatatgaggatgagcagtctctgaattccacgctgcagcggaaactgaaggagcaccaggaccgaattgaagagctggaagaagaactagaagctgagagggccatgagagccaagatcgagcagaaccgcaagcgggaggctgagctgctgaagctgcggcgggagctggaagaggccgccctgcagagcgaggcgacggcctccacactgcgcaagaagcacgtggactccatggccgagctgacggagcatgtggagagcctgcagagggtcaagtccaagctagagaaagataaacaggtcatgaaggctgagattgatgacctcaatgccagcatggagacgatacagaagtccaagatgaacgccgaggcccacgtcagaaagctggaagacagcttatcagaagccaacgccaaggtggcagagctagagcgaaaccaagcagaaatcaatgccatcaggacccgcctccaagctgaaaatagtgaactgagcagggaatatgaagagtcccagagccggctcaatcaaatcctacggataaagacatctctgacgtcacaagtggatgattacaagaggcagctggatgaagagtcaaagtctcgcagcaccgccgtggtgagtctggccaacaccaagcacgacctggacctagtaaaggagcagctggaggaggagcagggaggcaagtcagagctgcagcgcctcgtgtccaaactcaacactgaggtcaccacctggaggaccaagtacgagaccgatgccatccagaggacagaggagctggaggagaccaagaggaagctggccgccaggcttcaggaggcagaagaagcagctgaaactgcccaggcccgggccgcctccctcgagaaaaataagcagagactccaggcagaagttgaggacctcaccatcgacttggagaaggccaatgctgcagctgctgccctggacaagaagcagaggctctttgacaagatgctggctgagtggcagcagaagtgtgaggagttgcaggtggaagtggacagctcgcagaaggagtgccgcatgtacatgacagagagcttcaagatcaagactgcctacgaggagtctctggagcatctagagtccgtgaagaaggagaataagaccctgcaggaggagataaaggatctcattgatcagctgggtgagggaggaaggagtgtgcatgaactgcagaagttgaagaaaaaattggagatggaaaaggaagaactccaggtggccctggaagaagctgagtcttccctggaggttgaagagagcaaggtgattcgaattcagttggaactggctcaggttaaagctgacatcgaccgaagaatccatgag

SEQ ID NO: 260337 - DNA, 1129 bp, Homo sapiens
  misc_feature (74)..(74): n is a, c, g, or t
accttcattgtaacccactcaaccctggattcttttcgcagaatgggcctgaaagtcattcagcagaacgtgcncaagttcctgcagctccgtttctggggctggtggaagctgtacaacaaggtcaagccactcctgaatgtggctcggcaagaagaggagatgaaggccaaggaggaggagctcaggaaagccatggcccaaacccaggagttggtaaacaaggtcaaggaactggaggagaagacagccacgctcagccaggagaagaatgacctcaccatccagctgcaggctgagcaagagaacctgatggatgcagaggagcgcctgacatggatgatgaagaccaagatggatctagagagccagatctcagacatgcgggagcggctggaggaggaagagggcatggcggcctcactgagtgccgccaagcgcaagttggaaggggagctgagcgacctgaagcgggacctagagggcctggaaaccacgctggccaagacagagaaggagaagcaggccctggatcacaaggtccgtaccctgacgggggacctctcactccgtgaagactccatcaccaagctccagaaggagaagagggccctagaggagctgcaccagaaaaccctggacgacctacaggctgaggaggacaaggtgaaccacctgaccaaaaataacagcaagctgagcacgcagatccatgaggtaatacccattgctgtggccacctctacaactccaaggccagatccctctgggggcacggggtccgaagattagttttgagaactggaccaacacatcccccggggcgtgagggcccttctgatgccacagctaaaggatcggacccagtttggttccttcttgccttctgacctcagactctcctcgtctaccttctcttgctgttcttgtctctgtagctggaggataactgggagcaggaaaagaaaatccgggcggaggtggaaaaggctcgtcggaaagctgagagtgacctgaagatgaccatcgacaacctcaatgagatggagcgttccaagctggatctcgaggaggtggtgaaaaagtatgtcttgtcgtcgttcgttttgtccatcacaatggtagcaat

SEQ ID NO: 260338 - DNA, 747 bp, Homo sapiens
ggaataccattttaaatattttagaaggtaatacaggaaaatttgaaccaatgtaaggaaggagttgttggatgtgactcaaagtgggaaccatgaagaaaaagagtcacacatctgactatattaaaactagaaacttaagtatgacaaaagacactgaatattagagggccagccacagacgtggaaggtacttaccttgcaattatctaccaggaactgacaaaggaagtgtccaaattacataaaggactacttaaggggggaataaatgagtgatatatgagagagaaccaaaaggtcaattaacagaaaaatgttttagctcactaggagtcaaggaaatgccagtcagcacagttagataccatttcacatccagtcagataatatcagggatggcaaacatgttgagaaaataattcatactttagtaaagttgaaattacatattgcttataacagcagttcaacatctgtctttttataagactaaagttttgcatcatatttaggtacagaaattgtcagaacacttaaagcttgtaggcatttgttgctgggagaagactgaattgcttttttcaaaaactggaaatcacattgatgtgttgtaaaagagaaccttagatttagagagggaaaaaaaactacagtattttgttaaatttatctacatttaaagatactaataaatgcagtttatgaactaccagtctcctatattggtcatattttgacaagtaa

SEQ ID NO: 260339 - DNA, 667 bp, Homo sapiens
cagttggttacccagaaccaccctggagtgtgcgccaaactcagtatggagcactttctttagagtggtcagcttcatgattgcaagatggctgccacagttccaggcatcacagacattactccccttctccctccccacagagaacaatgaagagatttttttttttttttttcctgagacagagtctcgctctgttgcccaggctggagtgcagtggcactctctcggctcactgcaacgtccacctcccaggttcaagcgattctcctgcctcagcctcccgagtagctgggactacagacgcataccaccatgcctgggtaatttttgtattttttagtagaaacagtgtttcactatgttggctagggtggtctcgaactcctgacctcgtgatccacctgccttggcctcccaaagggctgggattacaggcgtgagccactgcacctggccaatgaagagctctttattgtgtgtgtgttttggaaggaaaaagactcttccaactcacatctcattggccaaaatcaggccacatggtcgctctctggcagtaaagtttagctattccctgagagcctatggcagcgtaactgattgcatttgactaagtatttagggtgcatggatgtttggcaatcagcctaacctctcgctgcag

SEQ ID NO: 260340 - DNA, 338 bp, Homo sapiens
ctggaataagtaagacaccatcactccctttcccatttcttaataaaggggaaaggattcccctttataaaggattgcaatttcccccaattcctttattgggtctatcaaaggtatgcaataaaatgtcccactacttatacatgccatataatttaccagttcttcccatcgtcacttggcgagacttccctccccagttctctgtcctactgtttcaggctgagctggctactctctccttgccctgagattttacttatcttttgccacccatgttcctggatgccttgccttcctctttcatgattttgagtttttgagtcctggattccaga

SEQ ID NO: 260341 - DNA, 344 bp, Homo sapiens
aatgttttcgcaatttgagacgctgatgcagccgccgctgctccacctgcaatctgagcgttgcctctctttaatgccactttgataccgcgccttttgagtcctttttcctacatgtatttgtaatttatttctgcaacagctagaacttactgtggctgctgtttaccctctagttgggctctactgcgaggcaaggcaaaagtcaggtccgtcggcgccctctcctggtaaagctgcgaagctgcagcaaacagagctaaattggtattttcccgtttgctgcggcaaatttttattaaagtgtaccctatatttatgattattaaactttagtgttcgcc

SEQ ID NO: 260342 - DNA, 324 bp, Homo sapiens
cagagagaggttgccccagacaaccaagaggaaaagaggggaagcgagaaagagacagagacccaccatcctggccaacaaccctgcgaagagggaaattggcagtccatgcacaggacccagcctctgatcaagcccagcaggcacaggctggccacgtggagtgtggggccctccaagccgcgcccacccagaacctaggccagcctgccagcgcggcttgcagtcccggctcccacctgtgcctctccctccacacctccctgcgagcagagggagtcggctccagccttggccagccccagagaggggcccccacagcac

SEQ ID NO: 260343 - DNA, 385 bp, Homo sapiens
gtaaataaacagctgcttctaaagaaaatatctattcgtaatctaagatcttttagaatgaaacttgccttgctagtttctcattatcataactacatagatagattctaatttatcccattttgacctgatacacagtctaaccttccaagactgtcaagttgaagggaataaattctcaggcaattccaatgagtagaatctgtcttttaagattgcacaatttcctctagtgacagctatcaccctggaaaagacagtccaagtaatgaccacacattaacacagacattctcaatttcctcccagcatacttggcagacagctagagggtggaggggcaaagcaatgttaagtttcaataaaagagagagagaaaaaaagg

SEQ ID NO: 260344 - DNA, 629 bp, Homo sapiens
tgagatggagtttccctgttgttgcccaggctggagtgcaatggtgcgatctccactcactgcaacccctggctcctgggttcaagcgattctcctgcctcagcctcccgagtagctgggattacagatgcccaccaccacacctggctaaattttttgtatttttagtagagacggggtttcaccatgttggccaggctggtcttgcactcctgacctcaggtgatccacccacctcggcctcccaaagtgctgggattacaggcgtgagccaccgcgcctgacccagtatagtgctttttataattaattgtgtacttttaaaaaacctttattcatgataaagtaaatccagtctactgagtggctgtgctatatctttaacagctattttatctttatttccttcagtgttacagcttccctacatagtacagattatgttacctaattaaatagttgagctatgtcccattctagttaagaaaactgtcctgttgcctattttcatctgattaaaattttctgactttctttcaatatctgtttttttgtaaaccagcctattcagttttatgtcccaacgtcctgttctcttgcttgcccactgatttttttctccatcatta

SEQ ID NO: 260345 - DNA, 541 bp, Homo sapiens
cagctgctagtttggttaagcagaggagaaagctggatgtagtccatgagaatttccctaaaaatgggaaataaagcacatttcatctccagtctgtctgtggttaaagctttctaaacacattgaaactactgcttaatataagtttacagcaaaaatccttttgaatttggagaactgcaagatgtcttgctcatattccaaatcctttctgcaaatttcccaataaagagacgtaagttattgtcttccacagcagggattctcaacctcagcactatggacattatgaactgaataattctttgttggaaggtactgtcctgtgcattgtaggatgtccagcagcatgcctggcctctaataaaagtcagaagcaccccactccaggtacaacaatcaacaatgtctctagacactgctaaatgtcccccagagaacaaaactgcccccagtggtgaacctatggtctacactgagtcagtgtttcagatgattgttctccttgcatagatgaagacagccaagtaggaacttaaga

SEQ ID NO: 260346 - DNA, 143 bp, Homo sapiens
tttgaaactatcagttatacatctatcctcctttcaattttacgtcacttggatatctcctgttgacatcaaacgccatcgtctaaatggacattttccatcattttgcttcacctcttctcgtccctctccaatcccctcat

SEQ ID NO: 260347 - DNA, 678 bp, Homo sapiens
caagtcagtgattttcttctcttcattatagtttccagccaccaaacacgtaaaaatggctgtcagaaggcttccctacaccttaagtgcaaagagttgtgactcacttatccaaaaatcccagcatagagccagctgatttcacaagtatttacaaagtgttaccagagacttttgaggccccgtaaggctttacctttacttgcaaagtccgtttgagctaaactcctaaacaccctcttccaggagattgattgctcattttgcttaggttttgaggaggaaaaattaaaagcaagcaattgagccatgattaagtccctgttatttaccttcttttttctttttgtactaataattcttagtccacattctacatgagaatcagtgggtaaactttttaaaaagtaaagatgccttggctctaacccctaacaattctatttctatttatggagatgggagtgggaggaggggtcagtttttttgtaagtcccccaggtaactctaatgtatagcaaaggttaagaaccattgttctgtatacacacagtagtgaccatgtgactgctctgtgctggtgtgaaggttgtggtgcaacatgtttgagaataaagtaatcctgatgcccaacctaaagaaatgatgcaaaatgaataaatggaacaaatcaaagga

SEQ ID NO: 260348 - DNA, 363 bp, Homo sapiens
agatggtaaattatatatgtgtattttatcttaattaaaattttaaaaatcaggagtttagaaatttttaagagaagtgtgcccatagtgataagaaagaaagacccttttggaaaattttcttgaacaaattatacagtattttcttaaacaaattgtacattctgtagcagttaatacaccaaataagatttcagggttacctcttggagattgtatgaaataaaaacatttaggtgggcatgatggctcattcctgtaatcctaaaactttgggaggctgatgcaggaacaatacttgaggctagtacttcaagaccagcctaggcaacatagtaagacccagtctccacaaaacaacca

SEQ ID NO: 260349 - DNA, 367 bp, Homo sapiens
agggcccattttgcctctttgtttcaactcaggcatttgatccacagcaagcattggactattactggctttagaatgactcaagtaggccgggcgcagtggctcacgcctgtaatcccagcattttgggaggccaaggtgggcagatcacaaggtcaggagatggagaccatcctggctaacatggtgaaaccccgtctctactaaaaatacaaaaaaattagctgggcgtggtggcgggcgcctgtagtctcagctacttgggaggcttaggcaggagaatggcgtgaacctgggaagcagagcttgcagtgagctgagatcacaccactgcactccagcctgggcaacagagcgagactccgga

SEQ ID NO: 260350 - DNA, 219 bp, Homo sapiens
ctaaggaagtaaaaataatataattggattatctttcatctccttgccaaaaatgatttctctgctgctgtgtcttgacatcctccattggtccttcagatttacagccctaagaagacaaggagtgcttctgttctggtcaccactgaatccccagtgcctaatgcctggctcataatagactcttaataaacacttgttgagtgaatgaacatctca

SEQ ID NO: 260351 - DNA, 343 bp, Homo sapiens
ctgcgcgtgaggctcagggagggatgggatcctaaaagatgcaggcctgcctgtattcaggagtacccactggccctgcttactcccgcccgggccaagtggagaagaagttagatgagttcttaggaggagagaggcagcttctttgaggtggtcgagtggcatcacaaacaagcgttgaatggaaaaagactagaagaggcagagcctgtcacaggttcaccatcatccagccaacactatgggaaatctcacacccaccactgtcaaaccgaggactttggacttaataactgctcagaattaaacgaccttaccttccatgggtgagggcttactgcca

SEQ ID NO: 260352 - DNA, 241 bp, Homo sapiens
atatatgtgtgggttttttcctgggtgctgttatattgatctatatgtctatcatgccaacataacactgtttgttcagtagtaagtcttgaaatcacatggtttaagttctttttgttcttttttgaaattgttttcactattctaagtcttttctatttccatatcaattagagaatcggcttgtacatttctacaaaatacttctgggaattttaatttccattgtgtgaattcagtg

SEQ ID NO: 260353 - DNA, 1167 bp, Homo sapiens
accctccgcctgccccgggagcctcagagtctggcccaggcaggtcggactggactccgaggaggggaggttgagccaggacctctagaacaccatggaagtttactccagagatcaggctgagcatgtgccagtctctctccctccctcaagaaacctatggagatgatagaaaacacacaaatagataaatagccatttataacgtacacagagcacaactgtggtggaaaatgacaagggagactcagggtgggtcttgacaacatcccacagaagaggcgctgacgcagcccccaccctggtggcgaaggaagtgctcccaggatcattgtcatgtcaccagagcccagcagggccagcgtcaggggagctcacctcaaggaagccgagctaatgagacagtcagaaatgagatgatgccagccaggcgcgggggctcatgctgtgatcgcagcactgtgggaggctgaggtgggcagagcgcttgagcacaggggttcgagaccagcctgggcaacgcagcaaaaccctgtctctacaaaaaaacaaaattagctgggcatggtggcacgcacctttagtcccagctacttgggaagctgaggtgggaggatcacttgagcctgggaggttgaggattcagtgatccaagatcgcgccactgcactccaacccgggtgatgaaacaaagccctgtctcaaaaaaaaaaaaaaaaaaaagtcacatttccagagtgctcggggcgggggggcagaggctgtggaatcaggaatgggtggtatcggaagccagcaagccaccgtggagtgcgcgcctgcctgcgaggtggcggcaggacctcgatcacacaatcatgcaaacgcccgctgtgtggtggccaaggagatggggctggagctgcctgccccgaggccaagggcctggtcagcggggcgggtggctggggtgggcccaggtgacagcgaggccgagtggctgagacccccacatgccaaggccccaagagcctccccgcctgtccggaacacttggaacatgtttccctcgcacgtgacccctcgagatgcttctgagacgtgccgggcaagacgtcaccacagggagcccgggccgaggcgcacgcctctgatttcctgtagctgcaagtatatccagttttctca

SEQ ID NO: 260354 - DNA, 649 bp, Homo sapiens
tggggaaggggtgtgaaatcacgaggaataagcaagcatggcagctacaggagtttggtaagattcacagggtgaagtgtggctctgtcactgccttggggcgtcacaggagaagaatcccattcccctctttagtgctaaggttggggcggcagcagcaggagggaggtgagctgtcctttacttccatttctagctccatttccaaaacgcatccacagtgcagggtgggagtaaatggcccaggacagcaggtaggacagatataagactacagaaagaacttctcagggctgagtccttggactcaaagtagtctctggggctcaaacttgctttgtcagaagccctccaaccaagcatgcgaggctggtgacacgtgggagggcatggaggccccagcattgtatgccaaccaatgggagctgcagacaaccaatctcctacctacctttaagtctgacctacatttgtccagagtatctacacctctcccatatcttctgaaacaatgaagcccagcagtggtctccaatcctaggaagtccttcctgctatctaacggccatccctcccaccgcagccaatcttccactgttacctaacccaatttggtcatctaaacaagagcaatggacaggggcccttg

SEQ ID NO: 260355 - DNA, 691 bp, Homo sapiens
aagatactgtatatacttaaaaattatttcaaaagaatttaaggttcaaattgtttactaaatttaattgcccctttccttttcctacatccatccctattcatctgaatctataaatttctgctgtaatttaattttccatgataatttttgaagttgttagtatataacaatctgccattctgcttgcatacagaataaatggaatcattgagaaattctccactgttttcaaatactaaatgcattttaaaattgaaaaatattttattgatatctgagtttaaagatagttcactcattaagagcctaagagctcttcaataagttgtaatcgtgtggtataaaagcttcattctgattactcaatcatgactaaaataacacttaagacacccgattcctgcatttcagcagcaacttgctgaattatcttttcataattactaatatgctaaagagatattattgagccaagaattgatgctgttgcctgacaaaaacagcgtagtttcagaaaaaggtaataccaaaacataaatactgttttatattaaaatttttaaaatataatgttgctttggtagccatgaaacttgtcaattttttatcatcacaaacataaccatcaccgaaattagattttgctgtttcaggttacttcctgaaatatatagatatttatttaggg

SEQ ID NO: 260356 - DNA, 435 bp, Homo sapiens
gcagcctaccccccttaccaatgacccacgccaccctcacactcccccacacacccccatcacatgtcaagttctttgccaccccaaagtgaaggtccgcccacttccaggagtcctcagaagttatctgtgttgttctgagtcacgcacgaaactcagtgaaccagacagaatggattttccccaggcagccaccacaaccctggagttggaatcaggagacctgagccaactgagtggggggcaattggttaaagtcaacagtctacctcctgtgtgatatcaagtgagccatgtccattcttgagcctcagtttcctcagttttaaaatgaggagtggcctgaatggtttttgagctgtcacagatggaaggagaggctctaaggcagtggaactatctgcaggtgttggaagggtcagtcaggaagacttt

SEQ ID NO: 260357 - DNA, 539 bp, Homo sapiens
ctgactacaatgaaaataaaggacagttctcggctcccagaatccctgtcacatatcagataatcaaaactagtctcctggaaatttgctgattttacatatttctaaaatctgtaaccttgtaaatattctgggctctctgcatgtttcctgtgccttaatgcagttacaaggggtggcttcgagtaaaggagggatggctttttgaatatttaaggagagaaattgtgaaatggtcattttcaggtgcgggaaagcagacctgctaaggaaatgcagttgaaggctcattgagatttgcagtcatgaatttaaagtgaaacccattggcatagctgggtgatttttcaccctagtttcagttaggttaagaaggtaataggaaccatcaggagacagggttataggggattttgttgatgacaggctatgattccccagagggaagaggtgtggaaggcaaggaaggttgagatactgagttggattagagaactatagataatgatgggaatatagcaagaccccattctccacaa

SEQ ID NO: 260358 - DNA, 482 bp, Homo sapiens
tgttactaggtggagcttctctgtaaaaaaaaatactataatgaatcattttaagtggagcatgtttttgtaaaatggatgatcatcaccctcctttctctcactacctctcccaccattcttttgtttcacatattttatactgtgaaattttcaaattgcagctgtcaatgttgtgcttgtgatgtatttgagaatgcattctatcctcatggaaaagaacacattcaatttgaacttcaagtttgttagttttctttaattatgatatttgcagtcattcttagaagagatatttgtctccaaggattggtgcacagtttgatttctgtgggaagatatgctttaaaatatgtatcggtgggggttgttaaaatagtgggattggggtggaggtggaattgctatttaactggcagtttcatcagtatagaaaaccttgatgtattcatgtagattatagattaaaaatttaaagtagt

SEQ ID NO: 260359 - DNA, 631 bp, Homo sapiens
atgaaaggttgaagggattttgggtggtggggtgggggggaatggcgtagaagttggcctcaggtataaaaattgagctgccccaaggtagaaatggaaaatgtctcgcccggctgaattattccaggcaaggtgaagatgaccggttctccccactaagaaatgtctcttatatgttgggttcgcccttatatgttgggttcagagtaagtactttcttcccctgcgcgggagttagggatagcagaactgtatttaataaacgaagactgaaatggggccaggatgcagtgagtagatccagtaggttacatggtcctgagagataagagactcaaagagccacccagcagtgaagacacaaactaccaccccctccaccaccaccagtgggcttccgtggagtctggggtacagatcagactgcactgtatttgtttccagaatggtcaattcttagtaatcctacccgagactgtctttttctctgccctcccagttcgtgagtggaattctatgcctacatttgcctgatgcaagtttttaaatatttccaaactgaccaacccagtttctcttaacttcttccttccccaattttctttcatttttaccaagttaacttcacatt

SEQ ID NO: 260360 - DNA, 257 bp, Homo sapiens
agctatgtgatgtctgcatgtgttggctggggctgtgtggcctaaagcacctcacctcatctgtacaatgggcatcataacactgtgtatctcaaaggagagttgtggggatcagaaggaaatacgatgtgaaaagcccccagaaaaattcctggcacatagaatgctcccaatcatggagagtatcatgatgatgagtctttataactcacctagtgatggcaccagtgtggcaggtagctgagagtgatcaaagg

SEQ ID NO: 260361 - DNA, 392 bp, Homo sapiens
atttcccctgatggctaatggatgctttttatgtgctgttggacatttgtatatcctctttggagagaagtgtgtgaaaagactcaaattctttgcccatttttataatgagttttttaattattgagttgtaagagtcttttttatactctagatgtgtcccttattacctgacatagcatctttatttttctaatccacatttcacaattctctcaaaactcaatcctaacactctctcacaaacacacacactcacacaaacaaacactcaacaatctaggaaatgaacttcctcaacctgataaaggctattaatgaaaaacttatagctcactactttccgcacactgcctgcctatgggctagcctttctcctcaaggagcagttt

SEQ ID NO: 260362 - DNA, 285 bp, Homo sapiens
aatgataccattagcaaaaggccagatttgtgtgtgtgtgtgtgtgtgtgtgtacctattatgtagtcatcttcactcagtgggatatggcaaaaaaactcatttctttgtcaatgtttgacttatgtaatgagaacaaatatgtatctgttactaaagaaaagacctggtgagctcaatgaatttgtaactcataacacactaatttcaccaacctaacatttgtaattctgtttgtttctatttaaagaaaattagaattaaataaagagcattggaagctga

SEQ ID NO: 260363 - DNA, 182 bp, Homo sapiens
cttccttatccctctgttttgactattcaagaccaaagatatgcagagttcaatgggggtagtggttaagagaacacatccttaaaaattattcatcaagatgagattgtggatctactgcatagtaaaatacaactttggcaagttacttaatctgtcttagcttcagttccttctttgtg

SEQ ID NO: 260364 - DNA, 444 bp, Homo sapiens
agactgagctctccagcctccatctcacaacaaatctgaagagggcccagcctcagttacagcccctcttactgcagtctggcaactatcctgtctgtgcagggacctgctgagaggcaaagacttgtctaagacaatgtgatagacaaggcagcctccattccacaatagatcccaaagggcccagtctcagctccagctcttcctactgcacatgcttgtgcaggtatctgctgggtgatgcacactcatgtaagccagtaagacaggccaactaggctcctccccacagcagatcctgaaggggccaatctcaactccagcccctctagctacagcctgagacccatcctgccagtgcagagacctgctgagaggcatgcctgctgggccattggtatagtttttgagactcaggtccgtgaacagtattcccttacaggc

SEQ ID NO: 260365 - DNA, 283 bp, Homo sapiens
gagcggcagcttcccggcaccatccctcagtccctgcctctcattctgctggagatggccccgagctcagggcgggagcaatcctacataactcactacccagaatggaaatgccacatagcacatttaattctgcactgacagttctcgggaaacaggcctagttctccatcgacctctaaaatagatgatggttttggtaatagcactttcttcaggaaattccattcatgttcattcatttattttagaccacaaatattcatgaattttgtacagtgtg

SEQ ID NO: 260366 - DNA, 407 bp, Homo sapiens
tgagtgtcttgcctttaacaggctttgactgaactaaaaccacattttccagtcaaccttatagtgataaaaataatactctggtcttaattaatgtactgtgtctaaaataatgtattatatcagttattgtaaccacccaacaagttcttgcctgctgcccaggcagagccaatttatcaagacaagggaattgcaatagagaaagagtttaatacacatagagctgggtaaatgggagactggagttttatattactcagcctcagtgaaaattcagaggctgggattttttaaagatagtttgtctgtaatcccagcactttgagaggccgaggcaggcggattggttgagccttaggagtttgagaccagcttgggcaatgtggtgagatgctgtctctaca

SEQ ID NO: 260367 - DNA, 440 bp, Homo sapiens
tgaggtcgcacaacagacaggcagcaaggcagggatccaagcctaggggtgggctgctctgaggcaacacccatcctcctaccacctctgcttcctgagtcctggcccctgtttcccatgctttttaatgttcctcgcagtcccagccagggcactcagcaaatgctggttgaataatctttcctggctggtttaagggaaaccaggtttgcagcaggagtgcaggaaatgcgaccccttgaacattccactctctttcagatttctatctggtccaagttgcccatggatccctgctagtgtactgcatgccactccaacaccaggcagtgctatgctgtgtggcaccatatctcacccaggagtgaaaccaaatcatgccctcagggaaaatgagccggttcctttttattttttaaatagcagagaataaagttatg

SEQ ID NO: 260368 - DNA, 685 bp, Homo sapiens
tttaaaagtcatgtgtagatttacttagcttaaaaatggaaaccaggaatatgaaaaaggagaagacatttaagaagacaaatgattacaaaatggtatccattgatcctctgtgaaatgtttgtttgtttgtttgtttgtttgtttgttttgagacggagtctcactctgtcgcccaggatggagtgcagtggcgcagtcttggctcactgcaacctccgtctcccgggttcaagcaattctcctgcctcagcctcccgaatagctgggattacaggcttgcgccaccacgcccaactaatttttgtatttttagtggagacggggtttcactatgttggccaggctggtcttgaactcctgacctcaaatggtctgcctgtcttggcctcccaaagtgctgggattacaggcatgagccaccgcacctggcccgaaatatgttttttatgcaattgtattatgctcagtgagaaaaagaatattctgacttgaacatatgcaaagtcaaaactgtggaaaggaactaactacagggctattggttgtatttttttttttgaaaattacttgaataattgttgattccagaggctttagtaaagattatattgagacagaaacacagtttaaatcaagcaatcggttatctagggatgcgcctacacagtgaatgtatcaaaca

SEQ ID NO: 260369 - DNA, 469 bp, Homo sapiens
tactatctccctaagtggatgacaaagttttcaagggcaaggaccatgcctttggctgcaacacctagccagtagtcagcacacaaggtgggcgatttactttcattattgataatgatgatatattactgtttccctgaactaaattatgtctcaaaggtctgagcatatcagtggcatttccaaagcaaagtcatttattctcagggaatgacttatactttgcggaactgcagctcaaggagatagaattttatttggaggaagaaatgcactgtgtcaaaactggaaaacttaaattggctcctctgattttatttgaagctatctgatttgtaagacatatctaagagagtcaagctgctctcctggtttgagttctgcagtcatgcatttctattgcatttgctgtctcctcctgggtgtcaactagctaccagctaatatatattctagaaacaaaagcaag

SEQ ID NO: 260370 - DNA, 356 bp, Homo sapiens
acagtgaaggttataagacacgcctgagcaggcctgggctgtggctgtctgggtgccatagcaaagttatgagataaaccagtgcaaggctcttttgagcaagtctggataacagccatctgggctgcatagcaacagtcacctgtcacaatttgattaactgcctttgttttgcctctgtatccttgcttttgtgccactatgctttataccactgtaagcttgtttcaagctagcccaccgccttttagaagtgtgtaaaaaagtcaagtgctgtctttgttctgggcccagttttcggatgttaatctgctggttctgagtgcactcaataaatcctcctatctcacccccac

SEQ ID NO: 260371 - DNA, 486 bp, Homo sapiens
gtcaaacacctgaaaaaagacacaagtcttgccctggtggattacatttcctttcacggtctatcaatctacattttcccaaactgtccatttctggaacctacaaactcaagagagtccttaggaatctgggcatcaccaagatcttcagcaacgaggccgacctctctggagtcagtcaggaggcacccctgaagctctccaaggctgtgcatgtggctgtgctcaccattgatgagaaagggaccgaagccaccggacccccccatctggaggagaaggcctggtctaagtatcagacagtcatgttcaaccggcccttcctggtcatcatcaaggatgacatcaccaactttccgctcttcattggaaaagtggtgaatcccacccaaaaataactggctgtcactcctcagcccctcccctccacccctggccccctccctggataacattaaagaaaggctgaattgccctctgcctgcg

SEQ ID NO: 260372 - DNA, 724 bp, Homo sapiens
cttaagacaaggcacaaatccttttttccattaatcaaaactttacagaggatataagcagtaattttatcattcattcaactggtttgcacagggagagggaggccagaagtctgactggtaagaacttttgcccttttcggggcatgtcaggcttctgggttcccttcccctgagctcatttaagctaagcagtttaaagtttggggatcttaacttttccccatttgaggatgcatctaagggaagtgtcctgtagtacaggacacaattacccatccacgaagagaagacagagttcgaggaaaaagaaggctttttttccccaaaggaatcccagtgattcaggaggcatttgagagaagtacagactgaagatgaatggctacccatctagaaagaggggaggcatccctaggtcctttctcttcctagcaaatacctggggtacgtgagggagagaaataatggtgtcccattctttcttctgtccttatatccccgagtcctgggcaacctcggcagggtgccacccatgaatgccaatgcaacttttcacccatgttaacagggaggcctaatgggtgggaattatccacatttacctacacgcagactccttcctgctgtggtaacttttgagttccctataccttgtctgtgtcatagatactagcatgacctctatctatgaaatgggagggggcctaattgtcaggaatca

SEQ ID NO: 260373 - DNA, 158 bp, Homo sapiens
taatctatctgcttagaaaaagaataactttgttgcatattttaaaatgtgaaactctgagaacttgtgtgtaaatattaaaatatactcagataatttcattatattgaaaattcttattactgtattgaaaataaaccaatgatgaatcctttagt

SEQ ID NO: 260374 - DNA, 421 bp, Homo sapiens
agagtctgagaagcactgctttagagcacctgttacagggaccctggacctcaagaggacttgggatcgacctccccaccaaactgactgaggactgtgtattctgctgatcttctgcatagcaacagacctggtttaccttcagagactcatcaaactatctgagagaatgcaattcctttaagatctcttttctctgtgtgtgtgtttttaaatatactcttgcttagagaaaaccatcagattggttctattacactcagatttaagatcaaacatctttttttcagagctttatggattctaataacaatagaaagtactgaaataagcctattttcgtggctgcctttcaatcagtatgtaacacactttccattttgtcttcaccagaaataaattgtactttaaatctctgctc

SEQ ID NO: 260375 - DNA, 442 bp, Homo sapiens
gacaattgtaagtttgcatgtattctttttctcctaactctgtttagactttgtattcaggatagaaattaccttttctaagaagttttaccaagctgagtgtaaatctataatacctcagcagtaaaacaatcccagagggataattttgtgcaaccatttcaatcttgataccaattaaaatggtatgatctatctcaccgccatcacacaaaacaggtttctatgccatctcctcacctcttgcttagagaaaaccatcagattggttctattacactcagatttaagatcaaacatctttttttcagagctttatggattctaataacaatagaaagtactgaaataagcctattttcgtggctgcctttcaatcagtatgtaacacactttccattttgtcttcaccagaaataaattgtactttaaatctctgctc

SEQ ID NO: 260376 - DNA, 423 bp, Homo sapiens
aaagatgtcacttgacagaagcaatgtgtgccattccaaagctacaacagtggagttggtaggtgtgtctgggccaaacagtggggctggacactgggtcggtggcccaaaaagagtgctaaatttttgctgcacatgtgtaaaaatgcagagagtcatgctgaacttaagagtttggatatagattctctggtcattgagcagatccgggtgaacaaagcacctaagatgtgctacaggacttgcagagctcacacggtcagattaactgatacacgagctctccctgccacatctagatgatcttgactgaaaaggtacaaattgttcctaaagcagaacagaaagttactcagaagaaaaggatatcccagaagaaactgaagaaacaaaaacgtatggcacaagaataaatttggcata

SEQ ID NO: 260377 - DNA, 1051 bp, Homo sapiens
ggttcctgcagcagccactgccctgcccaatccctcccataccccaccatgttggtgggtacccccaacctgctgacactggatgaagctgatgccacctggaccctcatcaaggataaggtcatcgaggagcactttgggcccaatgcagtagcagtacctttcctgtcagatgcagcctgctatgacctactgggtgtgctggtaaaacagtcccgcccagcccatacccgcctggctttgccaggtcggcagggccggagggcactgaaaccagtggggccactaccaagcctcctggagcaggcaggatctgagggtgccttcgcccactgcactcgggaatactcaccaaatggccgagcagagagagcctatgaagagacgcgaatgttggatggacagccctgcaagatccgcctacatatgggtgacctgcgcaagaaggttgccttcctgttgctgccaccagggcaggtgagcctacagcagactcttccctggctccgaagcacccacagcatctatgtcatctaccaggtcttctcttgttcctggctgcagctggggctgacgtctacagcccgtgagccccagctcctccggctacttcggtcattacctgttgccttctcctgcctcaagttttcactgcagtctaagggcgtgctgggaccacagaagcctctcactaaagacccattgccccatggggccaactgggtcagacccaacctcagcatcatgccgcctctggcccccacatcagcatctgctgatacaactgaagctgctgatgtgcccccacctgtcccagccccacctacgccacctccccaggaagggccagaggacaaacccaccagattctcctacaagggccgaaaccccttctggagggggccccagatactgtcagggtctatcctcagagttcgacagtgacgactgaagctgaagcaaaagattccgggggcaaagcccccaagatctggcataggggtactggtctctaataaacatcagctgctgctcccccaaaccatcctgg

SEQ ID NO: 260378 - DNA, 383 bp, Homo sapiens
acagcaattaagccttgctttcacagccgctgaagcagaccaacagatggttgtttaattgtttataaaaccaaacattaactactgggcttggcaacgtatctcttctcctgaagcctctcaaagcagatatcagacaacactctggaagatgctgagaaacatcaaaagatcaaaggtcgaatcttggaattcagatctgtcattgacctgccttataacttctgtcaaactgcaatgtggtgagattgttcacatgtttcacagcagtgttgcatggaatgactaatggccttcagttggttcctgtgtagatggtaaaatggaaagctgttcacaaaacccctttctagcaaagatgcgtctctgccaagtcacatatg

SEQ ID NO: 260379 - DNA, 250 bp, Homo sapiens
tcatgtccggaaacacttggtgaaggctccaggatggaatgtgccagtccaccagcagggcagccccccaggactgcatgactctccatgctgtggatgagaacggctgtacttacgtcacccttcctgccccttcagcccttgttttaaacactctttcagaaatcagagctaaacaatgcagaataaaatatttgattatgtagaaatgcttttaaatgttttaaagtaggaataaaaacaacaaaat

SEQ ID NO: 260380 - DNA, 222 bp, Homo sapiens
aggcctgaggttcattctcgttctctccctcttccctttccccttcctccctcctgccctcgaatctgcaaggtctctccgggtggctgtgttctgccagggcctcccaggctccaagatcactgccttcagggagcccaggaagagctgcacatccgctgcctctgtgtggcaggcgtgtccgagactgcaactcctagttcccacctttcacacctcatc

SEQ ID NO: 260381 - DNA, 549 bp, Homo sapiens
ccacacttttatagcttttcaatatctcacacaatttgattgtaaaaataatgcttctattattgtgatgaatgcaattagtgcttcatgaaagttttccttgaatatgtatccatccttcttaaggataatccagctatgttcagctttacagaaagaatatagtagaaccacttataacattcagacagaacagtgatacgtgaatattttccttgagaagttagtgctgtttcagtttttctctgacggtatgccttatcaataaacaataaataatgagacacatgaccggttcctctctatcagcctccttctgaatctcttcattctgagagttctgcccataaagttagtcttgcatttatttcttcttcttgattcccaaggaatgattcagtagtacattctgtgaagaatgtaatacttggccaggcacagtggctcacgcctctaatcccagcacttcaagaggcggaggtgagaggattgcttgagcccaggagaccagcctgagcaataaagcaagcaagacctgtctctaccaaa

SEQ ID NO: 260382 - DNA, 707 bp, Homo sapiens
gggcacattggtcctgtgggacaatttagcttctcctttggccacatagagccaaagattcagagacatgcctgtgtcagtatggcatggggccctgatgattgtacaaaacacatgccagtggatccactgggtgcagccaccatccagccaggggatggcatcttttgactgacactgaacatggtcattctgcccaatgggacaaactacatgaaatgatagtagccatgcaggctgcccccaacactatattttgctccatttccactaaatcatgggccattgccaacagcccagctgtctggtcaggaaaatagcaactgagtgactgaactattaaaggatctcatgagtggagaaaaggactatggcaatagcttgcttcctggacagctaaatatatgtcactctattagatgctggggctaccatggccacccttgagaggaatttatgtcatgtttttggatattccatgagacttcactctgaccaagaaacagcctcactgcccaatcaacataacaatgggcacactctcatggaaacaaatggactttccatgcaattaccaacacccaacactggctgctgtacctggataaacacctcagatatcctagaaatacaagtaggggtgatcataaagcaggctcactggctgcagacaataggacatcaaaagatccccctttcacctctta

SEQ ID NO: 260383 - DNA, 577 bp, Homo sapiens
ttctctagctttctgtcaggcacagtcagtggtccttaccttgcccacagattagtatcacctggggagtgtctcttcctaaaaacagcaattcattgctatccctaagttaaacaaactgtgtttgagcccatcacttattcacaattataattcctcctctgctgtctgtcttcccagctagatgtcaattccctgcaggcagagaccagttctctgctgccatgtctttaaggcctgatgcaccatagattaattcaaatccagtgtctaccactcactcggcttaatgtaagacaagatgaagactccagacttcagaacttcagtgtccgtaagtgtaacataaaagcttgcaggttatcgaagagaattaagtaaaaatatttctagaacctgcctggcaggtactcagtaaatattagttatttctataacatcccttgaagtaagccactcatgaaaataattatgaagctttcatatgcttcaaaattctgcaagagatgttttgaagctgcttttgtctgtgttaatgatttggtaattgtcttaagggctgcctaaagatatatgg

SEQ ID NO: 260384 - DNA, 698 bp, Homo sapiens
ttctctagctttctgtcaggcacagtcagtggtccttaccttgcccacagattagtatcacctggggagtgtctcttcctaaaaacagcaattcattgctatccctaagttaaacaaactgtgtttgagcccatcacttattcacaattataattcctcctctgctgtctgtcttcccagctagatgtcaattccctgcaggcagagaccagttctctgctgccatgtctttaaggcctgatgcaccatagattaattcaaatccagtgtctaccactcactcggcttaatgtaagacaagatgaagactccagacttcagaacttcagtgtccagggaaggggctgaaataccagactgcgatgtaccatctcttggttgctatgactgaggccattaaaatggcaggcattaaaagactgcacctcagtacccagctacaaagcctcaaggtcactgcattccacagcttcccgtcgcctttcattcctggcctcagagcttcaatatcctggcgagatcccctcgcattatatttcatgaggcttaaatgcaagctctcccacagcaagcccgagagtataatgggggttttaatacattccttttacctaaggctgggatccatttcaaaaagttacccaataggtttcctttcaggtgagctcattgctctgacattccaaaatgacattaaa

SEQ ID NO: 260385 - DNA, 419 bp, Homo sapiens
cacccatgtgaacttaattacttctttaaggttctgtctccaaatacagtcacaatctgaagtcttgggggttaggacttcagtatatgaattggggtgaaataattcagcccataaaaataccattgataagagctcgaaaaatgaaatacttcaatataaatctaacataagatgtgcaggatctgtatgctggaaactacaaaacgccaatgaaagagctagaagaagacctaataagcgaataaacacacagtgttcaaggattgggaagtacagtatagttttgttttgttgttgttgttgttgtttttgttttttttgagacagagtcttgctctgtggcccaggttagagtacagtggcgcgatcttggctcaccacaatcctgcctcccaggctcaagcgattctcctgcc

SEQ ID NO: 260386 - DNA, 519 bp, Homo sapiens
ttactgagaatagcatcatggtgtgttttagaaggagctagaaagttgtaaatctcaaattatccaaactaagccaactaaatattaaaagtcaagaataattttcaatattctggcaagtacttttgggagatttcattttccttgtcataaaagcattaaacaggaatcagatcagacagttcagcagcctcatatctgacttagcaaatagaacattttcccagatctcgtctgttttattgttaccatagctaaacctgagccccggcattgggattggcatcttcaaccacagcttcataaccctttagcctaaatgctgatgctcatctttaagcaagtcccccggactggggctgggtgttgcggtccaattcatgagaaatgatttggggttcctggggttttctgtgggtattgaccaaagtctctttttttgtcctgttcctttgtaacatatgcaacttataggaaggtggagggagaatgacaccttggggccacttagccttgtca

SEQ ID NO: 260387 - DNA, 254 bp, Homo sapiens
cgcttctttcaaatttcctcccatcagtttggctaaagaaaggaatttttctcctttagaaatgaattggcttaattagtaagtagattaatggcaattgctggtgagttggtttccagcagagtttcaccagagagggttaatcggagtcaggtctggaatctttcccagaactggctgccagccatttccaccaaccaatcaaccctacaagaaacagaggaaatgaaataaaatttgtattctctgtgcca

SEQ ID NO: 260388 - DNA, 359 bp, Homo sapiens
ttttttttttttccattttagcagagccaaatgaagattcttcaagatatggtatcttttcacttggctgtttctgcctgggtgactcagaggataagtatttgggaaagacatgaatggtagtgccagggtccaccagcccagaagcattggacgcattttatcataggaccatgagttggacaaaattttataggtgagaaaaaaagaaatgggctggagaagggagactgtcatctctcttggcttgctctgtctcctcctctcacccatcaagtcaagggaaccagacgcccaaagccaagttcatcagtccctccatcggcactgaaaaaatccatcagtgttcataagctgct

SEQ ID NO: 260389 - DNA, 401 bp, Homo sapiens
gcacataaagactttttaccaacagaaccctccacaaggcccctcaagggggctattcaaggctgtaaccttgaagagaccatctttgtagtcaactggatgtgatcatgattgacaaaatgcacacaccattaatttcaaatgtgatactttgtgttataaaaacatatatattggattttaagacattcgcactctgattacaaatataaaaaaattgttataaaagttggagaaaaacagaaaagcatgaataggaaaagaaagccacatcatctgcatataacaactgctagtaagttgatacctatctttcctgtatatgtgttcatctatgtgtgtgtacaagtatgtttgttaatagccccataaaagttgaatcatatttacacatttgattg

SEQ ID NO: 260390 - DNA, 905 bp, Homo sapiens
ttttctttctttttaatgttacccatccttgcaggcgcacagcggtatccatggatttgatgtgcatttccttgatagttaatgatgttgagcatctttcatgtgcttattaactctggaggtagacctgccaggccttttctaatgagggacaaccatggctttgtaccccaagaacatttttattgagttgctttgtgtctagatcattaggagaattaattaatactttctcttccaatgaagctcagctgcgtcctacatcgtgaatgaaaggctttctgtacatttttccaaaaaaaacctaggactattatggataagaagtgacattatctgagcagcacttgaagcaagagaaatacatactctgatgcattatttcagtctaaggaagtggcctgccacgcactctctctctctccgtgtgttttaatctaatatagcacaacttgtcgaagcaaatctataatgtatataaataacagaacagtcttaggtcctcatgaagagcgaactgacttttttatgtttaaaatcttaaatactggttaagttagaggtgagattaaaaagtgtaggaaaatcggctgggcccggtggctaatctcagcactttggaaggccgaggtgggcggctcacctgaggccaggagttctagaccagcctggccaacacagtgaaaaccagtctctactaaaaatagaaaaaattagccgggtgtggggcgggcgcacgaagtcccagctactagggaggctgaggcaggagaatcctttgaacccgggagacggaggttgcagtgagccgagatcacactattgcactccagcctgggcaagagcaagaccttgtcaaaaataaaaaaaaggtgtaggaaaataaactgtcatccagtacagct

SEQ ID NO: 260391 - DNA, 4237 bp, Homo sapiens
  misc_feature (2182)..(2182): n is a, c, g, or t
  misc_feature (3730)..(3730): n is a, c, g, or t
aatcaatatctgattgttagcaacagaacaagtgattgtgtggcatgcactataatcaattcaggatatttaatatagaatatgtgttatcacatgttaaatagggcatatgtttgaactttttaaaaaaacttttcccctaagcatttgagatcagctgaattaagctgctaatcattattcccctttgatctcattccttggtccaagtcctgagagagatactgttcctcttaaggatacttacgaaataatgacatggaaatattttgcttgtcacagtatattgcctgttttaagacctacttttaaaatcaaataagccataaattcttattgtaatgccatacttttaatcatttaaactaaatgtttaatcagaagttgtctaatacaaaaactagtcaaaaagcacgtgaaatgtatatactttaaccaagaaattctaaaaattggtttctatagagaaaactggacagaatgacaatgtatgtgacacaaaggtgtttaccacagcattttttatcacagtaaaaaatagtaaaaaaaaaaaaaatcacaagctaaatatcaatggagaattgattatagtataatataaaaatgatcatacaatgatcatatatacatttttcacttatatagtaagttgtccatgacttactggttaaaaaaagtgataaaactaaatatatgaatatcaaacaaaatacaaatagtgcttgcatttcggtggtagacttttatgtgacttgtactctgtactgaattgctaaaattttttacatcatattcccttttataagggttaaaataatataataactactgttttcattttgaacagacaaaagtacagagttctgggatacaatacagttcacaaatagtaatcctattttgtacccttgaaatttattagtttattctgaggatacaaataacatttatatatgcacacatgagccatcttaatatttccatttagttcagaatttcaaaaatatcaatcgatccttgaactttcaagtatagaaatgagtttagggtaaaatagtaacctttgaaataattacagtactgtattagatttgtctttttctttaattgcttaacttcatgaactcatttgtttttttctttttaatttttattcatctactttttccaatccccaatgtgattaaattcagaagaacagtatctttcaagtaaatgatgcaaaacttcctttcacatcatctcacgtcctttccccctttgtattagtagataattatactatctacagccagaacgatcttcctagacgtgatcatgctatgtgctatgaaaaaaaccttcaatggggacctccactaccgaaatgatgtggtagtactggcagtcgctcccaggtgcagtaactaggaaaaaatggatcaaatgcaaaatacattacagatacgaaagagctgtggaagcgcttaagactagatgtactaaaagtctttgtcttttctacatagctgagactaccaactgttttctttcctggcatcatttgccaattctaggcatggattaaagatcaggctttgtgtggactaaagcactttactggggaaaatcagcaggacttttactgactgcatgatctatcatgatgtactagaatctagaggagccctaaacccaatactgagtgagactagaacttaggggctaggcaaacaagttttcttaacaggccaataccacctctcaatgccaggcttcttcatatcctattctttctcccatttcctctcttgtatttggccacttctatccttttttcccccctcaggactctgctatttatccttcacgaaatccatccataaaatctaccaaatacgcaccacagaagctttctacaggcttatctttggcataatttttatttaacaacctcttattttccttgttgtatcctttcttggaagtggagtctttaattatctccagcacataggaagtgacctgagtgctgaataaaaaataagcaatggaatcgctacattaaagatgcttacaaacttttattatcaataaaatctataaattttacacctatcaactcagaaaaattcactgggaggagaaaaactattaaaaagcctaacttcaaatgaactcaaactttcctgccaaatcatanatatgaaaagtaaatcatccatgtatgctagaggatctctctgggagaagtgtcctacaatttataacattttacaagtggttaaatccattaaaacttcaaaaacttttagattgtctttctcctgtaatgtgatatcttccctaacttgctaaaactgagaacccagctagctttacataactgaaatgattgaatttgtttgcctaatacactaatatttgattttaatgaattatctcactcccacaaagtgtcttatgttagctgccttcatacgtggccttttaatcatccacatctaagaatactgagatgcaaaaattgctcagagtccagatgataataaggctaagtttatttctaggcacaagcatttagaacaaactgcctgcaagggacaaatttaccgccatgggccttttactttcacttggtcttacagctgcagaatccatccctaatttttgtcaactgcccattggccttttagaggttcttagtaagaaaatcaatggctgaactaactactgcgaaaactgaaagcacattatcttctcatggtaattaagtcatttaattaatattaggaaataaaggaataagcactaataaatggccatttagattctgggttttgcgtggtgacttagatgtcttcagtttcatggttaagagtgtaaggactttggaatcagtttctaattttaaaattaaatttcatcatttgctatctatgtgaccctggaggcaagttatgcccctttcctttgcctacatttctccatctgtaaaatacaggttatactgtaaataatcatggtgatgttctgaagagaaaagctatcataagcacttagcaaagtgtttggcacattctaattatgcaacaaaagctatcatcatgtccacagcttcaagttacctcttgtaactaacacttcctaaattcctatggctaaattacaaatttctactcaagtgaattaagtcctgtgattagacacctactttccctgaaggttttaaaattatcttcagattctggctttcatttgtcttcccaatggctttctgttcccttaaatttgtcctccatctctgcccccaattactcagctctttcctacagaggattttaagtagctttactgggggtatggtagaaagagaaaggggacttgaaggaatctttaaggcatcaaaaatagtctaagttggcctcaaatatgaactgagtagtctgggctcaatctgttactggaattcagctttctttagtaggaagcctttgaaggttttacataaaattataatgatcccatttattactatcagcctaaagaaccatttaaaatttgtgaattttcttgacacaatttccacatttttctgtaccttaagaatgtatcatgcctagttttatcaatcatgttttatcactgatactaacagaatcaagggtctgtggtacatttattttgcttttgcccatccagccttccttgcccattctggaaaaagaatgttttcaataaggggacccantacagatggtttgggtggcacactgagtatttagcaggtgagcctaaatactcctttattggatttacttattcccatgcttgtgtactgctacttacatcacaatcaaaagcagggattaccagttttttgaattaaaacaagatgccctcaaagttcagagtgctatgaatgttgcaacctcaaagttagctagtgaatttacattactgcctattacgactctaaatcctgagagccagaaaaggcctatgagcctcagatcttacaaatagcctggagtacttcttgaggatttgtaaacattccttggactcagcagtcccttgagaaaatcatttcctccaaaatctgtgtctatattctctatcttgtttaagctctccctccattcccaaacctaggaatcatcctaaattttcatctagaccctaattcaagatcctcagtctctcttctcttcctactgcttctgctgtatttcatgccctcatcctaactggtctg

SEQ ID NO: 260392 - DNA, 491 bp, Homo sapiens
caggtgctgtcagtgatgtgaatagtttttaagaaaatcatggagactttagttaatggcctgactcgcccaattaccaaagaagcttgggtgctaactacagaaacgtgggatgacctctttctatcagggtttgaaaaggcaggcttagccacatccaactacctcctaaaataggatcataactattttacctgctagcccctaatttgagggtaagggactgatatctctttgactggaaatgaggatatgatttcatacttctttcggttctatagtaatggaatccacaaagctgaccaaaatattatgttacccaggagccccagactcctaccctgtcaagacctttgtcagaaccgctgaaaaacaagcaggagagatttgagttttacttcctcttccgtgccctggaggtactaactagcaaataaatagctcagctaaagggataaaaaagagaagcaagggtcttgtgtcatctaaat

SEQ ID NO: 260393 - DNA, 1618 bp, Homo sapiens
gagtgcaagatcgttttctcagtggtggtggaagttgcctcatcgcaggcagatgttggggctttgtccgaacagctcccctctgccagcttctgtagataagggttaaaaactaatatttatatgacagaagaaaaagatgtcattccgtaaagtaaacatcatcatcttggtcctggctgttgctctcttcttactggttttgcaccataacttcctcagcttgagcagtttgttaaggaatgaggttacagattcaggaattgtagggcctcaacctatagactttgtcccaaatgctctccgacatgcagtagatgggagacaagaggagattcctgtggtcatcgctgcatctgaagacaggcttgggggggccattgcagctataaacagcattcagcacaacactcgctccaatgtgattttctacattgttactctcaacaatacagcagaccatctccggtcctggctcaacagtgattccctgaaaagcatcagatacaaaattgtcaattttgaccctaaacttttggaaggaaaagtaaaggaggatcctgaccagggggaatccatgaaacctttaacctttgcaaggttctacttgccaattctggttcccagcgcaaagaaggccatatacatggatgatgatgtaattgtgcaaggtgatattcttgccctttacaatacagcactgaagccaggacatgcagctgcattttcagaagattgtgattcagcctctactaaagttgtcatccgtggagcaggaaaccagtacaattacattggctatcttgactataaaaaggaaagaattcgtaagctttccatgaaagccagcacttgctcatttaatcctggagtttttgttgcaaacctgacggaatggaaacgacagaatataactaaccaactggaaaaatggatgaaactcaatgtagaagagggactgtatagcagaaccctggctggtagcatcacaacacctcctctgcttatcgtattttatcaacagcactctaccatcgatcctatgtggaatgtccgccaccttggttccagtgctggaaaacgatattcacctcagtttgtaaaggctgccaagttactccattggaatggacatttgaagccatggggaaggactgcttcatatactgatgtttgggaaaaatggtatattccagacccaacaggcaaattcaacctaatccgaagatataccgagatctcaaacataaagtgaaacagaatttgaactgtaagcaagcatttctcaggaagtcctggaagatagcatgcgtgggaagtaacagttgctaggcttcaatgcctatcggtagcaagccatggaaaaagatgtgtcagctaggtaaagatgacaaactgccctgtctggcagtcagcttcccagacagactatagactataaatatgtctccatctgccttaccaagtgttttcttactacaatgctgaatgactggaaagaagaactgatatggctagttcagctagctggtacagataattcaaaactgctgttggttttaattttgtaacctgtggcctgatctgtaaataaaacttacatttttcaataggtatc

SEQ ID NO: 260394 - DNA, 655 bp, Homo sapiens
agtctccgacgggccggtacagcccgtgtccccgccccgcgccatcgctaggcgacgtgcgcttttgccgcgccgtgctgcccgcgagggcagctgaggtggtggtggcggccgccttgtcgaggcatcgcgcgcccgtgaagtgttcgccgtcagtgctgttgggtgcctggagccgcgtcccccgtcccgaaaactgtccttgacagtacttgcgcggcccaacggccgccggcgcccccgcgtctccatggcgacggcctttttccctgcgaggaccccggcggcagggctgccccgcggcgcctgcttggcgcgacgctctagcggttaccgctgcgggctggctgggcgtagtggggctgcgcggctgccacggagctagagggcaagtgtgctcggcccagcgtgcagggaacgcgggcggccagacaacgggctgggctccggggcctgcggcgcgggcgctgagctggcagggcgggtcggggcgcgggctgcatccgcatctcctccatcgcctgcagtaagggcggccgcggcgagcctttgaggggaacgacttgtcggagccctaaccagggccaagtgtgcctcttgatcccgtaactgctaactggaagtcaagaaactaaaaacattatctcttgtacca

SEQ ID NO: 260395 - DNA, 2388 bp, Homo sapiens
agtctccgacgggccggtacagcccgtgtccccgccccgcgccatcgctaggcgacgtgcgcttttgccgcgccgtgctgcccgcgagggcagctgaggtggtggtggcggccgccttgtcgaggcatcgcgcgcccgtgaagtgttcgccgtcagtgctgttgggtgcctggagccgcgtcccccgtcccgaaaactgtccttgacagtacttgcgcggcccaacggccgccggcgcccccgcgtctccatggcgacggcctttttccctgcgaggaccccggcggcagggctgccccgcggcgcctgcttggcgcgacgctctagcggttaccgctgcgggctggctgggcgtagtggggctgcgcggctgccacggagctagagggcaagtgtgctcggcccagcgtgcagggaacgcgggcggccagacaacgggctgggctccggggcctgcggcgcgggcgctgagctggcagggcgggtcggggcgcgggctgcatccgcatctcctccatcgcctgcagtaagggcggccgcggcgagcctttgaggggaacgacttgtcggagccctaaccaggggtatctctgagcctggtgggatccccggagcgtcacatcactttccgatcacttcaaagtacagcagaccgaggacacggttgttaccaagaccaggctgttgccttggaagagcccagagcgtgtcaagggagacagccacatcacgccagaaatacatgacagctggattagccctgggagagggaggcccagatgtgggagctcaggggaggtgcagctcaacgtggagtttggaggaggctaccttgacctttgaatgccaagtgggagccagccagatgaaaggggttaaaaactaatatttatatgacagaagaaaaagatgtcattccgtaaagtaaacatcatcatcttggtcctggctgttgctctcttcttactggttttgcaccataacttcctcagcttgagcagtttgttaaggaatgaggttacagattcaggaattgtagggcctcaacctatagactttgtcccaaatgctctccgacatgcagtagatgggagacaagaggagattcctgtggtcatcgctgcatctgaagacaggcttgggggggccattgcagctataaacagcattcagcacaacactcgctccaatgtgattttctacattgttactctcaacaatacagcagaccatctccggtcctggctcaacagtgattccctgaaaagcatcagatacaaaattgtcaattttgaccctaaacttttggaaggaaaagtaaaggaggatcctgaccagggggaatccatgaaacctttaacctttgcaaggttctacttgccaattctggttcccagcgcaaagaaggccatatacatggatgatgatgtaattgtgcaaggtgatattcttgccctttacaatacagcactgaagccaggacatgcagctgcattttcagaagattgtgattcagcctctactaaagttgtcatccgtggagcaggaaaccagtacaattacattggctatcttgactataaaaaggaaagaattcgtaagctttccatgaaagccagcacttgctcatttaatcctggagtttttgttgcaaacctgacggaatggaaacgacagaatataactaaccaactggaaaaatggatgaaactcaatgtagaagagggactgtatagcagaaccctggctggtagcatcacaacacctcctctgcttatcgtattttatcaacagcactctaccatcgatcctatgtggaatgtccgccaccttggttccagtgctggaaaacgatattcacctcagtttgtaaaggctgccaagttactccattggaatggacatttgaagccatggggaaggactgcttcatatactgatgtttgggaaaaatggtatattccagacccaacaggcaaattcaacctaatccgaagatataccgagatctcaaacataaagtgaaacagaatttgaactgtaagcaagcatttctcaggaagtcctggaagatagcatgcgtgggaagtaacagttgctaggcttcaatgcctatcggtagcaagccatggaaaaagatgtgtcagctaggtaaagatgacaaactgccctgtctggcagtcagcttcccagacagactatagactataaatatgtctccatctgccttaccaagtgttttcttactacaatgctgaatgactggaaagaagaactgatatggctagttcagctagctggtacagataattcaaaactgctgttggttttaattttgtaacctgtggcctgatctgtaaataaaacttacatttttcaataggtatc

SEQ ID NO: 260396 - DNA, 1903 bp, Homo sapiens
agtctccgacgggccggtacagcccgtgtccccgccccgcgccatcgctaggcgacgtgcgcttttgccgcgccgtgctgcccgcgagggcagctgaggtggtggtggcggccgccttgtcgaggcatcgcgcgcccgtgaagtgttcgccgtcagtgctgttgggtgcctggagccgcgtcccccgtcccgaaaactgtccttgacagtacttgcgcggcccaacggccgccggcgcccccgcgtctccatggcgacggcctttttccctgcgaggaccccggcggcagggctgccccgcggcgcctgcttggcgcgacgctctagcggttaccgctgcgggctggctgggcgtagtggggctgcgcggctgccacggagctagaggggttaaaaactaatatttatatgacagaagaaaaagatgtcattccgtaaagtaaacatcatcatcttggtcctggctgttgctctcttcttactggttttgcaccataacttcctcagcttgagcagtttgttaaggaatgaggttacagattcaggaattgtagggcctcaacctatagactttgtcccaaatgctctccgacatgcagtagatgggagacaagaggagattcctgtggtcatcgctgcatctgaagacaggcttgggggggccattgcagctataaacagcattcagcacaacactcgctccaatgtgattttctacattgttactctcaacaatacagcagaccatctccggtcctggctcaacagtgattccctgaaaagcatcagatacaaaattgtcaattttgaccctaaacttttggaaggaaaagtaaaggaggatcctgaccagggggaatccatgaaacctttaacctttgcaaggttctacttgccaattctggttcccagcgcaaagaaggccatatacatggatgatgatgtaattgtgcaaggtgatattcttgccctttacaatacagcactgaagccaggacatgcagctgcattttcagaagattgtgattcagcctctactaaagttgtcatccgtggagcaggaaaccagtacaattacattggctatcttgactataaaaaggaaagaattcgtaagctttccatgaaagccagcacttgctcatttaatcctggagtttttgttgcaaacctgacggaatggaaacgacagaatataactaaccaactggaaaaatggatgaaactcaatgtagaagagggactgtatagcagaaccctggctggtagcatcacaacacctcctctgcttatcgtattttatcaacagcactctaccatcgatcctatgtggaatgtccgccaccttggttccagtgctggaaaacgatattcacctcagtttgtaaaggctgccaagttactccattggaatggacatttgaagccatggggaaggactgcttcatatactgatgtttgggaaaaatggtatattccagacccaacaggcaaattcaacctaatccgaagatataccgagatctcaaacataaagtgaaacagaatttgaactgtaagcaagcatttctcaggaagtcctggaagatagcatgcgtgggaagtaacagttgctaggcttcaatgcctatcggtagcaagccatggaaaaagatgtgtcagctaggtaaagatgacaaactgccctgtctggcagtcagcttcccagacagactatagactataaatatgtctccatctgccttaccaagtgttttcttactacaatgctgaatgactggaaagaagaactgatatggctagttcagctagctggtacagataattcaaaactgctgttggttttaattttgtaacctgtggcctgatctgtaaataaaacttacatttttcaataggtatc

SEQ ID NO: 260397 - DNA, 2289 bp, Homo sapiens
agtctccgacgggccggtacagcccgtgtccccgccccgcgccatcgctaggcgacgtgcgcttttgccgcgccgtgctgcccgcgagggcagctgaggtggtggtggcggccgccttgtcgaggcatcgcgcgcccgtgaagtgttcgccgtcagtgctgttgggtgcctggagccgcgtcccccgtcccgaaaactgtccttgacagtacttgcgcggcccaacggccgccggcgcccccgcgtctccatggcgacggcctttttccctgcgaggaccccggcggcagggctgccccgcggcgcctgcttggcgcgacgctctagcggttaccgctgcgggctggctgggcgtagtggggctgcgcggctgccacggagctagagggcaagtgtgctcggcccagcgtgcagggaacgcgggcggccagacaacgggctgggctccggggcctgcggcgcgggcgctgagctggcagggcgggtcggggcgcgggctgcatccgcatctcctccatcgcctgcagtaagggcggccgcggcgagcctttgaggggaacgacttgtcggagccctaaccaggggtatctctgagcctggtgggatccccggagcgtcacatcactttccgatcacttcaaagtatccagcgtctgtgtgcaatttcgttttgagaattccttctaaccagatcaggaaagctctcttaccaggaatagccccaggaaagacaatatggattagacgtactccatgataactggcgttttgcatggttaaaaactaatatttatatgacagaagaaaaagatgtcattccgtaaagtaaacatcatcatcttggtcctggctgttgctctcttcttactggttttgcaccataacttcctcagcttgagcagtttgttaaggaatgaggttacagattcaggaattgtagggcctcaacctatagactttgtcccaaatgctctccgacatgcagtagatgggagacaagaggagattcctgtggtcatcgctgcatctgaagacaggcttgggggggccattgcagctataaacagcattcagcacaacactcgctccaatgtgattttctacattgttactctcaacaatacagcagaccatctccggtcctggctcaacagtgattccctgaaaagcatcagatacaaaattgtcaattttgaccctaaacttttggaaggaaaagtaaaggaggatcctgaccagggggaatccatgaaacctttaacctttgcaaggttctacttgccaattctggttcccagcgcaaagaaggccatatacatggatgatgatgtaattgtgcaaggtgatattcttgccctttacaatacagcactgaagccaggacatgcagctgcattttcagaagattgtgattcagcctctactaaagttgtcatccgtggagcaggaaaccagtacaattacattggctatcttgactataaaaaggaaagaattcgtaagctttccatgaaagccagcacttgctcatttaatcctggagtttttgttgcaaacctgacggaatggaaacgacagaatataactaaccaactggaaaaatggatgaaactcaatgtagaagagggactgtatagcagaaccctggctggtagcatcacaacacctcctctgcttatcgtattttatcaacagcactctaccatcgatcctatgtggaatgtccgccaccttggttccagtgctggaaaacgatattcacctcagtttgtaaaggctgccaagttactccattggaatggacatttgaagccatggggaaggactgcttcatatactgatgtttgggaaaaatggtatattccagacccaacaggcaaattcaacctaatccgaagatataccgagatctcaaacataaagtgaaacagaatttgaactgtaagcaagcatttctcaggaagtcctggaagatagcatgcgtgggaagtaacagttgctaggcttcaatgcctatcggtagcaagccatggaaaaagatgtgtcagctaggtaaagatgacaaactgccctgtctggcagtcagcttcccagacagactatagactataaatatgtctccatctgccttaccaagtgttttcttactacaatgctgaatgactggaaagaagaactgatatggctagttcagctagctggtacagataattcaaaactgctgttggttttaattttgtaacctgtggcctgatctgtaaataaaacttacatttttcaataggtatc

SEQ ID NO: 260398 - DNA, 2033 bp, Homo sapiens
agtctccgacgggccggtacagcccgtgtccccgccccgcgccatcgctaggcgacgtgcgcttttgccgcgccgtgctgcccgcgagggcagctgaggtggtggtggcggccgccttgtcgaggcatcgcgcgcccgtgaagtgttcgccgtcagtgctgttgggtgcctggagccgcgtcccccgtcccgaaaactgtccttgacagtacttgcgcggcccaacggccgccggcgcccccgcgtctccatggcgacggcctttttccctgcgaggaccccggcggcagggctgccccgcggcgcctgcttggcgcgacgctctagcggttaccgctgcgggctggctgggcgtagtggggctgcgcggctgccacggagctagaggatccagcgtctgtgtgcaatttcgttttgagaattccttctaaccagatcaggaaagctctcttaccaggaatagccccaggaaagacaatatggattagacgtactccatgataactggcgttttgcatggttaaaaactaatatttatatgacagaagaaaaagatgtcattccgtaaagtaaacatcatcatcttggtcctggctgttgctctcttcttactggttttgcaccataacttcctcagcttgagcagtttgttaaggaatgaggttacagattcaggaattgtagggcctcaacctatagactttgtcccaaatgctctccgacatgcagtagatgggagacaagaggagattcctgtggtcatcgctgcatctgaagacaggcttgggggggccattgcagctataaacagcattcagcacaacactcgctccaatgtgattttctacattgttactctcaacaatacagcagaccatctccggtcctggctcaacagtgattccctgaaaagcatcagatacaaaattgtcaattttgaccctaaacttttggaaggaaaagtaaaggaggatcctgaccagggggaatccatgaaacctttaacctttgcaaggttctacttgccaattctggttcccagcgcaaagaaggccatatacatggatgatgatgtaattgtgcaaggtgatattcttgccctttacaatacagcactgaagccaggacatgcagctgcattttcagaagattgtgattcagcctctactaaagttgtcatccgtggagcaggaaaccagtacaattacattggctatcttgactataaaaaggaaagaattcgtaagctttccatgaaagccagcacttgctcatttaatcctggagtttttgttgcaaacctgacggaatggaaacgacagaatataactaaccaactggaaaaatggatgaaactcaatgtagaagagggactgtatagcagaaccctggctggtagcatcacaacacctcctctgcttatcgtattttatcaacagcactctaccatcgatcctatgtggaatgtccgccaccttggttccagtgctggaaaacgatattcacctcagtttgtaaaggctgccaagttactccattggaatggacatttgaagccatggggaaggactgcttcatatactgatgtttgggaaaaatggtatattccagacccaacaggcaaattcaacctaatccgaagatataccgagatctcaaacataaagtgaaacagaatttgaactgtaagcaagcatttctcaggaagtcctggaagatagcatgcgtgggaagtaacagttgctaggcttcaatgcctatcggtagcaagccatggaaaaagatgtgtcagctaggtaaagatgacaaactgccctgtctggcagtcagcttcccagacagactatagactataaatatgtctccatctgccttaccaagtgttttcttactacaatgctgaatgactggaaagaagaactgatatggctagttcagctagctggtacagataattcaaaactgctgttggttttaattttgtaacctgtggcctgatctgtaaataaaacttacatttttcaataggtatc

SEQ ID NO: 260399 - DNA, 2303 bp, Homo sapiens
agtctccgacgggccggtacagcccgtgtccccgccccgcgccatcgctaggcgacgtgcgcttttgccgcgccgtgctgcccgcgagggcagctgaggtggtggtggcggccgccttgtcgaggcatcgcgcgcccgtgaagtgttcgccgtcagtgctgttgggtgcctggagccgcgtcccccgtcccgaaaactgtccttgacagtacttgcgcggcccaacggccgccggcgcccccgcgtctccatggcgacggcctttttccctgcgaggaccccggcggcagggctgccccgcggcgcctgcttggcgcgacgctctagcggttaccgctgcgggctggctgggcgtagtggggctgcgcggctgccacggagctagagggcaagtgtgctcggcccagcgtgcagggaacgcgggcggccagacaacgggctgggctccggggcctgcggcgcgggcgctgagctggcagggcgggtcggggcgcgggctgcatccgcatctcctccatcgcctgcagtaagggcggccgcggcgagcctttgaggggaacgacttgtcggagccctaaccaggggtatctctgagcctggtgggatccccggagcgtcacatcactttccgatcacttcaaagtacagcagaccgaggacacggttgttaccaagaccaggctgttgccttggaagagcccagagcgtgtcaagggagacagccacatcacgccagaaatacatgacagctggattagccctgggagagggaggcccagatgtgggagctcaggggaggtgcagctcaacgtggagtttggaggaggctaccttgacctttgaatgccaagtgggagccagccagatgaaaggggttaaaaactaatatttatatgacagaagaaaaagatgtcattccgtaaagtaaacatcatcatcttggtcctggctgttgctctcttcttactggttttgcaccataacttcctcagcttgagcagtttgttaaggaatgaggttacagattcaggaattgtagggcctcaacctatagactttgtcccaaatgctctccgacatgcagtagatgggagacaagaggagattcctgtggtcatcgctgcatctgaagacaggcttgggggggccattgcagctataaacagcattcagcacaacactcgctccaatgtgattttctacattgttactctcaacaatacagcagaccatctccggtcctggctcaacagtgattccctgaaaagcatcagatacaaaattgtcaattttgaccctaaacttttggaaggaaaagtaaaggaggatcctgaccagggggaatccatgaaacctgtgatattcttgccctttacaatacagcactgaagccaggacatgcagctgcattttcagaagattgtgattcagcctctactaaagttgtcatccgtggagcaggaaaccagtacaattacattggctatcttgactataaaaaggaaagaattcgtaagctttccatgaaagccagcacttgctcatttaatcctggagtttttgttgcaaacctgacggaatggaaacgacagaatataactaaccaactggaaaaatggatgaaactcaatgtagaagagggactgtatagcagaaccctggctggtagcatcacaacacctcctctgcttatcgtattttatcaacagcactctaccatcgatcctatgtggaatgtccgccaccttggttccagtgctggaaaacgatattcacctcagtttgtaaaggctgccaagttactccattggaatggacatttgaagccatggggaaggactgcttcatatactgatgtttgggaaaaatggtatattccagacccaacaggcaaattcaacctaatccgaagatataccgagatctcaaacataaagtgaaacagaatttgaactgtaagcaagcatttctcaggaagtcctggaagatagcatgcgtgggaagtaacagttgctaggcttcaatgcctatcggtagcaagccatggaaaaagatgtgtcagctaggtaaagatgacaaactgccctgtctggcagtcagcttcccagacagactatagactataaatatgtctccatctgccttaccaagtgttttcttactacaatgctgaatgactggaaagaagaactgatatggctagttcagctagctggtacagataattcaaaactgctgttggttttaattttgtaacctgtggcctgatctgtaaataaaacttacatttttcaataggtatc

SEQ ID NO: 260400 - DNA, 1180 bp, Homo sapiens
gtgatacaaggagctcatgccaggaagtaagtcctggctcaacagtgattccctgaaaagcatcagatacaaaattgtcaattttgaccctaaacttttggaaggaaaagtaaaggaggatcctgaccagggggaatccatgaaacctttaacctttgcaaggttctacttgccaattctggttcccagcgcaaagaaggccatatacatggatgatgatgtaattgtgcaaggtgatattcttgccctttacaatacagcactgaagccaggacatgcagctgcattttcagaagattgtgattcagcctctactaaagttgtcatccgtggagcaggaaaccagtacaattacattggctatcttgactataaaaaggaaagaattcgtaagctttccatgaaagccagcacttgctcatttaatcctggagtttttgttgcaaacctgacggaatggaaacgacagaatataactaaccaactggaaaaatggatgaaactcaatgtagaagagggactgtatagcagaaccctggctggtagcatcacaacacctcctctgcttatcgtattttatcaacagcactctaccatcgatcctatgtggaatgtccgccaccttggttccagtgctggaaaacgatattcacctcagtttgtaaaggctgccaagttactccattggaatggacatttgaagccatggggaaggactgcttcatatactgatgtttgggaaaaatggtatattccagacccaacaggcaaattcaacctaatccgaagatataccgagatctcaaacataaagtgaaacagaatttgaactgtaagcaagcatttctcaggaagtcctggaagatagcatgcgtgggaagtaacagttgctaggcttcaatgcctatcggtagcaagccatggaaaaagatgtgtcagctaggtaaagatgacaaactgccctgtctggcagtcagcttcccagacagactatagactataaatatgtctccatctgccttaccaagtgttttcttactacaatgctgaatgactggaaagaagaactgatatggctagttcagctagctggtacagataattcaaaactgctgttggttttaattttgtaacctgtggcctgatctgtaaataaaacttacatttttcaataggtatc

SEQ ID NO: 260401 - DNA, 1114 bp, Homo sapiens
agtctccgacgggccggtacagcccgtgtccccgccccgcgccatcgctaggcgacgtgcgcttttgccgcgccgtgctgcccgcgagggcagctgaggtggtggtggcggccgccttgtcgaggcatcgcgcgcccgtgaagtgttcgccgtcagtgctgttgggtgcctggagccgcgtcccccgtcccgaaaactgtccttgacagtacttgcgcggcccaacggccgccggcgcccccgcgtctccatggcgacggcctttttccctgcgaggaccccggcggcagggctgccccgcggcgcctgcttggcgcgacgctctagcggttaccgctgcgggctggctgggcgtagtggggctgcgcggctgccacggagctagagggcaagtgtgctcggcccagcgtgcagggaacgcgggcggccagacaacgggctgggctccggggcctgcggcgcgggcgctgagctggcagggcgggtcggggcgcgggctgcatccgcatctcctccatcgcctgcagtaagggcggccgcggcgagcctttgaggggaacgacttgtcggagccctaaccaggggtatctctgagcctggtgggatccccggagcgtcacatcactttccgatcacttcaaagtacagcagaccgaggacacggttgttaccaagaccaggctgttgccttggaagagcccagagcgtgtcaagggagacagccacatcacgccagaaatacatgacagctggattagccctgggagagggaggcccagatgtgggagctcaggggaggtgcagctcaacgtggagtttggaggaggctaccttgacctttgaatgccaagtgggagccagccagatgaaaggggttaaaaactaatatttatatgacagaagaaaaagatgtcattccgtaaagtaaacatcatcatcttggtcctggctgttgctctcttcttactggttttgcaccataacttcctcagcttgagcagtttgttaaggaatgaggttacagattcaggatttgtaggccttaacctataactttggccaaatgctttcacttgcttatatggagtaaagagaaattctgtgtattcttgct

SEQ ID NO: 260402 - DNA, 1059 bp, Homo sapiens
agtctccgacgggccggtacagcccgtgtccccgccccgcgccatcgctaggcgacgtgcgcttttgccgcgccgtgctgcccgcgagggcagctgaggtggtggtggcggccgccttgtcgaggcatcgcgcgcccgtgaagtgttcgccgtcagtgctgttgggtgcctggagccgcgtcccccgtcccgaaaactgtccttgacagtacttgcgcggcccaacggccgccggcgcccccgcgtctccatggcgacggcctttttccctgcgaggaccccggcggcagggctgccccgcggcgcctgcttggcgcgacgctctagcggttaccgctgcgggctggctgggcgtagtggggctgcgcggctgccacggagctagagggcaagtgtgctcggcccagcgtgcagggaacgcgggcggccagacaacgggctgggctccggggcctgcggcgcgggcgctgagctggcagggcgggtcggggcgcgggctgcatccgcatctcctccatcgcctgcagtaagggcggccgcggcgagcctttgaggggaacgacttgtcggagccctaaccaggggtatctctgagcctggtgggatccccggagcgtcacatcactttccgatcacttcaaagtgtaaggggggccctactgacccttggaatttaggggggctaccctaggcggcatccacaacagagagaattcccttggagaggggaccctggtgctcggctgtccctctcatccgcgtagaaagtccctcatctgggggctcccgaactcagccctctcacattgtggccggctttactgaccctcacagacccaggctgggccctcccgatagaggccagccaaaggttcactcagcctctctttcaaggctggtgtatctctaaatcttagaccctcctccgttaccgtcagccaggtgggatgcccacgttttggagagaaaccgttctgaggaacccgggcctctgggtcccagctggctctccggcccccaggttatgtattctgggttggccacaaacagtggaattct

SEQ ID NO: 260403 - DNA, 775 bp, Homo sapiens
agtctccgacgggccggtacagcccgtgtccccgccccgcgccatcgctaggcgacgtgcgcttttgccgcgccgtgctgcccgcgagggcagctgaggtggtggtggcggccgccttgtcgaggcatcgcgcgcccgtgaagtgttcgccgtcagtgctgttgggtgcctggagccgcgtcccccgtcccgaaaactgtccttgacagtacttgcgcggcccaacggccgccggcgcccccgcgtctccatggcgacggcctttttccctgcgaggaccccggcggcagggctgccccgcggcgcctgcttggcgcgacgctctagcggttaccgctgcgggctggctgggcgtagtggggctgcgcggctgccacggagctagagggcaagtgtgctcggcccagcgtgcagggaacgcgggcggccagacaacgggctgggctccggggcctgcggcgcgggcgctgagctggcagggcgggtcggggcgcgggctgcatccgcatctcctccatcgcctgcagtaagggcggccgcggcgagcctttgaggggaacgacttgtcggagccctaaccaggggtatctctgagcctggtgggatccccggagcgtcacatcactttccgatcacttcaaagtggttaaaaactaatatttatatgacagaagaaaaagatgtcattccgtaaaggtaaacatcatcatcttggtcttggccttgcggctttcatcctccaggcagttggtacacttgccccccaccacggaca

SEQ ID NO: 260404 - DNA, 434 bp, Homo sapiens
ttcaaccaaccacggactgaaattacagatacagagggctgactgtaatatgccattttacataagggacttgagcatccgtgaatttttgtatacatggggagtcctggagccaatccccgactgatactgaggaccaactgtgttgctaatcaaattgtacacaattatatactcttacgaaaatgtagttaactattacagatccagcgtctgtgtgcaatttcgttttgagaattccttctaaccagatcaggaaagctctcttaccaggaatagccccaggaaagacaatatggattagacgtactccatgataactggcgttttgcatgtaggtaactgtggaagttttaggagcaactggtttctgccttgccagtctacttaagtatgtcagatacttgatagaattgtgtttttcttgtttccag

SEQ ID NO: 260405 - DNA, 2159 bp, Homo sapiens
agtctccgacgggccggtacagcccgtgtccccgccccgcgccatcgctaggcgacgtgcgcttttgccgcgccgtgctgcccgcgagggcagctgaggtggtggtggcggccgccttgtcgaggcatcgcgcgcccgtgaagtgttcgccgtcagtgctgttgggtgcctggagccgcgtcccccgtcccgaaaactgtccttgacagtacttgcgcggcccaacggccgccggcgcccccgcgtctccatggcgacggcctttttccctgcgaggaccccggcggcagggctgccccgcggcgcctgcttggcgcgacgctctagcggttaccgctgcgggctggctgggcgtagtggggctgcgcggctgccacggagctagagggcaagtgtgctcggcccagcgtgcagggaacgcgggcggccagacaacgggctgggctccggggcctgcggcgcgggcgctgagctggcagggcgggtcggggcgcgggctgcatccgcatctcctccatcgcctgcagtaagggcggccgcggcgagcctttgaggggaacgacttgtcggagccctaaccaggggtatctctgagcctggtgggatccccggagcgtcacatcactttccgatcacttcaaagtggttaaaaactaatatttatatgacagaagaaaaagatgtcattccgtaaagtaaacatcatcatcttggtcctggctgttgctctcttcttactggttttgcaccataacttcctcagcttgagcagtttgttaaggaatgaggttacagattcaggaattgtagggcctcaacctatagactttgtcccaaatgctctccgacatgcagtagatgggagacaagaggagattcctgtggtcatcgctgcatctgaagacaggcttgggggggccattgcagctataaacagcattcagcacaacactcgctccaatgtgattttctacattgttactctcaacaatacagcagaccatctccggtcctggctcaacagtgattccctgaaaagcatcagatacaaaattgtcaattttgaccctaaacttttggaaggaaaagtaaaggaggatcctgaccagggggaatccatgaaacctttaacctttgcaaggttctacttgccaattctggttcccagcgcaaagaaggccatatacatggatgatgatgtaattgtgcaaggtgatattcttgccctttacaatacagcactgaagccaggacatgcagctgcattttcagaagattgtgattcagcctctactaaagttgtcatccgtggagcaggaaaccagtacaattacattggctatcttgactataaaaaggaaagaattcgtaagctttccatgaaagccagcacttgctcatttaatcctggagtttttgttgcaaacctgacggaatggaaacgacagaatataactaaccaactggaaaaatggatgaaactcaatgtagaagagggactgtatagcagaaccctggctggtagcatcacaacacctcctctgcttatcgtattttatcaacagcactctaccatcgatcctatgtggaatgtccgccaccttggttccagtgctggaaaacgatattcacctcagtttgtaaaggctgccaagttactccattggaatggacatttgaagccatggggaaggactgcttcatatactgatgtttgggaaaaatggtatattccagacccaacaggcaaattcaacctaatccgaagatataccgagatctcaaacataaagtgaaacagaatttgaactgtaagcaagcatttctcaggaagtcctggaagatagcatgcgtgggaagtaacagttgctaggcttcaatgcctatcggtagcaagccatggaaaaagatgtgtcagctaggtaaagatgacaaactgccctgtctggcagtcagcttcccagacagactatagactataaatatgtctccatctgccttaccaagtgttttcttactacaatgctgaatgactggaaagaagaactgatatggctagttcagctagctggtacagataattcaaaactgctgttggttttaattttgtaacctgtggcctgatctgtaaataaaacttacatttttcaataggtatc

SEQ ID NO: 260406 - DNA, 2518 bp, Homo sapiens
agtctccgacgggccggtacagcccgtgtccccgccccgcgccatcgctaggcgacgtgcgcttttgccgcgccgtgctgcccgcgagggcagctgaggtggtggtggcggccgccttgtcgaggcatcgcgcgcccgtgaagtgttcgccgtcagtgctgttgggtgcctggagccgcgtcccccgtcccgaaaactgtccttgacagtacttgcgcggcccaacggccgccggcgcccccgcgtctccatggcgacggcctttttccctgcgaggaccccggcggcagggctgccccgcggcgcctgcttggcgcgacgctctagcggttaccgctgcgggctggctgggcgtagtggggctgcgcggctgccacggagctagagggcaagtgtgctcggcccagcgtgcagggaacgcgggcggccagacaacgggctgggctccggggcctgcggcgcgggcgctgagctggcagggcgggtcggggcgcgggctgcatccgcatctcctccatcgcctgcagtaagggcggccgcggcgagcctttgaggggaacgacttgtcggagccctaaccaggggtatctctgagcctggtgggatccccggagcgtcacatcactttccgatcacttcaaagtacagcagaccgaggacacggttgttaccaagaccaggctgttgccttggaagagcccagagcgtgtcaagggagacagccacatcacgccagaaatacatgacagctggattagccctgggagagggaggcccagatgtgggagctcaggggaggtgcagctcaacgtggagtttggaggaggctaccttgacctttgaatgccaagtgggagccagccagatgaaaggatccagcgtctgtgtgcaatttcgttttgagaattccttctaaccagatcaggaaagctctcttaccaggaatagccccaggaaagacaatatggattagacgtactccatgataactggcgttttgcatggttaaaaactaatatttatatgacagaagaaaaagatgtcattccgtaaagtaaacatcatcatcttggtcctggctgttgctctcttcttactggttttgcaccataacttcctcagcttgagcagtttgttaaggaatgaggttacagattcaggaattgtagggcctcaacctatagactttgtcccaaatgctctccgacatgcagtagatgggagacaagaggagattcctgtggtcatcgctgcatctgaagacaggcttgggggggccattgcagctataaacagcattcagcacaacactcgctccaatgtgattttctacattgttactctcaacaatacagcagaccatctccggtcctggctcaacagtgattccctgaaaagcatcagatacaaaattgtcaattttgaccctaaacttttggaaggaaaagtaaaggaggatcctgaccagggggaatccatgaaacctttaacctttgcaaggttctacttgccaattctggttcccagcgcaaagaaggccatatacatggatgatgatgtaattgtgcaaggtgatattcttgccctttacaatacagcactgaagccaggacatgcagctgcattttcagaagattgtgattcagcctctactaaagttgtcatccgtggagcaggaaaccagtacaattacattggctatcttgactataaaaaggaaagaattcgtaagctttccatgaaagccagcacttgctcatttaatcctggagtttttgttgcaaacctgacggaatggaaacgacagaatataactaaccaactggaaaaatggatgaaactcaatgtagaagagggactgtatagcagaaccctggctggtagcatcacaacacctcctctgcttatcgtattttatcaacagcactctaccatcgatcctatgtggaatgtccgccaccttggttccagtgctggaaaacgatattcacctcagtttgtaaaggctgccaagttactccattggaatggacatttgaagccatggggaaggactgcttcatatactgatgtttgggaaaaatggtatattccagacccaacaggcaaattcaacctaatccgaagatataccgagatctcaaacataaagtgaaacagaatttgaactgtaagcaagcatttctcaggaagtcctggaagatagcatgcgtgggaagtaacagttgctaggcttcaatgcctatcggtagcaagccatggaaaaagatgtgtcagctaggtaaagatgacaaactgccctgtctggcagtcagcttcccagacagactatagactataaatatgtctccatctgccttaccaagtgttttcttactacaatgctgaatgactggaaagaagaactgatatggctagttcagctagctggtacagataattcaaaactgctgttggttttaattttgtaacctgtggcctgatctgtaaataaaacttacatttttcaataggtatc

SEQ ID NO: 260407 - DNA, 2099 bp, Homo sapiens
agtctccgacgggccggtacagcccgtgtccccgccccgcgccatcgctaggcgacgtgcgcttttgccgcgccgtgctgcccgcgagggcagctgaggtggtggtggcggccgccttgtcgaggcatcgcgcgcccgtgaagtgttcgccgtcagtgctgttgggtgcctggagccgcgtcccccgtcccgaaaactgtccttgacagtacttgcgcggcccaacggccgccggcgcccccgcgtctccatggcgacggcctttttccctgcgaggaccccggcggcagggctgccccgcggcgcctgcttggcgcgacgctctagcggttaccgctgcgggctggctgggcgtagtggggctgcgcggctgccacggagctagagggcaagtgtgctcggcccagcgtgcagggaacgcgggcggccagacaacgggctgggctccggggcctgcggcgcgggcgctgagctggcagggcgggtcggggcgcgggctgcatccgcatctcctccatcgcctgcagtaagggcggccgcggcgagcctttgaggggaacgacttgtcggagccctaaccagggggttaaaaactaatatttatatgacagaagaaaaagatgtcattccgtaaagtaaacatcatcatcttggtcctggctgttgctctcttcttactggttttgcaccataacttcctcagcttgagcagtttgttaaggaatgaggttacagattcaggaattgtagggcctcaacctatagactttgtcccaaatgctctccgacatgcagtagatgggagacaagaggagattcctgtggtcatcgctgcatctgaagacaggcttgggggggccattgcagctataaacagcattcagcacaacactcgctccaatgtgattttctacattgttactctcaacaatacagcagaccatctccggtcctggctcaacagtgattccctgaaaagcatcagatacaaaattgtcaattttgaccctaaacttttggaaggaaaagtaaaggaggatcctgaccagggggaatccatgaaacctttaacctttgcaaggttctacttgccaattctggttcccagcgcaaagaaggccatatacatggatgatgatgtaattgtgcaaggtgatattcttgccctttacaatacagcactgaagccaggacatgcagctgcattttcagaagattgtgattcagcctctactaaagttgtcatccgtggagcaggaaaccagtacaattacattggctatcttgactataaaaaggaaagaattcgtaagctttccatgaaagccagcacttgctcatttaatcctggagtttttgttgcaaacctgacggaatggaaacgacagaatataactaaccaactggaaaaatggatgaaactcaatgtagaagagggactgtatagcagaaccctggctggtagcatcacaacacctcctctgcttatcgtattttatcaacagcactctaccatcgatcctatgtggaatgtccgccaccttggttccagtgctggaaaacgatattcacctcagtttgtaaaggctgccaagttactccattggaatggacatttgaagccatggggaaggactgcttcatatactgatgtttgggaaaaatggtatattccagacccaacaggcaaattcaacctaatccgaagatataccgagatctcaaacataaagtgaaacagaatttgaactgtaagcaagcatttctcaggaagtcctggaagatagcatgcgtgggaagtaacagttgctaggcttcaatgcctatcggtagcaagccatggaaaaagatgtgtcagctaggtaaagatgacaaactgccctgtctggcagtcagcttcccagacagactatagactataaatatgtctccatctgccttaccaagtgttttcttactacaatgctgaatgactggaaagaagaactgatatggctagttcagctagctggtacagataattcaaaactgctgttggttttaattttgtaacctgtggcctgatctgtaaataaaacttacatttttcaataggtatc

SEQ ID NO: 260408 - DNA, 2728 bp, Homo sapiens
agtctccgacgggccggtacagcccgtgtccccgccccgcgccatcgctaggcgacgtgcgcttttgccgcgccgtgctgcccgcgagggcagctgaggtggtggtggcggccgccttgtcgaggcatcgcgcgcccgtgaagtgttcgccgtcagtgctgttgggtgcctggagccgcgtcccccgtcccgaaaactgtccttgacagtacttgcgcggcccaacggccgccggcgcccccgcgtctccatggcgacggcctttttccctgcgaggaccccggcggcagggctgccccgcggcgcctgcttggcgcgacgctctagcggttaccgctgcgggctggctgggcgtagtggggctgcgcggctgccacggagctagagggcaagtgtgctcggcccagcgtgcagggaacgcgggcggccagacaacgggctgggctccggggcctgcggcgcgggcgctgagctggcagggcgggtcggggcgcgggctgcatccgcatctcctccatcgcctgcagtaagggcggccgcggcgagcctttgaggggaacgacttgtcggagccctaaccaggggtatctctgagcctggtgggatccccggagcgtcacatcactttccgatcacttcaaagtacagcagaccgaggacacggttgttaccaagaccaggctgttgccttggaagagcccagagcgtgtcaagggagacagccacatcacgccagaaatacatgacagctggattagccctgggagagggaggcccagatgtgggagctcaggggaggtgcagctcaacgtggagtttggaggaggctaccttgacctttgaatgccaagtgggagccagccagatgaaaggggttaaaaactaatatttatatgacagaagaaaaagatgtcattccgtaaagtaaacatcatcatcttggtcctggctgttgctctcttcttactggttttgcaccataacttcctcagcttgagcagtttgttaaggaatgaggttacagattcaggaattgtagggcctcaacctatagactttgtcccaaatgctctccgacatgcagtagatgggagacaagaggagattcctgtggtcatcgctgcatctgaagacaggcttgggggggccattgcagctataaacagcattcagcacaacactcgctccaatgtgattttctacattgttactctcaacaatacagcagaccatctccggtcctggctcaacagtgattccctgaaaagcatcagatacaaaattgtcaattttgaccctaaacttttggaaggaaaagtaaaggaggatcctgaccagggggaatccatgaaacctttaacctttgcaaggttctacttgccaattctggttcccagcgcaaagaaggccatatacatggatgatgatgtaattgtgcaaggtgatattcttgccctttacaatacagcactgaagccaggacatgcagctgcattttcagaagattgtgattcagcctctactaaagttgtcatccgtggagcaggaaaccaggtaaattgcttaccaaacacccctcttcctacaatattgtttaatgggaagaggttgcaaattcagggaactcttttgctgcaatttacactccccaatcatttcatcccaaaactcaagcctgcttttctgtagacttcttcatggacttgacagcctaattgttcttgaacatctggtttattatgtcaacatctaggttcctattctaacttggaatttcaaatatttattttctaatctgaagaagtcagtttaacagctcttctctctactggctataaaattgtatctattttgtttgaagcagtaagtacatatatcctatttgtgtttttagtacaattacattggctatcttgactataaaaaggaaagaattcgtaagctttccatgaaagccagcacttgctcatttaatcctggagtttttgttgcaaacctgacggaatggaaacgacagaatataactaaccaactggaaaaatggatgaaactcaatgtagaagagggactgtatagcagaaccctggctggtagcatcacaacacctcctctgcttatcgtattttatcaacagcactctaccatcgatcctatgtggaatgtccgccaccttggttccagtgctggaaaacgatattcacctcagtttgtaaaggctgccaagttactccattggaatggacatttgaagccatggggaaggactgcttcatatactgatgtttgggaaaaatggtatattccagacccaacaggcaaattcaacctaatccgaagatataccgagatctcaaacataaagtgaaacagaatttgaactgtaagcaagcatttctcaggaagtcctggaagatagcatgcgtgggaagtaacagttgctaggcttcaatgcctatcggtagcaagccatggaaaaagatgtgtcagctaggtaaagatgacaaactgccctgtctggcagtcagcttcccagacagactatagactataaatatgtctccatctgccttaccaagtgttttcttactacaatgctgaatgactggaaagaagaactgatatggctagttcagctagctggtacagataattcaaaactgctgttggttttaattttgtaacctgtggcctgatctgtaaataaaacttacatttttcaataggtatc

SEQ ID NO: 260409 - DNA, 1130 bp, Homo sapiens
agtctccgacgggccggtacagcccgtgtccccgccccgcgccatcgctaggcgacgtgcgcttttgccgcgccgtgctgcccgcgagggcagctgaggtggtggtggcggccgccttgtcgaggcatcgcgcgcccgtgaagtgttcgccgtcagtgctgttgggtgcctggagccgcgtcccccgtcccgaaaactgtccttgacagtacttgcgcggcccaacggccgccggcgcccccgcgtctccatggcgacggcctttttccctgcgaggaccccggcggcagggctgccccgcggcgcctgcttggcgcgacgctctagcggttaccgctgcgggctggctgggcgtagtggggctgcgcggctgccacggagctagagggcaagtgtgctcggcccagcgtgcagggaacgcgggcggccagacaacgggctgggctccggggcctgcggcgcgggcgctgagctggcagggcgggtcggggcgcgggctgcatccgcatctcctccatcgcctgcagtaagggcggccgcggcgagcctttgaggggaacgacttgtcggagccctaaccaggggtatctctgagcctggtgggatccccggagcgtcacatcactttccgatcacttcaaagtggttaaaaactaatatttatatgacagaagaaaaagatgtcattccgtaaagtaaacatcatcatcttggtcctggctgttgctctcttcttactggttttgcaccataacttcctcagcttgagcagtttgttaaggaatgaggttacagattcaggaattgtagggcctcaacctatagactttgtcccaaatgctctccgacatgcagtagatgggagacaagaggagattcctgtggtcatcgctgcatctgaagacaggcttgggggggccattgcagcttcccagacagactatagactataaatatgtctccatctgccttaccaagtgttttcttactacaatgctgaatgactggaaagaagaactgatatggctagttcagctagctggtacagataattcaaaactgctgttggttttaattttgtaacctgtggcctgatctgtaaataaaacttacatttttcaataggtatc

SEQ ID NO: 260410 - DNA, 415 bp, Homo sapiens
ttgaagtgtaataaattatattccagtggcagagaccaagtgacagccagttggacctgccccaaacgcactcacactgagatgcagacgcacaccgtggcgactcgaggggctctgcgaaggcctgctgccaggtgagttacaacaatgctttccaaaacagccgcgcaggggtcaggggtcaaagccacagctcagcacaacacaaaaccctgactctaccacgtgagaacgcgggtgggaagccccagcagctcctaaccaacgttcctccgatgccgccttcctgaaccttccttgcagctggaggggaccgcagtcagcaccagcaagggcagggtcccaggctgctggccttgacacttggtcccagctatatgggctgaagtatttcttagtgtgagagtgtaaccat

SEQ ID NO: 260411 - DNA, 425 bp, Homo sapiens
tgagacagaatctcgctctattgcctaggctggagtgcaatggtgtcatctcggctcactgcaacctttacctcccaggttcaagcgattctcctgcctcagtctcccaagtagctgggacgacaggcgtgtgccaccacgccccgctaatttttttgtatttttagtagagacaggatttcaccgtgttagccagacggtctcaatctcctgacctcgtgatccgcctgcctctgcctccctaagtgctggggtgagccacagcacccagcccatccttggattttgatagccatgaggggtcctggaacgaatctgaggaactgtatgaagctatgagcagaagccactactttaacttgattctcttgctaatattttctttgcattttcttctgtgtcatcttcatacctccacctcaaat

SEQ ID NO: 260412 - DNA, 366 bp, Homo sapiens
agtagtcatacctttatcctgacaagtttttcctcctgagggcctaatttgctaataggaagtaactagcttttgtaaaaaagaaaaatatggaatattaaaatagaacacaggagtggtgcacctatcatccctccccttagattcattcatgatccagaatgtaaaagatatttgggccgtcttactcatttaatgaacaccttccttttctgctcagaatcaatatgtattcgcccaagatgctaagtttatgccagaaatatgtatgttatgtggaatttcttttaaaattcttattcagcgtgtactgtcagttgctttaaatacttactgccaacaataaaatctatttttatgcctatc

SEQ ID NO: 260413 - DNA, 381 bp, Homo sapiens
ttctttctcaggttgaatttagcagcatttgttctttttccattcctgaattaattataactgtaagccttagttaaagtctagttatgtttgggtggtcagatgcattaagaattaatatttttaagtaacaattttaaatgttttggcatgtgacatttcttttataaattgttaaaatttatcattattaagtgatgtccttctgccttattatttttacagtaaaaatccaacttgtgaaaatacagttctcctaagttagagaaaattgctaacacattttgacattggaattgaatatgtatggattaacaaaacaaatattatttgaattccatctgatagctagctaaacaataaaacaaatataaaatttga

SEQ ID NO: 260414 - DNA, 503 bp, Homo sapiens
  misc_feature (7)..(7): n is a, c, g, or t
taaattngcggccgcgtcgactaaataagccatagagtgagtcaaatagagccctttggatctggtttatttcacttcttaatttttaattactgagtagtattccattgtatgggatgtgccacagtttatgtattcaccagatgaagaacatttaggttatttccagtttttgatggttatgaataaataagcagtttttgatggttattttcagtttttgatggtttttgatggctatgccataactgctgtcaaacattcataaaacaggttgttatgtgaacgtaagttttcatttctcttgggcaaatacttagtggaattgctaggtcatatgaaaagtatgtttgactttataagaaattgcctaggccgagtgtggtggctcatgcctgtaatcccagcactttgggaggccgaggagggtggatcacctgaggtcaggagttccagaccagcctggccaacatggtgaaaccctgtctctactaaaaatacaa

SEQ ID NO: 260415 - DNA, 159 bp, Homo sapiens
aaggcatggaagaacacttccagagaaccagctcacaagtgcaaggggatggggctgtcgaccccgtgtgtatagtgccaaggcaatccaggtcatggttgcagagtgctttactgccatttttattgcctcctttcaataaaccactgcagtgcatga

SEQ ID NO: 260416 - DNA, 169 bp, Homo sapiens
tggaggaggggcctggtgggaggtgattggatatggggtcatgggggcagatttcccccttgttgttccagtgacagtaagtgggttctcatgaaatttagttgtttaaaagtgtgtagtacctccccctttgctgtattctccttctctggccatgtaagacgtgcct

SEQ ID NO: 260417 - DNA, 556 bp, Homo sapiens
ggcaagaatgtgttgatagtcagaagggaaaagaccacgagcacccctgactgcaccccaacgtatactgatgtcatcagcgagaccctgtgcagcatgaagaagcggaaagacaacctcaatcagttgtaccagcatcattggactgaatggaattattttgacaagcatctaaaggagctgcaagacaacttctccagggaaatgaagaatattgatccaaaagcagcagatacaaaaaaggcaaaccacatgttcatcccaccttcagccgtcaatgaggaatcacctgacaagaaaactaagggaagtctccaaagagaaattgagtttaagggttgttcgaacaaaaaccatgggaaaggtagaagtgtgaacatgaggggaaaggaggagagggaaagagaagagaaacagaagttgaacatttctttccactcacttccaagccctgaggagctccacaacctagaaccaggaagcgcctacagaatccgtgatatttctgctacgaggtggagtggaacaagaaaataagaaaattgtggccaaagac

SEQ ID NO: 260418 - DNA, 389 bp, Homo sapiens
cattttaaatggttatataagtagctaaataatattctcagttttgcctcttggcctgcaatgtctaaactatttactttatggccccttaagaaaaagtttgctgacttggagacccctggggactttgaaggcatccactgggcatcttggaacataaccaccgaggataagggggcactactttgttagactccacagatgaacaagggtcagttgtccacactgaccactgtggccagcctggatcacatgcctgccctgcagtgaaatcagcaggacactggactcacctgggtcacttaggatggaaaagaacttctccaagtgaaccagaagaaggggaatgcaaaaattctagaataaactgtaactacatattccagtct

SEQ ID NO: 260419 - DNA, 492 bp, Homo sapiens
tcatttttgttttgtgggggtggtggtttaggtgttaagggtttggttgatatctgtagaaaatttcttaatgatctacacagtagataaaaaaacaagttaaggtcaaagacaattccttcgtctgttttgggagacgagtgtgtatgtttgaaaaaaaggtttgttctgggtcactcttctttcatccagacgcattaaaggaattagaagggggtctccctgccacccccgaaaccgtgagagtcaaacggagattcccttatattcctgctctcaggtgcgggtccgagtgacaagaacgttcacgtatcttcgggagagaacgaaaaggtgctcgggtctggcgggggcggggaacgccaggggttggtgggaactgaggggcttccggttcccgggaagcggagtcccgggccggccgcgggccgcgggctacgcagggagcacggggccctcgccgcccccagcccgcgctccttagcgttccct

SEQ ID NO: 260420 - DNA, 202 bp, Homo sapiens
gaaaccatataaagaattagattttgctctggcactgctgaacatagcatagtgacaccttaaggcaccagaaagtactgttcagattggctagctagtagctccagcgtgatccctgtttgccactttaatgtccagccttgttttttcatattcccttgagcttcaggtagccaaggctagaaagatatacctgtcactg

SEQ ID NO: 260421 - DNA, 365 bp, Homo sapiens
acaaaaaagaaatcataaatttactccctgacagagctatacaggttaactgaaatatcacctttcttggcttttggaatgtggtcatcctggctatcttttgttaatcggaaggtcagatggatggttttctgtgttttggattagtagaaaattagaaagcaaataatatattcaacaccttggcagacaaaattgttaaaaattgtgtagctaaaaaaaagcacgttttttggtggtgagactggtgggtatccatggctctgcccccaggagctcctagacaagcaggcacagtgtttccagtagatgagtacattcttaagaaagcagatatctttttttgccatcccccacctcctgca

SEQ ID NO: 260422 - DNA, 1347 bp, Homo sapiens
gccgctgagcgagggccctcatgagaagggaaggtcgcgtggacaggctgccaggggcaagcgtttttagattacttcctccttcttggccccagatgcacttggttgcacgctctggttcccaaacccccggccgctggcttatgcaaatcacttaggtacatgcaaaagtatcccttctcccggagcgccattggcccggggaggtctcgagctcattactatgcagagaggagagccgccattggccaagaggaggaccagaggggcgtgtttctcgggcaaattggatctcctaaattggatgacctggtaagtagaacttccctccagcgttcagttaagttttaaatgactctccgctgttccaaagggcgaggacgtctggagctctgcaaacggaaaaaagatttgaagaggaggaaaaaagtttccctcgatctgacacacatctttgggttttagctatacactaagttaaaagtgtaccctctccagtgcctcacttcacctggggatctttacacctatcttggatacacatttggtagctaagtcttagcaattcattctccccagtcctctctctgtatttggtgtttttggtgactgcaaattagactcctttctcacgcactttaaatcctgaacacaggaattttgtaaaaggtcagagaaagtgatgtttctgaacactggacaatttccaaaacatctgagtgggaggtgactacggctgagaagccagcagcaacgttggtgttagggctgaaagacaacttaaagacccccagaaaactctggttttatagataagaaatctgaggctcgagagagagtgttctgcccaacatcatcacggaacagctcctgggctcctggctcctaatctgagcacacaggacttgttgactgatggataagctggacttcggttctaccacccctttacccaagaactcttgtaaacatagaacctgaacaagtatatgcagaggccctacctgttgggtgaacggttcaaggtgccctgttacaacaacagctcagatacagtgggggctctgagtgctgtaatgattgactggataaaagtcctcaaacatgtagaatttcactttttatgaactatttcgacttagaaaaagagttaacagcaatcagcttaagaaatattacgaatgtagttgaagctccctttgtaccactccccaatcatattccttttcttcctctccctgagaagtaagcagtttcctaaactttgtagttaattcccatgcatattttcatgcttttcgtatgcatgtatccctaaacaataaacagcattgtttttcatatata

SEQ ID NO: 260423 - DNA, 977 bp, Homo sapiens
agagaaagagagggaagtggaagaaatagtggaacttgccaaagtgtacaataaaaagaaatttcagtcttaaaagcagtcagtacagaattaatctcagcaaacaacacgattaagaagctagataatattaggtaataaggaaaaaggcgtacattgtttctatcaatgagaaaacaaaagggcagaaactctgaaaagaggggaaaaaaatatttgttggaaagttgaagtacaaataggaacctaaatcaatggcatgatttttgagcagtagatacagtataagaaaaagaatccagtcaaacttagtacttaaaacattcttctttgagcatcacagtttccttttctgtagtcacattctctgcaataaacaatatttacaaataatgaggcaatgctgcaaataaacccactgaccaatcagaaaaatgatagttatagaagaggaaagtagaatcaaaaggcagggagatgagatgccaaactcaaatgcaaacaatgagagcggaatctgaaatacgagatgaagccaatacccagaagccagacacaggataagaaccgaaccaggttagaagcaaagcagagggcttcaaaatgatttcatcttaccaaaggatttctcttcgtagtgacaaaaatgttttctaattattgcctgttatgttggattgtttcctgtttgctttgtcagtttgtgaattgggatctcatgaatcatgatcatttcattgtaatagtagcatcaactaggataggacaatttatgtcaaaaaggtcggtgtaagacatattcaaatactttcatggctgtgaacacttaatataataaagaggttcttgcggacaggtgcggtggctcacacctgtaatcccagcattttgggaggctgaggtgggtgaatcatgaggtcaggagttcaagaccagcctggccaagatggtgaaaccccgtctctactaaaaataac

SEQ ID NO: 260424 - DNA, 1015 bp, Homo sapiens
agattaggagaacatatgtatgataaaacaattagactaaaaaggtcctttctttttatatgaaatggcagaaaagcaacagcagtttattgcttatgacagaatacatatgatactcgaatatttcttgagatctttgcttaaatctagtatctatacaaaatttttatgttcgctagattgtaaattcagttttcttactaagaaagactgaaatttattaataattttggggttctagtgattagcattagagactgatttgcttttaaagagaatcgcatattttatatatttccaattttacatacttctgaaagaacataactttgtcattaatatatggcatatgtatacaatgaaaaatgtacaaggatgtttcttacagcagttattgaaatagcaggaagaaaaaggtaacttaaaagacacttagcactagagtctccagtcacatctactccctggcccatgaactaagaacgtttttaacgtgtgtatgaaaggagtgacttaatagatctggcgtgttgaaacctgcacctttcaaagaaaggtctagccctcaacttgctcctgggagatcacagcgctaagcccctggaatatcctgcctgatgcaaggcctttgtttacctggggccttggatcacaccagatagtttatgctacagatttatggtgagggcattgcaccttgcagtatcaatttaatcgccgggggaggtggaaactgaataacatctgccatttctgttctccatgcctatgtgactaacacccaataaaaaccttggacaccaagtctcagcttccctggttgataatatttcataaatgacccacactcattcagagaggattaagtgctgtgcatgcatctcctgtcagatgggacaactggaagcctgtcctgctctcttctgaactctttcctatctgccttttaaaactgtactgattttaaactgtacttttgctctaataaactaattgtcaacgtaaaaaaaaaaag

SEQ ID NO: 260425 - DNA, 141 bp, Homo sapiens
tgagctgccattcccctgagctccacaccccacacccctcacccctccagaaggagctaagggcagattctcctcccttatcctccaagaagtcaggggcttcttgctctgtttgaaataaaaagcaactgcgtctgcgca

SEQ ID NO: 260426 - DNA, 1450 bp, Homo sapiens
gtttcagcggccgctgaattctatgaataatcagaagtcagtttggggagaagtcaaaatggacacaatcttcttgtggagtcttctattgctgttttttggaagtcaagcctcaagatgctcagctcaaaaaaataccgaatttgcagtggatctttatcaagaggtttccttatctcataaggacaacattatattttcaccccttggaataactttggttcttgagatggtacaactgggagccaaaggaaaagcacagcagcagataagacaaactttaaaacaacaggaaacctcagctggggaagaattttttgtactgaagtcatttttctctgccatctcagagaaaaaacaagaatttacatttaatcttgccaatgccctctaccttcaagaaggattcactgtgaaagaacagtatctccatggcaacaaggaattttttcagagtgctataaaactggtggattttcaagatgcaaaggcttgtgcagagatgataagtacctgggtagaaagaaaaacagatggaaaaattaaagacatgttttcaggggaagaatttggccctctgactcggcttgtcctggtgaatgctatttatttcaaaggagattggaaacagaaattcagaaaagaggacacacagctgataaattttactaagaaaaatggttcaactgtcaaaattccaatgatgaaggctcttctgagaacaaaatatggttatttttctgaatcttccctgaactaccaagttttagaattgtcttacaaaggtgatgaatttagcttaattatcatacttcctgcagaaggtatggatatagaagaagtggaaaaactaattactgctcaacaaatcctaaaatggctctctgagatgcaagaagaggaagtagaaataagcctccctagatttaaagtagaacaaaaagtagacttcaaagacgttttgtattctttgaacataaccgagatatttagtggtggctgcgacctttctggaataacagattcatctgaagtgtatgtttcccaagtgacgcaaaaagttttctttgagataaatgaagatggtagtgaagctgcaacatcaactggcatacacatccctgtgatcatgagtctggctcaaagccaatttatagcaaatcatccatttctgtttattatgaagcataacccaacagaatcaattctgtttatgggaagagtgacaaatcctgacacccaggagataaaaggaagagatttagattcactgtgaatgaaaagcacagcctcagaataaaagatgatttctcaaaaatagctgattggcaaaatatcatcgtcttgacaatatttgctctatatcttatgtcttttctgttttaaactgtgcctgtagtaatagatatctgtcttgatgaataagtaaaattaggtatgcatttgtttc

SEQ ID NO: 260427 - DNA, 1313 bp, Homo sapiens
gtttcagcggccgctgaattctatgaataatcagaagtcagtttggggagaagtcaaaatggacacaatcttcttgtggagtcttctattgctgttttttggaagtcaagcctcaagatgctcagctcaaaaaaataccgaatttgcagtggatctttatcaagaggtttccttatctcataaggacaacattatattttcaccccttggaataactttggttcttgagatggtacaactgggagccaaaggaaaagcacagcagcagataagacaaactttaaaacaacaggaaacctcagctggggaagaattttttgtactgaagtcatttttctctgccatctcagagaaaaaacaagaatttacatttaatcttgccaatgccctctaccttcaagaaggattcactgtgaaagaacagtatctccatggcaacaaggaattttttcagagtgctataaaactggtggattttcaagatgcaaaggcttgtgcagagatgataagtacctgggtagaaagaaaaacagatggaaaaattaaagacatgttttcaggggaagaatttggccctctgactcggcttgtcctggtgaatgctatttatttcaaaggagattggaaacagaaattcagaaaagaggacacacagctgataaattttactaagaaaaatggttcaactgtcaaaattccaatgatgaaggctcttctgagaacaaaatatggttatttttctgaatcttccctgaactaccaagttttagaattgtcttacaaaggtgatgaatttagcttaattatcatacttcctgcagaaggtatggatatagaagaagtggaaaaactaattactgctcaacaaatcctaaaatggctctctgagatgcaagaagaggaagtagaaataagcctccctagatttaaagtagaacaaaaagtagacttcaaagacgttttgtattctttgaacataaccgagatatttagtggtggctgcgacctttctggaataacagattcatctgaagtgtatgtttcccaagtgacgcaaaaagttttctttgagataaatgaagatggtagtgaagctgcaacatcaactggcatacacatccctgtgatcatgagtctggctcaaagccaatttatagcaaatcatccatttctgtttattatgaagcataacccaacagaatcaattctgtttatgggaagagtgacaaatcctgacacccaggagataaaaggaagagatttagattcactgtgaatgaaaagcacagcctcagaataaaagatgatttctc

SEQ ID NO: 260428 - DNA, 1321 bp, Homo sapiens
  misc_feature (4)..(4): n is a, c, g, or t
  misc_feature (6)..(7): n is a, c, g, or t
ggcncnngggaaaactctattttgaaaatgaatatattttgatttaaacaatacagagaagtcaaaatggacacaatcttcttgtggagtcttctattgctgttttttggaagtcaagcctcaagatgctcagctcaaaaaaataccgaatttgcagtggatctttatcaagaggtttccttatctcataaggacaacattatattttcaccccttggaataactttggttcttgagatggtacaactgggagccaaaggaaaagcacagcagcagataagacaaactttaaaacaacaggaaacctcagctggggaagaattttttgtactgaagtcatttttctctgccatctcagagaaaaaacaagaatttacatttaatcttgccaatgccctctaccttcaagaaggattcactgtgaaagaacagtatctccatggcaacaaggaattttttcagagtgctataaaactggtggattttcaagatgcaaaggcttgtgcagagatgataagtacctgggtagaaagaaaaacagatggaaaaattaaagacatgttttcaggggaagaatttggccctctgactcggcttgtcctggtgaatgctatttatttcaaaggagattggaaacagaaattcagaaaagaggacacacagctgataaattttactaagaaaaatggttcaactgtcaaaattccaatgatgaaggctcttctgagaacaaaatatggttatttttctgaatcttccctgaactaccaagttttagaattgtcttacaaaggtgatgaatttagcttaattatcatacttcctgcagaaggtatggatatagaagaagtggaaaaactaattactgctcaacaaatcctaaaatggctctctgagatgcaagaagaggaagtagaaataagcctccctagatttaaagtagaacaaaaagtagacttcaaagacgttttgtattctttgaacataaccgagatatttagtggtggctgcgacctttctggaataacagattcatctgaagtgtatgtttcccaagtgacgcaaaaagttttctttgagataaatgaagatggtagtgaagctgcaacatcaactggcatacacatccctgtgatcatgagtctggctcaaagccaatttatagcaaatcatccatttctgtttattatgaagcataacccaacagaatcaattctgtttatgggaagagtgacaaatcctgacacccaggagataaaaggaagagatttagattcactgtgaatgaaaagcacagcctcagaataaaagatgatttctc

SEQ ID NO: 260429 - DNA, 242 bp, Homo sapiens
ggataggctcagaagcacatgggaggtggggagatttagcatacacatccctgtgatcatgagtctggctcaaagccaatttatagcaaatcatccatttctgtttattatgaagcataacccaacagaatcaattctgtttatgggaagagtgacaaatcctgacacccaggagataaaaggaagagatttagattcactgtgaatgaaaagcacagcctcagaataaaagatgatttctc

SEQ ID NO: 260430 - DNA, 1539 bp, Homo sapiens
  misc_feature (81)..(81): n is a, c, g, or t
gtttcagcggccgctgaattctatgaataatcagaagtcagtttgggaagatccagttcttataggactattcatcaggtngtttagttcagcattactttgtgctttctgataagatatgatccaaaacctgatggagaagtcaaaatggacacaatcttcttgtggagtcttctattgctgttttttggaagtcaagcctcaagatgctcagctcaaaaaaataccgaatttgcagtggatctttatcaagaggtttccttatctcataaggacaacattatattttcaccccttggaataactttggttcttgagatggtacaactgggagccaaaggaaaagcacagcagcagataagacaaactttaaaacaacaggaaacctcagctggggaagaattttttgtactgaagtcatttttctctgccatctcagagaaaaaacaagaatttacatttaatcttgccaatgccctctaccttcaagaaggattcactgtgaaagaacagtatctccatggcaacaaggaattttttcagagtgctataaaactggtggattttcaagatgcaaaggcttgtgcagagatgataagtacctgggtagaaagaaaaacagatggaaaaattaaagacatgttttcaggggaagaatttggccctctgactcggcttgtcctggtgaatgctatttatttcaaaggagattggaaacagaaattcagaaaagaggacacacagctgataaattttactaagaaaaatggttcaactgtcaaaattccaatgatgaaggctcttctgagaacaaaatatggttatttttctgaatcttccctgaactaccaagttttagaattgtcttacaaaggtgatgaatttagcttaattatcatacttcctgcagaaggtatggatatagaagaagtggaaaaactaattactgctcaacaaatcctaaaatggctctctgagatgcaagaagaggaagtagaaataagcctccctagatttaaagtagaacaaaaagtagacttcaaagacgttttgtattctttgaacataaccgagatatttagtggtggctgcgacctttctggaataacagattcatctgaagtgtatgtttcccaagtgacgcaaaaagttttctttgagataaatgaagatggtagtgaagctgcaacatcaactggcatacacatccctgtgatcatgagtctggctcaaagccaatttatagcaaatcatccatttctgtttattatgaagcataacccaacagaatcaattctgtttatgggaagagtgacaaatcctgacacccaggagataaaaggaagagatttagattcactgtgaatgaaaagcacagcctcagaataaaagatgatttctcaaaaatagctgattggcaaaatatcatcgtcttgacaatatttgctctatatcttatgtcttttctgttttaaactgtgcctgtagtaatagatatctgtcttgatgaataagtaaaattaggtatgcatttgtttc

SEQ ID NO: 260431 - DNA, 2026 bp, Homo sapiens
ggctcgaggccaggatgcctccagtctgggggaaaatgcttcctcatttgcttctcccagcccacctcaagcagtctccccaccccttgagtctcagcagtgttaaagctgttactttcacagcttcctgggagcgagtgctttctcaagcccgtcttgcaaggtcttccacttcagcacaatgctactgcctaaaaaaatgaagctcctgctgtttctggtttcccagatggccatcttggctctattcttccacatgtacagccacaacatcagctccctgtctatgaaggcacagcccgagcgcatgcacgtgctggttctgtcttcctggcgctctggctcttcttttgtggggcagctttttgggcagcacccagatgttttctacctgatggagcccgcctggcacgtgtggatgaccttcaagcagagcaccgcctggatgctgcacatggctgtgcgggatctgatacgggccgtcttcttgtgcgacatgagcgtctttgatgcctacatggaacctggtccccggagacagtccagcctctttcagtgggagaacagccgggccctgtgttctgcacctgcctgtgacatcatcccacaagatgaaatcatcccccgggctcactgcaggctcctgtgcagtcaacagccctttgaggtggtggagaaggcctgccgctcctacagccacgtggtgctcaaggaggtgcgcttcttcaacctgcagtccctctacccgctgctgaaagacccctccctcaacctgcatatcgtgcacctggtccgggacccccgggccgtgttccgttcccgagaacgcacaaagggagatctcatgattgacagtcgcattgtgatggggcagcatgagcaaaaactcaagaaggaggaccaaccctactatgtgatgcaggtcatctgccaaagccagctggagatctacaagaccatccagtccttgcccaaggccctgcaggaacgctacctgcttgtgcgctatgaggacctggctcgagcccctgtggcccagacttcccgaatgtatgaattcgtgggattggaattcttgccccatcttcagacctgggtgcataacatcacccgaggcaagggcatgggtgaccacgctttccacacaaatgccagggatgcccttaatgtctcccaggcttggcgctggtctttgccctatgaaaaggtttctcgacttcagaaagcctgtggcgatgccatgaatttgctgggctaccgccacgtcagatctgaacaagaacagagaaacctgttgctggatcttctgtctacctggactgtccctgagcaaatccactaagagggttgagaaggctttgctgccacctggtgtcagcctcagtcactttctctgaatgcttctgagccttgcctacatctctgagccttaactacatgtctgtgggtatcacactgagtgtgagttgtgtccacacgtgctcaagcagaaggacttttgtgtccatgcttgtgtctagaaaacagactggggaaccttatgtgagcagcacatcccaccagtgaaacagggtattgctcttcttcttttcttgatcttcctgtctgggcagacttcagagactttgtggcctggaggcctattaagcacgacacagtatcagtggaattgatccataaacctccctgtccacatcttgcccaatggggaatggatctttcaccaaagagctcaccagcattttccacagagatgcaaattctgagcccttggagttcccagtggattcaaggaaggaagtgggaacaaggttggatgcctacttatgagcttgaccatcacagctatcggtaatcagaaatatgaaacaaaatctctgcacaaaagagcaagctcttaagttcacagggtgcctgggctgcatttgaatatcacttcccctctgcattttcccatcacatagaagactttgacctgtgaagctgccatctgttaatactaaaattcccaaataaggttctgttt

SEQ ID NO: 260432 - DNA, 1966 bp, Homo sapiens
cattgtgttgggtacggaagacgacagaagggtagaggagaaaagcgcatggcccggctagcagtgagcctctcaaaagcagcagggaagcccaagccacaaggtcttccacttcagcacaatgctactgcctaaaaaaatgaagctcctgctgtttctggtttcccagatggccatcttggctctattcttccacatgtacagccacaacatcagctccctgtctatgaaggcacagcccgagcgcatgcacgtgctggttctgtcttcctggcgctctggctcttcttttgtggggcagctttttgggcagcacccagatgttttctacctgatggagcccgcctggcacgtgtggatgaccttcaagcagagcaccgcctggatgctgcacatggctgtgcgggatctgatacgggccgtcttcttgtgcgacatgagcgtctttgatgcctacatggaacctggtccccggagacagtccagcctctttcagtgggagaacagccgggccctgtgttctgcacctgcctgtgacatcatcccacaagatgaaatcatcccccgggctcactgcaggctcctgtgcagtcaacagccctttgaggtggtggagaaggcctgccgctcctacagccacgtggtgctcaaggaggtgcgcttcttcaacctgcagtccctctacccgctgctgaaagacccctccctcaacctgcatatcgtgcacctggtccgggacccccgggccgtgttccgttcccgagaacgcacaaagggagatctcatgattgacagtcgcattgtgatggggcagcatgagcaaaaactcaagaaggaggaccaaccctactatgtgatgcaggtcatctgccaaagccagctggagatctacaagaccatccagtccttgcccaaggccctgcaggaacgctacctgcttgtgcgctatgaggacctggctcgagcccctgtggcccagacttcccgaatgtatgaattcgtgggattggaattcttgccccatcttcagacctgggtgcataacatcacccgaggcaagggcatgggtgaccacgctttccacacaaatgccagggatgcccttaatgtctcccaggcttggcgctggtctttgccctatgaaaaggtttctcgacttcagaaagcctgtggcgatgccatgaatttgctgggctaccgccacgtcagatctgaacaagaacagagaaacctgttgctggatcttctgtctacctggactgtccctgagcaaatccactaagagggttgagaaggctttgctgccacctggtgtcagcctcagtcactttctctgaatgcttctgagccttgcctacatctctgagccttaactacatgtctgtgggtatcacactgagtgtgagttgtgtccacacgtgctcaagcagaaggacttttgtgtccatgcttgtgtctagaaaacagactggggaaccttatgtgagcagcacatcccaccagtgaaacagggtattgctcttcttcttttcttgatcttcctgtctgggcagacttcagagactttgtggcctggaggcctattaagcacgacacagtatcagtggaattgatccataaacctccctgtccacatcttgcccaatggggaatggatctttcaccaaagagctcaccagcattttccacagagatgcaaattctgagcccttggagttcccagtggattcaaggaaggaagtgggaacaaggttggatgcctacttatgagcttgaccatcacagctatcggtaatcagaaatatgaaacaaaatctctgcacaaaagagcaagctcttaagttcacagggtgcctgggctgcatttgaatatcacttcccctctgcattttcccatcacatagaagactttgacctgtgaagctgccatctgttaatactaaaattcccaaataaggttctgttt

SEQ ID NO: 260433 - DNA, 2087 bp, Homo sapiens
ggctcgaggccaggatgcctccagtctgggggaaaatgcttcctcatttgcttctcccagcccacctcaagcagtctccccaccccttgagtctcagcagtgttaaagctgttactttcacagcttcctgggagcgagtgctttctcaagcccgtcttgcaaggtcttccacttcagcacaatgctactgcctaaaaaaatgaagctcctgctgtttctggtttcccagatggccatcttggctctattcttccacatgtacagccacaacatcagctccctgtctatgaaggcacagcccgagcgcatgcacgtgctggttctgtcttcctggcgctctggctcttcttttgtggggcagctttttgggcagcacccagatgttttctacctgatggagcccgcctggcacgtgtggatgaccttcaagcagagcaccgcctggatgctgcacatggctgtgcgggatctgatacgggccgtcttcttgtgcgacatgagcgtctttgatgcctacatggaacctggtccccggagacagtccagcctctttcagtgggagaacagccgggccctgtgttctgcacctgcctgtgacatcatcccacaagatgaaatcatcccccgggctcactgcaggctcctgtgcagtcaacagccctttgaggtggtggagaaggcctgccgctcctacagccacgtggtgctcaaggaggtgcgcttcttcaacctgcagtccctctacccgctgctgaaagacccctccctcaacctgcatatcgtgcacctggtccgggacccccgggccgtgttccgttcccgagaacgcacaaagggagatctcatgattgacagtcgcattgtgatggggcagcatgagcaaaaactcaagaaggaggaccaaccctactatgtgatgcaggtcatctgccaaagccagctggagatctacaagaccatccagtccttgcccaaggccctgcaggaacgctacctgcttgtgcgctatgaggacctggctcgagcccctgtggcccagacttcccgaatgtatgaattcgtgggattggaattcttgccccatcttcagacctgggtgcataacatcacccgaggcaagggcatgggtgaccacgctttccacacaaatgccagggatgcccttaatgtctcccaggcttggcgctggtctttgccctatgaaaaggtttctcgacttcagaaagcctgtggcgatgccatgaatttgctgggctaccgccacgtcagatctgaacaagaacagagaaacctgttgctggatcttctgtctacctggactgtccctgagcaaatccactaagagggttgagaaggctttgctgccacctggtgtcagcctcagtcactttctctgaatgcttctgagccttgcctacatctctgagccttaactacatgtctgtgggtatcacactgagtgtgagttgtgtccacacgtgctcaagcagaaggacttttgtgtccatgcttgtgtctagaaaacagactggggaaccttatgtgagcagcacatcccaccagtgaaacagggtattgctcttcttcttttcttgatcttcctgtctgggcagacttcagagactttgtggcctggaggcctattaagcacgacacagtatcagtggaattgatccataaacctccctgtccacatcttgcccaatggggaatggatctttcaccaaagagctcaccagcattttccacagagatgcaaattctgagcccttggagttcccagtggattcaaggaaggaagtgggaacaaggttggatgcctacttatgagcttgaccatcacagctatcggtaatcagaaatatgaaacaaaatctctgcacaaaagagcaagctcttaagttcacagggtgcctgggctgcatttgaatatcacttcccctctgcattttcccatcacatagaagactttgacctgtgaagctgccatctgttaatactaaaattcccaaataaggttctgtttagaatgtccctttttatgcttcttaattattagcagtaaatgttcatttttatgggatcct

SEQ ID NO: 260434 - DNA, 2161 bp, Homo sapiens
ttggccagaaggggaatagaaggcaaacaataaaacagcagcccaactccaccctttctgtttgttccttaaaggtcttccacttcagcacaatgctactgcctaaaaaaatgaagctcctgctgtttctggtttcccagatggccatcttggctctattcttccacatgtacagccacaacatcagctccctgtctatgaaggcacagcccgagcgcatgcacgtgctggttctgtcttcctggcgctctggctcttcttttgtggggcagctttttgggcagcacccagatgttttctacctgatggagcccgcctggcacgtgtggatgaccttcaagcagagcaccgcctggatgctgcacatggctgtgcgggatctgatacgggccgtcttcttgtgcgacatgagcgtctttgatgcctacatggaacctggtccccggagacagtccagcctctttcagtgggagaacagccgggccctgtgttctgcacctgcctgtgacatcatcccacaagatgaaatcatcccccgggctcactgcaggctcctgtgcagtcaacagccctttgaggtggtggagaaggcctgccgctcctacagccacgtggtgctcaaggaggtgcgcttcttcaacctgcagtccctctacccgctgctgaaagacccctccctcaacctgcatatcgtgcacctggtccgggacccccgggccgtgttccgttcccgagaacgcacaaagggagatctcatgattgacagtcgcattgtgatggggcagcatgagcaaaaactcaagaaggaggaccaaccctactatgtgatgcaggtcatctgccaaagccagctggagatctacaagaccatccagtccttgcccaaggccctgcaggaacgctacctgcttgtgcgctatgaggacctggctcgagcccctgtggcccagacttcccgaatgtatgaattcgtgggattggaattcttgccccatcttcagacctgggtgcataacatcacccgaggcaagggcatgggtgaccacgctttccacacaaatgccagggatgcccttaatgtctcccaggcttggcgctggtctttgccctatgaaaaggtttctcgacttcagaaagcctgtggcgatgccatgaatttgctgggctaccgccacgtcagatctgaacaagaacagagaaacctgttgctggatcttctgtctacctggactgtccctgagcaaatccactaagagggttgagaaggctttgctgccacctggtgtcagcctcagtcactttctctgaatgcttctgagccttgcctacatctctgagccttaactacatgtctgtgggtatcacactgagtgtgagttgtgtccacacgtgctcaagcagaaggacttttgtgtccatgcttgtgtctagaaaacagactggggaaccttatgtgagcagcacatcccaccagtgaaacagggtattgctcttcttcttttcttgatcttcctgtctgggcagacttcagagactttgtggcctggaggcctattaagcacgacacagtatcagtggaattgatccataaacctccctgtccacatcttgcccaatggggaatggatctttcaccaaagagctcaccagcattttccacagagatgcaaattctgagcccttggagttcccagtggattcaaggaaggaagtgggaacaaggttggatgcctacttatgagcttgaccatcacagctatcggtaatcagaaatatgaaacaaaatctctgcacaaaagagcaagctcttaagttcacagggtgcctgggctgcatttgaatatcacttcccctctgcattttcccatcacatagaagactttgacctgtgaagctgccatctgttaatactaaaattcccaaataaggttctgtttagaatgtccctttttatgcttcttaattattagcagtaaatgttcatttttatgggatcctaagctaagaatagatgtaatcatctttattggttttttaaaacacctttgctattatctatcacccatttatacagaaaattgctaagataatatttggtttcagatgatgaactaagtctataccctcttaagaattggtggaaaatagacaattagcagct

SEQ ID NO: 260435 - DNA, 1954 bp, Homo sapiens
ttggccagaaggggaatagaaggcaaacaataaaacagcagcccaactccaccctttctgtttgttccttaaaggtcttccacttcagcacaatgctactgcctaaaaaaatgaagctcctgctgtttctggtttcccagatggccatcttggctctattcttccacatgtacagccacaacatcagctccctgtctatgaaggcacagcccgagcgcatgcacgtgctggttctgtcttcctggcgctctggctcttcttttgtggggcagctttttgggcagcacccagatgttttctacctgatggagcccgcctggcacgtgtggatgaccttcaagcagagcaccgcctggatgctgcacatggctgtgcgggatctgatacgggccgtcttcttgtgcgacatgagcgtctttgatgcctacatggaacctggtccccggagacagtccagcctctttcagtgggagaacagccgggccctgtgttctgcacctgcctgtgacatcatcccacaagatgaaatcatcccccgggctcactgcaggctcctgtgcagtcaacagccctttgaggtggtggagaaggcctgccgctcctacagccacgtggtgctcaaggaggtgcgcttcttcaacctgcagtccctctacccgctgctgaaagacccctccctcaacctgcatatcgtgcacctggtccgggacccccgggccgtgttccgttcccgagaacgcacaaagggagatctcatgattgacagtcgcattgtgatggggcagcatgagcaaaaactcaagaaggaggaccaaccctactatgtgatgcaggtcatctgccaaagccagctggagatctacaagaccatccagtccttgcccaaggccctgcaggaacgctacctgcttgtgcgctatgaggacctggctcgagcccctgtggcccagacttcccgaatgtatgaattcgtgggattggaattcttgccccatcttcagacctgggtgcataacatcacccgaggcaagggcatgggtgaccacgctttccacacaaatgccagggatgcccttaatgtctcccaggcttggcgctggtctttgccctatgaaaaggtttctcgacttcagaaagcctgtggcgatgccatgaatttgctgggctaccgccacgtcagatctgaacaagaacagagaaacctgttgctggatcttctgtctacctggactgtccctgagcaaatccactaagagggttgagaaggctttgctgccacctggtgtcagcctcagtcactttctctgaatgcttctgagccttgcctacatctctgagccttaactacatgtctgtgggtatcacactgagtgtgagttgtgtccacacgtgctcaagcagaaggacttttgtgtccatgcttgtgtctagaaaacagactggggaaccttatgtgagcagcacatcccaccagtgaaacagggtattgctcttcttcttttcttgatcttcctgtctgggcagacttcagagactttgtggcctggaggcctattaagcacgacacagtatcagtggaattgatccataaacctccctgtccacatcttgcccaatggggaatggatctttcaccaaagagctcaccagcattttccacagagatgcaaattctgagcccttggagttcccagtggattcaaggaaggaagtgggaacaaggttggatgcctacttatgagcttgaccatcacagctatcggtaatcagaaatatgaaacaaaatctctgcacaaaagagcaagctcttaagttcacagggtgcctgggctgcatttgaatatcacttcccctctgcattttcccatcacatagaagactttgacctgtgaagctggcaagaattactcatcggggtacgaggccgaatcgtatcatggctagctgttctggg

SEQ ID NO: 260436 - DNA, 663 bp, Homo sapiens
ggttcatggaccatacatttggtagcaacactctggacaggtgctattcaatagaaatacaatgtgagccacacctgtaattttaaattttctagtagtcacattaaaaagtaaaaataaattggtaaaactaatttaataatatgtatataattaacccaatatatccaaataacataatttcattatgtataatatttacagtattagtgaaatattttacattcttttttggtactaactctttgaaatacagtgtctagtttacacttacaacatctatctcagtttggactaggcacatttcaagtgcttaaaagccgtatatgcagtacagtgcaagcccagatagttctgcattagatgtcttgaatcaatgatcactgtcatcctcataaaaatagaccttaattcttcacaatgcatttgaaagtttttatcccacctgttcatagccaattgttcttagttttcaatatgaaattaaacagttgcttagctcaatgtttacttttaatttccatgtaagctacccaatatatgataaattcactttagactaagacacttaagaaacagaacaggaaatagaataatcactggaataggaatctagagatacaaattcaggcccaaaagagttctgcctctatttatttgtta

SEQ ID NO: 260437 - DNA, 451 bp, Homo sapiens
ccgacttccactacgcttttaaaagtttaacgcataaagacttctatgcttttctctaaccgttacagactctgaaatacgaatgaagacaaaccagggcatttcaaaggcgctcggcatcacccaatttcccaaacatctcacgagatccagtttgccttaaaaagtacacgtatatttccaaaataagagcgaggctgggcagaatggctcattcctgtaatcccagcactttgggaggctgaggtgggtgaatcacttgaggtcaggagttcaagaccagcctgcccaacatggcgaaaccctgtctctattaaaaatacaaaaattggctagatgtggtggctcacgcctgtaatcctagcactttgggaggccaaggagagtggatcacctgaggtcaggagttcaagaccagcctggccgacatggcgaaaccctgtctccactt

SEQ ID NO: 260438 - DNA, 708 bp, Homo sapiens
ggaatacagggattatctcatccagccatctaagagaacagaaaagataaaaataataaataaataaataaatagctctgggatgtagtctttctggctaaacagcttccccatgaggaagttgcagcacttaaacttttgactcctgtaggcacagcagtgcatgcctgtagtcccagctactcctgaggtgggaagatcacttgagcccaagaagtcctggactatagtacacgatgccaatcgggtgtctgcactaagttcagcatcagtatggtgacctcctgggagtgggggaccaccaggttgcctaaggatgggtgaaccagtccaggcagaaactgaacaggtcaaaactcctgtgctgatcagtagtgggattgtgactgtgaataggcattgcactccagcctggatgacatagtgagatcctatctctaagaatagagagagagagagagggaactaaacttatcactccaagccaaattccctttcctcacaggcctctcattaatgttggaaaatgccgggtcctctgtacaactttctgtttcctacagttgcctggcctctatttgtttttgtcatgtcatattcctcaactgttctaattggagtggagctgtggtcatctattgttatagtagtaatactgaacattgccatcatttttattaagtgattcttacttgccacagcagtatt

SEQ ID NO: 260439 - DNA, 289 bp, Homo sapiens
tttttttttttgtagaaacaaggtctcgctttgttgcccagactggtatcgaactcctgggatcaagtgatccttcctccttagcctcccatagtgctaggattacaggtgtgagccaccacacccagccaagttcttatatctgtctctaagtatctctctctctctttatatataaatatagatagatagatgtggatagatatacacatatattttaaacctcctttgtctgcacatttaattagttacaaagctgtgtcaatttaggacttgtcttgtatccatt

SEQ ID NO: 260440 - DNA, 158 bp, Homo sapiens
atatcctcccacccaccacaacctcccaccccaacaaaacctgttctacccagtcttctccagctcagtggcaattttatccttccatctgttcaggctaaaaagctcgtccttgtccttaacccctctgacccatgcccaatccataagccaatcca

SEQ ID NO: 260441 - DNA, 550 bp, Homo sapiens
tcatttatttactatcttgttgcacagtggattgatgcaacttacagtaataatgtgaagtattatggcagtaacaacaaaatcaagaaaaacataaagtaagcacagtcatatgccacatgttctcactaaactataaatttgtccctgaatagccttgcagccaaaggaaagagaaaagttacaagcagttgtacaatttttactgttttatgtggaaatataaagcaatttattgggaagaagaagtatctcttcaactcttaattcacttctgtttagacattgagagatacagtagataaaatcattgaaagacacagtagatactttcttaaataacatccctatagcaaataaaataatatgctggaaacgaccatgttaaaatttgttcttcaaggctgggcacagtggctcacgcctgtaatcccagcactttgggaggctgaggtgggcagatcacctgaggtcaggagttgaagaccagcctggccaatagagcgagattctgtctcaaaataaataaataaataaataaataaataaa

SEQ ID NO: 260442 - DNA, 508 bp, Homo sapiens
aggcagttctccgtgacatgcatcggctcagctctgtgattctaaacacgggctgggcctgtaggaatgtccgtgacaccccatcaccaagctcccagtgcccagccagccccattctgtagctggcagcatgtcacccatcagcagccaaatccctgtccctggcctatggcaggctcagaaaccctcaagacttgagatcctgagcctcctcactggaggctgctgcagaaagagttcatctctgtataggtacaggaggtttggggcacacctgggaaccccaccatcccctcatgctgtacattcaacacaaccgcttcctgcgctcccagcccagactcacaactgaattcaaatggaacctctgatgggtaagtggaagactcttccacatttcccagcttgtcttcacccacagggcagtgagcctaaaatgtatctaaactgtggccaaaagcaaaagaaaataaaaacaaaattgttcaaagcattttaaaattgcctc

SEQ ID NO: 260443 - DNA, 451 bp, Homo sapiens
gttagctcccaagctctctcaaccaccctagtgtgagaagtatggaagggaccaggcagccctgtccaccaccatattcccattcccataatggaacctagctggtagagatgctcaaatgatgtttactgaatggtggctccagggcctttccacctgctgatcttcctgcctggaggaagctcttcctgagatacctgcatggttccttcccactccaggttccctttagaaaggatgttcccaaccatccaacctggaaatagagccccactgccaccggtgctctgtgtctcctcaccttgcttgatatttctagagagcacttatcactacttgaaattatacaggatatctgcctgtttcctgcctgtttcctcctcagaatggaagctcctcttgtgttctcgtagaaggcgctcaataaaaatttactgaagcagtgaaagat

SEQ ID NO: 260444 - DNA, 502 bp, Homo sapiens
ttaggcacgagggcagactcagcaatacatgtaaaggctgccaaatgcaactgggacattgggcagaagccacttgggaggaagtgaagataagtacacatagggaccagagggctcagaatagcagatctcagaaagctccagcaaaaatatacttgttgaaggtttagggtggaccctaaattgttttgcaacagtttgacaactcactgtaactgggttgtgtagagatgggagaacaatatttcatggatggaattggtccagagaagcagatcaggcagactattcaacaattatgtaaaccaatagcatgtatccaaagtagtttgtctctgtggcagcaaaggagagagccattcaattgtgaggcctaattaatttgaaatgctaccctggtcttccttcacctcccatctttttataggagcttatacaagttaccaatcgaggaaaattcagctcattcaatgagtaattaaaaggtactgttaaaaaaaaa

SEQ ID NO: 260445 - DNA, 400 bp, Homo sapiens
gtcctcccaccttggcctgagcaccagaatgaaggggagagtaaggcagtggatctttgggaaaggagtgttccaggaagaacagagatgcttctggttattttaggaggtcatgaaactctcaaaaattgtcaaaacagttagtcttaatttatcataaccaaaaagaaattataccttaccttatggaaataataaaatttagcatcgtattttgataaaatgttacaactccaaaatgatcgggagtctgtggataagcccatgcctgtaccatggcaccagctgttatctggctaaatattttgtaatctatgttgtaaaacttcctcttctgaaacttcccctcaaagttgaacaaacacaaattagaacaacatgagagtgatttaagaaacat

SEQ ID NO: 260446 - DNA, 493 bp, Homo sapiens
cttagaaacattgatcattttttcttaagcatagtgcctacaattttgattggtaaatggggttttgggcttggttgtggaaagtgaaccaaccatctgtttttttccttggactgcagtggtgctcaacagaacattttgcacgaggagccttaagctaaacatttgctctaaaacatatatgtgtatctatacatctatgtacatgtaaaaaaaccatgtgtatccacttatcagaataaatctctgatgctgggtgtggtggctgatgcctgtaatcccatcactttggaaggccaaggcaagtggatcacttaatcccaggagttttgagactagcctgggcaacacagtgaaaccctgtctctacaaaaaatacacaaattatctgggtgtggtggtgcatgcctatagtcccagctactagggaggctgagatggaaggattgcttgagcctgggatgtcaaggctgcagtgagccatgagcatgcc

SEQ ID NO: 260447 - DNA, 1003 bp, Homo sapiens
atagcagtgtgagaatagactaatacacagtccatcagggtattgggaagactgtggtttgcaagaacacagcaacatcagtggatgccttttggatggtgatggccttgtgttaactgcctgcagctgatgaacgtggtggggaacatgctgcatttcctacctgcctttgtgtgcaggtgaagcaaccagtctcgaagcactacgcaggagtgatgatgatctgcgacacctgcatctactcaggcagcctgctgagccccagccatagctggatctgtgacgagctcacgggcagcaggggtctgacacaatggggacctacatcgtggacctgctgacccacccgaccttctggagagatgagaagttgcacacactgtcaagacatacatgaggcagagtgccaccatctgtggcatccagcatgtcaccattgatgacttctgtttcaaaaaaaaaaaaaaaaaactacctgccgaaacaggattcaacactgtgtaaaagaaggaaacaacttcacaacatcaagatactaagcaatgtagcagttacaactatacaataaaaaattactagacacatgaagattcaacaaaatatgatccataccagaagaaaaatcagtcaatagaatcagaaatgacagagatcatggaattagcacaaaaaaaaccattaaaacagctattactaatataattaagaatttacaagaaaatatgaacataagaaaaaatgaagatatgaaaaacaatgaaatgcagcttttagacttatgtaatgcaatatctgaaaaaaatttaaatcactgtaggagcttaaagcaaatttaatgtagaagaaaagattgatgaccttgaagacatagcaatagaagctattcaagctgtagcacacagagaaaaatacaccaaaaagccaaactgctatgagtgtctgcagaaataaacttcagtagatgtgtaactccaaggactgtaggtagtggaattgacagata

SEQ ID NO: 260448 - DNA, 136 bp, Homo sapiens
catacaatttacctatttaacaaatctgtaggtgtactcctgaatctaaaataaaagtttaaaaaaaacttggtcaaagaaaaggaggtattaggaaagcttcccagagaagtttatatttaatttgcatcataga

SEQ ID NO: 260449 - DNA, 260 bp, Homo sapiens
actcaagtgattctaatgtacaaccaaggttgagaaccattgagctagactaattactggtttaaaaacttctgtgctcttatgtagtgcaattagtttgcttctaatatttatgaattgcttttgaatttggagacaaaaatatcaggatcaaagtgtaaatattctttattttcagactgataagaggtaagaggaggtgattcatgtttatatgcctttaaagacctttagttttcacttgtcttataggttcattt

SEQ ID NO: 260450 - DNA, 933 bp, Homo sapiens
gcctgcctctttagtgactacagacctcacttcccttctctggagttttggagtctattttcttcatggaattttgctaggaacaaaagaaaagtctaactccattaaatgccttaatggataaagaaaaattggatgttaagattgaatattgtaactatgcaatggattcctcagtggaaaacatgtatgtaaacaaagtgtgggttcaatgtgagaatgaaaattgtttgaaatggagattgttatcaagtgaggattcagccaaggttgatcatgatgaaccatggtactgcttcatgaacactgattcaagatataataactgctcaatttctgaagaagacttccctgaagagtctcagcttcatcagtgtggatttaagattgtctattcacagctccctcttggaagcctggttttggtaaaattacagaattggccaagttggccaggaatactttgccctgaccgttttaaagggaaatatgtaacttatgacccggatggaaatgttgaagagtatcacatagaattcctgggcgatccccattcaagatcatggataaaggcaacattcgttggacattatagtatcacattaaagattatgagatctatgacttatatccacatgttgctacagacatataagaaataatttaaagtaatgatcaatatttgaaatcataccaatgaatttttgaagctctataaagaagattaggctaatcacataattcaggattaaaaaatgtagcagcctttcattttcatctccagtttcctgactgggttgtttttcatgccaccttgaacgaaatatatctatttatactactcaataaatatttactcaactcctattatttgaaattcttctaggttccaaagtgaacaaaatagaccaaattgaatgccctcataaaatt

SEQ ID NO: 260451 - DNA, 476 bp, Homo sapiens
gcccacagttgatgcatattcatcccatattaagagatagggaagagtgatatgatggacacaccagggctatggagtcagagacgtgggttttagtccgacttcctttgttactatgtaactttggcagttaaactttgggaacctcagtattctcatctgtggaggtaaagacaaacattacctgtgaagcgggggctatggtgatgataattagcaatattttaagtagagagtcttctacagtgtttgacacaaaatagatgtttaaacaaacagaaaaaacatcttagctgttatctgctatgcagttcaaggtaaagagtagatgagaaagccagcctgaacacagtggtagtcctggagaatggataaccaaagcaaaagcaaagcaaaacagttaccagacaacatggaggttggtaatggcagtgaaatccttgattgctagcagtggaaggagatatccaaataaa

SEQ ID NO: 260452 - DNA, 316 bp, Homo sapiens
ctaactagcccaacatgatattcccttggatgactgctataccagtgcttgttaagctccaaggtgtttggaatcaccggggcatcttgttgaaatgcagagtctgattaagtaggtctggggcggtgccttagattctgcacatctaacaagctccaagtaaggccaaaattgccacttgaagacccacatgctggatagcaaggtactgtataacatttaaccttctttcttctgtaacagggatcagcaaactgtggcctaccgattggccacctgctttgtgaataaagttttattagaacacaaccacatt

SEQ ID NO: 260453 - DNA, 491 bp, Homo sapiens
atatttataaacttaatctttggactaggcatcctaattgtaattccatatcttaaagaagcaattctaaatataggaaatgcttcacaaatatggttgatttttgcagagttacctataaaagcaaaaagttataaacactgtaaaaccaaccataggaaactgtgttaattaaggtacattcacttgatagactatcatacagcattaaaatgatatttataaagaacttataacaatatgggggcaaggtttatgccatattgttaagtaggaaaataactgaatacaaaatcaaatatgttacatcaccattcaaaggtataataatgacaataaaaagaatctcatcaacatggtcggaagaaatacaccaagatattaaaagtaattgttaattgaacaatggcatcgtaggtgactttttctctctacttttctgaaatatccaaattttttacaataaacatgtatgtatttacagtgaaaga

SEQ ID NO: 260454 - DNA, 1927 bp, Homo sapiens
  misc_feature (110)..(110): n is a, c, g, or t
  misc_feature (495)..(495): n is a, c, g, or t
  misc_feature (687)..(687): n is a, c, g, or t
  misc_feature (834)..(834): n is a, c, g, or t
  misc_feature (1002)..(1002): n is a, c, g, or t
  misc_feature (1007)..(1007): n is a, c, g, or t
  misc_feature (1103)..(1103): n is a, c, g, or t
  misc_feature (1129)..(1129): n is a, c, g, or t
  misc_feature (1326)..(1327): n is a, c, g, or t
  misc_feature (1892)..(1892): n is a, c, g, or t
tctgtgtctcagctcacagggcttccaggatcatggcctataaaatgcttcaagtagtcctgtgctcaacattgcttatcggagcattgggagcgccatttttgttggangaccctgcaaaccagttcctacgtctcaaaagacatgtaaatttgcaggattactgggacccagatcacagttcagatgtgtgggtaaacacactggctaagcaggtatttgtattagaaacaaatggtccttcaccatttatctttttaaatagtcattgcattagctgaccactaattaacacatgactagcctagccctgatttttcctctctagacactctgaactatatctgctttttcttgcccatgaagtggtttttgcctggtaaactctgcctcttgcttaaagactagactcaaatgtccctctgaagcctttcccttcttctcagggcgacatttgtctttccttctctccctttttgcatgctctttcacaantaaatagctctcaaaatgtcaattggaattacttgttttgtgtacccaacctacctacctagactataaaggtagggtctgtatcttatccttcaaggtaattattctcgggaactagcaaaatgattgttatatagtcaaagcttaataaattattacatgtatgtgtagattgatgaatggatagtggtnggactttagttcactttcagttgttcagtagctaaatatccccggtgacaattattcaaggctttaatgttgttcctccttttgcttgccttttgtacattttcctattcatttgcattctcgctgcaaaagaaacaaagaagaaanttgcattggccttttttattctatatttacttttctgatagaagaagacattaaaactccaggccaaatgaaattgctgaattatctgagtatttcaattattcatgatctccctcttacaatttagcaatttaggaaacaaagttgtataatgaatgaatgaattcnttcanttattctttctttccacatatctcaggatctgattatcatcaggcatgaggattgtataaagtcataaaaagttgaatgtccttgttttcatgggnccttgatcttgtccgtactccacatnactgggtcttaaccggtctaccaggatctgcttgttttgcacttgctgatgaaaactactaactgaataatgcatccagttttatggctgtttttgtccaataggcattatttagcattattaaaacaagacatttgtttatttggtcaattaagtgattaagtaggctggtagactgtgtcttctttatagaatgnngacattttcaggtactctcctgcctctacttgtagaccagatttgtaccaactgacaggcactatgtaatgtagcaagactctgctacattggtttatactgtggccccacaaatactgtaaaatatctgagtattgaaataaacagataattaaaagtatgaaaaccaaattctatttggtataattcttccattatatttttctcatcttttaggaatatctgtatgataatcagaataactgatgcaagatgtgttctacacactcagagatcatgacttgtgtttccttttcttgaaggctcgtgaaacatggattgctttgaaaacaacagcacagtattatttggatatgaataccttcacctttgacatgtctactgcccagtaaatatgttttcctggttaaagcaggaggatgaagatggcagaggttggaatggcattgtgccaaaaccatgggttttagagatctgagggtatatccatgctgtttactacattatttattatgtctgtctcaaagttgttgaaaacagtagttatgaaaacccatgtaggaanctggaataagacattctcaataaatggtagttctc

SEQ ID NO: 260455 - DNA, 1019 bp, Homo sapiens
  misc_feature (344)..(344): n is a, c, g, or t
tctgtgtctcagctcacagggcttccaggatcatggcctataaaatgcttcaagtagtcctgtgctcaacattgcttatcggctcgtgaaacatggattgctttgaaaacaacagcacagtattatttggatatgaataccttcacctttgacatgtctactgcccagtaaatatgttttcctggttaaagcaggaggatgaagatggcagaggttggaatggcattgtgccaaaaccatgggttttagagatctgagggtatatccatgctgtttactacattatttattatgtctgtctcaaagttgttgaaaacagtagttatgaaaacccatgtaggaanctggaataagacattctcaataaatggtagttctcaaaaaaagaactaaaaaaaaaaaaggctgtagtaataacatttaccaaaacgatggcatttatgggaaaaggaaagcaaaaacataaacaaagaaaagtagtttcattaaaccactctgttcatagcttttactctctattgcctcttctttgagagagttttttaattcaaagaaggacagggagctctcaaatggagctgatcctcttctctcttcttcagtgcttgtcgcattcttaagtcagtcgattttaaaaccatgactttgaaacgtttttcatcaaaggtgtactgctgagtggagaatacagccttaccttaatacaacaagtagatagtggctaggaactcaatggaagtcattcacttgtaagtgcaaacttcttccaagttttgtaaaatttttgtaagctttgcattctgttccacaatttattgatgtttgttttaatgtgaaataacagttttgactcactggccaggcacattttataattttttcaattaaaactgaaaaattggccatagggaaaagtggactgcatttatcctataactttcctaatattcatggattaccacctcagtttgagaagcattgagatgatacaactaattgccaagattgccccccaaaat

SEQ ID NO: 260456 - DNA, 220 bp, Homo sapiens
cacctttaacatataccttaaaatcaatacatagtccaaagactcaaaatttcttttccctggtaggagtgtgaccgaaaatacagttatgaccttatacttctcctctccaaaaataaacttgactcaagataggtaggtactatctcagtttaaaagcttattatctttcaaacacaagaagaatgccagggaaatacatacacacacacacacacac

SEQ ID NO: 260457 - DNA, 405 bp, Homo sapiens
tcatagagatggggtcttgttatgttggtctggtctcaaactctttatacccaagtgattctctcacctcagtccccctaaatgctgggattacaggagtgagccaccacacccagcctcctccttcctcataatagcctttttttttttttttttttttgagatgaactctcactctgttgcccagactggagtgcagtggtgagatctcggctcactgcaacctccacctcccgggttcaagcgattcttgcacctcagcttcccaagtagcaggattacaggtgcctaccaccacactcagctaatttttgtatttttagtagaaacagggtttcaccatgttggccaggctggtctcaaactcctgcctcaagtgatcctcccacctcggcctcccagagt

SEQ ID NO: 260458 - DNA, 414 bp, Homo sapiens
aaaggagttcttaattttcctcattcaaactcagccttcagcctccaaagaatcacaagcttggttcttgagtgtaggcctttttcattgttctctgccctttttcctatggcagctttattctggcttgtgtctttggcacatcttgtgagggagtttccttctgactctcaggggtaggagacctttaaaagtacaagggtagtatactgggcccagaaatgtttcctgtcactcctgtaggagtagaggatttttttttcctcttatgtttttttctcttcacagtgagattactctgttccctgtgtggcagcagggtttacagcctttcttttaatgacattatggctttcattccttaaaggagaagggtctgggtgagactttgggtctttcccactgtggtggccg

SEQ ID NO: 260459 - DNA, 305 bp, Homo sapiens
aaaacacagcgactatgcaccaatcagtgctgttcatagagattcatcttctgctttcaacactggagccagatcttgcaggctgttttgcctccctggtgaagtgcagttcagcagtttagcagacagtgagcatcacaagaccaggcatcagaaactgggggaacaacaagacgttggggaccaagtgcaggagagaagaggcttcagggtgatggaaccgcttataagaagccgcagcagtgggagggctgggtgcaaggatgcaggttactaaaaggggccatggcagcagccccttgtga

SEQ ID NO: 260460 - DNA, 354 bp, Homo sapiens
attttttatatttcattaaggtatacagaaattcacttgttttaggcatttttaccaatctagcatttgaaattcatcattaacactatacccaaacttttcactgaaataaaattataattgcggcaagttccactcaacaattacttagtcttttaatttcttactttctgtaagcaagtttccccaaccaacaatcaatcaagactccacgctaaaaacaacaaacaacataaaatccaacctgtcttccttcatctcaatcacccttaatactcactcactctccctttcctgtaaaaggaaacaaaaaagaaacaaaaataaaacaactattctttttaaaacagagga

SEQ ID NO: 260461 - DNA, 788 bp, Homo sapiens
cccggccgccgcaggagcggctccccgccttagcccgcaggccgcgaggtgcacggccctctctaccgagaagcctgaccgccccaggcctccccgtcggcctccagcgcctacacccgtttcggcgcccactcttcgttctgcgcccctagatgcccatcggctgcgggagaggctcccggaaagctcggtggggccccgcgcagagcccgcccgccggagccgcaatgctgccatggtttccccgcgccaccagccagcgacattcacgagagagacgaataggacacggtcatccgagtgccgaggcgcggaagcgcgaactgcccggagcgacctggcttggcgcacagactcattaaccaagcccgagaggaggcagcaatgcgtgtgcgggaaagggagcggttctcaaaatacaaagtgataaaacagcttccagttatattgaaaaacgatgcaaaccctcaattccttttttttttttttggacctggccggacctggaaatgccggttataaacaagaataaaaacttgaatttattggtggaagtcctgttaaaagagctcaacacaagcatatgagacaaactgcaaaaagcaaacagtttccattcaaaaagcagggcccccctttgggtttttgtttaagcgtttgatgtgcccatgagacccctaacaaagcctgaaactaaatttatttttccctacatctctctgggatcaaacttttggaagtaaagcatgtatttatcaataaaacaaatgtttgcccagcatcatcca

SEQ ID NO: 260462 - DNA, 1058 bp, Homo sapiens
gtaattttcttaattgaaaaaatggaatttaaagtcaggaagatctaggctcaaagttaagctcaagttcactcagttttcctaagtctattttttcatctatataagatggtggaaacattgcctaaatgtagagtttttatgataatatagataatataggcagcatagtttctggcaaagtgtgagtgcttataacatgtatgacacccatcagggtgatatttaaaaatatttaaccagtgaggcatatgcatgacaggttaaaagaaacaccagccacaaacagatggtgtggaggtaccaaggcacaatgactaaatatcatgtgttatttccacagtttatacatcacctgattttgaaaggaagatgtcttacccaggataacttagatctcgaagtctccttatctcattattgaatatgaacctacacaaactttttaccttgtgatttgtatccacatccaaattactctgttagaatctgattaaattatttttgtttttcttgggatctgacttttgggaggctttaagtgattatgattgcacttccctccacctggaaaccacctcttccttctctgatctcaccttggcttagctctccaacacaagactctgtggtgtctgcccatgcccactactctcactgttgagaatagtattcaatatctgtttaacatatataactacttttaacaaacactgaatactcctttttactaaaggtgtaaagactgtcaagctttggattttctctgttaataatcaaagtttatagaaattttaatacttacctagatattctgcaaggtgatcaaattctggtttattggcaatgagctcttcttttgtaggaatgtttattcccatgaagcatggatatttaattggtggtgaagctactcgaatgtgtaccttggaaagaaatcattgcacacaaggtttttaagactatgcaaaattctttcattgtgcaaatacaatacaaaattgttttgcagaatattcagtaacaacatatgggtaataaattattctttctacaaa

SEQ ID NO: 260463 - DNA, 602 bp, Homo sapiens
tttccttttaggaaacaacaattagtgacatccttgaatccgaagtagtgaatgaaatattgcctttatcaaactccagtttttcaggaaaaggtttggtagagtcatttgcaagtcttcaagagactgaagagatcaagtcaaaagaagcaatggcaagttcaaagtcccctgaaaagtctcctgagaatcttgtgtgttcacagaattctgaggctggatacataaatgtggcttctctgaaggagacacatggtatacaagaacaagaccaaaagtcagaactataaaatcactggtgcctaaagctatactgaacaaaagtggtaatttaaagcctggacaaaaggtggaccatgacattgagaagagttaccacagatcccaaatggatatcacccaagagtcttcaaaactgctgataaattcattaaagcagttgtaaaaatggatttctcaagtttgtttgatatcctcagatgccttgtattgaccaaaatattgactttagttcaatgatttatttaggtttctcttcagcagagcacatgtagggttaattcaacattctttcccattatcatgggtatcttttctgattt

SEQ ID NO: 260464 - DNA, 263 bp, Homo sapiens
taaggtcccgatggagaaccatagcaagcgtcccctccctgtttctaaagatgagacactgtgactgcatttgttttttcctctttgttcaaagctcagtagtaatagtaatagcaacagttgccatttagtgctaaagttgctagagtgctagagttagcgtttgaactccgcctgcctggcttcagggtctgtgtacttcatggccaggctctgcttcctctgggattaaataatctttggcaaaatatgtcaccaccatg

SEQ ID NO: 260465 - DNA, 666 bp, Homo sapiens
gtaagtagcaggttgttgtatgtacgttcttactgataacccactggtcaatgtttttgcgttggtcttatattttggtaatttcaaaaatactcagtaatatgttgttattaatgcacagaagggatatgtgtgtctaaatgcttatatttgcttgctttgtcttaggtttggtgtgtctttttaaacttgggaatctagttgttatcttagcagtgtaatcaaaacaaatattataacctcaggactaattcttaatgaactttgctgaaattgaaagttgttgctgacaacttaagagcatttcttctcatcctcatcagccattgtgaacgcccttgttttcttgctgtcagctgtttgagattgtcatgatgatgttaaattatgttcagtcttctgagtgttttgttgattaatttgtgttactactcttttattaggatttatgttgtctggtgtattgtagcatctgtatttctgtcaccattgaaaatcagttagaaaacatcagtaacttattttgttcacttggaaaagctttccaagttaacattcctctacaattatcatggttaacagaagtaatagaaagagcatggactttagaatcagaagatgttagattgtacaacacttttctgtgttcatgaagaaaaaaatata

SEQ ID NO: 260466 - DNA, 346 bp, Homo sapiens
tgcccactgcactttgcctagggggatgcccacgactttttgaagtccccctacttaaaagacagaaatgtcaaacaccatgcatgcctcagatctgctataaataatatgtgtgcagagcatgacttcgatgagctcacacacggcgtttggaggcactaattaactccgtcaccctcatagcgccatctccgggaggccaaaagcgagtagcatcttttcacatccttttttaatttttggcaaccggttccggatattaaggggaaacttcggtgggctgtttgaacgctactttaggacgtgtttgttttgacgctgtgcctctacccttggacagagtggc

SEQ ID NO: 260467 - DNA, 463 bp, Homo sapiens
gcatcttattaactcaaattgaggcttggagtatgagggaccagcaggaggaacagacctcacccaaatccctttatgaatgaggctgcttttaagtgaatttaagtagttggaaaaattattgttgatctcaggcatttactgaccgctctcagtcgcttctgcatctcatcgttcaacactcaggatgcgcacatccatagccagtagcccagaacttcatttagaagttcaaccctggttcttcccaccattccctcccctagacttgagaccttgcctcaaagccccaggattgtttaagatcatggatttataagttgttcaatatcttggaagcaggcatggttaaggcttctgaaatgtatcttgtgaatcattcaaagaagaccttagtcctcttgagtcacatcttcctcacaccctgcagacagcaagtggccattaacgagtcactagtttg

SEQ ID NO: 260468 - DNA, 391 bp, Homo sapiens
aagttgtgttcgtttatgattctttaaatgttttccaatacttagatacatcaaaattataggacttctcaattccatcctattgttacagaatataaatttaatcaagataggaagaccctcaaaagatctttctcatgagttcagatattccaaataataattacagaatttcatttgtacatttgaactcttatcattgaatttgtttaattccttagtgtcttcctgttttcaggcttacttttcaattaatttcagtctgcaaaaagcttcaaaaatagatggtagcttttatatggttcctaatgttgagtgatttgattaaagttttccaactgattttgaacaaaatgtaatgaaagcttagaagactagtttacaaaaaaaa

SEQ ID NO: 260469 - DNA, 517 bp, Homo sapiens
cagcttcggagcaagggctgcaaaccagaccctctccagcactgagtagcacccgtaatccctccctttgggacaggggctgtggaaagtagaaggaggtgatacaaggaaagtgctggagtcccaagcagctggggcatgaggtccttcagggggcagcccaccaggacccccaaatccacgcatacctacagctgggagagaggccagccaccaacccacatcctcggagagtgctgggctccacttaggacacaggactgtctgcccagacaaacgggagacaggctaggactgcttcctcagcagtgcagaggaggggttcccagggcagctggctctgggcctagaagattccaaagcctatggtagttcctgatggagtcgtctgtcctccatccagggcattaagaactaggaatgaaggggaatcggggagaataaaaacacaggaccacagcccagcggcctgggcacagtctagctctgcagagaccatggggctgggctgtccact

SEQ ID NO: 260470 - DNA, 430 bp, Homo sapiens
taacctccttagaacctaattaggcttcccaacctgcaatctaacgagcttggtgatgtggctgccaagtttacagcagattcaaaggctgatggaaatgtttggggatgagacagaggcgatgatggaacaacactgtgaagagaaccacagcacggctccccataaaagtcatctttatggacagatatttcatggcggcagcttgagaaggctcacgtttcttaggcagctggtgcagagccaggagagctaatcatgagatcttccagtcccaggacgtgggctgcagctggcggctgtggtcgtcttatatcaaactctcaagagtcacagggcagcagcattggccccctcccaagtcattccagatgggatttaaggtggcttaatgagcattcataaaatacagcaagagaacataaactga

SEQ ID NO: 260471 - DNA, 703 bp, Homo sapiens
cattcactgtttacatctttgcactgctatatatttgtacatgcttctttctcttcctgaaatgaaactctgcattctcctctctacgtccttatttaggtcccaccattcttcaaaatccaactcgaattgaactccataaaaaatccacttccctttcttccctctgcccttgtcctatctccaccacttgttaacctcacccctatttaattttcagagcacatctccaggcattctctcttctgatgtagatatttacatacatttgtcgtttccctgcatgaatgccaaattctttggcttcaagcttttttcttgattcatttgtgtggccatcataaagtttagcctatgccttcaatataccgcgttttgaagaacatgtgttcaattataatgaatagaagaattattgttaaagggggcaatttaggttggattgaggacacccagcatgaaactgaaatgactgagaacaggcaattcatgactgcatgctctaaccactagactattttccattctgaataggacaatagtggtcattattttgttgccacagtttcattctcacactcacactgagcctttgaagtgaaatctctcctagcaccactgaggttgggaggattgctcactatttggagggattgcagtagaaagttatgaactctctggtgaaatgctgctcagtttattc

SEQ ID NO: 260472 - DNA, 395 bp, Homo sapiens
tggcctcccaaagtgctgggattacaggcgtgagtcaccgcgcccagccacatttccaactatctgatagccaactgcttcacacatctgtgtaatctgtctggcccctgaatgcatttctgtttgggatttctggatctctagattctaaaggcatagataggtgcattgatgcattccacaaatattgaatgagtgtctctcataggccagtcactattgctgacaatgggaacacagcggagaacagacaaaaatcactgcctttgtggagttgagattgtgtaggggagagacagataagctttaaaaaaaaaatgctgaggctggaggatcacttgaggctgggagttcgagactagcctgaacaacatagtgagacacccctctctaca

SEQ ID NO: 260473 - DNA, 557 bp, Homo sapiens
ctaacttcattattactacatcataataataatgaaatttattattattgcatattaaatgttttatttgcagtattgtgatgaacatttacttgcaagagatttgtcataagaaaaccttaaaacttttatgtaaccattttttatcttgtacaaggataagttttgaggtaaattaaagatggaaaacagtggaaataaaaagttatctagtgtctaagtttagttcaaagccatgcttactatcttttctggtttctatgatgacatggttgttgaaacatgcttctgatctttgggtaatgtattactgttaacataaaccattgtgatgacataggaagcaccaaaacctatcttcaacatttgaaaaaatcaggagccgtgtataagtcacaaaatgaccttttcttcgtttctgggttgttagtgcagcatgctgagaaaaacaggctctgcaaggcaacattaactgacagagttgtgggtcaaatctctttattttaaaagaggggttactttggagccaaagttaagtgttcttagggtttgggcag

SEQ ID NO: 260474 - DNA, 619 bp, Homo sapiens
gcacagaagacaggaagatgtctcaactgtattctaaatcctaattccattcctaaattttctccagatacatcttgctaatggcttctatttcatcaaagttaaaacatcatgcccacaatcacaaacaacaaaaaactaaaggcagacagacccatcttgaatagtcgaataaaaatacctaaggagaaataaactccccaggagttatatactatgggatgttcctttacactaataaaatcatcttccttttaaagtcaacatttgaatttcgcagttatccccttacctggaaaatgatcagcaaagcctgagaggtgaaacattttactcctgattatacatatcctctacagatgctaaatacccatgctgaatttgaaatctgagctgggtaaataggaaagaatgcatgtcccctttctttctttctttctttctttctttcttgttcatagttgaaaaggctgctgagttttgtttgtatgtttcttttgtgcctgggaaatgttttgcaattcttaggtatttgaaaaataactaatattacaaaaaaattaataacttaggtagcatgaaatatacactcacactaaaggaaaaataaaaaaacaaa

SEQ ID NO: 260475 - DNA, 545 bp, Homo sapiens
  misc_feature (2)..(2): n is a, c, g, or t
  misc_feature (13)..(13): n is a, c, g, or t
  misc_feature (54)..(55): n is a, c, g, or t
  misc_feature (99)..(99): n is a, c, g, or t
  misc_feature (119)..(119): n is a, c, g, or t
  misc_feature (152)..(152): n is a, c, g, or t
cngaagccccccncaggatacgtgtacagggtcccagcccccatggtgattccnncaaagaaaggggcccttttgtcgtcttctgcaccgtagtcgacncggccgcgaattcgcggctncgtcgactacggctgcgagaagacgacagaggngcctgttgagtgctgtggattacttttggaaaggcttttcggagcgcttctgaattttcagattctctaactatccctaacggtgcctggatgtgtgtctgagaaaaggcagcagactcggagaggttgaagggtcgggtcaaagcaaaagatgcgtttgtgaatgtcagacatttggaggctcttcagtggctccttagcatcagggatgccaggcagtcccagtggaagcgaagagatactcggcaagtggctgctggtaatgggacgcaaatgttgacttgatttgtgggacatccacgctgagaactgagtgctcacgtaactcaaatgggggtaatttggtttgttccactatatgtttatcttcaataaaatacctactgtctgtac

SEQ ID NO: 260476 - DNA, 347 bp, Homo sapiens
ccactgccacaatagaggacaacaagatttcctttgcactgcctagtaaatttcctttttcctactccaaccatccgcaaggcttaaaaacttcaaactcagaaaaaaattggggtttctaaattcactgttgagtgctgtggattacttttggaaaggcttttcggagcgcttctgaattttcagattctctaactatccctaacggtgcctggatgtgtgtctgagaaaaggcagcagactcggagaggttgaagggtcgggtcaaagcaaaagatgcgtttgtgaatgtcagacatttggaggctcttcagtggctccttagcatcagggatgccaggcagtcc

SEQ ID NO: 260477 - DNA, 476 bp, Homo sapiens
aggcctggccatctgaaacaggtgtgccttgtgtgggcgctgctggctgcagtggcctgtgttctcctgccgtttctcatggatgaaattgcaaataagcaagcgtgaggtttgtattacattcaatttgttttctaatttattgtttgtgctgttacaagttgtttttaaagcaagcgtttgggcagaatggagtctctggtgctctgtgtgcttttgaaacacatgggcggcatggcgtgtgtgcatctgcgttgggcgagttgcttagcctgtcttgtagcactttcccgatggtgtgtgtagtttttctttattactgcatattatttcacagtagggacagatatgtttttatctagctactgtcctgttgatggagatgatgttttctttgtagtttttaatcttatgaacagtattaaaatgaacatccttttatgtgtctccctgcacgtatttatgagtttctctaa

SEQ ID NO: 260478 - DNA, 621 bp, Homo sapiens
cacaatttaactttgctcaggctgatggagtaagaagaaaagatggaaagcatcatcaagagaccaagaaaaagctgtgggaaattacaaagagcagaaaaagcctagatcaatttccatctaaaagtctgttttcaaaagacacttggtttagcaaaaattctttttataaccatagtactaaacttttctttggccttcaccattttgtgacttggaaaacatttaaaatgcattaatggggtttgctagtggtttatgggagcccaataaataacatgctttttttctggactaagttctgaacaaacttaaaaatataagaacgaataaaagtagcagaaagattaaaatgttaccaggttaatttttttaaaaagttctcacaggttaaaaaaaaaaaaaattttacaccattttgatatttcagtgaatattcatattaatgaactaggttttgcaaccaaccagtcagtattagacactcccttccgaaagtcagccagtcaggaaagcaccctctacaaatatacatctgtgagtgtcaacctatccacaacagtctcacctgagtaacccctcctaaaaatggcatcaaacctataagcttttcaaaatcca

SEQ ID NO: 260479 - DNA, 292 bp, Homo sapiens
agtttataatgttttttaaatctgtggtttagtggttttggggtgtgtgtgtgcacgtgtgcgtgtacgtgtgtgcacatgtgcatttggggaaattcctagctattatctattcaaattatgcatctgcctcattctccttctctgtttcttttagggataaccttattacccagttctgttggcctgttttctaatggttatttttcttgaattttgctgatgtcctatctcctcatatggtgatttttatatcacttgccagacaatatatattaaaattttagaggta

SEQ ID NO: 260480 - DNA, 656 bp, Homo sapiens
caaaacagtttaagtcctaagttttgtgtttttttttcaatttcccccactcggccactccaagttctaaccttttaaactctgtattttctttctttagaagttatcctacaaaaataatcatgcaaaatttgaaagaaacaaatgcataaatgattcttacagccttgtatttagtggcaacaataccgaatgttcatcagtatgagaatggattaaataaattataaaacatccatacatttaacatcaatgaaacagaattaagtagactcattgattctaacacagaaacatgtccaacatatggtagaagtaaatcaaagagcttaagtagatgtactttcatgtcagcagaactgagttcttttgcagactctgcttcctactgcatgatggtgagaaaagtacttaacctatctaaacctacatctcattttcttcatttttaaaattgttttttaataagatgtcacatgcaaagcacttaccacataattaatagtcaacataaattagctgttcttttgttgttatattttaagttaaagtgttaagtacgagaacactgtgattcactgaatgtatttggagtatgtcatagcatcttacaatgtagttcagatagtattgaagttaaaagatgaccttgtttt

SEQ ID NO: 260481 - DNA, 667 bp, Homo sapiens
aactgatcctgttttaagtttattataaaaaaagttaaagaataaattatagctctatatgcaaaatcaaaattgcttgccataaaagaaggcaaaggtaaaacaaataccaaaatttatctgaaatgttgttacattttttgaatttaataattatataaaattttttatgaaaaacaataaaataagtctagtttattgacataaaaaggaatatctgaaatttagcttcttcagtgagattaaaactatgatcagtcaataataaaagacaccatttggttggatttcccttagttgaaggagaaaattaagttctaggccagagagatgatatgattgaacttttcgtttcactattagcaaggtcagagaaattctactaacatgttgtataaaactggaaagggcataaaggcttagttgagaatattcaggcaaaatgttgtatggggcttttgttcaatgaaatgtggtttcaggaagtaacggtaaatgtgttccaggaaccaatgaaccaggaaccagaaaaataaattgcagttattggttcagttaatgggcgtgggtcacccacccaaccttcctctttgcttcactcccacccccacccgcgagtctcagctacctccacttaaaatcagcagtgtatgccaacagtctagaa

SEQ ID NO: 260482 - DNA, 96 bp, Homo sapiens
gcattcctcccactttggcctcccagagtgctggtattgcaggcaagagccaacatacctgctggaaagtttttctttatagaacttttgtaccta

SEQ ID NO: 260483 - DNA, 542 bp, Homo sapiens
catcaaagttgcggagcatgtgtacatactgtctataagacacttgctttatattcaaagacacaaatatggccaatagtgaaagaatggaaaaagatatttcatacaataaaaattgttataaaacagagaaagacattatagttgtataaagcatcaatttatggagaaaatgtaacgattataaacatatatgtgcctaataagaactccaaaatgtatgaagtaaaaactggcataattgaaggaagatatagagtgttctataataatcgtttgagacttcaatactccactttcaataatggatataacaacatattagaagatcaaaaaggaaacagaaggattaaacaataaactaactagacctaacaaatatataaagaacacaccacccaacaagagaatccatattcatctcaaatgcacatggaacattctccaggatagattatatgttaggctataaaaaaagtctgactaaattaaaaaacaatgaactcatacaaagtatcttccttaaccacaatggaatgaaa

SEQ ID NO: 260484 - DNA, 571 bp, Homo sapiens
gactatgtgaactaaaacatgataagaagctgtcattttaacccccacagtgacagtttccccacaactgaattctaatcttaagtgatgcactccccagaatgttctggacaaggcctggtgccatccctgctgcagtccctggagggagagcagggggtctcctcggggccaccgtggagtctctggggcaagagggaggctgccggggggaggatgacaggtctgctcacttgtggactggacacaattccttctaggctgccgggggaggatgacaggtctgctcacttgtggactggacacaattccttctaggctgccggggggaggatgacaggtctgctcacttgtggactggacacaattccttctaggctgccggggggaggatgacaggtctgctcacttgtggactggacacaattccttctaggctgccctctggatgtgaattccagatgcacaggtaatgtagcagcagaaattcctctgagattatgtctgtgtatagttgtgttggtttgaaaagtgttttggtcatttgagtcttcatacttagtaaacaaac

SEQ ID NO: 260485 - DNA, 513 bp, Homo sapiens
cctgggccccatccctccccactggaggagctacaaccaggacaagcacatgggaagggaagggtgggttctttctccagggaattgcttttctgtccacttagtcacggcaggaaccaagaacagagagaaggaaagaagctaaacatggggcaaagagcaatgtgttgggcagggcggggaggcagcacgtggggttaagaggattcctgcctttcagcctcgaacgaaggagaaagaaatcaatatagtttgctttgtagggatcttaaccaatttcctgtaaagttttccaaaatgtctctttcacaaaagactagtaatgatgtggcaactctaggtcacacggaaaccctccgaatctcttctacattagccatctctgttaccaccaaccctccccacatatccttcaaaaataacagcacctggacaattgtctggaaacgagaaactcctttactcatagttctaactcaaaatgcagatggactctcttcaaggtttccgtaa

SEQ ID NO: 260486 - DNA, 492 bp, Homo sapiens
gatcatgtccttcttccctaatgtttaatttctctttgggggactttgaggacattctgtcatttgtcctccatcagaactaacacaatccattaaagaggtgcagtaatattggacctcaaaagaaaagcacttgctatttcaatttctactctcccaggatgtgtctcttctatataaattactcacctcagtgatcagctctgcaataccaaggggtcatgggagagattgttcttgtaacgccacatttcctccaaagaaattggtagctattggcttttctttgtgtaacctttactccgaacataagttaatgacctacctcttaaaagaaattaggcgtgttcacttttaacctttgtataaatagaaaaaaatagggaaagagaaaagtggataagtcattactgtacaactaattttcacaaagtgaacacactttgtaatcagcactgaaataaagatatagaacatgatcactggcaaaaa

SEQ ID NO: 260487 - DNA, 691 bp, Homo sapiens
ggcacacagtggacgccactgtgagtctcctctccttctgcacggggttggggagtttgctgccattttcacagtgaggaaaggggcgcccagggtgttgactttcagaataagcctgttctcttgtggggagagtatcggggtggtgggctgggttttgcagatgcttttccagggacttgaaagggccatgcaccctcatctgtggggcagggcctggaggggcggctgatgaatggtctccacattcttcccatggccctgccccggcacacccttccagtccctcctatggtgacccctgaacagagaagatggagtctgcaccaggagccctgaggcaggctccagcttctggccaagctccctaatgatgctgcggtcactcccatggggcagagagaggcctggccacacagggcctgacccctctcccagggccatctccacatgggggcgatgcagctgctcccaccctcctctgagcgctcaaggcctcctggggcaacagccttggaggtgacttcggagcagtggggagagggcaagcagggagcaggcagaggatttgctgagcagcaggagcagcggccctgcagatgcctggtgtggtggcccgggggagccagccacttcctgaggccactgctattttctgacctgaggaaaacaatgtgcggatttcctaagg

SEQ ID NO: 260488 - DNA, 324 bp, Homo sapiens
tccaattaactccacaggtgattaattttgaccagcggaagagaagagacaaaataacagattctctttccttcttccttcccatattattcagtcatggtttccctatatagcctgaatgcttggagatgtcccacaagactaagcaagtttacctgcaaagcaaccagctgcattctttgcagtttatcataatgaaatggccaatgtagacataaggtgtcaccttacattggttcatatcctttgttgcctctcttactgttttttcctcactctgcctgttctgaaattaactcttctaattaaagtattagcattaaa

SEQ ID NO: 260489 - DNA, 550 bp, Homo sapiens
agactgtagtaaatatcaccgcacctctgttttatgtgtataactggttattttcttaggatgaatttgctgggattacaggcatgagccactgcgcctggccaccaggtctagttattaagagttttaatgactatagccttgtgctttttatctcccttcaggctttaggctaaatagacttgattttattacctttattaattttgtataatattttttcttttaaaaaacaagcaggccacgtgtggtgtctcaggcttatcctcccagcactttgggaggccgaggcgggcagatcattgagcccatgagtttgagacgaccagcctgggcaacttgatgaaacccagtccctattcaaacaacaaaaataaccacacacacaaaaagcaagcaattatttaatagtggctatacctggtggggagctaagattatggatgattttaattttcttctttttgtatatctatcttctaaatgttccataataaacatatattagctttatataatagaaagaaaaaataaacttttagcaattaaa

SEQ ID NO: 260490 - DNA, 613 bp, Homo sapiens
tacatttcatagggctatccctacaagatagttgctgattatttttagcttgttttcaagaaagtggccaaaattagcatagtagttgtaaaaaaaatagttttattttttatgtattgaatgacatattaggttactattactaggaattaatttatataattaatattcaatatttgtcacacagatgtatgaaagacaatcataagcaaatgtatactttttcaaatatgcattagatgtaaatttaaccactctaatataaaaattctgttggatatttttctactgggacttccgaataggccaagcgagtggaggcattctaatacacaaatttgatgaagtttgaactcacaaaaccactccattatttttttgtttctgcaattatgtaagactctcagaaaagtctttagatctgacatgagaacttaactagactacatgaaattgtttctctttgcagctcattataaaaaaaagtagcatagatcttacattttagaaaggaaaacaagtaatagctgcaaatcccttcctaaaatggaattgctttgtttgaaaagaattcattctcacaatttgcatatgttttcttcacttataagtt

SEQ ID NO: 260491 - DNA, 418 bp, Homo sapiens
agggcacgaggctgagggttatggaacattcccaggaagggagagaatatcagaaaatgcaagactgccccagtgcagcagcagtgatgcagccagaggttaccagaagttctggcacctccaccttcatggacacaagctgtatatatcagtttaccatggttttcagtgtaaaaaagcaacttatgtccttcagtgtcagtttattgagctcttcagtgcagcctcataacttatattaattgggaggaaaatgcttccagagaaaggagagatgctggacaaaacaactttgtctttgactagttgtcaaggccctgctgtttggagtcattgacaagtccttgattcttgtatgacagatccaggggaaaaaaagaagtgattcatcttcttctgttgcacctttcaaggagga

SEQ ID NO: 260492 - DNA, 417 bp, Homo sapiens
agggcacgaggctgagggttatggaacattcccaggaagggagagaatatcagaaaatgcaagactgccccagtgcagcagcagtgatgcagccagaggttaccagaagttctggcacctccaccttcatgcctccccgtggcccccacctcctcaggatggccttgccagtacaggaggtttggatgtcaatctgtgtcgggggtgaatcaggatccgaatggcgtcgccccatttatacatgggtaggtatttgaagggaaagtcccccctgatgtagatttcatctgcttcgtccttagggaagggtggaatacgatgagatattacagcccaagccgtgcgccccctcctgcatggccgttggggagaatttgcatctctaatttgtgattaaacgtagcacctgtgaaaaaa

SEQ ID NO: 260493 - DNA, 295 bp, Homo sapiens
ccgagacaagagcccagtcgcattcctgattctcagtcccacctggctgagatgggaatggctgtatgggttgtctgaattcgggctttccctgagccaagcgcacacctcccttccctgctcacagcagctgttttcagagactgaggatgtttaaagctgccagaaaagcacggttacgttggccattccttttctgggtgttttctgtcatggaatgtttttccctgaactgtgacgattacagtgatcatttccaaatagcatttaggaaaaatacacagtacccacatga

SEQ ID NO: 260494 - DNA, 392 bp, Homo sapiens
tgcctgctgtcgctagatccaggttcaacagcataggtttttcagcagacaatcacaaccatgaaaacgcccaaaatggctccatgaatggaacgataaaaagaccaaagagatggacactagcacaaaaacttacgagccaaaagggacagtggcctgccgagccctgggcacaattattgagaattgctattggtccacgtgtctccatccccccggcctccaccctagacctggccacctcttctctcccctggattccctgaagcaccctcagtctggccttcccactcctgttgcccactctccatgccatagccaaagcgatcttttataaaggcaagattgtgccactgcattccaacctgagcgacagcaagacccagcctcta

SEQ ID NO: 260495 - DNA, 286 bp, Homo sapiens
ctcaggcgaccgtggtcttcgctctcctgtcaagggcatcacttaggggaaggaacgaacggccctttcttgctttctctctctgggaccagagagctggagagccattcggagcacccacgttatttttcttcttattaagaagacgggcggggagaggggaggacgcagaccctcgttcctcggggacagagccccgcccggcgccgcggcagagcggctgctggacccgggtgggccccggcggctcggggcgggggaggcgcgccccgcccagcgcggccgc

SEQ ID NO: 260496 - DNA, 495 bp, Homo sapiens
caatatatgagttcctgttgctgcagaagcttgccagtacttgctgttgttggacttcaaaatttttgctgttctgatgatgtttaatggtttcccattgtaactttaacttgaattttcctaattactgatgaggttgagcacctttttataggtttattgactatttggatttcctgtttttgtgaaggtcctgttcacaattttttgccattgtctattgagcttgaacagcttttttttggcctattgaccagctgcatcaactttttttgttaatttatatcttttttgcctatttttctaatgtaatctttatcttctaaaattcacactacaagtaaatgtttttaatacatttatagttttgtcttttactgtaaagtctttaatccatgtggactttgcttttgtgtatggatttttttttttttagatggagtttccctgcactccagcctgggcaacacagcgagactgtctcaaaaaaaaaaa

SEQ ID NO: 260497 - DNA, 288 bp, Homo sapiens
attccggtcaggtgctttagcagctcagttttcagggtttaagctgtctttggcttgaaggtcacatttcaccagggacccacccctatctgcctaggaatttgtctgcttcctgctgttattatttgaaagatacaggctattattgtgattctaggtcctagtttaatttttttaaagtaaatttacacatagaagagattgaaaggactaaaatgtaaatgatggtgatctttgggtgtgatttgcattcgtcttatttctgcagtgctcattaatgtttcaaat

SEQ ID NO: 260498 - DNA, 406 bp, Homo sapiens
agaggaggagaggggagggtggtggagaactgtcagcagctggtgtggcttctgaaccaatatgccagcctggattgccgtgtgaataattaggtgcaattttctccttggatgggtattcgatttcaaatgttacccgctcagattttgcctgggctgttgtcagaccactttcttgagaaatgtctctgatgggtatattcctagatcagagtgtgacagtatcagggaccccccagttaaacttatttcatttgattccagaaacaaacaggaactaagtgatcttagagaatgcattgctgaccttgtgttgcgcagcttcaaaataaagcaaattcagtgtctatctactatccaggggcaacaatggctgttgggcactgcctcattgattagtacattg

SEQ ID NO: 260499 - DNA, 535 bp, Homo sapiens
gctgtaagcataccagcctgcatatatggggagaggcattcattttatgatatgttttttcatttccagaaattatttttaaacgtgttcttcctccacttaaaatagaatttgtaaagcattcactgccacaggacaaagcaccaaaacacagaaaggaaacttgggatttttaaaatctaggctattgaatgtcaaaagtcaggactgcatagtaggtcctgaccaaacaacagattcagaagaatatgcattttattaataagaactgtttttcccaacctaaaatctagatacatttttccaaatgagaggcaagggtaagaggcaaaggtatctgtagggccataagacaatgtagattttattgggtccttgtgaaggggcatcgtgttggcctatcttaaacagtcctgtgcatgagatatataatatgatgacagtggcttgaacagtggtggaaaagggtcgtatatggacatgttttaacaaaatagacaacgaaatttgcatacggattgagcaagtggtgtta

SEQ ID NO: 260500 - DNA, 418 bp, Homo sapiens
gatggaagtttgaggcaggcaatgatggaagccaggaaaccaggacagtgagagatgctcatggtgttctagtaagagaggatggggctcagactagcagaatagagagaagtgattgactttctatatttctgtacacatgacaccatgccacttatcttactttctagacttctgaataaatagactttctttctgaagtcaagaaagaaaggattgctcgcctcctgcatagaagtagttttccaagcattaggaaaacaacatatcagttgatctaatgaccagccttgtgctttgtgtccatttttatggcaagtcactggggtgagaaccatgatccacaacaaagaaacattttctgctacacacagtgacatgcctgcagcctgactttgcacctcggtatctgcacccc

SEQ ID NO: 260501 - DNA, 425 bp, Homo sapiens
gctgcgtgactgttgtgagagtttcagcctggagaggaccaccctgctggaagggtgtcctgggaatgaagtccacgtaggtgagaacacacaccagggatatgtagctggatggactcagcagcccttggggaataaagccaggactgtgccccaaggaagccacacaaactgtgtagccagacagtctgtctgggaggagaaggaaggaatttatctaccagctcccatctctcatggaccaaattcttccccactgtacataactccatatcactttcagattgcataagggtgagagctgaatgtaggctccaacaggaagacggcattgaagcctggttgcttgttactactcagaatgccatctacaaaaggaaattatgtaaaaagcaataaagaaccccttttgttcttgcaggaaa

SEQ ID NO: 260502 - DNA, 580 bp, Homo sapiens
gagaatgaaatagagaaaaatcacatttaaaatatttttttctagttaaaatttaggggaatgttcactatattctaatgtttccatctaatggaaaacaagaaacatcagaattcacacacagagagacagaaacacacacacagtcccttaaaaaataaaatagaaaaaggagtaattttagtataagatacatatgacaatttgagatgtaggacaggaattctttgatattttaaaggcagggcttttttagagaatggaggaaagaaacaggtcaactgtgtttcatgcattaaacacattttaacgatttgaagctgagctcttcaggattgaatgctattatgatttatgttctaaggttggaaaattattgcctaaatgcagcaagaatattgaaaaagaaaagaaatgctggaaaaataaaatgtaaaatatataaatagcagagtggtaaatttatatgtattgactatatctagccttaagcttatgctaaatcaattttttattaatattattgactttcagggttcatatgagatgaagcactttcaataaatgtcaaataagtgtt

SEQ ID NO: 260503 - DNA, 368 bp, Homo sapiens
gattaaatggtctattaatgtatattctattagatccatttggtctacagttcagtttaagtccaaagtttctatattgattttctgccttgatgatctgtctagtgatgtcagtggaggtgttgaagtctctcactattattgtatcagtataaatattttcatagatctagtagaatttgttttacagggtgtgcacctgtaatcccagctacttaggaggctgaggcaggagaattgctggaccctgggaggcggaggttgcagtgagctgagatcatgctattgcaccccagcctgggtgacagagagagactccatctcaacaaaaacaaacaaacaaacaaaaataaaataaaatagaattt

SEQ ID NO: 260504 - DNA, 395 bp, Homo sapiens
agagacaaggtctcactatgttttctaggctggtcgtgaactcctggtctcaagcagtcctcctgctttagcctcccaaagtgttaggattacaggcatgagccactgcacctggcctaagatgttaactattttaactgtaaccctgataacaccaacctagatataactaagtcttctaagatcaatctttccttcagtgatggtgtctgatggagtgcttttagctggaagcattgaagcttgcagaaaacccaattcaactaacttaagcaatgataaatgcataatctaatacctcaagatgaaatcatgaataaggcaagaatgcatattctcaccacttctattcaacattgtactggtagttctagcccttacaataaggcaagaaa

SEQ ID NO: 260505 - DNA, 322 bp, Homo sapiens
acagaagcatgcttatgcaaatccagaaatgaaatgttaaaaattcagaaatcaaaatatttctttaaataaacttgttgagaaattttttactcagtaaacatttttaacatccactgagttttcttaattccactatttttctgaattgtcatttcttcatataaaaatatttgaataagtaaaactttatgttaggagtatatgtaagtatgtgtggctaccatttcaactaaaacttagggtgggaacctatctgaggatcttttttaaagctggataccttatagaacttgtaaaataaaaatctttttttctttta

SEQ ID NO: 260506 - DNA, 373 bp, Homo sapiens
acctgttcctttcatcaaaagctccattttgtactataaaatacagtttcatctaaaattagcaaacacaaaaatatataaagaagaaattgattatgcacatttgcagtactcaactaaccattgttaacatgtttctacatacgttgtaaaatagatctcaacatagatagatgacagataataagcatgttacttaaaaaatctgttttgattagatttatacataaactggatgtctaggttctttacctgtagatattgggattatagataatttttattttcttgtagtattatgtaattttctatgcaataatttatgtcatatgaaaaatataattaaataaaagatgaggcctgtgaaaaaata

SEQ ID NO: 260507 - DNA, 398 bp, Homo sapiens
taaatttcacatgtttaaaggaactcccgagctaaaattttaattgtctgttaaaattttatatagcagtgtttgacaaaatatggtgagagggctgcttgcaacagaattatcagatatgctcataaaatgtgaaatatctaggccttcttgtagaccagctgaacctgaatctttgagagtgagtcctgaatatctatattattaccaaactccttttttatgccctaaaatttgaaaatcattgatgtgcatgatgaaatttccactttattaagattaaaaactaggatccttttgagattgccatttaaatatcaaagaataaaggaggcactgctttccatttgtaaccttaaaaatgttaaattacctttctttcagttgagtgtgcgagg

SEQ ID NO: 260508 - DNA, 528 bp, Homo sapiens
aataaatgaatgatgagagatgtttaataaagaaacagaaaccataaaaaagaagcaaatagaaatcctggagctgaagaatacaatgactcaactgaaaagctcaagagacagcttcaacagcagactcaggcagaagaaaagaactgggaaacttaaaagacaggtcatttgaaatgatagcattagagggacaaaaagaaaaaagaataaaaaagaatgtggaaagtatacaggacttatgggacaacatcaagtgaaaataatacaggcatatgggagttaaggagaagaaaaaggggcagaaagcttcttatttttaaaaactaaaggctaacagtttaacaaatctagggaggaaaagggacatttcaattcatgaagcccaaaggtctccaaataagttaaacaccaagactcattataattaagttgttaaaactcaaaaagaaaaaatctgaaagcagcaagagaaaacctacttgtcatataatatacaaggaagcttctataagactatcagtgaat

SEQ ID NO: 260509 - DNA, 266 bp, Homo sapiens
aacctacagagagtaatagcatcataaaaacaagtagaaaaccgcactggactagtgtaagttatgagttccctgtttttttccactgtacattttgtggcgagcacaatgcatcaattacaggcattatgtttgtgatatcctgagttctggaacactgcctcaagagagttcatcaatcattgtctttttccctaaagtggtcttgcgttctctcagtctgtgggaaataattgtcaaaattaataaatgcacatgaaagaata

SEQ ID NO: 260510 - DNA, 415 bp, Homo sapiens
tttatcttaaggcttaatgtataacatgttaaaggaaaaatgaaatttagcaatttgttttcatttaattttatttcaaaaagtgttagtgttttgtttacccacagtgttcacagttcattagatctttaaaaaatctataatcttagaataagaaatactatttaatttttaagaaactgaggatgagaccattgttttagaatatgtacttgtgaatttagaatgaaaatgtaagaactggtctcaacattttttactcaaggttaatgtctccttgttttgtacacaaattttaagaggcagtgttatctggtgtccaacagattgaccataaataaattgggaattaaaatagaggcttctttagcaaagcacactaatttacagtataaagtggtaattgacactttaa

SEQ ID NO: 260511 - DNA, 543 bp, Homo sapiens
gatatggaggagcagaggccaagaccaatttttagatctgttctctccacctaatctggccccttgtctttttcccctcttgacaacaacatcaggctccaagagaaagagttctaggaccatctggcagagtggttggtgttcactttaacagtccaagtcactggaaggtagggcacaacatggttgtgccttaggctgtaattctgctcttcactagatgtcacaggtgatctggtgtttgatacaggatttgagataggattgttttcctttatggtagtggcagagctcatgtaggtaatttttactgttaacgtcagtccaattccttaatatccattattggagaaattgaaagattcatcctttgaaaatagttcctagacctgtggaggctgcatagttttcacagttcccagggacaatgggatagctattttgcacaatgactatattcatttagttatttaattcatcaatatttattgagagttaatatactatatgttagcaatggtacttgatactcaagatacaaaa

SEQ ID NO: 260512 - DNA, 515 bp, Homo sapiens
acaaaccccttccttctttaactcggtgtctgaggagttttgtctgaggctcctcctgctacaatttgttttaaaagtatctgtggttggcctggtggctcacgcctgtagccccagcactttgggcactgaggtgggcggatcgcttgagctcaagagttcaagactggcctgcacaatatagtgaaagtctgtctctacaaaaaataaaaaaattacccaggcatggtgatgcatgcctgtggtcccagctacacgggaggctgaggtagcagaatcacctcagccctggaagtggaagttgcagtgagtcatgattgtactgctgcactccagcctggataacagagcgagaccctgtctcaaaaaaaaaaaaaaaagtacttgtcagtgtctactactgtgtgctaagcactttgcttgattttgcagaaatggggcataaataagtccctgccctcagagaagaaaatatgttgggtaagatagatgaataaacacattttaatagaaca

SEQ ID NO: 260513 - DNA, 555 bp, Homo sapiens
aatgtagcacagggcttcagtgcgttttgactctcagttggatatgactactgaggagccttggcaataggttgaaaagagtgagaagaataaaaaagaaattttcccctgaacgtctccttttgaggtcaccttaggtcagctatgtccctttcccaaaggtcactcttcctctcaagacttttctgcataattttctctccttctaagttccaataacctctttctctttatctcctcatcccttcagatgtaggagtagaaacagctacaactgcctttaacagtgcaggcaggtttctgttctacccctggtagtttccctataccctgcccaaacctttgttatcagatcctttgtaaatcagtactcctgaaattatcttaattggagtgtgccatctgttttcagttgggaccctgactcatgcacttgctttttaatttttaaatgcatatgccatttctacataattagctttacagaagcaacttgaagcagaacctgcaacttacactggattcttaataaacaaacatcttttatacaacata

SEQ ID NO: 260514 - DNA, 409 bp, Homo sapiens
aattgacaattctgaaatcataaggtttcatgaaacctggaacaatttaaaggacagttttgaagaaatgaaaaaatatattccaaggttcttgaaaagtatgtgagaaataacataataagcatatagatttttttggtggggtcttaaaattcaaatcttagtagaaaaagaaacagaagaaaaaagaatccttcttgacgacaaaagagacaaaaggtctgaagagtcatggagaagggctgtgcaggcccaggggtcagataacagacaccaaaagtccaaactaatagcgttagttctgggtaatgaggaggaggggagagatactttcacaaaggagtcagaagatgagagacacactttcaaagtcaaaagattgtataggaattgggggagaaagctgaga

SEQ ID NO: 260515 - DNA, 383 bp, Homo sapiens
tgcctccttattgatcttagaatgaaatccagattcactaaagagttcctcagtcctctaggacctggcccttttttctcattgatcatactgcctgctcctattctgagggtaacaggaacctcgaggagggaggatattctgtttccctataacgttttgaagagtctcagtagaagcagcctgtttttgacaaaaagatcgtcagagtacagctcagcacattctcacagacagaatcgccctggtccagacatcgtcagcatcctggaagctgccatgccacctatcactacccccaccaagggagccactacgctgacttctaaatacagattatttttgtctgttgttgtgctttatataaaaatgtatgctctgtg

SEQ ID NO: 260516 - DNA, 710 bp, Homo sapiens
ggtaatttcaccgataaaattaatattggagaatatggcttagtttttgcaaattaaaggccaaatcaatattactcaaagtgtagacagagccaatgccactaagagagtgcatggccaagagcaaactagaacatattctcttagcagctaacagatttcaaaagagaagagaagagggtgctaactcatgcattttaagtctcttttccccaaacagccaccagaaaagataatggggcatgaaaccacaagtttaggaagatccatcccctaagagctctatgaataaacatgccaaattacatgaccagaacatttaacttgtaatctaatatcaacacatagatttatggtaattcttacaatttcttcaagaacaatgagtaagtagctgattttttcacacagacactgtgatttacagaaataagaaggaagacaaaataaacactacttatagtccactcataatggtatggaattacacatagaatttaggaactttgttatatttaaatgtgtttatacatttaaccacatacagtattttaataacaaaatgaagtataaagtataattttaatactagttcctaaaatattccatttttaaataatttttaaaacaatgttaacttttcatgtctcctgtctctatttttctattatgcttctaatcaatgtccaaaagtattttcttatattctt

SEQ ID NO: 260517 - DNA, 381 bp, Homo sapiens
gagatgctaacttgcctcagaggctggggtgggggtttgggggaaaataaaagaaaaatacttgctttatatttcaaatattgctgggcattttcaactcaagaattgaataatatgctagactaattacttcttatggtgtattaaatcttttaggcaactagcaggcacacaagatttactacttaagattatttaatctgtaatcccagcactttgggaggctgaggcaggcggatcacgaggtcagatcaagaccatcctggctaacatggtgaaaccccgtctctactaaaaatacaaaaaattagccgggcatggtggcaggtgcctgtagcccagctactcgggaggctggggcaggagaacagagtgaacccg

SEQ ID NO: 260518 - DNA, 494 bp, Homo sapiens
atcacaaaaaatcaaactcagtgtatcatattatcacatcatttctttgtgttctggatgctaggatactggtaaacaaagtaaaccaaaatttctcccctttatattttatatttatagagtgtaagatggacagcaatctaatcaaataagtaaaacttaacgtgtatagatgtaattatatatgaagagtatgttggctgatgtgctatggtgaaaagcaaagcagggttgcaaggatatgagtaaagtgtgggaattacaattttaaatgatcagggaaagtctcattgagaaagtgacttttgagcaaagatgtaaataaggtgagcaagactgctatgtaggcatccagtgtaagagtgttcccagtattggcagaagccagtgtaaagccccctgggcaggagctacctggcatacttgaagaacagcaaggaggctcatgtaaagttataatagctcgattggtgggggaggggaggtcatatgag

SEQ ID NO: 260519 - DNA, 386 bp, Homo sapiens
aaaataaacaaatagtacatttatggtaagcttgacacctttcacacagctgttaacattttctctcatctctgtgtaatgttctgtatgtttcatgaatgaagaggtacctcatccaacataataaaattaagtagcactttatagagcatgctacatgccaggcattattctaaatattttacacattgattattttaataatcagaacaacactatatgataaatactttaaatatattaatatattaaaccattagtctctgatttaaatacttataggtgaggttaacacagcctataaacaaatatttgtggacttcagaacaaactgaaagcaggttctaaatgtcaaataaaatggcttataatatgtccattggatc

SEQ ID NO: 260520 - DNA, 438 bp, Homo sapiens
cctaaaggagaaacctgaatcattacatctcctctcctcgctacaaatgcaaggcatgaatcagttttagactggagttctggatatgggtaccaatgttgctgactgcaagagcttccagccaatgccacctcagggggcaagcctacctcaggcatctcctcatcttcatcttctgaagacacgtcttcctgtgtgcactgcagcaaggaagggaaagatggagatcagagccccagtggcttgctagaatgcagcctccaacctactcccctgagcccccaggtctggaagttgtgcgcctgcctgtaatgctgccagtctctccaccagccagatctgagtggaagcaacagcccagggaatggctttgctaccagcccattatttttcgcctatcactgccaaagaataaaagaaaagcaaaatggctgtctc

SEQ ID NO: 260521 - DNA, 535 bp, Homo sapiens
caggatattgtaccgaaaaatccagatttctctaaaatggccccataggcctggtttcctgcatggctgcccctggctgaagaatgcttcattcggtctgtccagtctctggcattctgtggtttccctacagaaaccacgtgtttgctttttttatagtagagaaatcttaccactatctctgtgtgttaacaatctggctcctgctttgaggtgcaccttcacttaatggtgcctcgtaaacagattgcagcagtgagatcagccgggcttcagctgattaaacacccagttgggaacacccagctgggaacacactgtctctgttctttactaaagcaaagtccactctttcacaccggctcctctgctgtcctatcttacagaccttggctttcttttccatctctggacgatgttgatcctcacctggttctagttcctgccttaccttattctaatattgatggcctgcttctggcaatttacactgccttgtttcacttcacttcatcttgtttaacccctaaatgca

SEQ ID NO: 260522 - DNA, 530 bp, Homo sapiens
ctgtattataaattaaaacaaagcagtttacccgttaagaactgctgtatcagacccatgctgcaaatagtaacatcttttctagactctgaacctgaatttgttttgatgatttttgtagccatcaaagatgagaaacttctcatctcctcctaaacatttgttttaaacccaagggcttcttttaagccttagcctgtatgtcttgtgatggtgacttgctaaataaaaggctgatctgggccgggtgcggtggctcacgcctgtaatcccagcactttgggaggccgaggagggcggatcacgaggtcaggagatcgagaccatcccggctaaaacggtgaaaccccgtctctactaaaaatacaaaaaattagccgggcgtagtggcgggtgcttgtggtcccagctactcgggaggctgaggcaggagaatggcgtgaacccgggaggcggagcttgcagtgagccgagatcccgccactgcactccagcctgggcgacagagcgagactccgtctcaaaaaaaa

SEQ ID NO: 260523 - DNA, 144 bp, Homo sapiens
ccagtgttactggaccaaagctccctaggaagctgtatatttgtttgtgtgtgtgtgtgtgtgtgtgtctgtgtgcacgcacacacacatgcattttctggtctgtgaaataaaccacgaaggaactgaaaaacttgccttcta

SEQ ID NO: 260524 - DNA, 443 bp, Homo sapiens
cggcacgagggaggaaatgcttcctggacctgtttgaatggaaaactgtgtgtactctgagttacagttaataactggaaatgtaataaacatagtaacttgagatgatggcagtattcccagatgtataggatgcccagattttggttcatagagttaatgagctccaggggaactgccgtcacttgtcattcaggcaaaagagaaaaacaacaacaaaaaaccctttaggctaaggaagtctcaggatttctgaaagtttaaccaacttcagtttgagatttctatttgtcctttttatcttacctgaaggctaagagtgataaaggcaatagagattttgagtgagaggtacagatgctccccgatttatgatggggttacatcctaataaacccatttaagttgaaaatatcataagtcaaaaaaaacgattgcggccg

SEQ ID NO: 260525 - DNA, 465 bp, Homo sapiens
tcaaaaaataatatggaaaggaaaaaagtagttctggagttcataaatggtttttccttcttaggtatcaaacaccttgcctataaatgtctgacaccaagctgtctcccacatactcattgctcagggaaaccgtaagatatttgagatcttctgtaatcagctgtagtactataaaactttctgaataaacctgctagtcctgtggcctgtggctaccaaatcatgtgccaagatgtatcagggccccatggaggaactcacaactaccttgggatattttaaatttcagagtaattcagtgatactcaacataagccaagacactaagcaaactattagtttcaggttgttcagtttcaatatgagattgtactgcaaacccctccattaagtttcatcttctaaaaactgaatttctggtggttgctataactcaaaaaaacacaggtacccaccccacca

SEQ ID NO: 260526 - DNA, 654 bp, Homo sapiens
cttatgagtaggcctgtaacacggacgtgtgagaataaacgccagagaaaaatttttgatggtattgacatggaatgcatctgtggcacaggccagcgaagagatgggttggcttcctcttcgagtcagagcaaaaggatgtggcaaaaaagatctaaggatgccatgaggaattccatgtgtacgtgcaggtcgtgtggctggtctacttgtgggtacaaaggcccagacccattgtttcaactggagacctgtgaagggcgatcccagcctcagaacctcgcatgggatggactcagtactctgctgcaactgcatttcagtttaacttctccctctacccagtcctaacttccttattccctaaaaaatgcttctgggagtgctcctcagtaaacttcatgcataaacacttcagaggctcagagtatgtttcctggagaattccatctgtggcgtttcctcttcatgcctactgccaccatccaggtttaggcccccattaccgcttacctggaatattgcaaaagctttatcactattctctttgctcactggctctcctataatcagtctacacaacagcagactaattttttttatcccagatcatagctcttatgctgttttcctgctcaaaaactttggtggccc

SEQ ID NO: 260527 - DNA, 515 bp, Homo sapiens
cttatgagtaggcctgtaacacggacgtgtgagaataaacgccagagaaaaatttttgtggctggtctacttgtgggtacaaaggcccagacccattgtttcaactggagacctgtgaagggcgatcccagcctcagaacctcgcatgggatggactcagtactctgctgcaactgcatttcagtttaacttctccctctacccagtcctaacttccttattccctaaaaaatgcttctgggagtgctcctcagtaaacttcatgcataaacacttcagaggctcagagtatgtttcctggagaattccatctgtggcgtttcctcttcatgcctactgccaccatccaggtttaggcccccattaccgcttacctggaatattgcaaaagctttatcactattctctttgctcactggctctcctataatcagtctacacaacagcagactaattttttttatcccagatcatagctcttatgctgttttcctgctcaaaaactttggtggccc

SEQ ID NO: 260528 - DNA, 376 bp, Homo sapiens
cccaggaggcggaggttgcagtgagcgagatcgcaccactgcactccagcctgggtgacagggcaagactccgtctcaaaaaaaaaaaaaaaaaaaaaacaagatttttgcgtgttagactcagttgtccggaattgattttcacagttttctaaaattcaggctcaattcttagatttctgtcatttgcaacataaaatcaaagtggccttcagtttatccaaattatgaaaaaggtagattttcatgagcagctgtcaaaaggacatacaggggcctgtgtgtttgctttttaggaccccattatgttcagacctaattgaagctcagcaatttattaagtgtcacaatcataaaaatgtaaaaagacaaagac

SEQ ID NO: 260529 - DNA, 382 bp, Homo sapiens
  misc_feature (3)..(3): n is a, c, g, or t
cgngcccccgaccgcgcgagagagacgagggcagaccggacccacacctgctcctggccttaagatattttttatatcaggtcacgtttgttttatctagggggcaaaccttccttgtaagtaatgtttttctagtgatgctgcactcttggagtcagttatctgtcacctgaatcttcagggactgttttgggctgtcctgaggggggatgcgggggggtggcgtagcaggagttactactgatgggactgctgcccctgtaaacaggagaaccactgctcacagatttaccaaaggtgtggggtcttgagccccaaaagttgaagttgcagtgagctgagatgatgacactgtactctagtgacagagtgagacggtctc

SEQ ID NO: 260530 - DNA, 681 bp, Homo sapiens
gagagagggcagggcagagtcactgtctggggaagctcacctacccacaccacccctaggcccatcagcctctgcctctccttcatgggccccagtctaatcccctgacactaagctgtccctgatgaattgcatctccccaacacccccaggcatgctcaccttctgacactccaatctctgctattcctccaagtctgaccccaaaacatgcccatttctgcccctgttcacatcctccacccctaccctgtcttggagggagtccttctgctgggaagaaggtatggcatgtggtggcaactaaggtcccaaagctgtatctgcccttttgacctgggccttgcctgagagctgagctaagctccaatttgtgaatatttgtagggactaccaggcaccaggctccatgctgattttataggaggtacagggacatctaggtagggcagtggaaagtacagggactttggattcaaatggacccaagtcacattcctggctctgccactcactgtgtggccttaggttattcaacctctctgagccacagctcccctcatcaaaaataggagtaaaaatccctgccttagagagttgctgcacacagacaaatgtgcacacagctgccccagaaagcaagatgagaaagaggccctgggggaggcacaagtgttgtga

SEQ ID NO: 260531 - DNA, 340 bp, Homo sapiens
tttttttcaaaatcggtattaataccattttacagaggaaaaaaattaaccagtaatttttttcaaggcctataatcaatgttcacgatactaaaaggcatttcttcagaataaagatgatactaataattattgaatggcctattatgcaaatgacaactggcttaaagtgtttaacatgccccatggcaaaaaaggtgaaagtgcttaaaagcacagtaaaactacctgtccatcacagtagcctctaacttcatgtagcaattgagtacttgaaacatagctagtctcaaattgagatgtgtcgtaagtatacatactagattttaatgacttaata

SEQ ID NO: 260532 - DNA, 421 bp, Homo sapiens
actgtggaaatgggagctaatccctgtttaaccagctactgcctggtcagatactccttagagcataattttgctgagttatgccccattccatctttgaacccatgctagagtctccccctgcaagctaccctctctatcagctacttcattccaacagctactccttccttccagcttcccagtacctgccagggtcccatgagacaggggtgtcaccttcctcaaggctgaagacacagaggacatttgttactgactggttctctggccatgggtaaggacaagccagccctccatagaggcatgacaggctcttgctttcaaggaggcagagctacttcagaggcccaaggacatcttctcactccagacagggcatttcccagccaaagcctcagccttctaccttcaggctttc

SEQ ID NO: 260533 - DNA, 424 bp, Homo sapiens
tggtgaaaagacttgatctttgttctcagccaaggagcatttagtgacaaataatcattataacacattgtgataaattatttgctgagttgttcatgtgttttacaaatatttactgagaatctgctatgtgccagatattaatacaggctgtgggtttatagcagtgaataattccctagtctcatagagctaacattttaatgaggagaaaaatgatgatgtggagggagtgggagagtggagaaatgctaggaagataaattagagtaagaaaatggagcttgtcagtggaagggtgttgcctttttacagtggtcaaactcttgttgtaaggtgacatttgagccaagaccttaaagaaattgagaggataagtcactcaaatatctgggggaaagtgttctaaacagaggcagatata

SEQ ID NO: 260534 - DNA, 306 bp, Homo sapiens
tgacttcccaaatctgaatgcagcctgacctaaattagcacccaatcctgcttacactttccagtccagactactatattggcctgccataaaaattattttaaaaattaagaatttatatctcaaatataaacagttactagaattcatttagactgaaacagggcattataaatttatgaacaaattaattaccagtttcattaatgctgtttttataatgagtaagtaatcaagtccaaaactttactaagtttgtacccaatctaggagaggaaatacattagaaaacaaacggccaaaaaa

SEQ ID NO: 260535 - DNA, 544 bp, Homo sapiens
cagtagaaatagctaaggcactgacacttcagacattacactaaatcagattgctgagtatagaaaatccaaaactacagttggtaagtaaattaattttatgtaactttaaaatgagtagacatttctttgagaagtcataattaaattcaagtatacttttttgataaaattataaagctttttaaaagtaaataatgatgtaagtcaactctcaaattacttcatgctgtttcttcatttctattgtattcacctgtgaaagcatgtgatcaactattgctgcatcagagatatgagagatactttattaggtgggaattatatacgacctcttctataaaatagtaaggacactgaaatataagatgcataagagtctaagtgaagaggttctttgtggttaacttagtgatgtatgaagtagttgctcatgttatgagagaaaaacatttttaattttagttaaatgtaagttaaaattaaaatagtaccatataatgttagtgattgtacttttatttaataaaatgcagtacatttt

SEQ ID NO: 260536 - DNA, 453 bp, Homo sapiens
tctgtggttttggaaacttctaggtctctgtgattcatcatctctttttgtcttgcattagcgacaatatattctggccaactgatgatggaaggagagccagagagccaatctgcaagtttatagtcagtgccagatcagatcagtggtaatactttcaatattctccctctgctctgagggtgactgctggggtgtctgtctttcactctggacttgtgtgcccttttggccttctttttcaacctagtttttgttttccttggcttaaacattttatttattttttccatcgatatcaaaataacacacgcagctgggtgcagtggggtgcacctgtagtcccagctactcaggaggctgatattggaggattgcttgagcccaagagttcaaggtcagcctgagaaacatagggagacccccatctcaaaataaaacaaaatatagtaa

SEQ ID NO: 260537 - DNA, 438 bp, Homo sapiens
tctttctcaactaggtttcctatttcttttacttttttttttaaattaagacagagtttcactcttgttgcccaggctggagtgcaatggcattatctctgctcaccacaacctccgcctcccaggttcaagcagttctcctgcctcagcctcctaagtagctgggattacaggcatgcaccaccaggcccagttaattttgtatttttagtagaggcgatttttcctccatgttggtcaggctggtctcgaactcccgacctcaggtgatccgcccacctcggcctcccaaagtgctgggattataggcatgagccaccacacctggccttcttttaccttttcttggtcgagaaaccaagtgctggctcttcctgctcctcagccatgcctcacctctgtctagttgatttctacacttttgaaagggcaccggga

SEQ ID NO: 260538 - DNA, 502 bp, Homo sapiens
tttgtggagatgaggtctcactcctggactcaagggatcctcctgcctcagcatcccaaagtatgccactgtgcctgtgccattgctcttaggaaaacagtcctggctacctgggtgagaggatttgggaaaactgaggtcagactccaacagacagtggcagcaaacctaagcctagcccactcaaaggaaccaaagctggccgaccctggtatcgtatgagtgaatgtggagaaaatcagtgtctacctattctggctctactgagaatccccctcaacccactgcatgggtaggaaaactgaggcccagaccagaaccatgccttaagaaggccacagggccaagggacccaggattaggtcactaggatgtggttacctgtataatgtcacagggttggtctcacctactagccagcccaactcctgcctccttcaatttcccagaaatctggaccccggctccctaagaatctaaagacctactccatttgggaaaa

SEQ ID NO: 260539 - DNA, 540 bp, Homo sapiens
gccatgatgcctctcttgagggaaaggctgtgggtgggtccagcccatgggtggcaaaatgtggagtcttcactgcttcccctttagtgccatttgcttttttaatttttttctttaatgttttcaaaggaaaatattaatacaaaaaagaaaagaagcaaatgttctgcctgaccttgtcaaccacacctaggcattaactcttaaaattcttgcagtttgcagaggaaaagggagtaagaatgaacaagacatgcatgcgtgcatcgcggccagccttgggtcagaacttggacagattcagtagttgaaccattggctaaatggcccttattcatttttcggggcaaaacccactaggaatgagtgtatagagacctgtagaagcaaaatgatttcttcagcttggtgagggcctcaatgccccaatcccacctcacaccctgtctgctcgatctcactgtcttcttcacttgtaactctgtgtcttagtgctgaagtttattaaagtagagcttacagctcttttcatagcacctg

SEQ ID NO: 260540 - DNA, 425 bp, Homo sapiens
tgggatgaccacaggatggcttagaatctctgcctcagagtaaccatgactcacctctggcactgggcacaccctccctaaatctatgattccatctggatcccaaacaaattggggttctgttacctaggggaagaggagatggctgttgagtagacaatcaacagtgtccaccacattgccatacactgcactccccaacccaacctcacttgcagaggaggaagggggctcgtagacgtttctggaaggtgatggcaggagcacgagtgagaaggaagttgccctgcctgggcactggtctcagactggcctgacaagatgggaggttgtgtgatgtatgatgaagcctcactattggacagtttgtttttgatacaggtaactgccagtcatatcatgacctctgggacacacacatacta

SEQ ID NO: 260541 - DNA, 411 bp, Homo sapiens
tggtacatcaagcattatgcttgtcatttaaatacaagtaggttctaatggggagatctgctctcattgtgagaacaccttaaaatggactcagcacttgggatcaatctttaaaaacaaacaaattaagtctaactacacactatgttaatgagaaatgggtgttttactcaaagtgttatggaaacactggggagagaatttacatgacatatgaaaaagcaaaacttaataagattcctcatcacccatccccataggacttctgtgatgacacctcttttgcctttccttttccttttgcttttctccctgaaccttctagcgtctccttagtcactgcactctcatcctctattaatgttctgcgtgctgcaacatgcaaagaaataaaacaacggcatcagttta

SEQ ID NO: 260542 - DNA, 364 bp, Homo sapiens
ctagacctgtggattcttttgtgtgcccaagactaaatgcagggttgattccactatgacatttttttcctggtagccttttatgtccccaccctctaaagaaaaatcaataaagcaagaagacactgatttttaagagataggactctcttttcaaagtagattacttgagaggtaataaatttaattatacataaaagatcatacacacacacacacacacacacatattcacctttcattttaagcaaaactaggaaaataagagttgaaggtaaaactccctagttcctagcaaggtaagctagcgaacctgagaataaaagcaatgtcccaattcatccaattttggaatattaaaaca

SEQ ID NO: 260543 - DNA, 316 bp, Homo sapiens
aaagacaattcaataggagtaactgctttctttaacattttggccaatcccaacctcagcatgtgctcaacacaattttcacaatatggaacaccacctgtaattgttcagtacaagcaattctatcatcttgctactcaaaatctgggctgagaacctgcagcctcagcatcactggggagtttattagaaatgcagaatccagtgtggtggctcacacctgtagtcccagctctttgggagatttcggtgcgagcatcgattgaggccaggagttcaagaccagcctgggcaacatagcaagaccttgtctcta

SEQ ID NO: 260544 - DNA, 471 bp, Homo sapiens
gctgtctctgaacggaataaatctctgatagtatactaagagcagccttttattgaaagcctatatatgccaggctgtgggctaggcactgtgtatactttctgattttcactacagctttgcaaattgtttctgttaccatgtgatctatttgaagcctgaagatcagataaattaagcagtttgcccaaggacataggtaaagttaaatggtagagatgggattccctggactttgaattctctttttgtttccttattttatttttgagaggggttgggtatgttgtggcttgatggcaggatcttttgtaatgaaggctagatggaacatttaaaggggaatgtttgaatctgaattatagtagcatagaaggtagagttctttttgctgaaaaataaaaacagaaaaagcattagccttcatcatcaagaatgatcttggataaaacaggttagcatgctggttat

SEQ ID NO: 260545 - DNA, 383 bp, Homo sapiens
agtagagcaactgaggctcacagcagttatgtaacctgcccaaagtcacacagcatgatggagggtctggattggagattttgtctgactacaacactcatgtatcaaatcctattcagttttgatgttaaaaattctgtggttgaattcgtcacagtgtctttaaataaaacaacaacaaacaaaacacagcaaaccttaacatagttgctaatcatatgagtttacaaggccacctgtgtctttactatcagttacactccttcccaccccatcacattaatcactcaggtctagggatttgcaagtttgctaacagccgaatggaacaaagacaaaacgctaaaatttgtgatgtgggcctaactccaaagccttcaaga

SEQ ID NO: 260546 - DNA, 426 bp, Homo sapiens
ctatttctatgttttttttgtttgtttttttgagaccaggtctcattctgtcaaccaggctagagtgcagtggtgtgattgcagctcaccatggtcttgacctctggggctcaggggatcctccagccacagcctcttgagtaactgggactgctggtgcacactgggttaatttttaaagtatttgtagagaaggggtctccctatgttgctcaggtcagtctcaaactcctgggctcaagtgagttgagctcaggctcccaccccggcctttcaaggtgctaaaattataaacatggaccacctcaccctgcctatttctaggtatgtttaatgagaatacttttagctgcaattgtaatcactactagtcatcttgcaatctaggaaacaaacatagatttagaatgacaaaataatgcttgg

SEQ ID NO: 260547 - DNA, 665 bp, Homo sapiens
attttcttgaagaaataaaattcgctttgcaagatgataatcttgaatgccatggctaggtaattaaacaattaatataaactctgttctctttaatgaatatcttttttttgcctagtgcttcaactatagttttacagtgaaatgaatgcttaaaaattatatattttaatcttctatgttctgtatagatctgtttgccaactaacgtggggatttggtaattacaaaatattgtaactggaagggcattaaaaatccaacaccttcattcaggtccgataggagtgggtggtagagatgggagtagaaccagacagcctttaattcatttgcctctactttgtggcatgtgatagggacatttgatttactgggacataggtttgatgttgatcatagatgagtatcctttaaaaaacctttaaaaacttcaacaaagtgatttttttccaacacttccatccagaaggtattgcatatctcagctgactctcatataaaattattgttttggacattcatccctaacaacctttgcatttataatattcaatataatactgccctcagtgtcctcatctataaaatcaggataaagaacacatactttctagggccagggtgaggattaaatgtgttagtataagcgaagtgcttagaac

SEQ ID NO: 260548 - DNA, 689 bp, Homo sapiens
gtgaacctgggaggcggagcttgcagtgagctgagattgcgccactgcactccagcctggacgacagagtgagactccatctcaaaaaataaataaataaataaataaataaataaataaataaataaatacaaaataaaagaaataaagaatgagcaaaggaaaagatactgtgataggcagaatggcctccccaatatatcaatgccctaatcccaatgacttgtgagtatgttgtgttacaaggcaaagggactttgcagatataaacttacgtgtcttaaaataaggggattaacaaaagttatcctggtggccccagtctaattacatgagctgctaaacgcagagaagtttctccaactggagtcagaaagatgaagcagaaggaaaagttggagactttgaaagcctgagagagatttgacccattgtggttggatggggcacatggaaagcagaagaggaatgtgggcagccatggaatcaaagactggtcccagctgacagctggcagcaaaatggacctcagccctacagtccagtacgtggctgaatgccctgggcctctgaccagcagaactgggcgacagcaagcctgtgttgttttaaccacccagtctgtggtaattaatcacagcagccctgggagactcgtacagaaactgaaggtcagaatgggcatgtcg

SEQ ID NO: 260549 - DNA, 692 bp, Homo sapiens
ggccatttggggcctatggtggaaatgggaatatcttcaactaaaaactacacagaatcattctgagaaacttcatggtgatgtgtgcattcatctcacagagatgaatctttcttttcagttagtagttttgaaacattctttttgtagaatctgcaagtggataattggagcgctttgaggcctattgttcaaaagaaaatatcttcacatgaaaagtacacagaagcattccgagtaacctctttgggatgtgtgcattcatctcacagaattgaacctttcttttgattgagcagttttgaaaaactctctatgtagaatctgccagttgatatttggaggtcttagattcctactgtggaaaaggaaataccttcacataaaaactgcacagaatcattctgaaaaatttctgtacaatatttgcattcatctcacagtgttaaacctttattttcattcagcagttttgaaactttatttttgtagaatctgcaagtggatatttggagtgcttcgaggcctatggtggaaacgggaatatcttcacataaaaactacacagaagcattctgagaaacaactttgttaagtgtgcattaaactcacagagttgaaactatcttttgattgagcagttttgaatctctctttttgtagaatctgcaagaggatatttggagcccttt

SEQ ID NO: 260550 - DNA, 432 bp, Homo sapiens
gttctcgaaagcagtcctagtctctgagcaatgtatttgtaacctagagaatgcctgtgattcagctgctcaactggctcttcagacatccccagatgcccccttctctgccctgggcccagcttcctacctccagaatgcagctggggaaagagccgcaaaggctggtggtctggtgacccaggacatggaggtgcctctggaccctggcaactccaactagcattctaggaggacctcccacagtttctggagaagattctacaaaaggtctttggccagtaactaattcttcaatgtgaataaatgatagtttttttcctccaataaatgtcaaacagtactagttgggggtgggggcagtgggttgtgtcagctttcaacttgtggctgccagaactacaatgcttcttcttggttggtaaaatattt

SEQ ID NO: 260551 - DNA, 446 bp, Homo sapiens
ctttattgccctcgccaatatgaagcctgccagtagacaaggtccacccatatttgtttgaaagacctcaccatgaaataaaagataacagcagaggggactcataatttatatcctagaaaatcaacccagtccactattcttcttcataagaagacagccaaagataacaaaaaacataaataaaaccagcagcacaaaataactaaaacaagaacatttactttagaagaaacagataattcagaaaaaggagaatgttaaaagaacctagttatgcaattagcttgaaaatttgagaggatattgcatcgaaaaataagactagaaaagtacaaaagaacaatggagaacaaaataagatattttgtcttgaagatgcaattgcaaaaattcagacagttacgaagatgaaactaagaaaatcagaacaagagaaaaaagac

SEQ ID NO: 260552 - DNA, 709 bp, Homo sapiens
atggctctctgcagccttgacctcccaggttcaagtgatcttcccacttcagcctccgaagtagccctgactacagctgcacaccaccacgtctggataatttttaatttttttgtagaaacagagtattgctatgttgcccaggctggtctttcttgaactcctgagctcaagcaattctcctgccttggcctcccaaatgttgaaattacaggcatgagccaccatacccagactctcttacctgtctgaatgggcaaatggccacctccaaagtaataacaagtttcttttcatattttgtagcctctcccctcccaagtgtaccctttaacaacttagaggccctggtgacctcacaggactcattccgatcatgaataagaatagagataatgggaaagaaaatctttactactgctcaaagtggaacatctatatgagaaaaaaattaaggagacgagaaatagagttagatacttgataatatagtactagtcagtacctcatccaagttcaatgagcatgaaatttcatggtaactctgccaccctagatgaaggtttctcagccttggcactggtgatattttgagctggacaatactctgttgtggggagtgtcttctatattataaggtatttggcagcatcctggcctctatcctttagataagattgacaccccttcccccagtcacaagtatcaa

SEQ ID NO: 260553 - DNA, 419 bp, Homo sapiens
caatttgaataagaaaactgggctcttgatttagatttttggctgtcaattacatttggaaagttgggggtaaggtacaagctgcttaggaacccttatttcttccccctgcccttttgatatcatttctctctcttctccttgaccttaggtgggtcaaggagttggaattcaaatcacatgagcaaatagcattcaaatgtacatgatatataaggcactttagcgatccaaaaaaaatttacaatatagtttctgtctcaaaaagtttattgccttgtttggggagacaaaacataccacacgaaaagttcatgatacaggatttaaacaagggctcaacaaatcatagaggaattgttatataacatgggttcttccattaaatggtaaaggaatgctcttagctctaaatacta

SEQ ID NO: 260554 - DNA, 666 bp, Homo sapiens
gccaggtacactgtacctggcgcttacacatagttcttcatttgatgttcaccgggaccctgcaaaggaggtgttcaaatccttattttagtgattgggaaacaagctggcggggtcaaggactcatagccaacgcatggtggaaccacgtttaacctccgtacaccctcttttcatttgtcaaattgatttaaaaaatttaaattattcattcgttcgttcactcatggacagagctcctctatctgactcagagtgttttgagaggggaggtagccgggtgaggggccatgcagcgttatggccggagatttggagctgcgtctcgatcctggcctgctacttacctctgatatgattctggagatactttgtgtgtcagtttcctatccagaaaacgggaatcaggcttagcaaagagatgatgtggtgctgttcttcaaggtggaaggttgcatgcgttttggttttgattcccagtgtctgcaaaaaggagctgttaggacagaggaaacgggcaggaagccccagctgttcccttcttcctctgcttgcatcattgaacgctgccttgtgcctggctcggtcataagccgttggtacatgttacttcctttaatcttcactacagccttataaggttggtagtatcaccctcttttcaca

SEQ ID NO: 260555 - DNA, 695 bp, Homo sapiens
agctctctctctctctctctctctctctcctcgtgccgaattcggcacgagagggaggtaagtattcacagctggagttttatgcttcacacattttcatgtttgagaacaagaagcaacccctaggaaaacctcctccggcatgaagagaggctgaacaatgcgcttctgtagctagtggcaggccatggatatgatgaagtcacagatatcggaactgaatgcgagatagatgccagtgaaaccaagacaaaaactttcaaggaatccaagtgcacaggttctcagatcaatcacaagcgatgaggttgtcactgcacagaggggctgaaaagcagcatcaaagccactaaagagaggggagaagcttttgttgggccggcttttgtcttcataaccagcattggaagccagctcacatcaactgaaaggccgagttaatctatttctagtgaacattgttcgactgtgtgtagttagcccgtaatcattaaagaaaaataactaggttggcatgaccaaaaaagcattgattttcctgtggagcacatttgtatgagttgaattttttgcatatgttattgtgcgcatgagagagaagaggtgactgacctcacaaaacaaatgcacacagcagcgctgcttcttagcctccacaatgaacttggtgtttgtagagcaagacgtaagatggc

SEQ ID NO: 260556 - DNA, 431 bp, Homo sapiens
cctttattcacttgtcttgtttaactctcagcaaatcaagtacctcatccccatgtcacagatgaggaaaatatggacccagtttgcacagggtaaaaggtttcacgccatggccatctactctggagtctgagttctttctattcatctttgaatcagcagtttctttatctccactcaggctcaggagaaaatggaggcaggggcgtgcgttcacagcccccctcgatttaggcaccttccaagcttggggtaaaggtaggacctgggagtatcgccatcaacctcttgcactttatgctctagtagtttcctacttcaggcctccatacctttgcatatgctgttccctgtgcctggaatgttctcattcctctctgtctgcctggcaaactcctattcatccattaaaacccaaattaaccagcacc

SEQ ID NO: 260557 - DNA, 487 bp, Homo sapiens
ctgctttcttctgctgccttttatgctccttgtgcacctcccttccccgcaacctgggatgaaatctccccacgtgctggtgttcctttgcctcctggtggctctggtcaccgggaacctggttcagtttggggtgatgatcgagaagatgacaggcaagtccgccctgcagtacaacgactatggctgttactgcggcatcggtggctcccactggccggtggaccagactgactggtgctgccacgcccacgactgctgctacgggcgtctggagaagctgggctgtgagcccaaactggaaaagtatcttttctctgtcagcgaacgtggcattttctgcgccggcaggaccacctgccagcggctgacctgcgagtgtgacaagagggctgccctctgctttcgccgcaacctgggcacctacaaccgcaaatatgcccattatcccaacaagctgtgcaccgggcccaccccgccctgctga

SEQ ID NO: 260558 - DNA, 194 bp, Homo sapiens
gtgagatgagttagtattttaccttccgttatgctacttaactgtccgtgagactgtggcaagttaacctattttagcctcattttctccttatgggaaaggataagaaaatctatccttaatggttgatcaaggattaaactataaagtttttagaaagcattggcaaagagatggacatttaatggtagatg

SEQ ID NO: 260559 - DNA, 174 bp, Homo sapiens
ggtgcatgggtggttcagtggtagaattctcgcctgccacgcgggaggcccgggttcgattcccggcccatgcagcacgaaaatgtgttttggaccgtgcgcgggaggttgcggtaagccgagactgcaccgttgtattccggccacagcaacagtgagagaaacttcgtctca

SEQ ID NO: 260560 - DNA, 393 bp, Homo sapiens
ctatttgcttttcaggcaagtgttctagaaactattttgtgtccatgtctgtgaggaaagttggcctgtaatttccttttcccatgatatctcttctggttttgagcttgtggtaatggtggcctcgaaacttgtatttctgggaagagtctgtgtagaatggatattatttgttccctaaatgtttggttgcattcaccagggaagacatctgggccaggaattgtctttgtgggaaggttttagttgtatatggaatttctttactagatctagggccattttggtgatgaaacttcttctgccagatccaacaattagtgtctttcaaggaatttttctatgtcatctaagttgggaaatttgtggtcataaagctgttaataaacttga

SEQ ID NO: 260561 - DNA, 319 bp, Homo sapiens
ctctttttttctggctcactctgtctccctttaactctctctgtctgtctaatacagctcttttctttaccatttttcctccctcatattcaaatggtgccagctggaagaagccagctgaagcaggggcaggctatgctgctcagcagtgtctgctcttctgttagtgatgtttgtgtccagacaccatctgagaggggtcttttaaaaagggcagtatgtggctctgaaggataatgttggcaaaggcaaataagaaaaaggacataaaccattttgtaatgttatgtttatttccatttgggtgtaagttctcatg

SEQ ID NO: 260562 - DNA, 388 bp, Homo sapiens
caggagactgggtcccgtcggcactgtggggagcccagcctggggtctggccctagtggccgctccattctatgaagaatgaacagaaagggtgcaatccgtggatctgtggtcactgacccagagccagagggacactttgttcccacacaaccagtcctctgtcactctgcacttggaacccggtgtccacgccctgtcccccaggacgttcctctcccatgccaagactacagtgcccaggagtgcctggccccaaacccagccctgacactattctctccgtgttgccctgagcttctgcctgaagtgttcccatctgcagtgtggggacggtgagacctgccctgcagacctgaggctcagaaagacctcagctctagggaca

SEQ ID NO: 260563 - DNA, 708 bp, Homo sapiens
aagatacggagaaattggaatgatcatagattgctggcgagaatgtaaaatggtgaaaatacttcggaaaacagtttgacagttcctcaagatgttatcagtctgtccattggtgagtgaatggataaataaaatgtggagtaaagatacaagagaatacatttcagtatttaaaaagaagttacttttgtcatttgcaatgacacagattagcctggaggtcattatgctaagtgaaataagctaggcaaagaaagacaaatactgcgtaatttcacttattatctggaatctaaaaaagttgaattcatagaagcagagattagaatgttggctgcccaggcctgggggtgggagaaaggtagagggaaatgctggttaaagggacaaagtttaatttagacaggataaacaacttttggagatctattgtacatcatagtgactacagttaatatatgatctacttgacaattgctgaaagattagatcttaaatgtcatcacacaaaaataataagtatgtgaggtgatgggtatgttagttatcttgatttaatcatttcacagtgtgtgtgtgtgtgtgtgtgtgtatactgaaacagcacattgtaaatccacaaatatatatgatttttctggcactactccttacgctcactgaatatctcctcttaaccaggcgccgtttcttgtgttttctctggcc

SEQ ID NO: 260564 - DNA, 518 bp, Homo sapiens
caacatggcaaaaccccatctctacaaaaaacaaaaattagctggatgtggtggcacatgcctgtggtcccagcttcctgggaggctgaggcaggaggaacacttgagccctggaggttgaggctacagtgagttgtgattatgccactgccctccagcccaggtgatagagtcaccccatctaaaaaaaatgtgtaataaaaacctacagaatgcttgaaaaaccatcaaactactatgtaattgttgttatttttaaagaaagcaaaaatacaggtgtgaaaactattatggtattgctctgcagttatcacatcaaagattcaagctagaaatcctttacagtctattcaacatcattggtcaggcattctagaatatagtggatgtgatcatccctttgttgtacagacccattaggtttccaggatcttttgttgtaagtccaatacaccagcaatagatttaactatatcaaaatgccaagattaaaaaaagtctctttgcacccaacattg

SEQ ID NO: 260565 - DNA, 947 bp, Homo sapiens
catacctgtaatcccagctagttgggaggctgacacaggagaatcgcttggacctgagaggaagacgttacagtgagtcgagatcacatcattgcactccagcctaagtgacaagagtgaaactccttctcaaaaacaataaacaaaaaacaaacaacaaaaacacaatacaagaaagtggtatagtatatacagaaactctctaatatcctttctactacttttctataaacctaaaggtatacctaaataaaatgtttattaaaagctaataaagcgtccgaaatttatatataaacatgtgcataaattcatttaaataaaaaaattgtagtggctaggtacaactgagcaaagaagtaaaggtaaatgtgaggtatcggttacaatacaattcaaaaagataaagagatgaaaaatgtaaaagactgcttgaaagctggataatatttcagaagagcaagggtaacaaaaataaaacatgaaaaaattataatttaccacatttgcatacagaataatggtgaaaaattatgtgatcatcttaatagattcagaaataaaaggataaaatttatgctcatttattgtaaatgacttaacaaatgaatagaaagaaatatataatcagataaagaaatttttaaaaatcataatggtgaattattttctgtgtgtcactgggaagtcatcaggaatgccagttataaccactgctattcaattctatactggagttctcagtccatacaataaggaagaaataaaattgcaaacatctgctgataaacacattttgaaatttaagagtccaaaataatctgtaggtaaggtacatgaaaataaatgagtttagcacagtcagtgaacaaaaataaattaaaatttatagctatcagcaacaaattattggaaaataaaattttaaaatgtcatgccaatgatat

SEQ ID NO: 260566 - DNA, 494 bp, Homo sapiens
ctgcatcttcgggtattcagtccccttctacactgaatcagtattagcctgtgtggccaataacttgtgaccacgtgacttaatgaaatgatgatttgtgtcttatgaggttggtcataaaaggcactgcagctctgaggaaagccagctggtggtatgtaaaggcactcaagcatccctgtggagaggcccacatggagaagacttcctagcaccaacttgacaacacatgtagaccacattgaaaataatttctcaatttcctctgggtgactgcagccccagatgacctctgactccaaccttgtgagaaagcttgatatataaccacccaaatgagccatttttgaactcctgaccaagaggaaccataaaaactgatcagattaatagtgttgttttaagccattaagcattgtagtgatctgttttacaccggtagagaagtaatatggggtataaagattaataaatgatgcctatacacttcttta

SEQ ID NO: 260567 - DNA, 146 bp, Homo sapiens
catcataaagacctatagtggttcaagtagaggggacatgggttccaactcttgatggaggaatggcaaagttctagcagaccatgtggaacaagagatattgttgtggccatctttggaaaataaagtctgccacatacatgaat

SEQ ID NO: 260568 - DNA, 233 bp, Homo sapiens
catgaaatgtctttcttggtacagaatttcataaaaacttttaatcttggacaatataaaaaaaaagaaatgtaatgggagatcaacaactacttccaccagatgactgaaatctattagaggccctcaataattaaaatagcagagtactagccaggcacggtggctcacgcctgtaatcccagcactttgggagaccaaggcaggtggatcacgaggtcaagagatcaata

SEQ ID NO: 260569 - DNA, 576 bp, Homo sapiens
ttagaactttgagatacttatcctttggtgttttcaatgcatccctaagcccctaacttaattacaagtgaaatgctaaagtaaactacggtttgcaatgaacgcggctcctaattttcttaattaaatcttatttacccaatttcgttgaatgaaggtttatgctaaagagtggctttttattttaatctaaaaaaattggcttcagaactgtattttatgcagacattggaaagttgagcaactgcctgctggaagtgttgagtgtagccagagataattcggacaaaaatcttcgttttgttaagtacaggcatttttggttagatttgatattccacaatgtcatgtttaatgtttattgaaaagaatcatgattatgtcaaaataacttagctttaatggtctgaaataggatttttcttaccaggactagcagaaggcctaagaggagagttttctttgttactgatgaacagtatggtgacagtctttgaattgtagcaatgggcttctggttatacaaaaaatgtttatatattttaagctctgtaattttaagttatggcctttaag

SEQ ID NO: 260570 - DNA, 622 bp, Homo sapiens
ggaagaaggccatgagccccagtttgtgagtggcctctagaagcctgccacacgcctccccacaagcatggaaataaaggaaaaattgtgagtcccttcaagagaaattgcaggtacttagttagccttgaggagtcagggagcaacctgagaagtaagaaggtaataatagcttaaaaaatagcccccaagtaagttaaagttacccgatgtttggctccttatagaaactgaacataccccttgacctatgtccctgagacgttctacagaaatacagatctccaccagttggaaaatgctgagccctgtcacataggcctcagacaagagggaacggaggccaggagtggtggcttatgcctataatcccagcactttgggaggctgaggctggtggatcacctgaggtcaggagtttgaaaccaggctgaccaacagagtaaaaccccatctccaccaaaaatacaaaattagctgggcgtggtggtggatacctataatcccagatactcaagaggctgaggcaggagaattgcttgtactcaggaggtggatattgcagtgagccaagatcgcaacattgcactccagcctgggcaacaagatggaaactctgtca

SEQ ID NO: 260571 - DNA, 415 bp, Homo sapiens
cgcagcgagctgcggggagtccactgcggccaggcttcgtggtgccggcgccgggtgaaggctgcgcgggccgccgcggggccgagggcttgagagccactggcttcaagccgcgagtggcagaggccaggcagccgcgggagtggattgcaggcgcggtgtgggaacgccggcaagtcccccgcacgcagtctctccagacagcctcggggattgaaggtgtggcctaaacaggttgcatttctcctgctggcatttcgggtactcctcccagccgcgacccgatgcaccctcgaactttctcccggagaaatctctacccatcctgtcttttaatatttttcaagaggtctcaatggcccatccccgccagctgcctcttcctcccacccactcggtgtcaggggcggccgcc

SEQ ID NO: 260572 - DNA, 665 bp, Homo sapiens
attctcctagagcatctttggaagcatgaggccacgatgctgcatcttggctcttgtctgctggataacagtcttcctcctccagtgttcaaaaggaactacagacgctcctgttggctcaggactgtggctgtgccagccgacacccaggtgtgggaacaagatctacaacccttcagagcagtgctgttatgatgatgccatcttatccttaaaggagacccgccgctgtggctccacctgcaccttctggccctgctttgagctctgctgtcccgagtcttttggcccccagcagaagtttcttgtgaagttgagggttctgggtatgaagtctcagtgtcacttatctcccatctcccggagctgtaccaggaacaggaggcacgtcctgtacccataaaaaccccaggctccactggcagacggcagacaaggggagaagagacgaagcagctggacatcggagactacagttgaacttcggagagaagcaacttgacttcagagggatggctcaatgacatagctttggagaggagcccagctggggatggccagacttcaggggaagaatgccttcctgcttcatcccctttccagctccccttcccgctgagagccactttcatcggcaataaaatcccccacatttaccatcttca

SEQ ID NO: 260573 - DNA, 134 bp, Homo sapiens
caaatgtagtcaactgatccctgataaaggagcaaaagcacatagtggagaaaggattgtcttttcaacaaatcatgctggaaaaactagatattcacatgtaaaaaaaaaaaaaaaaagagtcctaacactga

SEQ ID NO: 260574 - DNA, 447 bp, Homo sapiens
gaaaattttaaatttttattgaaagaccttaaagaaaatctaaataaaaattggatgataatctatgatgctcgtggataaaaagacttaatgtcacagaagtgaaaacacaaatggaatacaaatatattttaaactactcaatgtttttagtagtcagagaaatgtaacataaaatcacaatgaaacaccattaaacctctaccatattaacagaaattaagaactcagacaataccaaatgttggaaaagatgtgtaacaatggaaactgtcatgtagttccagtgggaatgtaaattggtacagcggtttggtagtacatgaaaaagttgaacatgcacagaccataacccagtatttctactccatataatggaagctcttgtacatgtactcaggagacactgtacaaggatgttcatagtaacattgtttgtaactacaa

SEQ ID NO: 260575 - DNA, 444 bp, Homo sapiens
ttctataagggttgcattcagcaaatatgtagaattttaaagctggaagagacctttagcaagcccctgattttgtaggtgagagaacgaatgtgagatcaggtaactggtgatagttgcagatctgggactagaaaccaatgaagttatgctcagcatggttgctcgtgcctgtaatcccagcactttgggaggccaaagtgggaggatcacttgaggtcaggagtttgtgaccagcctggccaacatggtgaaaccccgtctctactaaaaatacaaaaattagctgggcatggtggtgggggcctgtagtcccagctactcgggaggctgaggcaggagaatcgcttgaacctgagaggcggaggttgcagtgagccaaaattgcaccactgcacactgcactccatcctgggcgacagtctgagactctgtctcaaaaaa

SEQ ID NO: 260576 - DNA, 1898 bp, Homo sapiens
gacagtctcactctgtacctaggctggagtgcagtggcacgatctcgatctcacctcattgcaacctccaccccctggcaaaatcagttatttggttatttggggcttgcaaatatattctatgaacagtccttttcaggatttgtatgatgctttataattttcaaagggtttctatattgtttctcatctgactccacagtagctctttgaaataggctgatcagtattattcctgttgtactgatgaaattataaagtatttagcctactgttgttgaaactggaaaggaagtctcttcacataaaattttatctctgccttcaaattatactccaagtataactaattctcactattttatcattttagttctggctaccaccttttcttagcttgaattctgcaagagccccctagtgttcccgagtccattttgctttgtatgattgtttccccacacagtagccagagtgatccagttaaaatgccagtcacctcacatctctctcaagctcacggccctccagtgactccctgtttcttagcaaatcttataatagatcctgtgtaatctggtgtctgggtattttttcagcctcttctactatcttccccttgtttgtgctactctctccatactggccctgcaggcagaagtttgttcctgtctcaggggctctgcacattatgtgcctttatgtttctcctactgtgctcactcacttcagtaatgtgtctgcttaagtgtcaccctctcacagggccttctctgcccttgctgaacactctgaaacagtcattctcatcattgtctttccttgcccctgcgtgttccttccttgtatgaaggtgacctgttatgatttacttatagtcattctgctataacatgacatgggcatttctgaaagtcacggtgctgtgcaacattgcaccagaccaatttatggggaaaatggagttaggagcacagtaaccaaaaacattgtcagtgacacattttaaaaagataggaacctaataaaaattgtaacttagttttacacgtataaaatggttaaagaataacaccgcaataaatggcactttaccttgaccaaaacctgacttcttgtgaaagtggccactcattggaagggttgcagttcatgaattactgtaaagtgatggatggaagatacctgatacgagacaaaaacttgtaacatcaaatgtggatggacctgactcataattcatgatgaactaagatagctattagatgtttgagctgtgtctgccttgtaaattcctgtgcagcttgatgtagctagtgtttctcacaggtgaaaatacacataagtgggaaatttgctggtttctgatagatcagtagccttcaaacaaatttgtctatttggaaacaaatgttatagcagaactgactgtattttagtttttgtttgcttgccttttgtggaatataagctccaccagaagaggaagtgagagttttaatgtttttatccaccttgtattcctgttacctggaatagtgccctgaaactttatagcatttaaactaaatggttagataaaaaaaatttggattgttataatttaaggggaatgaaattatagtattttggattagcattcctcaaacttgaatgtgtatactaagcacctggagatactatagtccagtaattctggggtgggtcccaaagatctgccttttaacaagatctcgggtgatacctacacttcactagagtaacaaggttctatagcagcaccgtccagtggaaatatgttggccacaaatgcaaaccatatgtgtacttttctagtagctttgcttaaaaactaaaaatgattcaattttagtatattttatttgacctaatatatc

SEQ ID NO: 260577 - DNA, 349 bp, Homo sapiens
ctggatacacaaatattgatccaatctggactaattagaaggtcagtcccaataacaaatcgaagtcagctgggcgtgatggctcactcctataatcccagcactttgggaggctgaggtgggcagatcatttgaagccagaagttcaagaccagcctgggcaacatagcaaaaccctgtctctactaaaaatacaaataattaggctgggtgtggtggctcatgcctgtaatcccaacagtttgggaggctgaggcaggtggtcacctgaggtcaggagtttgagaccagcctggccaacagggtgaaaccccgtgtctactaaaaacataaaaattagccaagcatg

SEQ ID NO: 260578 - DNA, 302 bp, Homo sapiens
tgtactctagtctgggcgagagcaagactctatctcaaaaaaaaaaaaaagtcacgccaggaattgaagctggtgcaggactagaactcagcccttctccatccctctctcatcacaaggtcccctagcaaaccagctgcaggagagacaggcagctctgagccatgtggtttgtgtgtatgtgctgctatgagaaatgtctgggggtctgcatgggccccaattacttcagggactggtgggtggcttctccaagccggagcccgtcaggccatttttagccctgggtgaccacagcccac

SEQ ID NO: 260579 - DNA, 238 bp, Homo sapiens
tatatatgcatttatgagtggatttttggtgttcctccttgtggatataaatttgtgttttccagactacacatgtatgatttttgtggttcatttggaaaaaggaaagatcccagggcatggtgcagtagatacttgcagttttgcaggcctgctttctggggtcaggaggtcatctgtctcttttgcatttagtttttaaatattgatattggtgatgcagccagggtgtgtagaa

SEQ ID NO: 260580 - DNA, 525 bp, Homo sapiens
gggatctaacacgcagaaatacacacgccaagacatgcaaagcggcccatggagcattgatccaaagtggaaggcaaagtggtctcccatccacggggaacattgtggttgcttgcacattctacatgcttaccactgctttcacacggccatgaggaggaatggactccagctcccggccgccccggagggagtggggtcagaagatgcagaagagggtgcatgatgaggctctgcttttaaaatgctgacagcttccagtgtgtcatgtacatttttgtgtatgtcaaataagcactgagaaaaacttagggaaaatattgtggattacagatgagacactcatattgagaaaggggcaaaccaagtacgtacaaaagaaaaagtctgagctaaacaatgtgtattatgtttgtaaaattacatttgtgtgattattgtgaagaaacaaaacttaaattttctttgcatttttcgagtaaacattatatttcatgtgtgatgagggtgcattccgtgtccgtt

SEQ ID NO: 260581 - DNA, 369 bp, Homo sapiens
aaaaaaaaaaaaaaaatcccacaaagaaaagcccaggctcagagccttcacgatagaatttttctaagcagttaaggaagaattaacaccaatccttcacagactctttccaagaatacagcaggtgggaacgcttcccattcatacggaaacgggaggccgcaccccttaggaatgcacacgtggggtcctcaagaggttacatgcaaactaaccccagcagcacacagagaaggcgcataagccgcgaccaggaggggttgctcccgagtccgtggcaggaaccagaggccacatgtggctgctcgtatttaagttaattaaaatggaacgatggccgggcgcggtggctcacacctgtaatcccag

SEQ ID NO: 260582 - DNA, 302 bp, Homo sapiens
acaaaacgcaaaaatttgttatttgagaggatcaacaaaattaagaaaccttaagtcaaactaaccgaaaaataaaaataaaaataaaacacgctcatattactaaaatcaggaatgaaagtgaggcttttaccatagagaaattgaaaagtatcttagagggaataacatgaacaattgtgtgtacaatttattgtatgctaataggaaacctagacaaatggacaagttcctagaaagatacaaacaattgaaattgactcaagaagaaacagaaaccttaacagacttatataacaagt

SEQ ID NO: 260583 - DNA, 299 bp, Homo sapiens
cggcacgaggcaaaattgcaattttccaaatcttccacaccgtacaccagaacttccatttttaaccagacacattactacctgaaagaaaggaccacatgccacagtttggtcatggtttattaactaaatcctaacaagtgttctgtgggacttccaagaagtcttcttaaaagtgcaagggtgaggtagaagtggggactggtgtcttcctcctccttcctaggaagaacatggtgtaagaagagaaaagagcaaaatattagggccctgagggacacaaagttgctgggtaacta

SEQ ID NO: 260584 - DNA, 364 bp, Homo sapiens
ctgactgaggtactgctgcttaatatggaagttcagatggggagagcagagggaaccaaaagaacccacgtcctagaggattttttctaaatgtcttgtgagcattttttccgcatttaaaagatttacttgtcggaattatttatgtgcaatatgattgtagaaagaaatcacctagaaagaaatcacagccaattcatttttcagcctctaaacacttggacagaggagccatatatgaatatgttcaaaagagttaaggccatctcctgtgggtatcagagaggcataattagaatgcattgaattctctccaactggtttgctgaagctcttatgtgagctttttcttttccttccttta

SEQ ID NO: 260585 - DNA, 1908 bp, Homo sapiens
atttcatttgttaaaaaaagtctcaactcattttactgagctctcccttttctagggcaagtatcatcgccatttgccaacatcaatatgaacttccagtttttaagagtagcttgtgaaaggttttagaaaaggaaacaaagatgggttttgaactttagattttcatgtcttttgtctgcagtgtatatttgttctcccctctccttctcctcctttccccccttgtctcccaaagctcaaacttgcttgagtctatcatagagactaaaccttgagcttcccctaaacttagctttaggaagctgagctgtggcctcacctgtctgccatgaacacagatttctctaagaaagccatattgatgagaagcccccaattactgcagcagacgtcgcacaatggtaccaaaaatgagcctctccagctgatacctggtagagtgagaggagccaggaggaataacttaggcctggaaattatctgcaggctttgcaatttgaaggttgagaaagagagcttaaatcaattagcgttctctcatgggactggtatgtttgtgtcaggatgaatggtttttggctctcctgttgcctcttggctaaaactctgattgagccaatggttgcagtctgatgctggacgccaacccaatttctgctaattattgcttttgtgattaaaagaaggtgggggtggggggctcccacagatgctgccaggtttgttttgtacaaactgaaagttaacttaattgtgagaacggagacctcatcactagctgcatgttttggatttgggggcatttacatttgtgttaattatgatttgtccaggtaagatgcagtagctgctccctgagcagctgtttccccccccaccccacttcactataatttccaagatttatttccctttgtttaaagggacacgcttaggtgaaaggttccaaatttacctggaaatggttaccttgtaaatttagcttgtctaatggattgtttccatgatattaaaatgtacagtcaattggaagaaaaaaaatgataaaaataaaatgaataacattgttagaaactggcacctgaaaacttcccttcaaagtgggggaaaaaaccgagtagctgaggaaagactttcattggttcactgtgtagaatggtggagcattttccacttgtgagattatttcataacaccaacaaatgccagaaactcattcagaaaaaaagccatatgtgaaaaacagtaatcctgtcatatccttagaggagaaaaaatgtatatttcttaacaagtggtgttgtgacttcttatgcaaatgtcttgcatattagtaacttttattatctttaggactgtgcttatcaggtacaaatgtgtctagttctgttttattgtttctttttcctttatatttatgtattgcatgaggtctgtggtcaatgcaaaatcatgatgacctcaatgtctttgaaatttgcaatgtgtttttaatatgtaagaaatgtaatcaacttgtatttcagtaagcagcactttaaaaagagtttaacatgatgacctttaaatggataggacttgggttgtttttatggtaatgttgcattggagttgagttttcctttaattaagttcttgtttcctcatctatgtgtctctcagtgcttcctgtccacctttgctctcagcatggtttcccatgcctaaaagtaagattttcttttctctttgttcccttggctgtaggtcattgtcctcttcccagaggctagcacaataactgttgctcaatgtaagatgagatggcaagatcatactactgttgttgcacctggatttgagttgggacatgcttctttgaggcagatgattcaagagaggacgtgctgtgtggcaggtgttttg

SEQ ID NO: 260586 - DNA, 1037 bp, Homo sapiens
atttcatttgttaaaaaaagtctcaactcattttactgagctctcccttttctagggcaagtatcatcgccatttgccaacatcaatatgaacttccagtttttaagagtagcttgtgaaaggttttagaaaaggaaacaaagatgggttttgaactttagattttcatgtcttttgtctgcagtgtatatttgttctcccctctccttctcctcctttccccccttgtctcccaaagctcaaacttgcttgagtctatcatagagactaaaccttgagcttcccctaaacttagctttaggaagctgagctgtggcctcacctgtctgccatgaacacagatttctctaagaaagccatattgatgagaagcccccaattactgcagcagacgtcgcacaatggtaccaaaaatgagcctctccagctgatacctggtagagtgagaggagccaggaggaataacttaggcctggaaattatctgcaggctttgcaatttgaaggttgagaaagagagcttaaatcaattagcgttctctcatgggactggtatgtttgtgtcaggatgaatggtttttggctctcctgttgcctcttggctaaaactctgattgagccaatggttgcagtctgatgctggacgccaacccaatttctgctaattattgcttttgtgattaaaagaaggtgggggtggggggctcccacagatgctgccaggtttgttttgtacaaactgaaagttaacttaattgtgagaacggagacctcatcactagctgcatgttttggatttgggggcatttacatttgtgttaattatgatttgtccaggtaagatgcagtagctgctccctgagcagctgtttccccccccaccccacttcactataatttccaagatttatttccctttgtttaaagggacacgcttaggtgaaaggttccaaatttacctggaaatggttaccttgtaaatttagcttgtctaatggattgtttccatgatattaaaatgtacagtcaattggaaga

SEQ ID NO: 260587 - DNA, 997 bp, Homo sapiens
atttcatttgttaaaaaaagtctcaactcattttactgagctctcccttttctagggcaagtatcatcgccatttgccaacatcaatatgaacttccagtttttaagagtagcttgtgaaaggttttagaaaaggaaacaaagatgggttttgaactttagattttcatgtcttttgtctgcagtgtatatttgttctcccctctccttctcctcctttccccccttgtctcccaaagctcaaacttgcttgagtctatcatagagactaaaccttgagcttcccctaaacttagctttaggaagctgagctgtggcctcacctgtctgccatgaacacagatttctctaagaaagccatattgatgagaagcccccaattactgcagcagacgtcgcacaatggtaccaaaaatgagcctctccagctgatacctggtagagtgagaggagccaggaggaataacttaggcctggaaattatctgcaggctttgcaatttgaaggttgagaaagagagcttaaatcaattagcgttctctcatgggactggtatgtttgtgtcaggatgaatggtttttggctctcctgttgcctcttggctaaaactctgattgagccaatggttgcagtctgatgctggacgccaacccaatttctgctaattattgcttttgtgattaaaagaaggtgggggtggggggctcccacagatgctgccaggtttgttttgtacaaactgaaagttaacttaattgtgagaacggagacctcatcactagctgcatgttttggatttgggggcatttacatttgtgttaattatgatttgtccaggtaagatgcagtagctgctccctgagcagctgtttccccccccaccccacttcactataatttccaagatttatttccctttgtttaaagggacacgcttaggtgaaagcttgtctaatggattgtttccatgatattaaaatgtacagtcaattggaaga

SEQ ID NO: 260588 - DNA, 312 bp, Homo sapiens
catcacctccagtgtgccatcctggcaaacttctactcttccttcaagtttcaactcaaatgctacctccccttagaaacttttctgaacttccttctgctatagtcaaactggacattgcgtttaaaatgaatatcactttaacaaaaatcacatcaccactgtttgcttttctgtcttcagctggacctcaacagggtccttaaaggcatgccctatgaaaaagcttgggtctgtccagctttgcatccatggagtctgtggcaaaagactaggagtttaataaacttggatgacttggtctaagtagct

SEQ ID NO: 260589 - DNA, 432 bp, Homo sapiens
gaagaacctggagtccattgttctagagcaagaagcatccagtataagagaaagatgtaggctggaaggctatgccagtctctcttttcacatttttctgcctgcttatattctagccatgctggcagctgattagattgtgtctacctagatcaagggtgggacctcctttcctagcccactgactcaaatgttaatctcccttggcaacaacctcacagacacacccagtatcaatactttgtatccttcaatccaatcaagttgacactcagtattaaccatcactgcaacatgtaagtagggtcaggtcaataagatggatatgaaagttcaaacacaatgacaaatacactgtggacactcaatatatggtaggtattatgattatggtgatattttcaaaacctttactaatttttgtatacattt

SEQ ID NO: 260590 - DNA, 428 bp, Homo sapiens
cccggtctcagtacttttttgtttatgtctaagtcagttccaggaaggctgccaccatttgctaccaaaacaatccttacacaacaatagcaagtctccttccatctcctctattctggtccttgaaaccttatcaatggtgaggtcacagtcattgtttgttgttcggttgagaactgagggggtggggtaggaggaagaaggtctatttttaaaaatcacacacactaaaaaaggttcaggctctgagaacctgtgaaatcttgactaattttggctttccccatgggaacccaccagaaaagtattcaaacttgtatagaacacccttgacgtaactaactccatcttagaaaaatactccattttatatttcatacagcactttgccaattaggataagatgttttgcttaagaaacaaattta

SEQ ID NO: 260591 - DNA, 235 bp, Homo sapiens
ccagctatccccagtgccacctatggctgagagggtaccaggatgaggccacatctggggaccatatggggagtggggggtgcagggggttgggaggaatgaaatcgaagtggggactgtaagtgcagacaagtttagttgtagaaaagggaggtgaccgctggaggggagcctgtgctgtttggaggagttcagagcaccttgagctgggcaacaagagcaaaactccatctca

SEQ ID NO: 260592 - DNA, 270 bp, Homo sapiens
cggcacgaggcaaaaataaaaaagcatagaagatatgtagtgaaaagtttgattccacccgtgccccatctgatcatttttacccccatactcacccagaagtaaccacttgcataagtttgctgttgttgttgtcttagagttttatttctatattcatgtttacctcctttttaaataaaaagaagggtagcatgctactacacactgtcctccaccttgctttttccaaatgacagtgtaatcttggagaaagcaagttggcggccg

SEQ ID NO: 260593 - DNA, 241 bp, Homo sapiens
aatttttgtatttttagtagagacggagtttcgccatgttgtccaggctgctcttgaactcgtgacctcaggtgatccatctgcctctgcttcccaaagtgctgggattacaggcatgagctgccatgccctgccaaaatataaaccatagagctttgtatcacaatatattcaaaataaagatagagtgactttttactttttagtgtgcaaattaaacataaagcttccaggaaaaagc

SEQ ID NO: 260594 - DNA, 465 bp, Homo sapiens
aaggatgctgaggcctggaaaccttggtctcacctggagatgtggctccacgatgcccttgggagcgagcgagtcatttcacaaagtgttaggagggaaaggagcctttctggggccagcacggttggaagagttcacagcctttctgtgagttgctttaggggcctaagactttggttgctgaaggaagtataaatgtacagtgaccctccaagagcctccctctcacaggtatgccccactttaagaaaacccgctagacgaaaaccctgacttttggagtaagatttgtcaaggagagagagttcttcccagtaccaaaggtttcagaaaaagacccgtttaagtagtaagctgaccttctgaaccaataaataagacagtggtttctttcttttgtagaggtcacctgttgtaaatctgagaacatttgaagaatttactgcattggctcattaaggttaa

SEQ ID NO: 260595 - DNA, 320 bp, Homo sapiens
tggggggagggggagaggcttattagcttagaaaaattcccttagtgattttgatgccctcctcaccccgccactgagtgctactgatttattttagaaatgctctcccacagatgtctgcatgactgactcccttatttcctcagcttccactcagatgtcaccttaccaaagagatttcgcttgatgatcctagcccactttctgtctcctgaccctaatttatttttcttcatggcactaaatatcatctagcacattatgtttctattgtgcgttatctgtcttccccaaatgctcaataaatgtttgttgactga

SEQ ID NO: 260596 - DNA, 573 bp, Homo sapiens
ttagttataaatcaagcctgaggtttcagatttctggactaaaaatatggttcagtttgtgctgctgtgggatgaagaatgggcagagaaaatccacagtgcaggcatggggataaatggcatttggcacttagctgcagggtttgggggacaacagggagtggtgggatggtggttaagtaagggtgcatgccccacctgaagctctacagtggctcagctccaactgagtgttgccatgggaaaatctgatggggccagatctgatccttcagagaatgaggaattccaggttgttatgtgaattctcacaatttgtaaatgtcggcttgccattcagcttttttgtttgtttgttttaaataatatcatgtgggtcaaacaaactatgttaatggtagccatctggcctggggctagtagcttattgcctctggccagtggtgtgctaacaaaagtttaaccagcagctctccaacaaaaaagggaggtgggctgctctgcctatgcagtagccatgcttttattcctttactttgttaataaacttgctttcactttaaaaaaaaaaaa

SEQ ID NO: 260597 - DNA, 271 bp, Homo sapiens
cttataccacacttagtggtacaaggtataattgctacatcaacaacgtttacccccaaattaagtcacaattaatattcagcagacttcagtaaatatcacctctcaccctttaatttgtattgttcagcatgacagactactgcttgtttttaagaaaaatacaactgatttcttaattccttctggcctttgataactttaaaacaaaacatttcttaaaaagtctgagtatttgacatcaaaaagcttaggatacttacattttaaa

SEQ ID NO: 260598 - DNA, 608 bp, Homo sapiens
aaatggttgtgatggaattcagcaacaccaataccttggtatttctgactttcaggatgttaggagactctttcagtccttcctgtttaaatatgaatggatatgtattgccattattgccctgcccctacatctcccaaatttagattgctagtatttatgtaagtttactagtcacaaatagattcttgcatttcccatctcttgtcatagggccctctttgagttcaatatgcttttattggcacttactttggttttctttacagcagcagctgctaattagtgacagcttttgagcaagcagcttgtcatttttggcagagataggggacatccatagcaagtcaagactatattttcatttgctaaatttactttgctacatggaaatacatcttggataaaaaatagtctgtagtcaaaggtggctgtgtttactgaattatcttcctgagttggcattctgtcctgtagttgaagaactcacagagatgaaaaaaagaaagaaagaaagaaagaaagaaagaaaggttcaacgtctatcagactgatgccataagtcctgagtcatccttctaacattaatctacattctatggctgtca

SEQ ID NO: 260599 - DNA, 521 bp, Homo sapiens
ctttataacttcatgaacagacttagaagacatttacttctcagctttagaataaaggaggtattctcagttgggtctctatagaccctagatttgctgaaaagcattaaatgggtagaaactaggtgctctagggaactgccaaatatatttcctaagacagaactgggatggagaattttttgcgttacagcctggagtaaattagaaggcagctggaaagccccaagcggctttcgagttgcacagatgctgtattatatccgctcccgctgtactgcagccccgcgccagctggtggggaactgtaagcaatttgattgcttcccttctatttaaaaatagccacaaaataacaaaaaatactgaaaatatgaataaatattaccttttttgctgtaactttttaaaagttttgactttaaaaagtttacaaatcgtaattagaagcgctctctatttttttttttttttaattaaagacaaggcaactcgaaagccccaagcggggtaccgagctc

SEQ ID NO: 260600 - DNA, 558 bp, Homo sapiens
gccattatcttagaaagcagccctccaggttcaggggtaactccctttcctctgctagactaaaggggcccacagctgttttcttaaggttcagctttctgagattccttctacccagtattacgtgccagcatccactgatcaataccagatgcacctattaattgaaaattgttggcatggacaggtgataggtagtagagactacaagaattacctgcatttccttccatactttgatttacttaacactttttttttcccaagagacacagggattctctctgttgcccaggctggagtacagtggcatgatcatagctcactggagcctccagctcctgggctcaagcaatccccccgcctcagcctcccgagtagctgggactacaggtgcgcaccaccatgcctggctaatttaaatttttattgttgttgttgttactgtgtggcccaggctggtctcgaactcctgggttcaattggtccccccgaagtgctgggatttgggagaatcgctaagggggctaccatgcctggccttatttaacacttttg

SEQ ID NO: 260601 - DNA, 543 bp, Homo sapiens
tctgtatccaggaaaagcccaacctttctatactaaggccagagaggttcagctccttaaaatattcatgaaaatccgaaagttattcccagttatttccaaaggttcctttcccttgagaaggcagcatgggcttatgcctagacccacacctaataataatgaggtatatttggtagacatagactatatttggtagttagggctggggtgtgggttattagaaaggatcttaaatgaaaggttggcatccatcaatttagtaccatagcctagggtctatcccctgcttgcagcattcagccatattatctcagaggtcttagccactgtgtgaattcctctagtggcaggcgctcaccacctcagtcacctattaaccatcctgaagtaggtggtcattcctgaaggtgagttgaaatctgactttcttagcttctggtcttcacttttggttctatcccctcaggtgtcacagaacaaatccagtttctcacttgaggcagcctttttactaagatgctacctggcaggtgtaagcat

SEQ ID NO: 260602 - DNA, 285 bp, Homo sapiens
agttacaaagctaaaatcaatatgctaagtattctaaatagagctacaaacatatcctgtgggacataagaagaaaagctgcacttggtggtttgagtatcatctctcctgacatacctcgagcctgtgtaaaaaagaaaagttactttgaaaggaatttgtaggactaaatttccttttggattttctcttctcccaagagaaggaggtatgtgctctgctcttcccaaatcaaggaatgtagatcttgctaacagaactgctcaaagacatggggtgcttgca

SEQ ID NO: 260603 - DNA, 408 bp, Homo sapiens
agggaccctgagtactgcctctgacctctctatggcaagccaaatggccatgggaagaccccatggagtgtcagaatgatgccgttgagggcaaggattttagaccggtcatggattctgcctgtgcactgggctctaccactttctagctatctggctactagcaagttaccttaacaatctaagtttcaacctccccattcgtgaaatggagatgatgtcttagtcatagaagtagcaagtctactgcatatcaacagtgtagcactgagcctggctctttataaggaaacaggccgagagacgcaagtcaaacagcaaaggatggtctgctgtctgtctgactccaatgccaatggtctttcctctataacctaaagcaataaaacccctgcaacatctaaaaaa

SEQ ID NO: 260604 - DNA, 486 bp, Homo sapiens
agggaccctgagtactgcctctgacctctctatggcaagccaaatggccatgggaagaccccatggagtgtcagaatgatgccgttgagggcaaggattttagaccggtcatggattctgcctgtgcactgggctctaccactttctagctatctggctactagcaagttaccttaacaatctaagtttcaacctccccattcgtgaaatggagatgatgtcttagtcatagaagtagcaagtctactgcatatcaacagtgtagcactgagcctggctctttgctggagcgcagtgggatgatctctgctcactgcagcctctgccttctgggttcaagtgattctcctgcctcagccgcataaggaaacaggccgagagacgcaagtcaaacagcaaaggatggtctgctgtctgtctgactccaatgccaatggtctttcctctataacctaaagcaataaaacccctgcaacatctaaaaaa

SEQ ID NO: 260605 - DNA, 353 bp, Homo sapiens
taatgattgccagtttttaatatatcctgtaagaattattttatgcatattaaaagatttttaaaagcccgaataatagaggatactatacagttctgagccttgtttttatgtaattgctttttgagatcattctcatgagtacttcttcagttgccttattctttttcatagttacatagtatattccaacttacaccaatactgtaagttattcagtcagctccctgaaaagataacatgtacattgtttccaagctgctattattaaaacaatgttacattaaatccttgtatccatttcccagtatgtgtgtaggataacttcctaaaggtaaagctgcttgatcaaa

SEQ ID NO: 260606 - DNA, 471 bp, Homo sapiens
actagtctccaagacccattccagttaacacttctttcagtagttttacaatactttttgctcaattatgtgaagtgtgacagattttaaattttattcagtgacatagctctgaagtctttatttcaaactttgaagcagttattaatatggaaaagtgaaattctataaaatcctgtttctctgatttttcattgatttttgctggcaggcaatagcgtgtttatcagaatgtttgttcctagaagagtactgtagttataaagttaaaggcatttactgcagtaagattttattctagctgtacgtgtactagtgatcaaagctattaaaactttgtgttagaatgtatgtcggaatatcaaagcagcagcagcagcaggaggaggcattgcagctgttttaagttttggctgaagtcagattttgaagcctgaatattttatgttaagataaaagaaaaaagaaaaa

SEQ ID NO: 260607 - DNA, 238 bp, Homo sapiens
ttcccttttctcagctcttaattccattctgtttttccaacagaattttgtctcaataattgtctgttttttcacttgaaatgtttttgattatcctatcgtatttctctgcagcaaaaatgtgtatatatttttcaatttaaatgctctttaaatgttcctctgattataaggctctaagtgttgtttaaaaatttgctcttgtttgaattatcatgacaattagtattagaataaa

SEQ ID NO: 260608 - DNA, 529 bp, Homo sapiens
aggccaggaacagagagcatgggcttccccaaggctctctccacatcctccttctctttccctctcaaggaaggaagacctgacttatttacacaaaactaaacacaaagatctgtaagatctgagcaaaggagaaaaagatccccacaaagaggctttgctgggggaaattacctaggtgtttgctaagccattgcccaggccagaaagaaaacctgctacaggcatgtgcctgctggttgtatattagaaccaagcacacagcttggtaaggaactcagtggggcctttctgggccctttctatgtattaggtaaccctgccctgatattcgtctcagccccttgtactcttctacagctcactgtagcaccctggtgggcccatgcagcctggcagttctgagaagctgaggcttgcacaccctccatatggaaggacaaatcggcagataagaggagggtggggtacagcatggcgccccagcagcagtttggagcctgggttttcgtccctgaccctcaccaac

SEQ ID NO: 260609 - DNA, 474 bp, Homo sapiens
tactcttcagaaaccccttaaaatagccccccaacaccttcatatagtaatttcctgacatgtctccctgtgtatattctcagagcatttatcacaattggaaattatcttcttaacctatttacctctttcttgttgttatccttaaccctaccatttgtgtgtagctctttgaaggcccagatcatcctcattactggctctagagcttcacatgggaccaggcacctagtggggcctcactatggattcaatgaatcaatagataaaagaatgaaactcctacaaaaattcagtacatctaggatgaagcaggacagccagaaactgagcttggattcagaaactttaaattaaacattcattctgggccaggtacagcggctcacagctataatcccagcacttagggaggccgaggcaggagcctaggagttcaagaccaggcaacatagtgagaccttgtctctacaa

SEQ ID NO: 260610 - DNA, 359 bp, Homo sapiens
tgttttctcttgctttctgctctatagggatatgtattgtcatcatatgagctattcctcttaagccagtatttcatactggttaccataattgggtgtttctggtttcggcatttagaattaaggtgggggaaaaaggaatcattctcctctacctgtaactttaagtttcataaatataatgtgttgagtcgtagtcatcagagaagctcaaaagtcaatgaaacgtaaggaatttgaaacatataaaggcttctttcaaaagctgctagaattaccttctgtttatctaaaaccttataattctgtacccaggtatattacctttagggattgagggcacaatgaaacatttttag

SEQ ID NO: 260611 - DNA, 443 bp, Homo sapiens
cccaaacctgtaatcggcaccccagtgagcagactggacatccccacccccacagctgccctttctcccctccactcatgttccctctagggccaccacgatcccgacttgtatcaccacagatgagtttcacatgtttttgaattttacatcttatctgttttctgttcctatacaagtttgccttttttgaattccatataagtgggattctacaatgtgttatctcaatttgagtctgttttttttttcctgctcagcatgatgtttttgagatgcatatatgcggttttgtgtatctgtagatggttcttttttattgcagaataatgttccagggtatggatgtaccaaagcttgttcatccattcaccagctgagggatatttggactgtttccagttttcagccattataaataaagccactagaaacatttgcaa

SEQ ID NO: 260612 - DNA, 284 bp, Homo sapiens
ctggattcagctttgagtagctagaggagagaaaagtcacaaatttttacctttcctggtcatgcttttgctcacgctgcgctcaggaaaatgtaggcctatgcctgtctagatgtagcatcagccaaagccaagcaaagctgcaagagctgcagatgggtgaactcactcatgcggtttgcctgggcaaccacaggactgacattgagacattttcctttcaaatgagactgtgataactttcactgaccaaaacatctgggaaaaaggtttggtttaaagca

SEQ ID NO: 260613 - DNA, 410 bp, Homo sapiens
cagtcctagctaatgaacgtgtgagcatgatgcaaaaatgtatgctcatgatatgaaaggagaggcttagggagacagaaacgttgagatacagagtaaacgataccaccgcgagggggaaaaaacgcgtttaattacattttagacttttcaatgataacacctgtattttgtgttttattactcatgtgattttataatttgagctgggtcaatacaaacaaaaaggtactgtcagtttatgctgacgtaatgaactgcgatttcagattccttggtctgcgtgcttgttttctcctttgcccaagttcccagattctcaaaactctgagattagttttgaagggatgagacaagaaaacatataaatactccagaggattaaaatccaaaagcatttaaagttgtat

SEQ ID NO: 260614 - DNA, 443 bp, Homo sapiens
agggtgaacacttaggtggacacatggatattgatgtcagtgctgcacagggcacggtactggacaagtgtcacaagtccagctgggcaaactccaggatgccaggtcacaagggctgtttccaggaagggctgacccctgatgtttacatccttttcctctgaagctcagtggagctcaccagtctcagttcaccttgtaggccactgaagaaattcccaattagcacagaggaacgtccaaccctatgggatttgagactggagattgcagccatcacatgatggaagcagaattagactccaaaaaccttgccttgagtctcggcgtctcggctctgtcatttgccagccaaatgaggccaggcaagtcacaatctcatggagtattcacttatctacctgtaaagtaggaatgtctgacctatttcagaagattgttct

SEQ ID NO: 260615 - DNA, 418 bp, Homo sapiens
gaattctgtcaatctctaatgccacaaacttctgtgaagcctctcctgtgtgccaagcactgggcttgaggtgaggtggatcccaagaggaaaggtgcagacagtcgcttcccatcaaggggcagagagcagacctggtgcagtcactgtgtctcagaggcgctgcttgaggtaacatctttgcagtatcttctgatggaggatataggaactgattactgatataggataaaaggcaaataggttgggactatatttcactgttgtcattgttccttactctttattcagaaggtgctttctcgtgacaagtttaaatagtgaatgaagatcagatatttcaacagtaactgaaataacctgttcataatgaagtgaactgtttggccagcagttaaataagtgcggctttttcctt

SEQ ID NO: 260616 - DNA, 311 bp, Homo sapiens
caggagttcacgtaacaaggaatggcagaaacgaaggatgtttttggccaggaaccgcatccaggtaacatctttgcagtatcttctgatggaggatataggaactgattactgatataggataaaaggcaaataggttgggactatatttcactgttgtcattgttccttactctttattcagaaggtgctttctcgtgacaagtttaaatagtgaatgaagatcagatatttcaacagtaactgaaataacctgttcataatgaagtgaactgtttggccagcagttaaataagtgcggctttttcctt

SEQ ID NO: 260617 - DNA, 400 bp, Homo sapiens
atatataaaggggagtttactaagtattaacttacatgatcacaaggtccctcaataggctgtctgcaagctgagcaaggaaagccagactgaatccccaaactgaagaatttggagtccagtgtcgaagggcaggaagcatccagcacaggagaaagatgtaggctggaaggctagccagtctctccatttcatgtttttctgcctgctttgtattcattgacagctgattagattgtgcccaccagattaaaggtggatctgccttctccagcccattttctgcctgctttgtattcattgatagctgattagattgtgcacaccagattaaaggtggatctgccttccccagcccactgactcaaatgttaatctcttttggcaacaccctaacaga

SEQ ID NO: 260618 - DNA, 186 bp, Homo sapiens
gaaatacacgccacatagagggaacagttttgagtcacaaattgaagtgatggctcccagttttttcccttggaaggagtacctggacacactgctgttttaagtatcaagagttcttcagaatatttgtatttgtgccctttgtgggcccaggaagtgcaagcagaaggttgcctgacttcgtag

SEQ ID NO: 260619 - DNA, 408 bp, Homo sapiens
gcaaataaatattagacacactgtttccttttaaagtgttcttatctttgtgtttcaggttgaatcatttctatagacctgagttcatagtcacgagttcttttttctagcatgtacactctgctactaagcaaaacaagtgaattcttaacttctgatattgtatttttaatttttagatttttttcatgtgctctttaaaaatactttccatttctctagtgaaattccctatatgttcaccatgttctcagcttttccctttcatcttgccaacatatttcccattctcagtttgaatacctgatcatttctacctggtcattattctttctgtgggtgttcttctgatgactgtttttacctggattaagttaccttttcttcttcacttgtcttgcaattaaa

SEQ ID NO: 260620 - DNA, 384 bp, Homo sapiens
ctatgttgaagagtaaaatacttagtaatatatagtacaatatttagtaagttactgactagtttgtcattgtaatcaaagagtttgaatgatttctacacctcctcaggtgctaggatttatctttaagcaccttaatatatatacatagtatataccatcatcttcaaattaaaagttatcagcttttaattttttccagtacaactacatataatgggtggatatataatagtggaaacttcacatgttgttcttgatcttacaaaagtatgataagaatcttgggcataaaagtggaactttagcagttcattggaaaagaaagccacaaattgatctttagcaccctatacttttcctatattaaaaacaattataaag

SEQ ID NO: 260621 - DNA, 449 bp, Homo sapiens
tagtagtcattctaataggcatgaagtgatatctcattgtggttttaatttgcatttccctgatgatttgtgatgttgaatatttttttcatatacctactagccatttgtatgtcttcatttgagaaattctattcaagtcgtctgaccagtttttaattaggttatttgctttcttactattgagttgtttcaattccttatatattttggatattaaccccttgtcagatgtttggtttgcaaatatattttctcattctgcaggttgtctccttactctgttcattatttttgtagttatgcagaagctttgtagtttgatgtaatcccagttgtccaattttgcttttgttgcttgtcatttggggacatacccataattgatcttagccaaaaggctgagaagtgatttgggtcatattaaaaaatatcattgccaagaccaa

SEQ ID NO: 260622 - DNA, 208 bp, Homo sapiens
catggctgcctagattctagacatcctatttcctatgcccaggccctctttccaatgtgttccattcacgttctgctaaatagaaaactgtgtataatccttcctcttttgtcctcccaacactcacatcttccaaatcaaaacccaggagtcaactctgtatgatctctgcaacttttctataaatctaaaattattacttttaaaa

SEQ ID NO: 260623 - DNA, 345 bp, Homo sapiens
ttttttttttcataaagcctttcttcagggtgaagtttctttgtttttaaatctaggactttaaactcaaataaccaaacatttaaaaatctattatgcattatgatatgactattttagaaaaaacttcaccagaatcttctctttcttaaaaaatagaaataattaaaacaaaaagcccttaaaacgtgaatattcttagtatttccgcaatatgtacttataaaacaaacattagtgaaaatcaactgacactatcaaagagaagagctttaataagcacttcccaatatacctataaatgcacaatataaaactaaacagttaccatgtacctttttaatt

SEQ ID NO: 260624 - DNA, 472 bp, Homo sapiens
ttgaattctagggtttgtggtgtgcataattacttttacttaagagtgagattggcagatagctgtataccagagagtttttgaatgctgttggaaggtaagcgtggatttaattcatgcaaaacaaaccgttgaggagctattcaactggcaacttttgtctcaagtaataaagtgatttcattttgactgacagataatttttcaatataagagtataaagatagctgcattatatttgttctaggtttttgacaccaattttgttggtgtttagaagaatggcaattttatttctacctcctggacaatggcacgtgaacactcattcattcaccgagtatttgttgagcatggctgtgtgccaaactctgtttaaggggcataaaatagagcagttagggagagggaagaaattcctggcctcagagcttccatttcagttgggggagaaaataatgaataaataagt

SEQ ID NO: 260625 - DNA, 430 bp, Homo sapiens
attcacttccagagagcaaaatatctccatgatttctgtattattggtgaagccacctcaaagcccctaataaataaaataattacctttattattattatggtcacattatagctaggtaaggacttatattcttgatcttagctacctgtgtaacacaagacctgcttaaagataaaaatttgcttgatgtcatgattgattaaaatattgttaattgggcaaattgatattattcagcctcaagggatagtaatacaatatttcatgtttaatacatttaataaaatggtattttgtctataagaatcactagcctttccatttttaaaaactacttaaatctcaactccctgttgacattttgcttttattgcaggaataatggtaaagagaaagactagatccatgttagcaaactgatacactt

SEQ ID NO: 260626 - DNA, 5240 bp, Homo sapiens
  misc_feature (59)..(59): n is a, c, g, or t
ccggcacccggagctcctgggcacacgcattggcaggggccgcttcggcagagtgatgnctgatgatgagtccgagagcgtcctctccgactcccatgaagggtcggagctggagctgcctgttatccagctgtgcgggctggtggaggagctcagctatgtaaactctgctctcaaaactgagactgagatgtttgagaaatattacgctaaactggagcccagggatcagcgacctccacgattatcagaaattaaaatatcagcagcagattatgcacagtttcgaggcaggcgtagatccaaatcccggacaggtatggaccgtggggtaggcctgactgccgaccaaaaacttgagctggtacaaaaagaggttgcggacatgaaggatgacttacgacacacaagggcaaatgcggaacgcgacctgcagcatcacgaggcgatcattgaggaggctgaaattcgatggagtgaagtttcgagagaagtgcatgagtttgaaaaagatattctaaaagccatatccaagaagaaagggagtattttggccactcagaaagtgatgaaatacattgaggacatgaaccgccggagggataatatgaaggagaattacgtttgaaaaatgtttctctcaaagttcagaggaaaaaaatgcttttacaattgaggcagaaggaagaggtgagtgaggcccttcacgatgttgattttcagcagttgaagatagagaacgctcaatttcttgagacaattgacgcaaggaatcaagaattgacccagctaaagctgtcatctggaaacactctgcaggttctcaatgcctacaaaagcaagcttcacaaggcaatggaaatatacctcaatctggacaaggagatcttgctgagaaaagagctacttgaaaaaattgaaaaagaaacactacaagtagaggaggaccgggccaaagccgaggcagtgaataagaggctccggaagcagctggccgagttccgggcaccacaggtgatgacttacgtccgggagaagatcttaaatgcggacctggagaagagcatcaggatgtgggaaaggaaagtggagatagcagagatgtccttaaaaggccatcgtaaggcttggaatcgaatgaaaataaccaatgagcagttgcaggcagattaccttgctgggaagtagccagaggcaggccacggcttacagaccactacatgacctataaaagtaatcagctcctttctagtcacgggctcctctcactgttccctgtctgcctggtgttcccaaccccccacccaggctgagtatcatctcctgggccacatctgcccatggggagtgttttcacagcctggcccctggaactgttaccactgaaagaaccacagggcactctaatggtttgacacttgttagccagcatttagttcacaagcatagtgaaagtgaccttcccacacctgggagagggatagaggagggagagccagcccagtgtatgccatgggcttatccgtggcagccccagtgtgcaactatcaaaaacagacatcaaaacagcatggtgaatgcctggcactcagcattctcagtttactcttcagtttggtggggtagctcctggactagatactgctgcaaaagaaaacaagcacgaaggaaaccaagatgatttcttcgggctgatacaacctgttctgacctgcaaaaatcctaccttcccccacctccccaccgtaatagtcatagtataagggttgtacagacgcctcaggagacctgcctgattcctttacatccttctccctaacatctagactatctctagagctgtttcctagtcgtgaatgcgtgatggtccttctttgtccctgcaagtatgatccaacatggcccagttcagaatcagaatatgtcttctgtgtcatggtggcatttggtccatggtgggagaaagaaatcaacttttcccagtggtggagtgaggacaggggagggccggccctctcagccttggatgtgatccatttgctgtagtcttccaccttggtgtacagaaacaggccagggcacgtctcaccaccgaagttcaggactcctctcagaacccacagatcgaactgctgtagctggcacatcattgggcttcctgggtccccctgtgataaaagacagaaggcttcaagtcttagaaaaactagtttttgttgtaaatctatccttgtgcaatatactgtttgttctagaaatgttttacgctggttctcactggaaatggggcaaattataggatacaatttcaaatctaggcagccaccaccacaaattccaacaagatgacttttccttttattatgcaaattagctgtggacttctgctgattgcctatagcttcctggttcatatttcattttcttgcccctttccagtcctttggccaaaccttccctctcttctggcttctcattcctgaaatgttggtgtttgtttctgttttgtcctgaaatgctcacattttcccttctctgccttgcttcaacccttagtgtaagccacttcctgccacctggcaactgcttaccagcctggctggccgtgctctgggtcttccctactcccaatggagcagtcctctgggacttgggaattctgccacatacactttatctaacttaaagtgacggagtagaagcttggcatcattagctagatatgggaccctggcaagtgaccaaatcctctctgagccaaggtgggaacacagttaatgcctgtaacacgtgctgagcacagcacagtgcctggcacacagcaaacactcaatagaatattagctaccatcatcctgatgtcgctataaaggccagcatttttctgaaaagttggggaaaatgggaaaagcaacaaggcaactagtaggtatcacttaccttacctgcccagaccccacacccctaggtctcctctcaaaggaattcctgcccctcccatggcccatcttggtccgagaagggggtggtcatccccaggctagccagccacttctgacctgtgtggcctgcctggctggaaggcccaggcaatgacatgttgctctcgcagtttggactgagacatggaatggggccgcaattaacaacaggaaacaatctgaacagactgaaccacgagcagcagaaaggcagaagagcagccgcttcagccccttaccatccgagacctgggtgtgtggtctgtcttggtcactctctctgtctctctttctctctttctttctctgtccccaaggctggagtgcagtggtgcaatcttggctcactgcaacctccacctctgggattcaagcaattctcccacctcagcctctcgagtagctggggctacagctatgcgccaccatgcccagctaattttttttttttttttttgagatggagtcttgctctgtcccccatgctggagtgcagtggcatgatctcggctcgctgcaacctcctcctcctgggttcaagcgattctcctacctcagcctccccagtagctgggattacaggcgcccaccaccacacctggctaatttttatttttagtagagatggggtttcaccatgttggccaggctggtctcgaactcctgacctcatgatccacccgcctcggcctccccaagtgttgggattacaggcgtgagccactgcacccggcctaatttctgtatttttagtagagatggggtttcacgatgttggccaggctggtcttaatctaacttcaagtgatctgcccgcctcgccctctcaaagtgctgggattaggcatgaactaccatgcccagtggggtattctctttcaataaagctcctcttttccaaggaagccacaccagaacagagatgaagaccagtgggaaaacatgggagcaactccgtgggcaggccagcggggaggccatgctgcaaagctgccgtgattccctggtgatctctcagcaggccaaggccagacatgtgaggaaggccttgaggacttcattctgtgcctctccttggatggaagggggtgctttagtgtggcactcctgacttttcaattgactggtgaagaggcccttgtgtgcacctcactatgtctgcctaggtcatgggggctccctggccaagaatgacgtggttccccctttcatcagtccgattcgcagtttgtcttaactgtagtggtatagccagagcaagaaaaagaatgtgatttaggacaaatgattggatgagtgattggtagatgtcctcagctatggcgtggttttgcaggtcactgttccacccacctgggcacagcatatacgctttttctcttccccataatcccgtaggggctgcgacttctgaagcacaagaggcagaggcgaacagctccaggtgcccctctggagctaccctacctcatctcccaagggagcggccacagcccagagtggggtctttcattttgtgatcttttcccttgacattcagcaaaagccctgacagtggtagaataaaggcaggatgggtgagtgcagagtgattctgcttttgttgggtttcagggaaacccataggcagattctgaacctggtggttgattctacatgtgggaattgtggctttgaagacctctggacatgagaacatatttccaagacagaggattctatggggacgggtcaccattaaatggtgtgcaagcataattctgttcaaaaatgaaggcatgtttagaggtgtgtcacagttaaaaaccaacctgaactttgcagttagattttaaaagatggtcagttagagtagaaatagcttagaatattccattgagtctaagatacagttagaaatcaacatctttgaaattagggtgtgtcttttaatcagttgatgtcagagtttaacgggcagcatttttttctttcttgggattacaaaaaatgatggtgcattctataattggcagcatcttagatctgaggaagtatgatacttgtttgacggaatggttgacggcagaattttgttaaaaagctatatcttcactgtattttaacacattatctaatttaagaaattgttaagatcccccacctggcagaggacccagtacaaaataggcactcaatagatgttacaccaactttggaagggcaaacatatttcttaatgagaggcagtccttcatgttttgcaataaaatgactttt

SEQ ID NO: 260627 - DNA, 5034 bp, Homo sapiens
ggcagtgaatcgagctcggtcccatctcgtgacggcgattatcacgaaattaaatatcagcagcagattatgcacagtttcgaggcaggcgtagatccaaatcccggacaggtatggaccgtggggtaggcctgactgccgaccaaaaacttgagctggtacaaaaagaggttgcggacatgaaggatgacttacgacacacaagggcaaatgcggaacgcgacctgcagcatcacgaggcgatcattgaggaggctgaaattcgatggagtgaagtttcgagagaagtgcatgagtttgaaaaagatattctaaaagccatatccaagaagaaagggagtattttggccactcagaaagtgatgaaatacattgaggacatgaaccgccggagggataatatgaaggagaattacgtttgaaaaatgtttctctcaaagttcagaggaaaaaaatgcttttacaattgaggcagaaggaagaggtgagtgaggcccttcacgatgttgattttcagcagttgaagatagagaacgctcaatttcttgagacaattgacgcaaggaatcaagaattgacccagctaaagctgtcatctggaaacactctgcaggttctcaatgcctacaaaagcaagcttcacaaggcaatggaaatatacctcaatctggacaaggagatcttgctgagaaaagagctacttgaaaaaattgaaaaagaaacactacaagtagaggaggaccgggccaaagccgaggcagtgaataagaggctccggaagcagctggccgagttccgggcaccacaggtgatgacttacgtccgggagaagatcttaaatgcggacctggagaagagcatcaggatgtgggaaaggaaagtggagatagcagagatgtccttaaaaggccatcgtaaggcttggaatcgaatgaaaataaccaatgagcagttgcaggcagattaccttgctgggaagtagccagaggcaggccacggcttacagaccactacatgacctataaaagtaatcagctcctttctagtcacgggctcctctcactgttccctgtctgcctggtgttcccaaccccccacccaggctgagtatcatctcctgggccacatctgcccatggggagtgttttcacagcctggcccctggaactgttaccactgaaagaaccacagggcactctaatggtttgacacttgttagccagcatttagttcacaagcatagtgaaagtgaccttcccacacctgggagagggatagaggagggagagccagcccagtgtatgccatgggcttatccgtggcagccccagtgtgcaactatcaaaaacagacatcaaaacagcatggtgaatgcctggcactcagcattctcagtttactcttcagtttggtggggtagctcctggactagatactgctgcaaaagaaaacaagcacgaaggaaaccaagatgatttcttcgggctgatacaacctgttctgacctgcaaaaatcctaccttcccccacctccccaccgtaatagtcatagtataagggttgtacagacgcctcaggagacctgcctgattcctttacatccttctccctaacatctagactatctctagagctgtttcctagtcgtgaatgcgtgatggtccttctttgtccctgcaagtatgatccaacatggcccagttcagaatcagaatatgtcttctgtgtcatggtggcatttggtccatggtgggagaaagaaatcaacttttcccagtggtggagtgaggacaggggagggccggccctctcagccttggatgtgatccatttgctgtagtcttccaccttggtgtacagaaacaggccagggcacgtctcaccaccgaagttcaggactcctctcagaacccacagatcgaactgctgtagctggcacatcattgggcttcctgggtccccctgtgataaaagacagaaggcttcaagtcttagaaaaactagtttttgttgtaaatctatccttgtgcaatatactgtttgttctagaaatgttttacgctggttctcactggaaatggggcaaattataggatacaatttcaaatctaggcagccaccaccacaaattccaacaagatgacttttccttttattatgcaaattagctgtggacttctgctgattgcctatagcttcctggttcatatttcattttcttgcccctttccagtcctttggccaaaccttccctctcttctggcttctcattcctgaaatgttggtgtttgtttctgttttgtcctgaaatgctcacattttcccttctctgccttgcttcaacccttagtgtaagccacttcctgccacctggcaactgcttaccagcctggctggccgtgctctgggtcttccctactcccaatggagcagtcctctgggacttgggaattctgccacatacactttatctaacttaaagtgacggagtagaagcttggcatcattagctagatatgggaccctggcaagtgaccaaatcctctctgagccaaggtgggaacacagttaatgcctgtaacacgtgctgagcacagcacagtgcctggcacacagcaaacactcaatagaatattagctaccatcatcctgatgtcgctataaaggccagcatttttctgaaaagttggggaaaatgggaaaagcaacaaggcaactagtaggtatcacttaccttacctgcccagaccccacacccctaggtctcctctcaaaggaattcctgcccctcccatggcccatcttggtccgagaagggggtggtcatccccaggctagccagccacttctgacctgtgtggcctgcctggctggaaggcccaggcaatgacatgttgctctcgcagtttggactgagacatggaatggggccgcaattaacaacaggaaacaatctgaacagactgaaccacgagcagcagaaaggcagaagagcagccgcttcagccccttaccatccgagacctgggtgtgtggtctgtcttggtcactctctctgtctctctttctctctttctttctctgtccccaaggctggagtgcagtggtgcaatcttggctcactgcaacctccacctctgggattcaagcaattctcccacctcagcctctcgagtagctggggctacagctatgcgccaccatgcccagctaattttttttttttttttttgagatggagtcttgctctgtcccccatgctggagtgcagtggcatgatctcggctcgctgcaacctcctcctcctgggttcaagcgattctcctacctcagcctccccagtagctgggattacaggcgcccaccaccacacctggctaatttttatttttagtagagatggggtttcaccatgttggccaggctggtctcgaactcctgacctcatgatccacccgcctcggcctccccaagtgttgggattacaggcgtgagccactgcacccggcctaatttctgtatttttagtagagatggggtttcacgatgttggccaggctggtcttaatctaacttcaagtgatctgcccgcctcgccctctcaaagtgctgggattaggcatgaactaccatgcccagtggggtattctctttcaataaagctcctcttttccaaggaagccacaccagaacagagatgaagaccagtgggaaaacatgggagcaactccgtgggcaggccagcggggaggccatgctgcaaagctgccgtgattccctggtgatctctcagcaggccaaggccagacatgtgaggaaggccttgaggacttcattctgtgcctctccttggatggaagggggtgctttagtgtggcactcctgacttttcaattgactggtgaagaggcccttgtgtgcacctcactatgtctgcctaggtcatgggggctccctggccaagaatgacgtggttccccctttcatcagtccgattcgcagtttgtcttaactgtagtggtatagccagagcaagaaaaagaatgtgatttaggacaaatgattggatgagtgattggtagatgtcctcagctatggcgtggttttgcaggtcactgttccacccacctgggcacagcatatacgctttttctcttccccataatcccgtaggggctgcgacttctgaagcacaagaggcagaggcgaacagctccaggtgcccctctggagctaccctacctcatctcccaagggagcggccacagcccagagtggggtctttcattttgtgatcttttcccttgacattcagcaaaagccctgacagtggtagaataaaggcaggatgggtgagtgcagagtgattctgcttttgttgggtttcagggaaacccataggcagattctgaacctggtggttgattctacatgtgggaattgtggctttgaagacctctggacatgagaacatatttccaagacagaggattctatggggacgggtcaccattaaatggtgtgcaagcataattctgttcaaaaatgaaggcatgtttagaggtgtgtcacagttaaaaaccaacctgaactttgcagttagattttaaaagatggtcagttagagtagaaatagcttagaatattccattgagtctaagatacagttagaaatcaacatctttgaaattagggtgtgtcttttaatcagttgatgtcagagtttaacgggcagcatttttttctttcttgggattacaaaaaatgatggtgcattctataattggcagcatcttagatctgaggaagtatgatacttgtttgacggaatggttgacggcagaattttgttaaaaagctatatcttcactgtattttaacacattatctaatttaagaaattgttaagatcccccacctggcagaggacccagtacaaaataggcactcaatagatgttacaccaactttggaagggcaaacatatttcttaatgagaggcagtccttcatgttttgcaataaaatgactttt

SEQ ID NO: 260628 - DNA, 5113 bp, Homo sapiens
  misc_feature (59)..(59): n is a, c, g, or t
ccggcacccggagctcctgggcacacgcattggcaggggccgcttcggcagagtgatgnctgatgatgagtccgagagcgtcctctccgactcccatgaagggtcggagctggagctgcctgttatccagctgtgcgggctggtggaggagctcagtttcgaggcaggcgtagatccaaatcccggacaggtatggaccgtggggtaggcctgactgccgaccaaaaacttgagctggtacaaaaagaggttgcggacatgaaggatgacttacgacacacaagggcaaatgcggaacgcgacctgcagcatcacgaggcgatcattgaggaggctgaaattcgatggagtgaagtttcgagagaagtgcatgagtttgaaaaagatattctaaaagccatatccaagaagaaagggagtattttggccactcagaaagtgatgaaatacattgaggacatgaaccgccggagggataatatgaaggagaattacgtttgaaaaatgtttctctcaaagttcagaggaaaaaaatgcttttacaattgaggcagaaggaagaggtgagtgaggcccttcacgatgttgattttcagcagttgaagatagagaacgctcaatttcttgagacaattgacgcaaggaatcaagaattgacccagctaaagctgtcatctggaaacactctgcaggttctcaatgcctacaaaagcaagcttcacaaggcaatggaaatatacctcaatctggacaaggagatcttgctgagaaaagagctacttgaaaaaattgaaaaagaaacactacaagtagaggaggaccgggccaaagccgaggcagtgaataagaggctccggaagcagctggccgagttccgggcaccacaggtgatgacttacgtccgggagaagatcttaaatgcggacctggagaagagcatcaggatgtgggaaaggaaagtggagatagcagagatgtccttaaaaggccatcgtaaggcttggaatcgaatgaaaataaccaatgagcagttgcaggcagattaccttgctgggaagtagccagaggcaggccacggcttacagaccactacatgacctataaaagtaatcagctcctttctagtcacgggctcctctcactgttccctgtctgcctggtgttcccaaccccccacccaggctgagtatcatctcctgggccacatctgcccatggggagtgttttcacagcctggcccctggaactgttaccactgaaagaaccacagggcactctaatggtttgacacttgttagccagcatttagttcacaagcatagtgaaagtgaccttcccacacctgggagagggatagaggagggagagccagcccagtgtatgccatgggcttatccgtggcagccccagtgtgcaactatcaaaaacagacatcaaaacagcatggtgaatgcctggcactcagcattctcagtttactcttcagtttggtggggtagctcctggactagatactgctgcaaaagaaaacaagcacgaaggaaaccaagatgatttcttcgggctgatacaacctgttctgacctgcaaaaatcctaccttcccccacctccccaccgtaatagtcatagtataagggttgtacagacgcctcaggagacctgcctgattcctttacatccttctccctaacatctagactatctctagagctgtttcctagtcgtgaatgcgtgatggtccttctttgtccctgcaagtatgatccaacatggcccagttcagaatcagaatatgtcttctgtgtcatggtggcatttggtccatggtgggagaaagaaatcaacttttcccagtggtggagtgaggacaggggagggccggccctctcagccttggatgtgatccatttgctgtagtcttccaccttggtgtacagaaacaggccagggcacgtctcaccaccgaagttcaggactcctctcagaacccacagatcgaactgctgtagctggcacatcattgggcttcctgggtccccctgtgataaaagacagaaggcttcaagtcttagaaaaactagtttttgttgtaaatctatccttgtgcaatatactgtttgttctagaaatgttttacgctggttctcactggaaatggggcaaattataggatacaatttcaaatctaggcagccaccaccacaaattccaacaagatgacttttccttttattatgcaaattagctgtggacttctgctgattgcctatagcttcctggttcatatttcattttcttgcccctttccagtcctttggccaaaccttccctctcttctggcttctcattcctgaaatgttggtgtttgtttctgttttgtcctgaaatgctcacattttcccttctctgccttgcttcaacccttagtgtaagccacttcctgccacctggcaactgcttaccagcctggctggccgtgctctgggtcttccctactcccaatggagcagtcctctgggacttgggaattctgccacatacactttatctaacttaaagtgacggagtagaagcttggcatcattagctagatatgggaccctggcaagtgaccaaatcctctctgagccaaggtgggaacacagttaatgcctgtaacacgtgctgagcacagcacagtgcctggcacacagcaaacactcaatagaatattagctaccatcatcctgatgtcgctataaaggccagcatttttctgaaaagttggggaaaatgggaaaagcaacaaggcaactagtaggtatcacttaccttacctgcccagaccccacacccctaggtctcctctcaaaggaattcctgcccctcccatggcccatcttggtccgagaagggggtggtcatccccaggctagccagccacttctgacctgtgtggcctgcctggctggaaggcccaggcaatgacatgttgctctcgcagtttggactgagacatggaatggggccgcaattaacaacaggaaacaatctgaacagactgaaccacgagcagcagaaaggcagaagagcagccgcttcagccccttaccatccgagacctgggtgtgtggtctgtcttggtcactctctctgtctctctttctctctttctttctctgtccccaaggctggagtgcagtggtgcaatcttggctcactgcaacctccacctctgggattcaagcaattctcccacctcagcctctcgagtagctggggctacagctatgcgccaccatgcccagctaattttttttttttttttttgagatggagtcttgctctgtcccccatgctggagtgcagtggcatgatctcggctcgctgcaacctcctcctcctgggttcaagcgattctcctacctcagcctccccagtagctgggattacaggcgcccaccaccacacctggctaatttttatttttagtagagatggggtttcaccatgttggccaggctggtctcgaactcctgacctcatgatccacccgcctcggcctccccaagtgttgggattacaggcgtgagccactgcacccggcctaatttctgtatttttagtagagatggggtttcacgatgttggccaggctggtcttaatctaacttcaagtgatctgcccgcctcgccctctcaaagtgctgggattaggcatgaactaccatgcccagtggggtattctctttcaataaagctcctcttttccaaggaagccacaccagaacagagatgaagaccagtgggaaaacatgggagcaactccgtgggcaggccagcggggaggccatgctgcaaagctgccgtgattccctggtgatctctcagcaggccaaggccagacatgtgaggaaggccttgaggacttcattctgtgcctctccttggatggaagggggtgctttagtgtggcactcctgacttttcaattgactggtgaagaggcccttgtgtgcacctcactatgtctgcctaggtcatgggggctccctggccaagaatgacgtggttccccctttcatcagtccgattcgcagtttgtcttaactgtagtggtatagccagagcaagaaaaagaatgtgatttaggacaaatgattggatgagtgattggtagatgtcctcagctatggcgtggttttgcaggtcactgttccacccacctgggcacagcatatacgctttttctcttccccataatcccgtaggggctgcgacttctgaagcacaagaggcagaggcgaacagctccaggtgcccctctggagctaccctacctcatctcccaagggagcggccacagcccagagtggggtctttcattttgtgatcttttcccttgacattcagcaaaagccctgacagtggtagaataaaggcaggatgggtgagtgcagagtgattctgcttttgttgggtttcagggaaacccataggcagattctgaacctggtggttgattctacatgtgggaattgtggctttgaagacctctggacatgagaacatatttccaagacagaggattctatggggacgggtcaccattaaatggtgtgcaagcataattctgttcaaaaatgaaggcatgtttagaggtgtgtcacagttaaaaaccaacctgaactttgcagttagattttaaaagatggtcagttagagtagaaatagcttagaatattccattgagtctaagatacagttagaaatcaacatctttgaaattagggtgtgtcttttaatcagttgatgtcagagtttaacgggcagcatttttttctttcttgggattacaaaaaatgatggtgcattctataattggcagcatcttagatctgaggaagtatgatacttgtttgacggaatggttgacggcagaattttgttaaaaagctatatcttcactgtattttaacacattatctaatttaagaaattgttaagatcccccacctggcagaggacccagtacaaaataggcactcaatagatgttacaccaactttggaagggcaaacatatttcttaatgagaggcagtccttcatgttttgcaataaaatgactttt

SEQ ID NO: 260629 - DNA, 491 bp, Homo sapiens
gaattcctgaagttcataaagatgagactacttgaagaagaatttgattcctctctaaaaagattaatagaacttacgagcttaggaacttagaagttcagcaggactgttttatctgcagctgtctttggtcatagtcaatataaaactccacatgcttcacaaatgcgtttactcatctgtttatgtgacactaacactccgtggaagagattgttacaggagatagagttattgagtcaaccccagacactaatcaggaactgactccactttacatggagatatcatcaacagaacatttgaaagtgtaggtattcagggagcactgaaggaaatacaataacattagagttggaagtaaaccatgcagggagaaaaagaccattttttctctttcaaggatgaacaactaaaactggtcgaggaaagtgtgtcagagggctcctccatcttgagagaataggaggaggggatatctgccaagaatg

SEQ ID NO: 260630 - DNA, 641 bp, Homo sapiens
gaggaattggacattatatattaaggacacaagaggtatgagaattcctcagctacagtcggcagcaaatgtgttcgacaagctgaaaggtttagcactaagtacaaggcaagagagatagaagataaggaaggaaagctaaggaaataaatttttcttacaaaactcctctaaagtattctttttataacaggtcttgccagaacttagataagccagaatgactacgttattcttccagaaaactgtttatgaatcagtctgctattttctacccaaaaaaaaaaaaaaagtgctgctcacttaatttgttaaaggacaaagtagttgaatcatcttacttgctgaatctacaggaaaaatactgtcacttctttattgttgtcattttccagtgtttattatgtcataaaatgttaggctttgaagtcccaatctgactgtttagagcagggatctcctgccaactgcattatgtcatcaaatgagcaaacataataaacataattaacatagcaagcatttttcaagtcactggaatttaaaagttgtttgttatagctactggtgttacttaccctgacttatgcacaaaggaaaatagtttcatttcaaataggtagttttttcccaaatagcta

SEQ ID NO: 260631 - DNA, 306 bp, Homo sapiens
atgagaaacaaagtgaccactgatgtagtaattattttcatcaagaaagagggattgcaaggcaagaaagaggggaaggaagaagttatttatgtaattttggggtttctgctgaggaaacctgagtgaactcacttcagatgcatttagaatgtttgcataccagaagatttgatttctgactgctccgatgactactggaatcaggaaggagtgctagagttgggataaaccacagtgcctcattcctgtttattagtatcaggcatcagacatatatttttttttagttattcaaatgagtta

SEQ ID NO: 260632 - DNA, 242 bp, Homo sapiens
ccacaatcaggttttagaacatttccatcaccctaaaaagttaccacatgctcactggcaatgaatccctctcccaaccttagccccaggagagcattgatctgctttctttcactatagatttttcttttctagaaattttataaaaataggtagatatatacatcatacaatatgtatttggcttcttttccttagcataattcttctgaggctcatccatactgttgcaagtttcagta

SEQ ID NO: 260633 - DNA, 507 bp, Homo sapiens
atagttcttttaagtcaaaagtagctaaacacttgaaactagaacacttatttctctagaaatcaggaaaatgttattaaaaggagggaaggaaagaattcaattcctatcgtctcctggaaaacacagaattggaagattcataattatcattataattaatataacaacaactaagatttcttgaggttttactaagttctaagcatcagtacaagcacttaacagatattaactcatttgaccctttccacaccacagaagctatctaggctggaagagaataaagaatgatacttcctccagcaaagagctatgatttttaaggacctgtccagttgaaggagtgataagacaagatatagctggtgcagaagggctggatgatgctctacataggtttcactgtgcaacttgagttgccatcacgtatataaatttatgtaaattgggtaatccatctgctttaataaaatgtgtatgcaaccacagggtgtagaaatttca

SEQ ID NO: 260634 - DNA, 501 bp, Homo sapiens
aggtcccaccagcaggctcaataccccagtcaacagttgagattttagatgctaagtatgaaaacacctccaaattcactcgccacttaataccttacaatgactgcattacagtcgtactagccaattgatttgattctgataacagggctcctacttccatgccaagtgtcccactctaaatactttctaaatctctagttcctacaacagtcatttatccttgctaccatgagattgttattccttgcatcttaccctactttttctcacgtaagtgacctaatgctttcctatcctaaaatgctgaaatagaataatgctacataatccaagctgagatctttgatgttacatgaatcaccttttctccagatattgaataaattactgatcccagtggaatttttaaatttcatctcatttctatttataatcatggaatgtaaccaaggctgaatcttttagttaataaaataattcagcagaaataactataga

SEQ ID NO: 260635 - DNA, 412 bp, Homo sapiens
ctttactttctgttggtattggtaaagtattctttctggctgaagcatctctgaaatatcagaggaaaaatgggaggtgggatccagagggattggaattttagacatctttcaattatttttgtcatttgtgataagtacctaatgaattttgaacctagtaatgcccttatgtgctaactattttggtacctgaggaactggagtgtttctgttccttaccttgtttagtggtctaggaaagaggtctgaagattcaaactctagtctagtttaagtttgtgtttgatagtttacaaatcaaggtgcttaaattcacactttatttactgctatatgcagctcttttttaaagccttttgtgatattttttggtattttgattgtttaaagccctcaggtagcctaatta

SEQ ID NO: 260636 - DNA, 553 bp, Homo sapiens
agctggatattttctagtttctctgttgcatctgcatttagatagattttcttgtttctggtctgtcatgacagtttcattcctttttacagtgttctattaaaccaaaccataccccagcccagtgtactcattagaaaaaagtaaacatttgcatattccctagaaccctaaaactgataacaagaacctaccctccattctggcttttggatccaattttctgttatgtatgatgtctaaaccgaggtggtcaattgttcatcccagccaggcataggatcagacagctgagttccctaggattagactgctagtgcttagccatgactactatggctggttttgttaacctgtaagtatagtttttacttgactaaaacatgctgtaatttatttaccctaccttgagatttttttcttctgtaattctcagcccagaactattatttcaaactaaacttgtatttcacatttttaattagtgaagaggctcaacgaaatgcaattttcaaatagtcacccaatagtataaagcttttgtggaatatca

SEQ ID NO: 260637 - DNA, 620 bp, Homo sapiens
ctggtcttgaactcctgacctcaggtgatccatccacctaggcctcccaaagtgctgggattacaggcataagccaccatgcctggcccatccaggttattctgatgtatgtggtcagttaactgtgacttaagggactgatctagtgacttgcttaaggttatagcctcaaagtggaacccaggattactggcttcaactccactggcagtaatactagcatggtgaatgtagacaatatgatgtggtgatcaccattttaagagagcattcatagaggaaactttatctcaaaggaatgcattgctttcaatagagtttgagataatggtaagtgataggttggtgtgtggtatctgggtaggagaagcttctcatcctgaaaatcatatgtaggtaatgctcaggttgctgaggcaggaagctagcccttaatttggggtcctgtaggtcacagagaatcccctggaattgccgactttgacttaagtgtcacttctagctacaaagggtatctcaactggcgagcaagtggccccattggctaaagccaaggagaccacatctggaaacttaaatcactctggtagcttccagaaagagctacctcaggaaagctc

SEQ ID NO: 260638 - DNA, 505 bp, Homo sapiens
taagctttttaattttcccccagtaacagtgagcagattgctgaaatctctgaagcaggaatgtaacaagagttttgagggctctaaattctctgctgtttcaccctaaggaatggtttggcagcatcctctatgctaggcacagaacaactcaggaggaattgtacaaagaccttatgaaccacatttgaagctagtctgttcagttcccattcaaaataaatacacaactgtaattgaatttatggtgatttggtctgtatgctaaaattaaaaatcgcttttgggggattttcacataggggtatatttataattttctgtgtgctttgcagttaaaaatacatagtgaaagttttatttttgtagttcctctgttgtacagaggaaatttaaattcttaaaattagaattttctaattttaagcactttcatttttcctttagaaggtactttggagcacataaaagaaaatgccattagaaattgaacatagaaaatgtt

SEQ ID NO: 260639 - DNA, 1365 bp, Homo sapiens
  misc_feature (308)..(308): n is a, c, g, or t
  misc_feature (684)..(684): n is a, c, g, or t
  misc_feature (1150)..(1150): n is a, c, g, or t
  misc_feature (1291)..(1291): n is a, c, g, or t
gctccagacagctcagaacagagagactccatttgtttgagagaacataatggaaaagaacaagagtctgcctggtaatccagagaattcctgtgaatcttatccaagactaccaaggcagtacctctgtgaggctgcaagaagcacatcactattgggcttggggtgccccctaatgcagatatgacttagaccacaacactcaagtcattttgaaaacctggaaagcctttccaagaaggatgggtacaaacaagcccagatagagaagactacaataaatacctaactcttcaatacccagacanaaacaaacataagcatccagaccatccaagaaaacatgaactcaacaaatgaactaaataagacaccaggaacctatttgaagaaacagagatatgtgacctttccaagaattcaaaagtgctgtgttgaagaaacttaaagaaattcaagataacacaaagaagaaaatcagaattctatcagataaatttaacaaagaggttgaaataattgaaaagaaccaagcagaaattctagagttggaaaacgcaattaacatactaaaaaatacatcagagttttttaatagcagaattgatcaagcagcagaaataagtaatgaggctgaagacagaccatttgaaaatacacagtcagaggaaacaaaaagaaaangaataaaaaagaatgaagcacacctatgagatctagaaaaatagccccaaaagggcaaatctaaaatttattaaccctaaagaggagatagagaaagagacaggggtagaaagtttagtaaaagggataataacacaaaacatcccaaacctagagaaagataccaatatccaaatacaagaaagttatagaataccaagcagtttaacccaaagaagactacatcaaggcatttaataatcaaactttcaaacatcaaggataaacaaaggatcctaaaagtagtgagagaaaataaatgacatacatctggcaacatagtccttcccattcttccctccccttctgaggcagaggagtctcatcccatggccatcatcccacagagctatggagagtattgccaagccaccactggagcacccaggtatgtatgtgtgtatatatagacaaaaactgtaagagncaaagaagctgactatataatgacaaagggattgatacatcagaaaggtataacaattttacatatatgtgcacccaacactggagcactcagatatataaagcaaatattattagagctaaagagagagatgcaacctanaaggactgaaccatgagccattctaaactcatcctatgatgccagtattaccctgctaccaaaaccggacaatc

SEQ ID NO: 260640 - DNA, 532 bp, Homo sapiens
atgttggctaggatggtctcaatttcttgaccttgtgatccccccgcctcagcctcccaaagtgctgggattacaggcgtgagccaccacacccagccaagaagaaacttcttaatagaggaagggaggcatagggggcagagaggctaaaaaaagttttgtttgttttttttaatttttttacgcttttttttttttgtcttttgttttgtttttttttcctttttctggagaacggggtctcgctatattgcccaggcaggtctcgaactcctgggctcaagctatcctcccgcctcttagcctccctgagagctgggattacaggtgtgagccaccgcgcccggcctaatttttttaaataaaagttctatgtgcttaatatagaaaacttgccaaaaagtccctcaagttcctattctccaaagccagtcactgttgaaattttgccatagttccttacatgtacgcttctttttttttgatacagggtttcactccagcctgggcgacagagcaagagtccgtctca

SEQ ID NO: 260641 - DNA, 1040 bp, Homo sapiens
tcctgcccttcatatttctcaaaggtagacttaataaaggtagaagagacatttctaatttttctatatatctcttgctccctaatttctaaaaggcataactaaaatgctttattcgagccactcccttgcatctgaaccctacctaccaagtaggttaagagtaggttaggtaaggtctgtagctacttctttctttcagttacaaattgtaggtgggaaagaaggatgcggaaggaaacttgcaaggaaagcaaacagaaagaaaaagaagtaaaaaaggagagaagggaatttggtgggtggtccaaccatcaaaatgtggtactaatgccataggtatctacaccacttatgtaagttggaatgttgatgcattccaacgcatgtttttatctttgtactgaaagcccttaagaatacccgaagtaaacatataaaaagtattttaagttcaagttattctttatttcttatgttacgtaaggtactgaagttagccaaggttgctttttagtgttataatgatgcagttcaaagtcataacctgaataagatgttaagtactatagagtgtacaccctaaagataccttaaaaattatgtcctaaataatcagaaattttaataatcatggacatgtatcaacataaaccaaagccaaataaatcagggcttctaaagaaaacgttaaaaaggtgtaatgttcagttataggacatgatactggaggcagggaagacttgaaatctcatttattttcttataatgaagacaccagaagacgttaaaaaaaaaaaaaagatcacgatttccaaacaatgattttcatagtcgacattattttcagttctttatcttgatttagggagcctggaaatttaggacttcgtttcttattaatactaatagtctaaaggtgtttaccagtacaaataagttattgtatgtaatttgctcttctcaaaaaatagagttttctgtatcaataaaaatctgaaatgggggccacaattctgtggctaataatgcctatatat

SEQ ID NO: 260642 - DNA, 220 bp, Homo sapiens
gcttttcacaaaaacatgattctttaatacacatctaataatgcacaatcaatcaatatacacataagaaagcttttcaaattttagcatcccacatggtctctgctgtgagagacaataacgcacttgtaaaatggatgacataaagccctatgcatatttcaaatgagacaagaagatatttatatagttgatgatgtttgctattgtaataatggca

SEQ ID NO: 260643 - DNA, 361 bp, Homo sapiens
ggaaagtatgcaaagtccagtggtttctaaatttggctgatcatcagagtcagcttatgagctcttaaaaacaaaaataggctgggtgcagtggctcatgcttgtaatcccagcattctgggaggctgaggtgggcggattgcttgagctgagaagttcaagaccaggctgggcaacatggcaaaaccctgtcccaacaggaaatacaaaaattagttagtcatggtggtgtgcacctgtagtcccagctacttgggaggctgaggtgggaggattgcttgagctcagggacgtagaggctgcggtgagctttgattgagccactgcactccagcctgggtgacacagcgagaccctgtct

SEQ ID NO: 260644 - DNA, 316 bp, Homo sapiens
tttgggtgtgatggcaggaactaatttcttgtgttttggccagttagctctctgcacacttgcagagtaacaggttctttttcttttgtggcatttaatttgagtaagaccttatatttttagaaattcccagttagctggtaatctctcaaatgaagtggttttttacttgatgagggcatgaagacttttaaaaatcagaagcctcttataaataaatatcttctaggatttttgctaaccacttaatttgtattaactttttttttttctttctgagacggagcctgggcaacaggagcaagactccatctcg

SEQ ID NO: 260645 - DNA, 791 bp, Homo sapiens
cttggccggtagggacggtgctgactatggcgacggcgtcggggagtaaaggcggtggcagaggcagagcggtgaccgcgcctctgcggagggccagtgacggcgcccgcgggtgtgtgtgaggatgggactttgagcctgttggaccgcggcatgtgcgcccggaaactgccccttctcgggggtcgatgatgggcagcaagatggcgtctgctagtagggtcgttcaggtagtcaaaccacacactccattaataaggtttcctgacagaagagacaatcctaaacccaatgtatcagaagctttgagatcagcagggctaccatctcactcttctgtaatttcacaacattctaaaggaagtaaatcaccagatttgctgatgtatcagggtccaccagacactgcagaaataataaaaacattacctcagaaatacagaaggaaacttgtgtctcaagaagaaatggaatttatccaacgtggaggtcctgaataaccatggtggctgctgtttgtcatcagacaatagaattgtctttacaataaaggacttccaaaatgacagatgagaaactgtatattaaacacctttaataaatattatgaaaaaaatgaaatatagaaaatttaaaaaaaaaaaaatttagatggacacttgtatttcctaatttatgtatcttggtcagcttctccacaagcttacctaattgtttatatactttatacttattaaagtatacatttttaaatgttactattaataatatcaacattaccagtgtgacgc

SEQ ID NO: 260646 - DNA, 1961 bp, Homo sapiens
ttgttacttgcagctgaagatggaaagagccaggcgaaggggaggcggcggcggccgcggccgcggaggcaagaatgtagggggctctggcctaagcaagagtagactctatccccaggcccagcactcccactacccccactacgcggcctcagccacccctaatcaggccgggggcgcagccgaaatccaggagctggcctccaaacgagtggacatccagaaaaagaggttttacctagacgtgaagcaaagctcccggggccgcttcctaaagatagccgaagtctggatagggagaggccggcaggacaacatcagaaagagtaaactgaccctctccctgtctgtggcagcggagctgaaggactgtctaggggacttcatcgagcactatgcccacctgggcctgaaaggccaccggcaagagcatggccacagcaaagagcaaggctccagaaggaggcagaagcactcggcaccctccccaccagtctcggtggggtccgaagagcatcctcacagtgtcctgaaaacagactatatcgagagggacaataggaaatattacctagacctaaaggaaaatcagcggggtcgcttcctacggattagacaaaccatgatgcgggggactggcatgataggttattttggccacagtttgggccaagaacagactattgtcctcccagcacaaggaatgattgagtttcgtgatgccttggttcagctgattgaagactatggcgaaggagacatagaagaacgaagaggtggagacgatgacccgcttgaactcccagaggggacttctttcagagtggacaataaaaggttctactttgatgtgggctctaataaatatggaattttcctgaaggtaagtgaggtgagaccaccttaccgtaatactattactgttccattcaaagcttggacaaggtttggggagaattttatcaagtatgaagaagagatgaggaaaatttgcaacagccataaagaaaagagaatggatggcagaaaggccagtggtgaagaacaagaatgcctcgactagagtgaaattgaactccatcaggcaaaatttaaaatcacaaattggctaaaagtactgatccattatcctttgaagaagtttttcctcttttttggcccgttgttattagtaatacctctagtagtggatacttcaggaagtctgattctcatgttatgttacacatagatcactataattcttacgggaattccaaccttcccagagctaaatagtttagctgcttcaactgctccagactattgaagtatgcaaatcagcacaaaatgtgacattctgacattctaaataccataactaagatttacattgcactatgacataatcccgaaaaaagatacatatacttaaatagaagtgtgactttcccccaaaagtatttcaattctacttcattaaaagctgctaagcttacctgtagggcagttaccacagaaacagaaattgacctccggtatagataaatatttacttataaaagtacaagtagacgtatattgtccgttgaataactgaatataccatcaaaggatcaaatcttattacctaattaaaccttaaaaatataatgtcataatatttcttaagaatactatagtattctataatttcaaactttgtggtaaccctacattttatagttgccatatcaaagccatgggagagttttaattcgttattctaagtttagttacaatcccttctttacctctacttaatgttccatatatttttattgactttccaaagtttcaggaattacttttatgtcacattgagtggtaggcttcatccaattgctttgctatggaaatcttggtggtgtagcttttcatgctaatttaaagattgcaagaggtttcttccccaaaatatatcatggactcaaggtgttata

SEQ ID NO: 260647 - DNA, 297 bp, Homo sapiens
ggttcttggtaagtttaggaactgtagttttaatggtatgtggcagcagaagccctactgaaatgagttgagaagatagtgtgataaggaaatcaaaacagcaaatggagacaattcttcttaaacgtttgcctgtggaaaaactgaaagcgtttcctcttagatctggaacacaacaaggttgtgcacttttaccactcttatttgttatagtactggaagtcctagctagagcagtcagacaagagaaggaaataaagggcatccaaattagaaaggaagaagccaacttattct

SEQ ID NO: 260648 - DNA, 397 bp, Homo sapiens
agaaaagaggtttatttggctcacagttctgcaggctgtacaaacatggaactggcatctgctcagcttctggtgaggcctcaggaagctttcactcatggcagaaggtgaagtgggagtaggtgtgtcacatgcaagagagagaacgagagagaggggagggaagtctttaacaactaagtccagagtgaactaatagagtgagaaatcactccttactgtagggagggtaccaaacaattcataaaagatctgcccccatgacccaaaagcctcccactaagccccacctccaacaccagggatcaaatttcaacatgaggtttggaggagacaaaccatatccaagccatagcacctcagtttcttcatttgtaaaattcagataatagagaat

SEQ ID NO: 260649 - DNA, 643 bp, Homo sapiens
atttcagcaaacaaacttagttgttatcagtttaatataacctgttagaactataagattttttgtaagtctaattgtaaccacaaaacagaaacttgtaatagatgcactaaaaataaaaagcaaggaatgaaaacatactactacagaaaatcatacaaccatgaaggaagatagtaaaagtggagaaaaggaggaatgaatctacaagcaaatagaaaacaatgaacaaaagagcagtaatatgtctttacttattaataattaccctgaatgtaaatggactaaatccttcaagtaaaatacatggagtgtctggatggataagaaaacaagaattagttatatgctgcctacaatagacccattttccctataaggacacacatacactgaaagtaaaaggattgaaaatgatattccatgcaagtggaaattgaggaatatctatatccatatcagataaaatagactttaaagcaaaacccataaaaagagacaaaaaatacattatataataataaaggggtcaatacaactaaaggatataatagttgtaaatatatttatgcactcaacattggagcaccaaaatgtataaagcaaatattggtaaacctaaagggagaaatagactgcaata

SEQ ID NO: 260650 - DNA, 841 bp, Homo sapiens
caggtacctaagaactgttaccctgctccaatggaaggtgcttttccttggtgcctaagagcacctttttggcattgaaaccaaacacctttacaccacaaaagagagaaggaggaatagaatacagctgtcacttaccaatgtgtctaagtcttattgctatctcagttaatctgctttgaacacttaaaaaacaaagtgccattctccaagtttcagcttgcactaagtcttaaccagaaggaaaataccttaatttcatttatcttaattcaagatgtgtttgttcatttcttattgtattattaaaaaaatccttctagttaaaaagatgagtgggtatcaaaaatatcagcatttttgtataattaaatttttgtgctggtttttgtacaatcaaaaaccagtattttggggccgggcgcggtggctcacgcctgtaatcccagcactttgggaggccgaggctggcagatcacctgaggtcatgagttcaagaccagcctgcccaacgtggtgaaaccctgtctctactaaaaatacaaagattagctgggcgtggtggcgggcgcctgtagtcccagctactcgggaggctgaggcaggagaattgctagaacccaggaggcagaggttgcagtgagccgagatcgcgccactactccagcctgggcaacaagcgaaactgcatctcaaaaaaaaaaaaaaaaaaaaaaaaccaccagtatttttgtacaattaaaacaaaaagcccactttcagatgaaaacttcaggtgtaaaagtacaagataacgatgaattctgaaggccagcataattcacacactggacttcttaag

SEQ ID NO: 260651 - DNA, 321 bp, Homo sapiens
tttttttttacagctttacagtatctggcatgccctggtgaatgagctattgcctggggtttctgggttttatttttttgagatacagttttgctcttgttgcccaggcagaggttgcagtgagccgagatcgcgccactactccagcctgggcaacaagcgaaactgcatctcaaaaaaaaaaaaaaaaaaaaaaaaccaccagtatttttgtacaattaaaacaaaaagcccactttcagatgaaaacttcaggtgtaaaagtacaagataacgatgaattctgaaggccagcataattcacacactggacttcttaag

SEQ ID NO: 260652 - DNA, 450 bp, Homo sapiens
gtgacaggaaagctttgctcaacttcttatccccctttcactttcagaatcattaatcgtctgtgtgaaaaaactaatctcagtgccagactcaaatctttgctttccctccttatttgaaactttgccctgcaaattctcactgctttggtagctgtctgttgccttcaaactgatttttaaaaaatattttgtttagcctttccgtttgtttcagtatgaaaattggttcaaaacaacctagtcacatcttgtcagaaacagaactgctcaccatttttaatccattaatttgtcttgttttattatatatttgatatgtacaaaggaatatatgtaacatttgtataacatgtttcataatacaatgaacacctatgaactcttagttccttagagttcttagagttttattactcttcaatcctttctacttcctccttgtcccta

SEQ ID NO: 260653 - DNA, 127 bp, Homo sapiens
ataaaaattccaggcctataccccagaggaaatcttatcagcaggtaaaagaatttctcaggctctataaccctggcagagtaggtaaacaagtcagaaacaagatatcctggaaatacatgattta

SEQ ID NO: 260654 - DNA, 375 bp, Homo sapiens
aaatgcctggtatagtttgggcactctatgttttgaaaactatggatatacaaagacggcagcaaccctgtgggtataatcttggtgatgtgggtgtggaggagtgaggctggactggttcctggcagcagggaggaaaagccagtttgggacaggggtgcctgaaactcactgtgcagtttccttgggcaggcccaccccaaacctggcttcagcccaagcctgcctgatgggggcccttcccaggatccccacccacagtcaggacaggtcctggcccgtacctcactcctctgcctgcggctggggtttgcttaagcctcttacattccggagggattgataggattccagaagccacacccaccacccact

SEQ ID NO: 260655 - DNA, 428 bp, Homo sapiens
aaggaagagatcatataactacaaacccaagataatcaactaaaaaactactatagacaatacaaattcactaagatagcaggatgtaaaagtaatgtactgaaattaatagctttcatgtaaacacagtcaattagaaagcatagtagaggaaagggggcaatttaccataacaagaaaatgattaagtaccaaggagtacatttaacaaaattgtgcaaaacctatacaaggaaaacttaaagatactcctgaaggaggaaaagaacaagttgatcaaacgaaaaagacacaccaagtactgcaaatcagtattataaagctgttctctctttatatttaatgtacctgaatatgtatacaatgtttccttgacttagacaagtccaaatggaaaaaggaagaagcaggcataaccaggaaaactt

SEQ ID NO: 260656 - DNA, 703 bp, Homo sapiens
gctgaggtagcccatgcatatggcacaagacttactaaagaatagctgcaaaggactgaaggagaaaaagaagtgtgtgaacgaaaagtatgtgagacagatctcaatcaacttagaaagtttattttgccaaggttaaggacgtacccgagacacagccttaggaggtcctgacaacgtgtacccaagccggttgggcacagtttcatttcatacattttaaggagacatgagacatcactcaatacgtgtaagatgtacattaattcagtctgggaaggtgggacaactcaaagcagggagggtgcttccaggtcataggtagataagagacacctggttgcatttttttgagtctctgattagcctttcactgaatacacaatttacatgtgagacaggggtaaaggaatacttacttctgccttagtctggttcagtgaatctgcatttttacatcaatagtagggcagaggaagcaatcagatacacatttgtctcaggtgagcagagggatgattttgagttctgtcctttgtcctatacctgtgaagataaactcccaatttacattgccaggatgaaattcaacagaactgttttagggtaaagatcttgaggcccacaaggaattttgctgtgggcaaattgtgagggaagcatgtagcttttttatctttgtgttatagctaccttatttggg

SEQ ID NO: 260657 - DNA, 332 bp, Homo sapiens
cacatactcctagtgatggagggctctgggttttctgttcatcctcatcactctgtgcttattggctacctgtccatgtgtaaataacacatgtgccctgtgctcattggaaccgtgagtcatccgcagggattcctaagagggcccatgagaatggctttcactcctccagcctctgcccttctgacctcctccacaggcttcagccttatgggagtccccaagtcttggaagcatctctagtgagtgcagtgactccttagctggttccttttcaaccttcaacctccattttcttaacccttaccaactctactgcccagctgcaccca

SEQ ID NO: 260658 - DNA, 398 bp, Homo sapiens
aagaaagtttgtttgagatcctatgtgtagaatggacttgattcctcttgcactgaaaaatgccttaataaaaatgaatggttttgcccatactgtaactgtagtttaggtccatttgactaaagcttgagtccatcttcggacattttgaagaatttcttccttttaaagctgctatatttactgatatttccaccccctgggaatctgcttctcttgtttattagagctgctaaaatgaaagcttgccaactgattaattttaatagtttagccagaaacctgtggataatgtatattggctgccaagcttgagataaattctgttggctctgttgcaaagattttggcagaaatgtctgccctttgcgaagcacagaggaactggagggaatgcg

SEQ ID NO: 260659 - DNA, 427 bp, Homo sapiens
atataaatatattatctttatatacacatatctatgtatatatacacaaacatgcgcatatataggggcacatacctattttattaaaagactaaaggcagcaaagtggagctgtaaacatgaaggataaatcatttcatacctggaagagtgctgtctaaacactgcccatcacctaaccaagagtcatcatccctaactttttttcataattgactatttcagttaatagccctaggcttcaagaaaggctgcgcatcttggaagtattagggcatgagtcatgagtcttgattcttccaaataaaatatggtaactctttctagtgatttgtttaggaatgtatgtgtaagatgatgatgggaagtctactggaatctctgagagaagatttttcttgcaaaaaataaaaagacctaatgaaag

SEQ ID NO: 260660 - DNA, 416 bp, Homo sapiens
ccttaaactctcccctgtctctgcactccacagaggaacatttcccatcctcctgtccttccaatgtagttataatatatagtaacttttgttaggtatgttagtctttaccttatttttactatctgaatgctgcttatagctgtatcttatgataatgtatgattacttttcctttttatataatgttttgcttttcttgaaatcactagttgtcaggtattatcctagaactctgggatatgcagttttttatgtgtagctgtcatactgggattctttcaccatcattctgaagctggtttccccgtttctcttgagttagatctcctttttactccatctcttgttgtcctcttttaaaaaattcattatcttattttagtgaaatgtatagttaagcagcttcttaatat

SEQ ID NO: 260661 - DNA, 367 bp, Homo sapiens
catggcatcattcctgcaacatcttattggttatataggtaagtttatgcaatgtgggaagggactagacatgggagtgaatgaatgctaggaggtgggaattactgggtgccatcttggaaactggctaccacatctgtaattatagaatgttatgaactggactgtgataaattccaagtacagccatccttggagtctgtgggttattagttacatgaccccttttggagatcaaaatccaaagatgctcaagtctctgatataaaatggtgccctattgcatataacctatgcacatcctcctgtatactttaaatcatctctagattacttataacacctaataaaatgtaaaaattatgta

SEQ ID NO: 260662 - DNA, 301 bp, Homo sapiens
ggattggttagagggaacaagatcaaatacattagtttgtcaaataatcagcaattaaaatagaaaacatccactggtccatggaaaaacaaacaaggaaaagctacttttctcccaggggacacaagaaccaccaacatttaaaattacctggatccactttttaagggtgaaggtataaattatatgcaaagtgtcaacattggggagtcaacaagacccaagcgcaaggaacattaccagttgcaacagtctagatacttcttcggacctcagttttcagtctacaacatagtgatta

SEQ ID NO: 260663 - DNA, 434 bp, Homo sapiens
tactacagaacctctttacagatgagaaaataagctaaaagagactgagtaacttgcccaaggttattctttatcgtgcagggacaaggaatttgatacatagcctgcctgactcaaagtttgtgctcttaatatattcttctgtctctcttaatgattatttctgactcttgtcaagtttgttactttctctaacttaacatcattggcattttgggcaggagaattctttgtcgtgtggggctgttccatacctggtgggaagtctaatatacttggttccaagcctgacatgccattagcttccgccagccattgtgataatccagaatgcccctacatgtttctaaaacttcttactgctgggggattccatggttggggattttggaattgaatatggatgtggctgtctagctcacgtcaccatgata

SEQ ID NO: 260664 - DNA, 330 bp, Homo sapiens
ccagttactcgagaggctgagataggaggatccctggagcccaggaggtcgaggctgtagtgagctgtaattgtgccactgcactctagcctaggtgacagagtgagaccctgactcaaaagaaagaagaatactacataagttatgtcgtgtacctcttaccacatacattaggttgtcctgccattggggatactaagtttgaacatctgcttaatgtggagttggccaggtctctccactgacacatttgtaacctacagttaatcagcagggtgatattttgaatatttcttgttcttaaaagacaggctaaaataaagatatgag

SEQ ID NO: 260665 - DNA, 394 bp, Homo sapiens
atacctaataaatattggggtgtgtccttggctttgatctgtacatgctgcatattctctctgggcaatcttatccaaattcaaagcttcaaaaagccaactatattctggtgatgcccaaaagcacatatctgatcctgagttttaccaactccagactcttaattaaattgggcctatctttaaagataatgtggccaaatgtatagtcatactcgttttctcttttcaaagtctgcttttccccacataagtcctatcttgtctctatatgctcaatccagaaatcagggtcattcagattctgttagctcccacatcaaatcctcctatctttttttcctctaaatagcattcaaatgtctccttccttatatgctcattgcctcattat

SEQ ID NO: 260666 - DNA, 471 bp, Homo sapiens
ccagataattgtacgagagtgtagaggggcagaaatgcacaggatactctgggagcatcaagggaggattaaaaggactgggttattggtgtagagatttccaggaaggcttaccataggcactgatggcaggcaaagacaggtaattaacaaggtaaattggagaaaactggatactttaggcagaggaaatgcaatgggcaaaagcctgtggatgagaacctggtagagggacgatgtgttacaaatgctgatggtgttttattcaattcttgctttcccctgggagaaatgacttttgggtacagtgcatcaaggaagattcagaaggtaaaggtggtgagagatgtaggttaaaaagtcatcgtctgttttcttagtttgcctgatttcttagtttgcctgatttcttagtttgcctgctacacaaagtgaagcagaatgcagttgagtgatttatgtccatcataa

SEQ ID NO: 260667 - DNA, 465 bp, Homo sapiens
acccaacatagaaagcctcaaagcaggaagatactacacagacttccaaagaagcagtgagaggacaccatctgatgctggctgcaccaagaagcctgaatggctgtcagtgtcagagaggaaagaagaaagatgagagggaaagctaagaaaaggtgagaagaaagggtcaggaggagaaatgcaaagagactgggataattttttggaccataccttctctgctggcagcttactgtgactgcaccatccaaaatttggtataaggatttggaaatttgaccaatatttcttagaaggattttgcaccatcagatacattttgatattagaagataaagagattggcccgaaactgggatggaggagaagcagccaaagagttgttctgtttcttaagttactttgaaggttgtacacttttaatattcattttgaggaataaataatttagacatccaatta

SEQ ID NO: 260668 - DNA, 425 bp, Homo sapiens
agcataagcgttgcctagagcaatgggatctgacgccttttgacgccccttgcagtgaatgaccccagcttcctttagaggaaagaagaaagatgagagggaaagctaagaaaaggtgagaagaaagggtcaggaggagaaatgcaaagagactgggataattttttggaccataccttctctgctggcagcttactgtgactgcaccatccaaaatttggtataaggatttggaaatttgaccaatatttcttagaaggattttgcaccatcagatacattttgatattagaagataaagagattggcccgaaactgggatggaggagaagcagccaaagagttgttctgtttcttaagttactttgaaggttgtacacttttaatattcattttgaggaataaataatttagacatccaatta

SEQ ID NO: 260669 - DNA, 315 bp, Homo sapiens
tctcatttgcttcaatttgccgaaagatcaaatactctcctgagtccttcttttctctccacgaacttgccaagaattctgggatcaactctatttccataaaacaggaagagagaaaaggaaaattataaggccccttggggtcactggattttgcaccatcagatacattttgatattagaagataaagagattggcccgaaactgggatggaggagaagcagccaaagagttgttctgtttcttaagttactttgaaggttgtacacttttaatattcattttgaggaataaataatttagacatccaatta

SEQ ID NO: 260670 - DNA, 156 bp, Homo sapiens
aggagtctccttgaaatgacaatgggatttgtgcaacctgtgacattttgcactcaaggatccttttcccagtgccctatgggatgtgagcacctgttcacttacagtacatgtaagataagacacttttaataaaaactctggagacctggtgta

SEQ ID NO: 260671 - DNA, 512 bp, Homo sapiens
  misc_feature (498)..(499): n is a, c, g, or t
aatgtggtgtataaatataattgaatattcagcttttaaaaggaaaaacattctgacacatatacaacacgatgaccttgaggatgttatgctaagtgaaataagccagtcacaaaaagactaataatgtatgattccatttatatgtggtacctagactgcttagcagattaagggatcttcaggatttggagtataagacacacctcggccttccaaagtgctaggattataggggtgagccactgtgcccagtgctgctccttttttcttgcaacatgcggattaccatacctttcctcttttcacctttagcccactttttccctttaaatactgaagccctcagcatcatctctggagaaaaggcacagaccagactgtttctgggattccctatttagttcttccaggcatgtccttaaccttggcaaaattaacttctaaattgttttagacctgtgtcagataatttttggtgtacaaaatgtggtcacnntcccccaagattt

SEQ ID NO: 260672 - DNA, 467 bp, Homo sapiens
agtcaaccaaggtaagaaatttttactttgtcacatactcatcgcatgagatgttcctgcaggatatgaccattgtcatcttccataagcttatcaatccaattgattagttatagccctattagggcacataattgtgtctagtagtgttttcatagttactctagtaagtagtcatccagatttcttctgcaagttgtggaatttaacactgttttgttaatgattagtgaaagtattattttcatgtgagaaggataaaatattccaatttgaaaatgtatccaagtagaatttatagtaacattataactttctctttcttttgtcctattaggcagttaagttcaagtaaccacagggcttttgctcttaaagagatctggctcagaatgaataccaggttgaagaggctgagacagagcagacttgctgaaggatttgggggatatttaggaataatgtta

SEQ ID NO: 260673 - DNA, 498 bp, Homo sapiens
caaatacaaaagataaatgaagcaaaaagctggttctttgaaaagataaataaaactgacaaaccattagcaagattaactaagaaaagaagagagaaaatccaaataacctcactaagaaatgaaacagaagatattacaactgaaatacaaaagatcattcaaggctactatgaacacctttatgcacataaactagaaaatctagaagagatgggtaaattcccggaaaaataccgtagcttaaatcaggaagaattagataccctgaacagaccaataagcagtgagattaaagtggtaatttaaaaattatcaacaaaaaaaagtccaggaccagacagattcacagcagaattctaccagatattcaaagaagaattggtaccaatccttttgacactattccacaagatagagaaagaagaaacataccctaattcattctgtgaagccagcatcagcctaataccaaaaacaggaaaggacataaccaaa

SEQ ID NO: 260674 - DNA, 514 bp, Homo sapiens
tcagtggacaactggggactggaacatggggaagttgggtggttacaactgtaattaatagaccaatctgtggcccacatgagatccacctgaaagaattcttgcccagctctgtgccttcttcctaagatgtggcacccagaatggcaccaaacatgcctagtgaggtttggatcaagagtaagctggcttctctgctatgttttcagtagccttcctgaaaacacccagcatttgtttagcttctttagctttagcacgtgtttccaccagtgtcccttaacggagaggatgactatgtcactgaagaagtggaggggctgaaaatggactcagctcttggcccctgtagagactgcaagactccgtgcacaacgtgacagtcggggcttcctctgagcactgcgccgttcagccctattgcgcaacctgccacgccctgttactgtaaatggaacaccggctgtgagctggtcaaggccctgccatgacaaggccacttgcataggactcc

SEQ ID NO: 260675 - DNA, 200 bp, Homo sapiens
gtggactgatttaagaattgataattatacagtcttcacagaactcagaaaaatggtaaatttttacattcatattgggtgtttaccaccttgggaaatataacaaaaggaagaaatatctaatgtttttgattttctagtattgccgtaagaaaacaaaaataattctctacttgtccactatttctggtcccagactg

SEQ ID NO: 260676 - DNA, 433 bp, Homo sapiens
ctggagattctgatggttgtgtttctgaatctgaattttttaacaagcccctcagggtgattgtgatgcagctgtcagtggtatgggatccagtaccttagccatctgtgccccaatcgccttacatgtgaaagtgcgtaattaatacttgcctggctcctgtaccacacaggattcagagagcatgagatgagttgtatttcaaattatttcataaatttaaaagtaccgtaaaagactgggcacagtggctcacacctgtaatcccagcaaactttggggggctgaggcaggaagattgcttgaagtttgagagcagcctgggaacatagcaagacctcatctcttaaaaaaaaaatatatatatatatttatatttatatatttttgtatattttatatttatatatgtgtatatatatatattttttta

SEQ ID NO: 260677 - DNA, 426 bp, Homo sapiens
atcacttgagcccaggagttcaaaaccaacctggacaacatttctacaaaaaaatgtaaaaatttgccagtcacagtggcatgcctgtggtcccaattactagggtggctgaggtgggaggatcatctgaacctgggaggtggaggccgcagtgaggtctgatcacaccactacactccagccttggcaacaaagtgagacctcacctctcaaaaaacaaatcatgtatatggacttagttcctttaacgtgaaataatgccccatatgtgtacactccattgatttgtaggaaaaaattgatgcaaggatgagggatgcataaaggaagaatttctccagtatctctcaatctttttttctttttctttttctttttttttttttttttgagactgagtctcgctctgttgcccagtctggggtg

SEQ ID NO: 260678 - DNA, 381 bp, Homo sapiens
agagttcttgccattaccaactggtaagagcggctcactgcacccaaactgtttataggaaccatgtggtttgtgctgaacatctgctttcctgtggcacagtctgaaattttgatatatacctgttagaggcggcctgtgtgaccagcccccagtaaaatgctgaacattgagtttctaaggagcttccctagtagacatttcacacatgtcacaactccttgcctggggaattaaacatgttccatgcgaatccactgggcaaggacccttggaagcttgtgcctggtttctcccagcctttgccccacgcactttttccctttgttgatctcactctatatcctttcactgtaataaatcttaccaggagtaaaacta

SEQ ID NO: 260679 - DNA, 915 bp, Homo sapiens
tgggctttcatttgccttgttttattgaatacaatacacttccagaaaaatgcacaatcataagtgtacagctccgtgtacactctcttttacaaacagaactctcttagtttattttgtgctgctataacagaacacctgagactgggtcgtttacaaagaagagagatttacttttcacagttctggaggctgggaagtccaagatcaaggcatcagaatctgatgagaaccttcttgctgcatcctcacacagcggatggtggaagggggtgaacccacgcccacgagccctttttatagcgtcattaattcattcataagccttcatgacctaaacacctccagttaggtcccacctcccaacacggtggcattggggatgaagtttccaacacacacattttggagggacacattcaggatatagcaagaacacatcctctaaacaaagacatagaacatgaccacagtttccacaggccctttttctccctccagttactactcacatctacagcaagcacaatcctgatttgtaacagcaaagttcagttttgcttcttcttaaccctatataaatggaatcatacaatgtattctcatctttgacttcttttgctcaacgctgtaattctgagattcatacgtgttgctgcatacagtttgttaatcctcatttctgtacagtgttctattctatgaatataacacaacttatgaattcattaccctgttgatgggtgttggtatcatttccagttttcactgttatatgtagtactgttatgtacatatgttttgatgcatatatgtatgtgtatgtatgtttctatggggtttgtactttagagtggaatttctggtagattgggtttgtgtatgttcagctttaataaacattgtcaaataaca

SEQ ID NO: 260680 - DNA, 105 bp, Homo sapiens
  misc_feature (91)..(92): n is a, c, g, or t
  misc_feature (94)..(95): n is a, c, g, or t
  misc_feature (97)..(100): n is a, c, g, or t
  misc_feature (104)..(104): n is a, c, g, or t
cctcgccctggccctggctgggcggggaagctggggtgagggacgagtccacgggacacccaaaggcaacatgacggaaccttgccaaagnnanngnnnntgcnt

SEQ ID NO: 260681 - DNA, 673 bp, Homo sapiens
ctcaatgggaggcaccaataagagagcacaggaaaggaagagaaagagtttggggaatttattctctggttaccttccagctgagccatgggttggcagtgaccaccttctcaactgaaagctatggcttctgccaggaactcctctatcacaactgctgctgctatgtctgggttccagaaacccgagctccttcaaaccttggtgtggtaagagcgccactgttcctagctctgggttgcttcaactatctcataatgagttcccctaaaccttccacaactttgtaaacagacgctttgcttggactctcctctgttgactttgttggtgtgtttcatttccagacctattctgatgcaatatccatgagcagaacattcccacaatattccttatggtgaccaggaagtgccctgtccttaaatggctatcatgggaatgggaatactggaggtatagaaaaaaccaaggctatcaatgagagtgtaaagaaggtgaaaggagagaggcagatgaagattgttgagaccttcaggatcagtgttgggggtgttgggggtgcagaggaccatggcacaatgacctatgggtttggatttgaaatgccctccatttcccgcggttttaataggccacacttccttttttggcaagtttatagaagtcgggt

SEQ ID NO: 260682 - DNA, 621 bp, Homo sapiens
ctcaatgggaggcaccaataagagagcacaggaaaggaagagaaagagtttggggaatttattctctggttaccttccagctgagccatgggttggcagtgaccaccttctcaactgaaagctatggcttctgccaggaactcctctatcacaactgctgctgctatgtctgggttccagaaacccgagctccttcaaaccttggtgtggtaagagcgccactgttcctagctctgggttgcttcaactatctcataatgagttcccctaaaccttccacaactttgtaaacagacgctttgcttggactctcctctgttgactttgttggtgtgtttcatttccagacctattctgatgcaatatccatgagcagaacattcccacaatattccttatggtgaccaggaagtgccctgtccttaaatggctatcatgggaatgggaatactggaggtatagaaaaaaccaaggctatcaatgagagtgtaaagaaggtgaaaggagagaggcagatgaagattgttgagaccttcaggatcagtgttgggggtgttgggggtgcagaggaccatggcacaatgacctatgggtatagcattaggaattcaagccctccca

SEQ ID NO: 260683 - DNA, 382 bp, Homo sapiens
cactcctgttccctcagggactagaacgttccttcctcatcacagcttgcggtggatggagaggctcacccttcctgcagggtctcaaaaaaataaaaaaagaaaaaagaaaccacgcatgctgtcaccgaataagacaagcctactcgggaaatgtacacccagctctttgctttgaaatcttaccctggccaaggctgcggcgctgagagtgtgcagagtcagacggggaaaacggaggaaagaaagaacttctctccccagccactgcgcagacagcagtaaaggggcccacagaggcctaacaccccaatctgcagggtagcccgggtgcatttgccccatcccacctgccagctgcaacacccgccccatgcctcta

SEQ ID NO: 260684 - DNA, 253 bp, Homo sapiens
ctgtagagttgtgcttctcaaactgtaatatgcattagaatcgcctgcagggcatgttaaaacacagattcttgggctctaccccagagattttgattcttcaggtctgagaatgtgcatttctaacaagctctcaaaggatacagatgttactggtctgaggcagccaggtgctaagaatcaaatcctttcatgcgtcctaagattaagttaaattaagatcaaattgaacttaaaccaaaaaatagaaaaa

SEQ ID NO: 260685 - DNA, 2857 bp, Homo sapiens
gcgcttttaccggggcacgcggcgagcgtgaccacgccccttacgtccggacgctcggtcgcctcccggggcgcggtaatcaccgcccagagggaaggaggtcggcagtgtgaggagctgctatggtgctgagtttcctggtagagccggccgagctgaggcggtcgcggccatgaaggcgggtgccacgtctatgtgggcttcgtgctgtgggctgctgaatgaagtcatgggaactggagctgtcaggggccagcagtcagcatttgcaggagccaccggtccattcagatttacaccaaaccctgagttttccacctacccaccagcagctacggaagggcccaacatagtttgtaaagcctgtgggctttcattttcagtctttagaaagaagcatgtttgctgtgactgcaagaaggatttttgctccgtttgttcagtcttacaagaaaatctccgtagatgttctacttgtcacttattacaagagacagcatttcagcgccctcagttaatgcgactgaaggtgaaggacctgcggcagtatctcattctgagaaatatacccatagatacttgtcgtgagaaagaagacttggtggatctagtactgtgccatcatggactaggctctgaggacgacatggacacaagcagtctgaattcttcaaggtcccagacttctagcttttttacacgttcgtttttttcaaactatacagccccctctgctactatgtcttcgtttcagggagagcttatggatggagaccaaacatccagatctggagtgccggcacaggtacaaagtgaaatcacttcagcaaacacagaagatgatgatgacgacgatgatgaggatgatgatgatgaagaagaaaacgcagaggatcggaaccccgggctctccaaggagagagtgagagcttcactgtctgacttgtcaagccttgatgatgtggaaggaatgagcgtgcgccagctgaaggaaattctggctcggaattttgtcaactattctggctgttgtgaaaaatgggaactggtagagaaagtaaaccggttatacaaagagaatgaagaaaaccaaaagtcctatggcgagcggctgcagctgcaggatgaggaagacgacagcctgtgtcgcatctgcatggatgccgtcatcgactgtgtcctactggagtgtgggcacatggttacctgcaccaagtgcggcaagcgcatgagtgagtgtcccatctgccggcagtatgtggtgcgagccgtgcacgtgttcaagtcctgaaacaggctcccctcaccaggacagtcacccccaaacttgacccccaacatttcaatgcacagaagggactggaaagttatgttcaaaggctgaagctattttaaaacattattttgactactaagtggggacagaaagatccatcctgagttgtggaaacattggtccatgccgtgagcctgtctgcctgtggacacgtgagcttcccgggctcagctgggctttatcacacatcccgtgaacactcattgaagtcagcctgtttgcgccatgtgggcatcagccactgctgtcttgggaggacacttatcctgttctcttatttccccttcatcctatttttaacttaaactgctcagatgtttgaaacttctgtcctctttggatgagatcagtgtccacaagtggccgacatggaacatgctgagcagtggctcctctgaatgttcactttattagtcatgtatattttaaatgctaacatttgatgaatgtaagtttccacattgttgctgtttctgcatttaaacataattgggaacaactgacattctctagtcgactgccagggccttagactccacatgtccatttttgttcaggtatagctttttatagcaagggctgcatctagcttcttttattagaagtgtgtgtgctaaattccttattaatgtgtaatcagtttacattgttttgtatagtgaaggtgtattttcagtgctacccgctagctgattttaactttaggaataaaattagttttaaaagcttttgtttacattgtcttggtcagttcctaaatcaagtgacctggcctagcacccctcttcagaagagatggtgggagcaccttcaaagatgtcacatgggggccgggtgcggtggctcacgcctgtaatcctaggaccttgtgaggttgaggctggaggaatgcttgagctcacaagttcaagactagcttggacaacatggcgaaaccctgtctttggaaaaaattagccaggcgtggtagtcccagctactcaggaggctgaggtaggaggatggcttgagccttgggtgtggaggttgcagtgagccaagatcacaccactgaaatccaacttgggtaacagagccagaccttgtctcacaaaaaaaaaaaaagaaaaaaaaggaaaaaaacaatgccacatgagcaacagtgcttacatttcctgcttgcttatcagtaaggttaactgctgatgtgctgtttcttgtgtccaggtattgcgctaggtgctgtagttgcctctgcagtcctcaaagcaactttctgaaataaacattgctttgcttctctaacctctgagaagttagacttgtctaaaacctcatggttaaaaagtggctatgcagaatttgaacctagctctgatgccagagttgctcttaacccttccagtaccacataagaaatgagaaacttgggccaggtgtggtggctcatgcctgtaatcctagcactttgggaggctgaggcgggtggatcatgaggtcaagagttcgagaccagcctggtcaacatggtgaaactgtctc

SEQ ID NO: 260686 - DNA, 2064 bp, Homo sapiens
gcgcttttaccggggcacgcggcgagcgtgaccacgccccttacgtccggacgctcggtcgcctcccggggcgcggtaatcaccgcccagagggaaggaggtcggcagtgtgaggagctgctatggtgctgagtttcctggtagagccggccgagctgaggcggtcgcggccatgaaggcgggtgccacgtctatgtgggcttcgtgctgtgggctgctgaatgaagtcatgggaactggagctgtcaggggccagcagtcagcatttgcaggagccaccggtccattcagatttacaccaaaccctgagttttccacctacccaccagcagctacggaagggcccaacatagtttgtaaagcctgtgggctttcattttcagtctttagaaagaagcatgtttgctgtgactgcaagaaggatttttgctccgtttgttcagtcttacaagaaaatctccgtagatgttctacttgtcacttattacaagagacagcatttcagcgccctcagttaatgcgactgaaggtgaaggacctgcggcagtatctcattctgagaaatatacccatagatacttgtcgtgagaaagaagacttggtggatctagtactgtgccatcatggactaggctctgaggacgacatggacacaagcagtctgaattcttcaaggtcccagacttctagcttttttacacgttcgtttttttcaaactatacagccccctctgctactatgtcttcgtttcagggagagcttatggatggagaccaaacatccagatctggagtgccggcacaggtacaaagtgaaatcacttcagcaaacacagaagatgatgatgacgacgatgatgaggatgatgatgatgaagaagaaaacgcagaggatcggaaccccgggctctccaaggagagagtgagagcttcactgtctgacttgtcaagccttgatgatgtggaaggaatgagcgtgcgccagctgaaggaaattctggctcggaattttgtcaactattctggctgttgtgaaaaatgggaactggtagagaaagtaaaccggttatacaaagagaatgaagaaaaccaaaagtcctatggcgagcggctgcagctgcaggatgaggaagacgacagcctgtgtcgcatctgcatggatgccgtcatcgactgtgtcctactggagtgtgggcacatggttacctgcaccaagtgcggcaagcgcatgagtgagtgtcccatctgccggcagtatgtggtgcgagccgtgcacgtgttcaagtcctgaaacaggctcccctcaccaggacagtcacccccaaacttgacccccaacatttcaatgcacagaagggactggaaagttatgttcaaaggctgaagctattttaaaacattattttgactactaagtggggacagaaagatccatcctgagttgtggaaacattggtccatgccgtgagcctgtctgcctgtggacacgtgagcttcccgggctcagctgggctttatcacacatcccgtgaacactcattgaagtcagcctgtttgcgccatgtgggcatcagccactgctgtcttgggaggacacttatcctgttctcttatttccccttcatcctatttttaacttaaactgctcagatgtttgaaacttctgtcctctttggatgagatcagtgtccacaagtggccgacatggaacatgctgagcagtggctcctctgaatgttcactttattagtcatgtatattttaaatgctaacatttgatgaatgtaagtttccacattgttgctgtttctgcatttaaacataattgggaacaactgacattctctagtcgactgccagggccttagactccacatgtccatttttgttcaggtatagctttttatagcaagggctgcatctagcttcttttattagaagtgtgtgtgctaaattccttattaatgtgtaatcagtttacattgttttgtatagtgaaggtgtattttcagtgctacccgctagctgattttaactttaggaataaaattagttttaaaagct

SEQ ID NO: 260687 - DNA, 1975 bp, Homo sapiens
aaagagtgggaaggaaccctccacacagaaggagagaccaaggcccactctgatttcatcttgagttgcctagtgccttctccattggcatatctgccatctcatcccatagatcctttctccccaggtccacaccagtagtcgtgggccatgaactaagaccccagatcacaagaatctctccccatgaatggcagtaaaacatttctcttaaatctagagactactgacctttcaagcttgaattcctgttctgttccaactattcatgattccctttgatctcctctgacctgtagaaagggaagcacccaaatccatagccctatggccaaatctcaggctggggttaacttttttttaacttattcatcgtctttcttattcacagactggattttctcagatgtaaaggtgggccaagagccaggacggcccatctctttcaagttagacttcagcagggccaggaacacagatggcttgagatgattctaaggctagggagggaaggatgcacaattattcctaactttcctaagggggaactaaggctccttttcctactgagatgaggctccagagactgtggtgttcccagggctacaaagctggggcaactgagttaaattccaatagcatcctgactccaaagcccatctacagaagaccagctgagggtttctttttctagttacagaagtaatatatccctatcacagatgtcttgaattagacaaagatataaaatagaaatacatagctaacatttgttgggtacgtcaagcattttattctttacaaaaccctgaggtatagcttttatcattgccatttctagtggagagaaccaaagtgcagagaagttgggattatttcttgtacaacactggggtggcattgggcctgcaggggtcattcagcaggtggctgctcagcttcggactgggagggtggctggctgactggccatgcctgaagccgaggccttagctctctgttgcctttcagatggcgagcggctgcagctgcaggatgaggaagacgacagcctgtgtcgcatctgcatggatgccgtcatcgactgtgtcctactggagtgtgggcacatggttacctgcaccaagtgcggcaagcgcatgagtgagtgtcccatctgccggcagtatgtggtgcgagccgtgcacgtgttcaagtcctgaaacaggctcccctcaccaggacagtcacccccaaacttgacccccaacatttcaatgcacagaagggactggaaagttatgttcaaaggctgaagctattttaaaacattattttgactactaagtggggacagaaagatccatcctgagttgtggaaacattggtccatgccgtgagcctgtctgcctgtggacacgtgagcttcccgggctcagctgggctttatcacacatcccgtgaacactcattgaagtcagcctgtttgcgccatgtgggcatcagccactgctgtcttgggaggacacttatcctgttctcttatttccccttcatcctatttttaacttaaactgctcagatgtttgaaacttctgtcctctttggatgagatcagtgtccacaagtggccgacatggaacatgctgagcagtggctcctctgaatgttcactttattagtcatgtatattttaaatgctaacatttgatgaatgtaagtttccacattgttgctgtttctgcatttaaacataattgggaacaactgacattctctagtcgactgccagggccttagactccacatgtccatttttgttcaggtatagctttttatagcaagggctgcatctagcttcttttattagaagtgtgtgtgctaaattccttattaatgtgtaatcagtttacattgttttgtatagtgaaggtgtattttcagtgctacccgctagctgattttaactttaggaataaaattagttttaaaagct

SEQ ID NO: 260688 - DNA, 439 bp, Homo sapiens
gaaacccgcgccttccctttggaggcccgtttcccctcccaaaaaaaagttatttggaaggtccccttttccaaggccaaagcgaaaaggttcccaaaaaaaaaaaaaaaaaaaaaaaggcagggacaaaacacaggagccagaaaggatacttctggctacagaaagcaaggaatatttttggaataggtaactttggaactgtgccttgaagtatgaggatattgtaaaagcttatttttaactttccagtttagttataaaatattattacagcttgaaatatctattaaagtatctagaagtagctttatttcctgaaaaccaccctctgctgtgttaagatccaaaaacaaagcagggatctttatatataatgcctcgaagaatcagtatctttattaatattaaatttctgtgcccatttcagggccgagct

SEQ ID NO: 260689 - DNA, 2744 bp, Homo sapiens
gcgcttttaccggggcacgcggcgagcgtgaccacgccccttacgtccggacgctcggtcgcctcccggggcgcggtaatcaccgcccagagggaaggaggtcggcagtgtgaggagctgctatggtgctgagtttcctggtagagccggccgagctgaggcggtcgcggccatgaaggcgggtgccacgtctatgtgggcttcgtgctgtgggctgctgaatgaagtcatgggaactggagctgtcaggggccagcagtcagcatttgcaggagccaccggtccattcagatttacaccaaaccctgagttttccacctacccaccagcagctacggaagggcccaacatagtttgtaaagcctgtgggctttcattttcagtctttagaaagaagcatgtttgctgtgactgcaagaaggatttttgctccgtttgttcagtcttacaagaaaatctccgtagatgttctacttgtcacttattacaagagacagcatttcagcgccctcagttaatgcgactgaaggtgaaggacctgcggcagtatctcattctgagaaatatacccatagatacttgtcgtgagaaagaagacttggtggatctagtactgtgccatcatggactaggctctgaggacgacatggacacaagcagtctgaattcttcaaggtcccagacttctagcttttttacacgttcgtttttttcaaactatacagccccctctgctactatgtcttcgtttcagggagagcttatggatggagaccaaacatccagatctggagtgccggcacaggtacaaagtgaaatcacttcagcaaacacagaagatgatgatgacgacgatgatgaggatgatgatgatgaagaagaaaacgcagaggatcggaaccccgggctctccaaggagagagtgagagcttcactgtctgacttgtcaagccttgatgatgtggaaggaatgagcgtgcgccagctgaaggaaattctggctcggaattttgtcaactattctggctgttgtgaaaaatgggaactggtagagaaagtaaaccggttatacaaagagaatgaagaaaaccaaaagtcctatggcgagcggctgcagctgcaggatgaggaagacgacagcctgtgtcgcatctgcatggatgccgtcatcgactgtgtcctactggagtgtgggcacatggttacctgcaccaagtgcggcaagcgcatgagtgagtgtcccatctgccggcagtatgtggtgcgagccgtgcacgtgttcaagtcctgaaacaggctcccctcaccaggacagtcacccccaaacttgacccccaacatttcaatgcacagaagggactggaaagttatgttcaaaggctgaagctattttaaaacattattttgactactaagtggggacagaaagatccatcctgagttgtggaaacattggtccatgccgtgagcctgtctgcctgtggacacgtgagcttcccgggctcagctgggctttatcacacatcccgtgaacactcattgaagtcagcctgtttgcgccatgtgggcatcagccactgctgtcttgggaggacacttatcctgttctcttatttccccttcatcctatttttaacttaaactgctcagatgtttgaaacttctgtcctctttggatgagatcagtgtccacaagtggccgacatggaacatgctgagcagtggctcctctgaatgttcactttattagtcatgtatattttaaatgctaacatttgatgaatgtaagtttccacattgttgctgtttctgcatttaaacataattgggaacaactgacattctctagtcgactgccagggccttagactccacatgtccatttttgttcaggtatagctttttatagcaagggctgcatctagcttcttttattagaagtgtgtgtgctaaattccttattaatgtgtaatcagtttacattgttttgtatagtgaaggtgtattttcagtgctacccgctagctgattttaactttaggaataaaattagttttaaaagctaaaaaaaaaaaaaaaaaaaaaaaaaaaacaaaaaaaaacaaaaaaaaaaaaaagagacgagggggccagcaacaaaagaaaatcacacggaggaaggagcacacagaaaaaggacgacaccgcgtattgtaggaaagaagaggggcgccacaaaaggagggagtcgttgaataaacacaagaagagaacccgcggggcgggaaataaaacaaccgccagccgtaatcacaggggaaacaaaagagtgcggccggcgagaggcgcaaacttggtgcaaaagcaacacccacacacacagcgggaggagaaccaacaataagagcgacccaacacagagaaacaccataaaacaacgccaacaccgaggagcgacaaacaacccaacacaaaggcaaaacagattccaaaacggcggctgcacaaaaaaaaagccgcaaaagaacgcgacgagcgacgcagaaagaacaacgccgcccagcagcgagacaaaaaaacgaacaaaacacatcttacaaagcggggcgaagaccgaggaagcgcgacacagccgacaaggcgagaaaaagccgggaagccgcaaacgaaagaagaccaaaaaaaacaagatcaggggccgcgcgcgcaggagaagagaaaaccgagaaagagagggggggggcgacggcggacgagagaggcaa

SEQ ID NO: 260690 - DNA, 2785 bp, Homo sapiens
tataaatgatgcttttgtttttgtgaaactggatttacaccattgaggatttgggctgttaaatgtttattatttaacttaatgttgatttatattgaaattgtttaattgtgggtatgctcatctgtagatttctgggcagagactgattcctgatgtcatggaatgctaacatgtgaatgttcatgtaaggaaatacttctttctgtggaattaaaattacattaaaagctaagcaagtatacctggccgggtgcaatagctcacgcctataatcccagcactttgggaggccaaggcagatggatcacttgaggtcaggagttcgagaacagcttggccaacatagcaaaaccctgtctcgattaaaaattattttaaaaagaaaaaaaggaaaaaaaaagttaagcagttaaaaataaacaagaaaagctaagcaattatatggataagtacatgttcactcaaacctggagcagctggttttagtatatgtacggaatgggtatttactttctccctttggcgttttggtttggtttggtttggtttggtttagaaactgatgttttgaaataggtcttacctctcagactcaagtaactttttaaccttgcagtaacatccaatcaacttcctataagggattaaaaaaaaaaatccaaattggtgccctgtgttaatttgatttaatcctctttcccatttttccttatttatattgatctcaccattaattgtgctaatctgggttcttccaagctcaaaatgagatatcaaggagaaagtaatctactgaatgtaattccttttcctttttttttctctgaaaggtgggggagtggtactaaggatcaagtatactgttaaaagaaaacaaaaacccaagcatgaggaaggcgggtgccacgtctatgtgggcttcgtgctgtgggctgctgaatgaagtcatgggaactggagctgtcaggggccagcagtcagcatttgcaggagccaccggtccattcagatttacaccaaaccctgagttttccacctacccaccagcagctacggaagggcccaacatagtttgtaaagcctgtgggctttcattttcagtctttagaaagaagcatgtttgctgtgactgcaagaaggatttttgctccgtttgttcagtcttacaagaaaatctccgtagatgttctacttgtcacttattacaagagacagcatttcagcgccctcagttaatgcgactgaaggtgaaggacctgcggcagtatctcattctgagaaatatacccatagatacttgtcgtgagaaagaagacttggtggatctagtactgtgccatcatggactaggctctgaggacgacatggacacaagcagtctgaattcttcaaggtcccagacttctagcttttttacacgttcgtttttttcaaactatacagccccctctgctactatgtcttcgtttcagggagagcttatggatggagaccaaacatccagatctggagtgccggcacaggtacaaagtgaaatcacttcagcaaacacagaagatgatgatgacgacgatgatgaggatgatgatgatgaagaagaaaacgcagaggatcggaaccccgggctctccaaggagagagtgagagcttcactgtctgacttgtcaagccttgatgatgtggaaggaatgagcgtgcgccagctgaaggaaattctggctcggaattttgtcaactattctggctgttgtgaaaaatgggaactggtagagaaagtaaaccggttatacaaagagaatgaagaaaaccaaaagtcctatggcgagcggctgcagctgcaggatgaggaagacgacagcctgtgtcgcatctgcatggatgccgtcatcgactgtgtcctactggagtgtgggcacatggttacctgcaccaagtgcggcaagcgcatgagtgagtgtcccatctgccggcagtatgtggtgcgagccgtgcacgtgttcaagtcctgaaacaggctcccctcaccaggacagtcacccccaaacttgacccccaacatttcaatgcacagaagggactggaaagttatgttcaaaggctgaagctattttaaaacattattttgactactaagtggggacagaaagatccatcctgagttgtggaaacattggtccatgccgtgagcctgtctgcctgtggacacgtgagcttcccgggctcagctgggctttatcacacatcccgtgaacactcattgaagtcagcctgtttgcgccatgtgggcatcagccactgctgtcttgggaggacacttatcctgttctcttatttccccttcatcctatttttaacttaaactgctcagatgtttgaaacttctgtcctctttggatgagatcagtgtccacaagtggccgacatggaacatgctgagcagtggctcctctgaatgttcactttattagtcatgtatattttaaatgctaacatttgatgaatgtaagtttccacattgttgctgtttctgcatttaaacataattgggaacaactgacattctctagtcgactgccagggccttagactccacatgtccatttttgttcaggtatagctttttatagcaagggctgcatctagcttcttttattagaagtgtgtgtgctaaattccttattaatgtgtaatcagtttacattgttttgtatagtgaaggtgtattttcagtgctacccgctagctgattttaactttaggaataaaattagttttaaaagct

SEQ ID NO: 260691 - DNA, 1488 bp, Homo sapiens
gcgcttttaccggggcacgcggcgagcgtgaccacgccccttacgtccggacgctcggtcgcctcccggggcgcggtaatcaccgcccagagggaaggaggtcggcagtgtgaggagctgctatggtgctgagtttcctggtagagccggccgagctgaggcggtcgcggccatgaagggagagcttatggatggagaccaaacatccagatctggagtgccggcacaggtacaaagtgaaatcacttcagcaaacacagaagatgatgatgacgacgatgatgaggatgatgatgatgaagaagaaaacgcagaggatcggaaccccgggctctccaaggagagagtgagagcttcactgtctgacttgtcaagccttgatgatgtggaaggaatgagcgtgcgccagctgaaggaaattctggctcggaattttgtcaactattctggctgttgtgaaaaatgggaactggtagagaaagtaaaccggttatacaaagagaatgaagaaaaccaaaagtcctatggcgagcggctgcagctgcaggatgaggaagacgacagcctgtgtcgcatctgcatggatgccgtcatcgactgtgtcctactggagtgtgggcacatggttacctgcaccaagtgcggcaagcgcatgagtgagtgtcccatctgccggcagtatgtggtgcgagccgtgcacgtgttcaagtcctgaaacaggctcccctcaccaggacagtcacccccaaacttgacccccaacatttcaatgcacagaagggactggaaagttatgttcaaaggctgaagctattttaaaacattattttgactactaagtggggacagaaagatccatcctgagttgtggaaacattggtccatgccgtgagcctgtctgcctgtggacacgtgagcttcccgggctcagctgggctttatcacacatcccgtgaacactcattgaagtcagcctgtttgcgccatgtgggcatcagccactgctgtcttgggaggacacttatcctgttctcttatttccccttcatcctatttttaacttaaactgctcagatgtttgaaacttctgtcctctttggatgagatcagtgtccacaagtggccgacatggaacatgctgagcagtggctcctctgaatgttcactttattagtcatgtatattttaaatgctaacatttgatgaatgtaagtttccacattgttgctgtttctgcatttaaacataattgggaacaactgacattctctagtcgactgccagggccttagactccacatgtccatttttgttcaggtatagctttttatagcaagggctgcatctagcttcttttattagaagtgtgtgtgctaaattccttattaatgtgtaatcagtttacattgttttgtatagtgaaggtgtattttcagtgctacccgctagctgattttaactttaggaataaaattagttttaaaagct

SEQ ID NO: 260692 - DNA, 1656 bp, Homo sapiens
gcgcttttaccggggcacgcggcgagcgtgaccacgccccttacgtccggacgctcggtcgcctcccggggcgcggtaatcaccgcccagagggaaggaggtcggcagtgtgaggagctgctatggtgctgagtttcctggtagagccggccgagctgaggcggtcgcggccatgaaggcgggtgccacgtctatgtgggcttcgtgctgtgggctgctgaatgaagtcatgggaactggagctgtcaggggccagcagtcagcatttgcaggagccaccggtccattcagatttacaccaaaccctgagttttccacctacccaccagcagctacggaagggcccaacatagtttgtaaagcctgtgggctttcattttcagtctttagaaagaaggtacaaagtgaaatcacttcagcaaacacagaagatgatgatgacgacgatgatgaggatgatgatgatgaagaagaaaacgcagaggatcggaaccccgggctctccaaggagagagtgagagcttcactgtctgacttgtcaagccttgatgatgtggaaggaatgagcgtgcgccagctgaaggaaattctggctcggaattttgtcaactattctggctgttgtgaaaaatgggaactggtagagaaagtaaaccggttatacaaagagaatgaagaaaaccaaaagtcctatggcgagcggctgcagctgcaggatgaggaagacgacagcctgtgtcgcatctgcatggatgccgtcatcgactgtgtcctactggagtgtgggcacatggttacctgcaccaagtgcggcaagcgcatgagtgagtgtcccatctgccggcagtatgtggtgcgagccgtgcacgtgttcaagtcctgaaacaggctcccctcaccaggacagtcacccccaaacttgacccccaacatttcaatgcacagaagggactggaaagttatgttcaaaggctgaagctattttaaaacattattttgactactaagtggggacagaaagatccatcctgagttgtggaaacattggtccatgccgtgagcctgtctgcctgtggacacgtgagcttcccgggctcagctgggctttatcacacatcccgtgaacactcattgaagtcagcctgtttgcgccatgtgggcatcagccactgctgtcttgggaggacacttatcctgttctcttatttccccttcatcctatttttaacttaaactgctcagatgtttgaaacttctgtcctctttggatgagatcagtgtccacaagtggccgacatggaacatgctgagcagtggctcctctgaatgttcactttattagtcatgtatattttaaatgctaacatttgatgaatgtaagtttccacattgttgctgtttctgcatttaaacataattgggaacaactgacattctctagtcgactgccagggccttagactccacatgtccatttttgttcaggtatagctttttatagcaagggctgcatctagcttcttttattagaagtgtgtgtgctaaattccttattaatgtgtaatcagtttacattgttttgtatagtgaaggtgtattttcagtgctacccgctagctgattttaactttaggaataaaattagttttaaaagct

SEQ ID NO: 260693 - DNA, 1695 bp, Homo sapiens
gcgcttttaccggggcacgcggcgagcgtgaccacgccccttacgtccggacgctcggtcgcctcccggggcgcggtaatcaccgcccagagggaaggaggtcggcagtgtgaggagctgctatggtgctgagtttcctggtagagccggccgagctgaggcggtcgcggccatgaaggcgggtgccacgtctatgtgggcttcgtgctgtgggctgctgaatgaagtcatgggaactggagctgtcaggggccagcagtcagcatttgcaggagccaccggtccattcagatttacaccaaaccctgagttttccacctacccaccagcagctacggaagggcccaacatagtttgtaaagcctgtgggctttcattttcagtctttagaaagaagcatgtttgctgtgactgcaagaaggatttttgctccgtttgttcagtcttacaagaaaatctccgtagatgttctacttgtcacttattacaagagacagcatttcagcgccctcagttaatgcgactgaaggtgaaggacctgcggcagtatctcattctgagaaatatacccatagatacttgtcgtgagaaagaagacttggtggatctagtactgtgccatcatggactaggctctgaggacgacatggacacaagcagtctgaattcttcaaggtcccagacttctagcttttttacacgttcgtttttttcaaactatacagccccctctgctactatgtcttcgtttcagggagagcttatggatggagaccaaacatccagatctggagtgccggcacaggtacaaagtgaaatcacttcagcaaacacagaagatgatgatgacgacgatgatgaggatgatgatgatgaagaagaaaacgcagaggatcggaaccccgggctctccaaggagagagtgagagcttcactgtctgacttgtcaagccttgatgatgtggaaggaatgagcgtgcgccagctgaaggaaattctggctcggaattttgtcaactattctggctgttgtgaaaaatgggaactggtagagaaagtaaaccggttatacaaagagaatgaagaaaaccaaaagtcctgtaggtttatcttttcattttttccctgtagtatttttccttaggcttttaaaaactgggttgtttttgtcacaattaagtcaaatttatttttgagaaagctgtgtaccattttactgagtatcagttagttacatgagcctgtttatagatctggaaaggagtaacttcattatgtgatgttcattatggctgcgagaccaccactgccaagtgagttagaaaattattcaatttggtttttcttactataattaactatttgttacaaccctaattaaattcctcgtctctgtaaaaatgcttattttctcactaatgcctttggccggccagtaccttggttctctcaacttttaaatctaacagtagggggaaaattccctatagcccagatgttacatagttcttagcatcaactatctgtagatttctgtgtaagtcacaaaaagctgaggttaagaacttctgaactaggctgggcttggtggctcacaactgtaattctaggactttgggaggctgaggcaggaggatcacttgagcccaggagtttgagaccagcctgggcaacatagagagatcccatctctaa

SEQ ID NO: 260694 - DNA, 1654 bp, Homo sapiens
gcgcttttaccggggcacgcggcgagcgtgaccacgccccttacgtccggacgctcggtcgcctcccggggcgcggtaatcaccgcccagagggaaggaggtcggcagtgtgaggagctgctatggtgctgagtttcctggtagagccggccgagctgaggcggtcgcggccatgaaggtgaggggccggtggagccggacagaccctcctcgccaatcctatcctgccagggcacctgaagcgcctcctttctttccgccttagcggttacctagtcgtcatctcggagagctgcgctgaggggggtcgcttgcccggcttcaggtgccccaaccgagccagggcaggctgccggaccctctcgagctcctccagtgccacccccgtcagcgacccgagcggtggggagaagccgggcgtccctagcgttcgcgccgggtgggcccctctctgcgccgggccctgtgcgcctcctcgggggcctgaggcagagccgccaggctcgcctgagcctcggtcccttggcgcgcggcgtgccctttcccgccccgagtccttgaactaacccaagtgttggggacatcgtgggaccgaggagaacaggaggggtgcagggggtggtgaggctagggccaggctaacgggttaaagaactctcagggtggggatgccacccggaaggggtgcttcgtaggctgcacgtcggggccgcgaactagagaaggctggatgtgcctccatcgccactaggtaaacgcagcaaggaatttggcagcttgagttctccaaggtgggagtgagagcgtgggagcattactgatgagaagttgaagaaaaggggaaaggggagcggggtttccggcctacttctgagagatgattctcaacccgatcactgagagttctgaagagctttgtgaacagcagtcagttcagggtattgattcatttgccgaactcaaaccaagtgggatgagtcataaggtgatgataactttcagacctagatggtttcgttaatctcagtgcagaggtgtgctgggggtgggtaatctagcaggtgagctgctagattaacgctgtctccataaagcgtcaaagatttactatagaagattgaaaaagagtgtcagctgggcacagaaattcagcacatgttttgttgaacgttttctgtgcgttagccaagagggagacatggtgaagagaagtaattcaaaatacagtctcatcccttaggaaggcagtttaccattcaaaagaagagttatttgtaagtaaccatattacaaggcagaaggctataggtatcaaaaaaaaaaaaaaaaaaaaggcagggacaaaacacaggagccagaaaggatacttctggctacagaaagcaaggaatatttttggaataggtaactttggaactgtgccttgaagtatgaggatattgtaaaagcttatttttaactttccagtttagttataaaatattattacagcttgaaatatctattaaagtatctagaagtagctttatttcctgaaaaccaccctctgctgtgttaagatccaaaaacaaagcagggatctttatatataatgcctcgaagaatcagtatctttattaatattaaatttctgtgcccatttcagggccgagct

SEQ ID NO: 260695 - DNA, 1141 bp, Homo sapiens
actctagaggatctcttctgcggtgcctttcccgccccgagtccttgaactaacccaagtgttggggacatcgtgggaccgaggagaacaggaggggtgcagggggtggtgaggctagggccaggctaacgggttaaagaactctcagggtggggatgccacccggaaggggtgcttcgtaggctgcacgtcggggccgcgaactagagaaggctggatgtgcctccatcgccactaggtaaacgcagcaaggaatttggcagcttgagttctccaaggtgggagtgagagcgtgggagcattactgatgagaagttgaagaaaaggggaaaggggagcggggtttccggcctacttctgagagatgattctcaacccgatcactgagagttctgaagagctttgtgaacagcagtcagttcagggtattgattcatttgccgaactcaaaccaagtgggatgagtcataaggtgatgataactttcagacctagatggtttcgttaatctcagtgcagaggtgtgctgggggtgggtaatctagcaggtgagctgctagattaacgctgtctccataaagcgtcaaagatttactatagaagattgaaaaagagtgtcagctgggcacagaaattcagcacatgttttgttgaacgttttctgtgcgttagccaagagggagacatggtgaagagaagtaattcaaaatacagtctcatcccttaggaaggcagtttaccattcaaaagaagagttatttgtaagtaaccatattacaaggcagaaggctataggtatcaaaaaaaaaaaaaaaaaaaaggcagggacaaaacacaggagccagaaaggatacttctggctacagaaagcaaggaatatttttggaataggtaactttggaactgtgccttgaagtatgaggatattgtaaaagcttatttttaactttccagtttagttataaaatattattacagcttgaaatatctattaaagtatctagaagtagctttatttcctgaaaaccaccctctgctgtgttaagatccaaaaacaaagcagggatctttatatataatgcctcgaagaatcagtatctttattaatattaaatttctgtgcccatttcagggccgagct

SEQ ID NO: 260696 - DNA, 654 bp, Homo sapiens
  misc_feature (26)..(26): n is a, c, g, or t
aggagcatgagagtgtgatgctctgnagattacagtaattctgtgtccccaaaaagccagcgctggcatagatcttctgcctgtagctcgcagagatttagttttccattttactgctaggaatttctgtgcccatttcaacagaaattcagcacatgttttgttgaacgttttctgtgcgttagccaagagggagacatggtgaagagaagtaattcaaaatacagtctcatcccttaggaaggcagtttaccattcaaaagaagagttatttgtaagtaaccatattacaaggcagaaggctataggtatcaaaaaaaaaaaaaaaaaaaaggcagggacaaaacacaggagccagaaaggatacttctggctacagaaagcaaggaatatttttggaataggtaactttggaactgtgccttgaagtatgaggatattgtaaaagcttatttttaactttccagtttagttataaaatattattacagcttgaaatatctattaaagtatctagaagtagctttatttcctgaaaaccaccctctgctgtgttaagatccaaaaacaaagcagggatctttatatataatgcctcgaagaatcagtatctttattaatattaaatttctgtgcccatttcagggccgagct

SEQ ID NO: 260697 - DNA, 1191 bp, Homo sapiens
gcgcttttaccggggcacgcggcgagcgtgaccacgccccttacgtccggacgctcggtcgcctcccggggcgcggtaatcaccgcccagagggaaggaggtcggcagtgtgaggagctgctatggtgctgagtttcctggtagagccggccgagctgaggcggtcgcggccatgaaggcgggtgccacgtctatgtgggcttcgtgctgtgggctgctgaatgaagtcatgggaactggagctgtcaggggccagcagtcagcatttgcaggagccaccggtccattcagatttacaccaaaccctgagttttccacctacccaccagcagctacggaagggcccaacatagtttgtaaagcctgtgggctttcattttcagtctttagaaagaagcatgtttgctgtgactgcaagaaggatttttgctccgtttgttcagtcttacaagaaaatctccgtagatgttctacttgtcacttattacaagagacagcatttcagcgccctcagttaatgcgactgaaggtgaaggacctgcggcagtatctcattctgagaaatatacccatagatacttgtcgtgagaaagaagacttggtggatctagtactgtgccatcatggactaggctctgaggacgacatggacacaagcagtctgaattcttcaaggtcccagacttctagcttttttacacgttcgtttttttcaaactatacagccccctctgctactatgtcttcgtttcagggagagcttatggatggagaccaaacatccagatctggagtgccggcacaggtacgagggggtaactaattacacccagggcccggcacgcttattcttggccgtatatggtggggcctttagtgcttgatgacttctgataaacttcaagtcatgtgctggagtgaagcttccacacccagctgaactctgcacttaaaggctgtcctgatgtatagtgtctgctgaggtgctaggtggctccaaagtctgctgtctgaagggtcccaaaatagctcatcagtctcttggccttagttaatttctctgtcttacacagttagacactaactgttgaagaaatggctgtgaaaaagtagcacatacacatttgtagtgttatgtgttagtgcacgtgtttcagtgaccacagaaaacaatcagtagtgtaagttagc

SEQ ID NO: 260698 - DNA, 695 bp, Homo sapiens
gtgaggccacctataaaatttggtttccctgacatgtcagcctgacaggaagggacagtgccctgtggacattcgctagattagtacaggatgtttcttctggtttgaatgtaggacagtatactgaaacacttctaggactgctgagatggctgggagaatattcagggccagtgatgagtttagagtggggagggtctggacttatgggaccagggctaatggatgctctgtggtttcagaaccccgggctctccaaggagagagtgagagcttcactgtctgacttgtcaagccttgatgatgtggaaggaatgagcgtgcgccagctgaaggaaattctggctcggaattttgtcaactattctggctgttgtgaaaaatgggaactggtagagaaagtaaaccggttatacaaagagaatgaagaaaaccaaaagtcctgtaggtttatcttttcattttttccctgtagtatttttccttaggcttttaaaaactgggttgtttttgtcacaattaagtcaaatttatttttgagaaagctgtgtaccattttactgagtatcagttagttacatgagcctgtttatagatctggaaaggagtaacttcattatgtgatgttcattatggctgcgagaccaccactgccaagtgagttagaaaattattcaatttggtttttcttacta

SEQ ID NO: 260699 - DNA, 2277 bp, Homo sapiens
gcgcttttaccggggcacgcggcgagcgtgaccacgccccttacgtccggacgctcggtcgcctcccggggcgcggtaatcaccgcccagagggaaggaggtcggcagtgtgaggagctgctatggtgctgagtttcctggtagagccggccgagctgaggcggtcgcggccatgaaggcgggtgccacgtctatgtgggcttcgtgctgtgggctgctgaatgaagtcatgggaactggagctgtcaggggccagcagtcagcatttgcaggagccaccggtccattcagatttacaccaaaccctgagttttccacctacccaccagcagctacggaagggcccaacatagtttgtaaagcctgtgggctttcattttcagtctttagaaagaagcatgtttgctgtgactgcaagaaggatttttgctccgtttgttcagtcttacaagaaaatctccgtagatgttctacttgtcacttattacaagagacagcatttcagcgccctcagttaatgcgactgaaggtgaaggacctgcggcagtatctcattctgagaaatatacccatagatacttgtcgtgagaaagaagacttggtggatctagtactgtgccatcatggactaggctctgaggacgacatggacacaagcagtctgaattcttcaaggtcccagacttctagcttttttacacgttcgtttttttcaaactatacagccccctctgctactatgtcttcgtttcagggagagcttatggatggagaccaaacatccagatctggagtgccggcacaggtacaaagtgaaatcacttcagcaaacacagaagatgatgatgacgacgatgatgaggatgatgatgatgaagaagaaaacgcagaggatcggaaccccgggctctccaaggagagagtgagagcttcactgtctgacttgtcaagccttgatgatgtggaaggaatgagcgtgcgccagctgaaggaaattctggctcggaattttgtcaactattctggctgttgtgaaaaatgggaactggtagagaaagtaaaccggttatacaaagagaatgaagaaaaccaaaagtcctgtaggtttatcttttcattttttccctgtagtatttttccttaggcttttaaaaactgggttgtttttgtcacaattaagtcaaatttatttttgagaaagctgtgtaccattttactgagtatcagttagttacatgagcctgtttatagatctggaaaggagtaacttcattatgtgatgttcattatggctgcgagaccaccactgccaaatggcgagcggctgcagctgcaggatgaggaagacgacagcctgtgtcgcatctgcatggatgccgtcatcgactgtgtcctactggagtgtgggcacatggttacctgcaccaagtgcggcaagcgcatgagtgagtgtcccatctgccggcagtatgtggtgcgagccgtgcacgtgttcaagtcctgaaacaggctcccctcaccaggacagtcacccccaaacttgacccccaacatttcaatgcacagaagggactggaaagttatgttcaaaggctgaagctattttaaaacattattttgactactaagtggggacagaaagatccatcctgagttgtggaaacattggtccatgccgtgagcctgtctgcctgtggacacgtgagcttcccgggctcagctgggctttatcacacatcccgtgaacactcattgaagtcagcctgtttgcgccatgtgggcatcagccactgctgtcttgggaggacacttatcctgttctcttatttccccttcatcctatttttaacttaaactgctcagatgtttgaaacttctgtcctctttggatgagatcagtgtccacaagtggccgacatggaacatgctgagcagtggctcctctgaatgttcactttattagtcatgtatattttaaatgctaacatttgatgaatgtaagtttccacattgttgctgtttctgcatttaaacataattgggaacaactgacattctctagtcgactgccagggccttagactccacatgtccatttttgttcaggtatagctttttatagcaagggctgcatctagcttcttttattagaagtgtgtgtgctaaattccttattaatgtgtaatcagtttacattgttttgtatagtgaaggtgtattttcagtgctacccgctagctgattttaactttaggaataaaattagttttaaaagct

SEQ ID NO: 260700 - DNA, 2130 bp, Homo sapiens
gcgcttttaccggggcacgcggcgagcgtgaccacgccccttacgtccggacgctcggtcgcctcccggggcgcggtaatcaccgcccagagggaaggaggtcggcagtgtgaggagctgctatggtgctgagtttcctggtagagccggccgagctgaggcggtcgcggccatgaaggtgggggagtggtactaaggatcaagtatactgttaaaagaaaacaaaaacccaagcatgaggaaggcgggtgccacgtctatgtgggcttcgtgctgtgggctgctgaatgaagtcatgggaactggagctgtcaggggccagcagtcagcatttgcaggagccaccggtccattcagatttacaccaaaccctgagttttccacctacccaccagcagctacggaagggcccaacatagtttgtaaagcctgtgggctttcattttcagtctttagaaagaagcatgtttgctgtgactgcaagaaggatttttgctccgtttgttcagtcttacaagaaaatctccgtagatgttctacttgtcacttattacaagagacagcatttcagcgccctcagttaatgcgactgaaggtgaaggacctgcggcagtatctcattctgagaaatatacccatagatacttgtcgtgagaaagaagacttggtggatctagtactgtgccatcatggactaggctctgaggacgacatggacacaagcagtctgaattcttcaaggtcccagacttctagcttttttacacgttcgtttttttcaaactatacagccccctctgctactatgtcttcgtttcagggagagcttatggatggagaccaaacatccagatctggagtgccggcacaggtacaaagtgaaatcacttcagcaaacacagaagatgatgatgacgacgatgatgaggatgatgatgatgaagaagaaaacgcagaggatcggaaccccgggctctccaaggagagagtgagagcttcactgtctgacttgtcaagccttgatgatgtggaaggaatgagcgtgcgccagctgaaggaaattctggctcggaattttgtcaactattctggctgttgtgaaaaatgggaactggtagagaaagtaaaccggttatacaaagagaatgaagaaaaccaaaagtcctatggcgagcggctgcagctgcaggatgaggaagacgacagcctgtgtcgcatctgcatggatgccgtcatcgactgtgtcctactggagtgtgggcacatggttacctgcaccaagtgcggcaagcgcatgagtgagtgtcccatctgccggcagtatgtggtgcgagccgtgcacgtgttcaagtcctgaaacaggctcccctcaccaggacagtcacccccaaacttgacccccaacatttcaatgcacagaagggactggaaagttatgttcaaaggctgaagctattttaaaacattattttgactactaagtggggacagaaagatccatcctgagttgtggaaacattggtccatgccgtgagcctgtctgcctgtggacacgtgagcttcccgggctcagctgggctttatcacacatcccgtgaacactcattgaagtcagcctgtttgcgccatgtgggcatcagccactgctgtcttgggaggacacttatcctgttctcttatttccccttcatcctatttttaacttaaactgctcagatgtttgaaacttctgtcctctttggatgagatcagtgtccacaagtggccgacatggaacatgctgagcagtggctcctctgaatgttcactttattagtcatgtatattttaaatgctaacatttgatgaatgtaagtttccacattgttgctgtttctgcatttaaacataattgggaacaactgacattctctagtcgactgccagggccttagactccacatgtccatttttgttcaggtatagctttttatagcaagggctgcatctagcttcttttattagaagtgtgtgtgctaaattccttattaatgtgtaatcagtttacattgttttgtatagtgaaggtgtattttcagtgctacccgctagctgattttaactttaggaataaaattagttttaaaagct

SEQ ID NO: 260701 - DNA, 1955 bp, Homo sapiens
gcgcttttaccggggcacgcggcgagcgtgaccacgccccttacgtccggacgctcggtcgcctcccggggcgcggtaatcaccgcccagagggaaggaggtcggcagtgtgaggagctgctatggtgctgagtttcctggtagagccggccgagctgaggcggtcgcggccatgaaggcgggtgccacgtctatgtgggcttcgtgctgtgggctgctgaatgaagtcatgggaactggagctgtcaggggccagcagtcagcatttgcaggagccaccggtccattcagatttacaccaaaccctgagttttccacctacccaccagcagctacggaagggcccaacatagtttgtaaagcctgtgggctttcattttcagtctttagaaagaagcatgtttgctgtgactgcaagaaggatttttgctccgtttgttcagtcttacaagaaaatctccgtagatgttctacttgtcacttattacaagagacagcatttcagcgccctcagttaatgcgactgaaggtgaaggacctgcggcagtatctcattctgagaaatatacccatagatacttgtcgtgagaaagaagacttggtggatctagtactgtgccatcatggactaggctctgaggacgacatggacacaagcagtctgaattcttcaaggtcccagacttctagcttttttacacgttcgtttttttcaaactatacagccccctctgctactatgtcttcgtttcagggagagcttatggatggagaccaaacatccagatctggagtgccggcacaggtacaaagtgaaatcacttcagcaaacacagaagatgatgatgacgacgatgatgaggatgatgatgatgaagaagaaaacgcagaggatcggaaccccgggctctccaaggagagagtgagagcttcactgtctgacttgtcaagccttgatgatgtggaaggaatgagcgtgcgccagctgaaggaaattctggctcggaattttgtcaactattctggctgttgtgaaaaatgggaactggtagagaaagtaaaccggttatacaaagagaatgaagaaaaccaaaagtcctatggcgagcggctgcagctgcaggatgaggaagacgacagcctgtgtcgcatctgcatggatgccgtcatcgactgtgtcctactggagtgtgggcacatggttacctgcaccaagtgcggcaagcgcatgagtgagtgtcccatctgccggcagtatgtggtgcgagccgtgcacgtgttcaagtcctgaaacaggctcccctcaccaggacagtcacccccaaacttgacccccaacatttcaatgcacagaagggactggaaagttatgttcaaaggctgaagctattttaaaacattattttgactactaagtggggacagaaagatccatcctgagttgtggaaacattggtccatgccgtgagcctgtctgcctgtggacacgtgagcttcccgggctcagctgggctttatcacacatcccgtgaacactcattgaagtcagcctgtttgcgccatgtgggcatcagccactgctgtcttgggaggacacttatcctgttctcttatttccccttcatcctatttttaacttaaactgctcagatgtttgaaacttctgtcctctttggatgagatcagtgtccacaagtggccgacatggaacatgctgagcagtggctcctctgaatgttcactttattagtcatgtatattttaaatgctaacatttgatgaatgtaagtttccacattgttgctgtttctgcatttaaacataattgggaacaactgacattctctagtcgactgccagggccttagactccacatgtccatttttgttcagaattaacatttcatagcaagtgcattatttaataaatagtcttgggacaactgactaacatt

SEQ ID NO: 260702 - DNA, 1437 bp, Homo sapiens
gcgcttttaccggggcacgcggcgagcgtgaccacgccccttacgtccggacgctcggtcgcctcccggggcgcggtaatcaccgcccagagggaaggaggtcggcagtgtgaggagctgctatggtgctgagtttcctggtagagccggccgagctgaggcggtcgcggccatgaaggtacaaagtgaaatcacttcagcaaacacagaagatgatgatgacgacgatgatgaggatgatgatgatgaagaagaaaacgcagaggatcggaaccccgggctctccaaggagagagtgagagcttcactgtctgacttgtcaagccttgatgatgtggaaggaatgagcgtgcgccagctgaaggaaattctggctcggaattttgtcaactattctggctgttgtgaaaaatgggaactggtagagaaagtaaaccggttatacaaagagaatgaagaaaaccaaaagtcctatggcgagcggctgcagctgcaggatgaggaagacgacagcctgtgtcgcatctgcatggatgccgtcatcgactgtgtcctactggagtgtgggcacatggttacctgcaccaagtgcggcaagcgcatgagtgagtgtcccatctgccggcagtatgtggtgcgagccgtgcacgtgttcaagtcctgaaacaggctcccctcaccaggacagtcacccccaaacttgacccccaacatttcaatgcacagaagggactggaaagttatgttcaaaggctgaagctattttaaaacattattttgactactaagtggggacagaaagatccatcctgagttgtggaaacattggtccatgccgtgagcctgtctgcctgtggacacgtgagcttcccgggctcagctgggctttatcacacatcccgtgaacactcattgaagtcagcctgtttgcgccatgtgggcatcagccactgctgtcttgggaggacacttatcctgttctcttatttccccttcatcctatttttaacttaaactgctcagatgtttgaaacttctgtcctctttggatgagatcagtgtccacaagtggccgacatggaacatgctgagcagtggctcctctgaatgttcactttattagtcatgtatattttaaatgctaacatttgatgaatgtaagtttccacattgttgctgtttctgcatttaaacataattgggaacaactgacattctctagtcgactgccagggccttagactccacatgtccatttttgttcaggtatagctttttatagcaagggctgcatctagcttcttttattagaagtgtgtgtgctaaattccttattaatgtgtaatcagtttacattgttttgtatagtgaaggtgtattttcagtgctacccgctagctgattttaactttaggaataaaattagttttaaaagct

SEQ ID NO: 260703 - DNA, 701 bp, Homo sapiens
ttgccttccgccatgattgtaagtttcttgaggcctcctcagtcatgcagaactgtgagtcaattaaacctctttcctttataaattacccagtcttgggtatgactttattagcagcatgagaacagactgacacagatggtatatgtgcataataacttggaaagctagatatttattttcgcaatgctacaattaaaacattttgaggacttttaaaattacctttagagccaccatgcctggcctagatattttttattctttccaaaatttaattctccctgaagttaaaaattttcattactgagaatgtacatagagatgtgtcacaaccctttagtaattccaaaaggtgtttcaaaaattttatacaatgataatcactgttgaaacaggtgtatattctcctcagatcatgactgaccaagatgatattccaagaagtaaactactggcctttatagagtaggatgtaggccattttcattactgataacatacttttaaaagaaatgtttacagatttaaataagttaaaacatctaaatgcttttaaaagagcacctggcacattgcaagttattcattattaattagtagatgaatcatatatctggagtgcacccttgctctatatgaaagcttccctaactatagatatataggtgatagactgacaataaagatttgaggaaaga

SEQ ID NO: 260704 - DNA, 317 bp, Homo sapiens
caaaatgttatctttcaaagcaggagagttagttttacaactacttcttaaaacttggaataggccaggcatggtggcctatttgggaggctgaggcaagcagatcacctgaggtcaggagttcgagaccagcctggccaacatggtgaaaccctgtctctactaaaaatacaaaaagtagccgggtgcatgcctgtaatcccagctacttgggaggctgaggcaggagaatcgcctgaacccaggaggtggaggttgcagtgagccgagatcatgccattgcattccagcctgggcgacgagtgaaactccatctc

SEQ ID NO: 260705 - DNA, 1182 bp, Homo sapiens
cggtcatattcctcttacgtttctaaaattctcctagtagctttaactgattattcaaaatggagacagtgctttgcttcttgattttaagatttgtaaaatttaaaggtacactgcctttatttgattttgcttggagtcactgtgtgaaaattaattgagcgttgacaatctatagttagtaccagcgattttaatcaatatgcaatgatgcagcgtaatggcaaagtattggtttatctgttttgactgatttttttctataaataaagcaaacatacacccatatatgtatgatttatggtgatagaaataaaacggagtcagactattaacccagcaaatatggtagcctgccaagatgcagttggcaggcaaaattaatgtctgaaacagaacacattactgagataaaggacataaaattattaaacacttcgtgcatccatttttaccaggaaggagtccttagtttccgtgtattattttacagtaaatggctataggactagatgtgtaggctaccaaaaagaaaggaaaaaaaagaaccaggtcattcactgttgtggcatcagtagtcagctgtgctatttctagcaacccctccttctagaacccagctaagcaaaatggtgagcctctgagacaacttggctgaagtcatctcgaagaagcatagccaattgcacagggcattcactgccttggaactttttgaaagtcttcagatggctttagtgaaatggttttcccagattgaagggttcaaatctttgcacctagcagcaagcgagagaatgagattatctctgtcttcctccacggattaaaaacagtgataggataatggttggacccagcactgtaggcctggatcttggggcttcttgggaagaggaaggatacaattaaagataaggaactacaaaaccccgtagggcgcttggcgagtgaccgggctgggtgttggcagagagcaccatgtgtgtaagcccctgtggccacaaaaggaccattgggattcttcacgtggaccagtgttaagcagctggtaaacagggaaaagcatggggggaagtgaacagggatggaaggtttgtcttgattagtattaaaaaaaaatgttttactttctagaaaattgtaactttgaaggggacctcctactaaatttatttttaa

SEQ ID NO: 260706 - DNA, 1412 bp, Homo sapiens
agcaggctggtaccggctctgaggtgtatggatcaccgcgggcctcccagccagccccgcggcggggcagccgcaggagccctggctgtggtcggggggcagtgggccatgctgggggcagtggaaggccccaggtggaagcaggcggaggacattagagacatctacgacttccgagatgttctgggcacgggggccttctcggaggtgatcctggcagaagataagaggacgcagaagctggtggccatcaaatgcattgccaaggaggccctggagggcaaggaaggcagcatggagaatgagattgctgtcctgcacaagatcaagcaccccaacattgtagccctggatgacatctatgagagtgggggccacctctacctcatcatgcagctggtgtcgggtggggagctctttgaccgtattgtggaaaaaggcttctacacggagcgggacgccagccgcctcatcttccaggtgctggatgctgtgaaatacctgcatgacctgggcattgtacaccgggatctcaagccagagaatctgctgtactacagcctggatgaagactccaaaatcatgatctccgactttggcctctccaagatggaggacccgggcagtgtgctctccaccgcctgtggaactccgggatacgtggcccctgaagtcctggcccagaagccctacagcaaggctgtggattgctggtccataggtgtcatcgcctacatcttgctctgcggttaccctcccttctatgacgagaatgatgccaaactctttgaacagattttgaaggccgagtacgagtttgactctccttactgggacgacatctctgactctgccaaagatttcatccggcacttgatggagaaggacccagagaaaagattcacctgtgagcaggccttgcagcacccatggattgcaggagatacagctctagataagaatatccaccagtcggtgagtgagcagatcagaagaactttgccaagagcaagtggaagcaagccttcaatgccacggctgtggtgcggcacatgaggaaactgcagctgggcaccagccaggaggggcaggggcagacggcgagccatggggagctgctgacaccagtggctggggggccggcagctggctgttgctgtcgaaactgctgcgtggagccgggcacagaactgtcccccacactgccccaccagctctagggccctggacctcgggtcatgatcctctgcgtgggagggcttgggggcagcctgctccccttccctccctgaaccgggagtttctctgccctgtcccctcctcacctgcttccctaccactcctcactgcattttccatacaaatgtttctattttattgttccttcttgtaataaagggaagataaaacca

SEQ ID NO: 260707 - DNA, 1355 bp, Homo sapiens
agcggggagagagccgccgagccgagccgagccccagctccagcaagagcgcgggcgggtggcccaggcacgcagcggtgaggaccgcggccacagctcggcgccaaccaccgcgggcctcccagccagccccgcggcggggcagccgcaggagccctggctgtggtcggggggcagtgggccatgctgggggcagtggaaggccccaggtggaagcaggcggaggacattagagacatctacgacttccgagatgttctgggcacgatcaagcaccccaacattgtagccctggatgacatctatgagagtgggggccacctctacctcatcatgcagctggtgtcgggtggggagctctttgaccgtattgtggaaaaaggcttctacacggagcgggacgccagccgcctcatcttccaggtgctggatgctgtgaaatacctgcatgacctgggcattgtacaccgggatctcaagccagagaatctgctgtactacagcctggatgaagactccaaaatcatgatctccgactttggcctctccaagatggaggacccgggcagtgtgctctccaccgcctgtggaactccgggatacgtggcccctgaagtcctggcccagaagccctacagcaaggctgtggattgctggtccataggtgtcatcgcctacatcttgctctgcggttaccctcccttctatgacgagaatgatgccaaactctttgaacagattttgaaggccgagtacgagtttgactctccttactgggacgacatctctgactctgccaaagatttcatccggcacttgatggagaaggacccagagaaaagattcacctgtgagcaggccttgcagcacccatggattgcaggagatacagctctagataagaatatccaccagtcggtgagtgagcagatcagaagaactttgccaagagcaagtggaagcaagccttcaatgccacggctgtggtgcggcacatgaggaaactgcagctgggcaccagccaggaggggcaggggcagacggcgagccatggggagctgctgacaccagtggctggggggccggcagctggctgttgctgtcgaaactgctgcgtggagccgggcacagaactgtcccccacactgccccaccagctctagggccctggacctcgggtcatgatcctctgcgtgggagggcttgggggcagcctgctccccttccctccctgaaccgggagtttctctgccctgtcccctcctcacctgcttccctaccactcctcactgcattttccatacaaatgtttctattttattgttccttcttgtaataaagggaagataaaacca

SEQ ID NO: 260708 - DNA, 483 bp, Homo sapiens
gctcttctttgtagaagaactggctagatataggcagggtagaggcaaagtttccaagaggctgtgagcctttcgatgcacctttccagaaatccagccccaggggaaggctttaggagaattgccacagggtttcccaccctcagggctgtcattgctctgggttatcacttcatcaatccattggtcatggttgggataccaggaggtggggtgggaatggtgttcccccttgggctgcagtggtaggttttgttccacagatttggccattgcgtatttggattacttgctgcccctgccacccaccatctatcccagaaattgcattttctgtcttgccctatttgccatctgtaactctcacccaccagaaacttacaaagcttatctctcccaagttcctcttgataagaaatcatgtttatgtgattctagttatttccactttcataaagatataaagtatcattaaaaaaaaaa

SEQ ID NO: 260709 - DNA, 2540 bp, Homo sapiens
cagccaaaccatatcaaccttattgatgtttttgcaggttttggaaggtgacaatgaaatgtgaagaagttacatttctcaaacttgaaagttagtgacggcttaccaaattttaatgaaaattaaatatgacttagaagcattgatttatgaaggcttatgatgtcatcggtttcgacagaaagcaaactccagcaggctgtgagcctacagggagttgacccagaaacatgcatgattgtatttaaaaaccactgggcacaggttgtgaaaatcttggagaagcacgaccccttgaagaacacccaggcaaaatatgggtctatccctccagatgaggccagtgccgtgcagaattacgtagaacacatgctcttcttgttgattgaagagcaagccaaagatgctgcaatggggccgattctggaatttgtggtctctgagaacatcatggagaaacttttcctttggagcttgagaagggagtttactgatgagactaaaattgagcagctaaagatgtatgagatgttggtcacccagtcgcaccagcctctgctgcaccacaaacccattctgaagcctctgatgatgttgctgagctcttgttcaggaacaaccacccccactgtggaggagaagctggttgtcctactcaatcagctctgttccattcttgccaaagatccatccattttagaactcttcttccacactagtgaagaccaaggcgctgccaacttcctcatcttctcccttctgattcccttcattcaccgagaggggtcagtaggccagcaagctcgggatgcattgctcttcatcatgtctctttctgctgagaacaccatggtggcccatcacatcgtggagaacacctacttttgtccagtacttgcaactgggctcagtggtctctactcttccctgcctacaaagctagaagagaaaggcgaggaatggcactgccttctgaaagatgactggcttctacttccttctcttgtccagttcatgaactccctggagttttgcaatgcagtcatacaggtggctcaccccttgattcgaaatcagcttgtcaattacatttacaatggatttttggtaccagtcttggctcctgctctccataaggtgactgtggaagaggtcatgaccacaactgcatatctggaccttttcctgcgtagcatctccgagccagcactacttgagatcttcctccgttttatcctattgcaccagcacgagaatgtccacatcctagacactctcacgagtcgaatcaacaccccgtttcggctttgtgtggtgtctctggcattattcagaactctcattggtttacattgtgaagatgtgatgttacagctagttctaaggtatctgatcccctgcaatcacatgatgctgagtcagaggtgggctgtgaaggagagagactgttactctgtttctgcggccaagcttctcgccttgactcctgtctgctgctccagcgggatcactctgacgctggggaaccaagagagggattatattctctggtcaaagtgtatgcatgacacttcagggcctgtggagcggccattccccgaagcgttctccgagtcagcctgcattgtggagtatgggaaagccctggacatcagctacctgcagtacctgtgggaggcccacaccaacatcctccgctgcatgagggactgccgtgtctggtccgccctgtatgatggcgactcccccgaccctgagatgtttctccagagtctgacggaggagggcagtgtgagctcggcctgccctgtgttcgggctcccgcaacaactccccaggaagacaggacctcagctggctcccagaaaggacaagagccagacagagctggaatgggatgacagctatgacactggaatctcctcaggggctgacgtgggctccccagggccttatgatgatctggaggtttcaggccccccagcacccattgatccccccaaacacatccaggagatgaagaagaatgccctcctgctcttcaaagggtcctacatagaagagtcggactttcaggatgatgtgatggtgtacaggctgtgtgctgagaaggactccgaggacatgaaggattctcaggaggaagctgctaggccaccagctgaagcccaggctgaagttcagagtgtccccatcaacaacggccccctcctcagcacccagccagagacagattcagaggaggagtggaatagggacaattcagacccgtttcacagtgagcccaaggagccaaagcaagagagggaacctgaagcagccccagaatccaactcagagttagcatcccctgcccctgaggcagagcacagctctaacctgacagccgcccacccggagagcgaggagctcattgcccagtatgaccaaatcattaaagagctggattccggcgccgagggcttgatggaacagaattaccccacacctgatcccttgcttctcactaaggaggaagaagggaaggaagagagtaaagg

SEQ ID NO: 260710 - DNA, 2528 bp, Homo sapiens
catttttttattattgccattacaggttttggaaggtgacaatgaaatgtgaagaagttacatttctcaaacttgaaagttagtgacggcttaccaaattttaatgaaaattaaatatgacttagaagcattgatttatgaaggcttatgatgtcatcggtttcgacagaaagcaaactccagcaggctgtgagcctacagggagttgacccagaaacatgcatgattgtatttaaaaaccactgggcacaggttgtgaaaatcttggagaagcacgaccccttgaagaacacccaggcaaaatatgggtctatccctccagatgaggccagtgccgtgcagaattacgtagaacacatgctcttcttgttgattgaagagcaagccaaagatgctgcaatggggccgattctggaatttgtggtctctgagaacatcatggagaaacttttcctttggagcttgagaagggagtttactgatgagactaaaattgagcagctaaagatgtatgagatgttggtcacccagtcgcaccagcctctgctgcaccacaaacccattctgaagcctctgatgatgttgctgagctcttgttcaggaacaaccacccccactgtggaggagaagctggttgtcctactcaatcagctctgttccattcttgccaaagatccatccattttagaactcttcttccacactagtgaagaccaaggcgctgccaacttcctcatcttctcccttctgattcccttcattcaccgagaggggtcagtaggccagcaagctcgggatgcattgctcttcatcatgtctctttctgctgagaacaccatggtggcccatcacatcgtggagaacacctacttttgtccagtacttgcaactgggctcagtggtctctactcttccctgcctacaaagctagaagagaaaggcgaggaatggcactgccttctgaaagatgactggcttctacttccttctcttgtccagttcatgaactccctggagttttgcaatgcagtcatacaggtggctcaccccttgattcgaaatcagcttgtcaattacatttacaatggatttttggtaccagtcttggctcctgctctccataaggtgactgtggaagaggtcatgaccacaactgcatatctggaccttttcctgcgtagcatctccgagccagcactacttgagatcttcctccgttttatcctattgcaccagcacgagaatgtccacatcctagacactctcacgagtcgaatcaacaccccgtttcggctttgtgtggtgtctctggcattattcagaactctcattggtttacattgtgaagatgtgatgttacagctagttctaaggtatctgatcccctgcaatcacatgatgctgagtcagaggtgggctgtgaaggagagagactgttactctgtttctgcggccaagcttctcgccttgactcctgtctgctgctccagcgggatcactctgacgctggggaaccaagagagggattatattctctggtcaaagtgtatgcatgacacttcagggcctgtggagcggccattccccgaagcgttctccgagtcagcctgcattgtggagtatgggaaagccctggacatcagctacctgcagtacctgtgggaggcccacaccaacatcctccgctgcatgagggactgccgtgtctggtccgccctgtatgatggcgactcccccgaccctgagatgtttctccagagtctgacggaggagggcagtgtgagctcggcctgccctgtgttcgggctcccgcaacaactccccaggaagacaggacctcagctggctcccagaaaggacaagagccagacagagctggaatgggatgacagctatgacactggaatctcctcaggggctgacgtgggctccccagggccttatgatgatctggaggtttcaggccccccagcacccattgatccccccaaacacatccaggagatgaagaagaatgccctcctgctcttcaaagggtcctacatagaagagtcggactttcaggatgatgtgatggtgtacaggctgtgtgctgagaaggactccgaggacatgaaggattctcaggaggaagctgctaggccaccagctgaagcccaggctgaagttcagagtgtccccatcaacaacggccccctcctcagcacccagccagagacagattcagaggaggagtggaatagggacaattcagacccgtttcacagtgagcccaaggagccaaagcaagagagggaacctgaagcagccccagaatccaactcagagttagcatcccctgcccctgaggcagagcacagctctaacctgacagccgcccacccggagagcgaggagctcattgcccagtatgaccaaatcattaaagagctggattccggcgccgagggcttgatggaacagaattaccccacacctgatcccttgcttctcactaaggaggaagaagggaaggaagagagtaaagg

SEQ ID NO: 260711 - DNA, 487 bp, Homo sapiens
catctgctcttctcccttggcacaaagttaaactgcatttttttcagcctccctggaggttaagtgcaaatcagagagatgcatgaaaaagtgatgtttctcatgcatttcagaagaaaccatcaaaacctcccaggtgtgcttcttccggctcttttcccatttgcaactctgcaactcataggctaggaaatgacctcaggaaggactttgaagtcatcagcggaaggtggatgaatgactttgtggaatccaggcctgagcttgattcctttcctggatgaccagaaatatccacaagggactgctaaccttgaacaagataaaactttgttttattccactgagctttggaggcttagcatgttagaatggttagaattggtagtattagagcataaattaatgtggcaaacttactgagtttttgtgaatactgctatgagtgaattgagcaagtgaataaatgtaatctatatttatgaac

SEQ ID NO: 260712 - DNA, 475 bp, Homo sapiens
ctgtattcaacaattggctcatgaaacttctgcaaatttaacaccatgctcttgtgagctggagtgagctggcatgagcacactactgcccgtatttaatgaggttgagatgccacagcttccaaggcatgaggaggaggagggaatctgaagacagacaaataggaatgttgaagtggctgtatcatgctaactgcacactcattcccgactacattcctctagaaagcccacaagatatcttcttcactaagacttcgatttttaaaaattttatttcttgttattttgttttagtttagtagtaccttaggaggaaggcaagggctgaaaaactacctattgagtactgtgctcacgacctgggtgaaggaatcatttgtactccagaccccaatgacatgcaatctacccaagtaacaaacctgcacatgtacctccaaacctaaaataaaagttgaaaatggaaagaaaa

SEQ ID NO: 260713 - DNA, 313 bp, Homo sapiens
agtgggggttggggacccctggtataaaggaaaaataaaaatttgatttgagtaggaagctctggtttaattttggcattatcagctaatggccatgtgactatgagcaactccctctgggaagcagctggactagattctcctaagggggcttccagatactcttcagctgtaatatattatttccatgtggtggcaagtagctgcttagggatttgttttcaggttaattgaagacatacagcaaaaatggttgaggcagactgtagaattctacaggtctgagtttgatcttggccctgccgatgtttca

SEQ ID NO: 260714 - DNA, 343 bp, Homo sapiens
atccaccaccccctgcctgctggggacagcgcagccccatgccacagggttgcgtagggagctggggtgcagaaagagctccgtggctgtgggttttggtcctgggcttcgggacagactgttcagggctggttgggaaggacatagactgagcagaccctgcccacagagggcttttctgtgccagggccacaggggtcccagagacggacacagaggctgccacaggcacccatggctggtagaatgaggcagggactcagagaactggggaactgactcccacctcagtttcagtatcagcaaggcgcccttgaaatctgatccctggcttctgaagccc

SEQ ID NO: 260715 - DNA, 240 bp, Homo sapiens
gatatgtttactttcattcttactaagtagagtactcagaaggtgtgtcttcttctgaggctttcacttggcaaagataaaattagtagtctctaacgtatagctagtagagaccaagcaaaatatgatttgttgtcagttgcatcttttctcttgccagaggcaattgattactgaactcgttataggtttaggagtgttgaagatcatcagtatcataaccaaaaggaaaataatgtg

SEQ ID NO: 260716 - DNA, 455 bp, Homo sapiens
cgtaattgttagaaaattcttaccagtgtcatattgagctgacagtctatttacctttctgtaactatgaaaacattggctctctggaagtaggactaagcctacttcttcttttaagcggtaataaccacttcccttttatagactcccagggttgaaagggaccttccaagtcatctgttcaaacctcccattctggcatggaataaacaggtttttttcctgagtatatactatgtacaacgccctaaacatagataaaagacacagtgttgtgccccagcccaccccccgcccccagccccaaaggtgaggcaaagtagcaaataattacaacatggggctcagacagaagttacatttaagttgatttctaaaataatttgtttccctttttgttctagaatgtttttgttctttcaaatgtttgacataaacttcttttggatattaaa

SEQ ID NO: 260717 - DNA, 456 bp, Homo sapiens
attcacctaaaacatgtttatcgagtggcaccttttgccccagcactctgccacttagacactcaggatgcgtaggtgagttacatgttgcctaagaatctgtttccctgtctgtaaattgggggtgaccccagaagccaatttgcagaactgggggctaaaaataaatgattcctgtgccgtgtctcacacctgtaatcccagcactttgggaggccgaggcaggaggactgcttgaggccaaaagtttgagaccagcttgggcaacatagcgagaccccatctatacagaaataaaaataaattagctgtgggtggtacatgcacctgtagtcccagctactcgggaggctgaggcaagaggatcgctggagcccaggagttggaggccgcagtgagttatgatcacaccactgcactttagcctaggtgacagagtgagatcctcctctctta

SEQ ID NO: 260718 - DNA, 464 bp, Homo sapiens
atcttccattaacattggtgtcctaattctgagcatattgaaaaaagaagcgaaactacacagatccatagaacgggactgaaagggaccttaaggagcatattgtctataacctgcccatttcataaagtcgcctggtgatatcgctagactaaagtagatgagggtttcttttccattcaaaaggacaggaatatggatgaaggtcaatgaggaccacgttagcatattagccagcatgactttgttatacttcagaagaaaactgctgcatctcaatgttacctccacaataaatcaatatattaggttgaaccacatgaaactgcccatacttgatcattttgccctaccaaaaaaagtcaattacatatgattcaacttagtatgttccaaactctgaaactgcttttccagtaagtgaactgattatagtcctttaaaaactaaataaaatgaacaga

SEQ ID NO: 260719 - DNA, 437 bp, Homo sapiens
  misc_feature (13)..(13): n is a, c, g, or t
  misc_feature (15)..(15): n is a, c, g, or t
  misc_feature (37)..(37): n is a, c, g, or t
cctcgtatgcccngntgatctagaggatcccatcganctcaaagtgacagactgaaagggaccttaaggagcatattgtctataacctgcccatttcataaagtcgcctggtgatatcgctagactaaagtagatgagggtttcttttccattcaaaaggacaggaatatggatgaaggtcaatgaggaccacgttagcatattagccagcatgactttgttatacttcagaagaaaactgctgcatctcaatgttacctccacaataaatcaatatattaggttgaaccacatgaaactgcccatacttgatcattttgccctaccaaaaaaagtcaattacatatgattcaacttagtatgttccaaactctgaaactgcttttccagtaagtgaactgattatagtcctttaaaaactaaataaaatgaacaga

SEQ ID NO: 260720 - DNA, 3896 bp, Homo sapiens
  misc_feature (350)..(350): n is a, c, g, or t
  misc_feature (1057)..(1057): n is a, c, g, or t
  misc_feature (1400)..(1400): n is a, c, g, or t
  misc_feature (1746)..(1746): n is a, c, g, or t
  misc_feature (1769)..(1769): n is a, c, g, or t
  misc_feature (2024)..(2024): n is a, c, g, or t
  misc_feature (3891)..(3891): n is a, c, g, or t
gtcggagcaggcgagcgcgccgctggccaaggacaagcagatcgaagagctgcggcaggagtgccacctcctgcaggcgcgtgtcgcctcgggtccctgcagcgacctgcatactggaaggggcggcccctgcacccagtggctcaacgtcagagacttagaccgcctgcagcgcgagtcccagcgggaagtgctgcgcctgcagaggcagttgatgcttcagcagggcaacggtggcgcttggcccgaggcgggcggccagagcgcaacctgcgaggaggtgcgacggcagatgctggcgctggagcgcgagctggaccagcggcggcgcgagtgccaggagctgggcncgcaggcggccccggcgcggcgacgtggcgaggaggccgagacacagctgcaggcggcgctgctcaaaaacgcctggctggcggaggagaatgggcggctgcaggccaagaccgactgggtgcggaaggtggaggctgagaatagcgaagtgcgcggccacctgggccgcgcgtgtcaagagcgcgatgcctccggcttgatcgccgaacagctgctgcagcaggcggcgcgcgggcaggacaggcagcagcagctgcaacgcgacccgcagaaggccctgtgtgacctccatccttcctggaaggagatacaggcgctccagtgtcggcctggtcaccctcctgaacagccctgggagaccagtcaaatgccggagtcccaagttaaaggtagcagaaggcccaagttccacgcacggcctgaagactacgcagtgtcacagcccaacagagacatacaggagaaaagggaagcctccctcgaggagagcccagttgcccttggggagtcagccagtgtcccccaagtttcagagacagtccctgccagccaacctctgtccaagaaaaccagctcccagtcaaactcctcctctgaggggtcgatgtgggccaccgtgccgtcctcccctactctggacagggacacagccagtgaggtggatgacctggagcctgacagcgtgtccctggccctggaaatgggnggctcggcggctcctgctgcccccaagctcaagatcttcatggctcagtataactacaacccatttgaggggcccaatgatcaccctgagggtgagctgcccctcacagctggggactacatatatatcttcggggacatggatgaggatggcttctatgagggggagcttgaggatggccggcgggggctggtgccctccaacttcgtggagcagattccggacagctacatcccaggctgcctgcctgccaaatcccctgatcttggccccagtcaactcccagcggggcaggatgaagctctggaggaagacagcttattatctgggaaagcccagggantggtggacagagggctgtgccagatggtcagggtgggctccaagacagaagtagcaacagagatcctggataccaagacggaagcctgccagctgggcttgctgcagagcatggggaagcagggcctctccagaccccttctggggaccaaaggggtgctccgtatggctcccatgcagctacacctgcagaatgtcacagccacatcagccaacatcacctgggtctacagcagccaccgccacccccatgtggtatatcttgatgaccgagagcatgccctgaccccagcgggcgtgagctgctacaccttccagggcctgtgccccggcacgcactaccgggngcgggtggaggtgcggctgccangggacttgctgcaggtgtattggggaactatgtcctccaccgtcaccttcgacacactcttggcaggacctccctacccaccgctggatgtgctggtggagcgccatgcctcgccaggtgtcctggtggtcagctggctccctgtgaccattgactcagctgggtcctccaatggagtccaggtcaccggttatgctgtgtatgcagatgggcttaaggtttgtgaggtcgccgatgccactgctgggagcaccntattggaattctcccagctacaggtgcccctcacgtggcagaaggtctcagtgagaaccatgtcactctgtggtgagtccctggattcagtgcctgctcagatccccgaggacttcttcatgtgtcaccgatggccagagactccaccctttagctacacttgtggcgacccatccacctacagagtcaccttccccgtctgcccccagaagctgtcactggctcctccgagtgccaaggccagcccccacaaccctggaagctgcggggagccccaggccaagttcctagaagcattctttgaagaacccccaaggaggcaatccccagtgtccaacctgggctcagaaggagaatgtccgagttcaggggctggcagccaagcccaggagcttgcagaggcctgggagggctgtagaaaggacctgctctttcagaagagtccccagaaccacaggccaccttcagtcagtgaccagcctggggagaaggaaaattgctaccagcacatgggcaccagcaaaagccctgctccaggattcatccatctacgcaccgagtgtgggcccaggaaagaaccgtgtcaggaaaaggctgcccttgagagggtacttcggcaaaagcaagatgcccaagggttcacacctccccagctgggtgccagccaacagtatgcatctgacttccataacgttttgaaggaggagcaggaggcactgtgcttggatctgtggggcacagagaggcgagaggagaggagggagcctgagccccacagcaggcaaggacaagctctgggggtcaagagagggtgccagctccatgagcccagctcggcactgtgtccagctccatccgccaaagtcatcaagatgcccaggggtggcccccaacagctggggacgggggccaacactccagccagggtctttgtggccctctctgattacaaccccctggtgatgtctgccaacctcaaggctgcagaggaggagctggtcttccagaaaaggcagttgctaagagtgtggggctctcaggacacccatgatttctacctcagcgagtgcaacaggcaagtgggcaatatccccgggcgcctagtggctgagatggaggtggggacagagcagactgataggaggtggcgttctccggcccaagggcacctgccttctgtggcccacctcgaggactttcaggggctcaccatcccccagggttcctccctggtgctccaggggaactccaagagactcccactgtggactccaaagatcatgatagcagctctggactatgatcctggggatgggcaaatggggggccaggggaagggcaggctggcgctgagggcaggagacgtggtcatggtttacgggcccatggatgaccaaggattctattatggagagttgggcggccacaggggcctggttcctgcccacctgctggatcacatgtccctccatggacactgagcaagcatccttgcccaggtagtggcctctggctgctcacaccctgccagaggagaagcaagcgttcagaccctcacaccagcacccctcctcaccaccataagtagcatgtgctccaagtgccactgtgttaaactgatggtagtccttaagtgtcccctaggctctgaaagtagcaggacttaagcctgagttatttgcaaaagcaaacacaacaagccaacccctgagagtctgagaagccatttcaaagttgctgataactatggcaggtatacggagaagcgcctttttctgtggccaatgtgtgttttctctgggaggttaaggttatctgtccattgccttgtacgaaagtctcaagaaaagtctacatcttaaaaaanaaaaa

SEQ ID NO: 260721 - DNA, 270 bp, Homo sapiens
gttcttgttaatgccatcagcacaggaaaatgggcagctgggcaagatggggaccccccacccccgacccctggctgctccctgaggggctgaagctctcctagcacacaaatccccagggtctagctgctgagcctcccaggccactccgggccctggcaggccctagagctgtagctgtgaatggtacagctgtgtgtcctttctgtccccccaactgtctactgtgctggagtctccagactgtgggggttagatacatacaataac

SEQ ID NO: 260722 - DNA, 182 bp, Homo sapiens
tggatgtaggatctgttggaaagagtctgggtcatgggggcatatctctcatgaatagctggatgctgtcctcatgataataagtaagctctcactctattagttcccaaaagagctactcgttaaagagcttggcacctctctctctctctctctctctctctctctctgcctgcgcgccc

SEQ ID NO: 260723 - DNA, 235 bp, Homo sapiens
acacatacacacaggcacacggtacccataaacacacagccacacacacattcacaggcacacacacattcacagggactcaataaaccctggaatcttctctgtgatagttaataaagcctaccatatgaatgtgtatatgtgtgtgaaatgtgatgtttatagtagatgtcaatctacttctatgtgtttttatataaatgagaataaaacattttaatcccctttaactttg

SEQ ID NO: 260724 - DNA, 437 bp, Homo sapiens
gagacctctcctcatctctgcagggatgaggggccaactctgtagcccaggctgttgcttcccggtctgttgatgaatcctccatagtctggtgagtgtagtgtctgactctggagcccaggctattgcttctctgtctggtgatgcttcctccatactctgtagtctgctgtgtgtaaacatatgtatatatatatatacatatatatgtatataatttatacatataactgtaaataaaaataattgtataatgtacataattatttaaataaataaatgtaaataaatacatatataattttatatatattatatatatttatatatataaaaaatatatatattttttcccttctcatatcaatttgcttatcatatcatttacttattatatctgtattgccatataattgagacaaaagatgtttaccctt

SEQ ID NO: 260725 - DNA, 457 bp, Homo sapiens
tttttttttttggtgttatacaaagagaaaatgttcttaattctaatacagtcctattcatcaatctatttattttatgatttgcacattttatgtcctgagcatatatgactacctccaagatcataaacatcatttcctatatattcttctagaagttttatagttttagatttaggtatgagtatattatccatgttgaattgatatgtatggcattatttaaggattgagttttattttcaggtggatattcagttgttccagtaacatttgatagaaaggcttatgatttccaattgagtaactttggcatctttttggaaaatcaattgcacatacatatatacatctattccgggaatctttttctgtgcccttgtcaatgcttgtttcaataaacacttttttgcttggtgtagttttataataagtcttaaagttaagtagtgtgact

SEQ ID NO: 260726 - DNA, 353 bp, Homo sapiens
gagctgatattatgatgataattatagtaaagctgtgtcatattcttttggataaagtcattttaacgatatattttaacttcctttagcgctttgtgtgctgacataatcaggaattgcatggagttacaacttttctttctctcacaatctccatttgaagaaatcattttttaatgtgctgtgtgtgtgcatgtataggcatgtgtgtatatgtgtataataagagaaatagggttgggacatgtcttgataatctcaaatttctaaccatcctgctcctttttttgttgtatttgtaatattcttctaatgttattaataaaaataaaactgtttcccattcagagttt

SEQ ID NO: 260727 - DNA, 1445 bp, Homo sapiens
agacctagaaatagcaactaaagagggatgagaaaaaaatatcataaaggtcaagggaagagtgcgtcttgagaaagaggatatgtccatgtattgccaaagcttaaggatattttctcttttcagaatatggcaacagatttctgaaagtaaatgtttcccatttcctaagtaccatacctaccaaaagacatcagaaatatagtcagatcttactgatcaacttctccatccaagtgatcactgttacttaagggctttcaatttttttttttgaccatgatccacagggaaaagaaaaatacattttatattgtgattcagctcacaaaatataaaactatctaacatattaaaacaaaaattgtacaagaaaatatttaaactttaccacatgccttgcattcagttatttttcattccagtccattccacaccattccattcctttccattaaaaataatatccctcaacattcatttcatgagtcatcaaagagtcctgaattgtggcttgaagactattgccattgcctatgtggcccctccctcctcaaacttcctcactctgccaaaggcaaggcagcttcccatgacagatgctgatgcaggagaaaaggctctttacaagattttcaacaaaataaatgaatgatgaccagaatcactcagcaaatattccagtaatgacactcacgcatggcaaacagccatatggggccctcagtggtctctgatttacaagctttatctcactaattatcataacaaccctagggggtaggtactcttattttcatcccattttacagatgagacagctgaggctcagggagattaagggatccactcaaattcacatgactagtaaacagcattcctgggatttgaaccactcttccctgacgccaaaacttctgtttttagtgctacattctatttttttgcattaattgttttggtggatagaatttaaacttttggaaaattttcaccttggaaacaaacttcactcaaaagtataaaagtataatctgtaaccttcccagctaggttcatagcctggctatgaactggggactgtctgactccagagctgagcttggagccctctggcagtgaaatacattgtcttatattcctgtccctctttcacatgcacaggcatgtaagaactccaacatcgcaagcttctttttaaaaacatatttttaaaagttgcacaatctgagtgatctgctcacacgaagcagtgatgactcttgtctattttttaaaaatccctttctggatcacataaaacataaaggacagagcaagctctttgctccacctaatggataaggaggcaaggacatgctcacgagccttttctctgcaaagtgatttctttcctctaacactggctcctgagaaactccttggaaatgagaatgaggttctag

SEQ ID NO: 260728 - DNA, 605 bp, Homo sapiens
gctcattgcttgttattatatgtgatggatataaatatacatttataaataaatctgtccatccatatatacaatgatagattaataaacacagtgctggtgtgttcatttacagctcagataaataaattcaattttttagtggcaaacataccatatagattaaaggaacaaccccagtttcctttgacagacctgctttccaagctttgtggccataagatgctttgcagttgaagcatatatcccaaggagattaaataaattcttgtagttagcagttggagagcgtattgcttcttttctgtgaacactgaagaaaggaatattttatgatgagaatcacaaactgtataagtttaagctgaaataaggctcttggcccactagctatttctctaactttgctgtttgttctgtgtgctcttgtggtctcaataccttgaattcttaagaaactaagatttacaaggatcatttcttcatgtgaagaaatgaactcttttagttcattttctgttgcttataacaaaatacctgaaactgagtaatttcttacaatcatggaggctgggaaggccaaggtcaaggggtggcatctggtg

SEQ ID NO: 260729 - DNA, 402 bp, Homo sapiens
ggccctatggcccgccggcttttagctatgcgccggtcccacagctgcagtgctccctcagtccctggagttcccagccaagccacagacctgcctctgaggaagggaatcgagcagggagtaggaggggacctctggggactcgggcctggtaagtggggctctggcaggcagaacggggctggggtgtcagcaccaccccgcccattcctctctgctttggtcacagcatccctggtctccaccttgctcactggcttctcgtttgggctggaatgggcctctgactcctgtctgccccagcctccttcccgtactcccgggttctcccttttccttgttccctaaagccagtgctaattaagacacaccctctttgcatgttccttccaccattatccc

SEQ ID NO: 260730 - DNA, 662 bp, Homo sapiens
atagagaagaggtctgggttgaaggtagggatatgtgtgtcatctgtgtgagcctttaccacttattgttttgtttcatttgctttcgcttttgcttctcctctgaccctgcacctgtgcaacttcccctcctccgtcaggtctcagctccaatgttgcttccttcgggaggccgccctactcctaccccagtgtgaattaggccgagttaggctctcccccagtctttctgtttaaatttttccttccaagcacttatcatggtttgagatgaaagatttatgtttgcctgtcctttagcgatgaatcccagtccacactgaaatgtgttagaaaaaaatgacttcatttttctgtaatgaaatcatttaggccctaaatctgaggaagagaaggcaggaagaagagctgagtgcagataaattgcaacatttatggatcagatagaaaaagagacactgccgcaagcagctaagaaggagctagaaaggaaacagggtgtccgggatgccatgggagagggagatgggagcgtttcaggacagagcacgtgtcgctgtgtctgattccgttgaggagtcaagcgtgtaaagactggagtgtctactggatttacaatacggggacacaggtccttggttccagcagtttgtgtggagcag

SEQ ID NO: 260731 - DNA, 430 bp, Homo sapiens
cttatcactcatcattaacatgtactctttggagcaagggaaaaatgggaaagctgtatgaagaaaaaggcatacatccatgactactacaccaaatcatgtggccaattaattgcattgataaaaatgtcatcaaacgtggagacataaagcctgcatgtttccatgaacagtgtcaactaaaggaaattatgtcacatattaaaataagacaagtaaatatataaaaagttgaaatttttttaactaatatctgagttcctctaaatactttctgtaatacatgaaacagaaagtttgtagttttttgcttggaggaagaaacaatattgtcttaccactcatttgatattttctcaggaagagtgtgctttcccctggacagtcagaagcaaaatctgtagaggaagaaggaaaaatgtgataattt

SEQ ID NO: 260732 - DNA, 554 bp, Homo sapiens
ttacgcataattacagcagcaagatgaaccgggtaacattcaggctttaattaaaaaattgagctttaccacttgagaaaattgcttaagcctgtggtctcaggtttctcatctgtaaaaggagggtaacaacagtacctatctcatggttatcatgaagcttaaacgaaggaactgagtggttaggcaagcgccagaaatttagcatgcacacaataaaccttagcaataaaccactatcatttagaatgattgaatgttaaacattgtacagggccataaaactggactaattaaactctttggcaatgtagaaactggagcccacagatcagaatcccttgattcctaccctatgtcactgctccttccactacaccactatataaaccttcttagactgctttatgttcgaaaaatagcaggatctcccagcagtgctaaccaggagcaggaagtaaacaaaaagtttctatatcggggtgggcgggggagaaacaggaaatgggcgactgcgcacactaaaattgagatcccttggagcaaggctatta

SEQ ID NO: 260733 - DNA, 543 bp, Homo sapiens
tcactcatttgagattcagaaaacgaaggagcaagtcgtgtaggggagaaattaagggttctttttagacatgttaagtttgagatggctaagacactctaagtaaatttttttttaggaagcagttggatatgcatttttggagctcagggaagatgtctgggctagcaatacaaatttggaagtcatcagcttgtaaatgatatttatagacatgagaatggatttcttaaagagaatatataaatttgagtagtggaagagtgattcagtgttggaggcaaatctgtttcaagaaaggagtggttagctctattgaatgtgctttgagagactgagggcattaagtttgtatgaagagagtagaaatagtatgattgataatttatgagattatggggcattgctacattgacatcttcatcagtgtgtccttttgctttaattcatttaatattttcttcgtgataaaactctttgaagtgggaattacttgataaaaatgtatagatattattcatggttctttctccatactcaacc

SEQ ID NO: 260734 - DNA, 953 bp, Homo sapiens
tcttctgcctccttttttccactttgaaggacccttgtaattatattgggcccacctggaaactcaggatactcagtctattttgaggtgagctgattagcaatctagttctgtctgctatcttaatttccttttcccatataacctgagattctacggattcaaatatagacatttttggatgtccgttattctacagagatcagtccaaaaggcaacaggaatatgtagcaattctaattttatattcaaaatataatcaagtggaagtttaccgaactaaaaggagaaaagagtcatctataatcatactggaagacataatacacctctcattagctgatggcatgaacagacaatatcacaaagaacatagcaaaggtgacagacttgatctaattgggatacataaaacactaaccaacaatgacaaaatataatttcattttatgctgtataaaccatttaccaaaattgaacacataaaggaccataaagccctaatacattacaaagagtagaaatcaaaatgagtgcattctctgaaaacagtgggattaagctagaaatcaataaagccatagagattactaggaaatctctaactgcttaggaattatgtagttgtctgggcatagtggctcacacctgtaatcccagcactttgtgaggctgaggcaggaagatcgctcgagcccaggaattcaagaccatcctgggcaacatagacccctgtctctacaaaagtataattttaaaaagtcagctgggcatggtggtgcatgtctgtggtccttgctacttgagaggctgaggcaggcggatcgcttgagcttgggaggtcaaagctgcagtgggccatgattatgccgctgcactccagcctggataacagagtaagaccatctctcaaagaaagaaattatgtagtatacttctcaatgacctgagag

SEQ ID NO: 260735 - DNA, 236 bp, Homo sapiens
tcagtagcttgaggatgtgactttattttcttctggcttgcctaaagcctaataagaagtctgctatcattcttgttggtgaacgtcagagaaacatgtgtcctttttttcttttatttcttggttgttttcacaatgttctatctctgtttttcagcaacttgattatgatgtacttgagtttatttttctatatttattctgtgtggagtatattgagcttcttgggtctgtag

SEQ ID NO: 260736 - DNA, 372 bp, Homo sapiens
agagtgaatgttcgctggggccttccagaagacagttcagtcttagcaaactggccaggaaggattttcatcaagatggaggaaaaacctggagatctttggctcaaaggacatgacctaattctacagatgaatctgtactgacgttagaaaaccactggtggaacataaaacttgtacattcttctaaaaatgaaggtagatcacagcagactcaatctatttatagccagtcatatcaacattactgattgggaattaccaaaagaggtgaaattatttaacaaatcctttgttaagtcatattctgaacctacagatgtcaatttcaggtgtttattttttaaataaagataattaaaacactaaaaa

SEQ ID NO: 260737 - DNA, 109 bp, Homo sapiens
gaataagtctatgccgtctattctgactggaattaaaaattaacctttaaagtcaattcaggttaagcacagcacaaaagcatatcacttgctaaatggtatttgatga

SEQ ID NO: 260738 - DNA, 452 bp, Homo sapiens
cagctgaatttcctaaaatacagggtgcttgatcataagactcttcaagaaaaagatattttagaacactaataaatacaatgcgaaaaaactgtgttcttatctgggtccttctatcagtgaagccaaaagagctattacaagacaacttaaaactcattccaaagatgaaggcagttgtctgtacaatgcagtgcatcccaggcatctccaaaagacagtaatgagaatccaacccgacagtgaagggagccatgcccatcagggaagttggtgcaattggaaggaaggaaggaaagaagaggtgatccaatcagcatattttttctttgagaacatgaataacaatattcatcaatttctcatacccacaaaaatgttctaaaaaaaacagagaaagcaagttagaaaatccgcaaccatagcaagcagtatcctaaagaaacataatt

SEQ ID NO: 260739 - DNA, 388 bp, Homo sapiens
ggttgcatgaggggccagccaggctggggggtgctcagctgaccagactgcccactgaccttccttctcctgtggacagaagcagcccccaccccttctccagataacaaacacacaggtgtgcactcccattgcacccatcaaagataattgccttattttgctagtaaaattgctgaaaggcttgtcaccattttgcctgtgaaatcagtcaagtacgaatcatccatccaatttctagtaggtcctggtttctcacacttgaactgcctactcaggaattctgggcaaataagaaagatcaaagcaacaaaacctgttcacacgttactgtccttcctgtgactgctaaatagagcaattaataaagttgtcacaatgttacagt

SEQ ID NO: 260740 - DNA, 566 bp, Homo sapiens
gaacttagaccttctggcttctcctttggggatactcctccctctaggacaagtgttgggtctgttctttagccacacactttgtgccatgcctcatcctttaggagaaagaatccagtgggggctgggagtgagtgggcaaggctgtttgatgattaggtgaggtgttagctcacccacctgatccagatctgaagtcaggttttcaagtgtttattagtgatgctaactccagcactgtcatttcacccttgctcagttgtcccttcttcactgtccttgactgccccttttcttggaccccatcagtaggaagttggggtcaactcagtgttgacaggttcattttggccctgagctggttcaggactacatcccagcctgtcccagcaccttgcaaataatgggcactagatacacttgttgagttgtatggaatggaattgatgtataaatatttagttgcacataaacatcctggaaaaattagttgtgaatcacaaagaatgattctggtatctttggaggatctattgagaataaaagtaaaaactagagacaggaaa

SEQ ID NO: 260741 - DNA, 696 bp, Homo sapiens
cccttagcaacagtccatgcataattgcttggagttttaaatgctaaagaaaaatggtgaatttgcactcactaggttttgtagtgaattcttgacatgcatagccaatgcaccatcaggctaaatagtactcatgaagaaacagagataagacacttctggaagtgtgaaaattctgatttgagagaaatgtatgcagaattgatatttatagtacttattttctggctctaatatgttatatattctgctcttggatattggctaattatcatgtcagtaaatgctgtatctggaaaacattttgtcaagtgaataagacttttcatatttctggtaaaagaacagtatatatacttttatacatgtttccaaagatcaaacagctttaaaaaggtgtacatctggctattatttaaccagactgaataatgcatgaaagaatgtagactctttggaataatgtgttattttaattcttacatgactctgttacagagcaagtttatttccattctgaggtttgatgtataatctttctagtcatagaaccatatgaaccaatcactgtctcttacctcccttcaaacacacacacacacacacacacacacacacacacacacacacacagaaagtttaatgataatagcactttttctactcatatactcatagattatgatgagactcagt

SEQ ID NO: 260742 - DNA, 1044 bp, Homo sapiens
gattagaaaaaaaaaaaaaaaaaaaagtgaatgctccttcaatatttatttcatagatctgtgaaaccatttatcaaatcataggtattattcatctttggatccagcttgcagcactttctaacgatgcccatagagtgtttttataattgaaaccatcatgtttgaactagaagggggatgatagaaattaggttgattaaaaaaattattcagctctctttatcctctcaaaatttatagcctctagatgaaaaggagaaaatagggtatcagatgtattctagaaatgcttgatacctcagctgaaaagtaccatttgccacttccttcaagatagtatttgttttgtattacccatataatatttttaaaagttaaaaacacttttctgaataggtaatgtattcatcactgtgtaaaattcaaaaagtacaaaaacgagaattctgtgaaaagtattattctaagtcttattccctagctacttggctcccctctgggaggcagccggtgagctgtatgtttcttttgtaccttttgaaatgattgtatgtgtatacaaatgatcactttatgtatacatttctcctgtccccccccccccttttttttttttgcatttggcagcataccttaacatactcttttgcatcttactttttttttctcaccacttaacaatatatgctcatgcacttcataacaatgttgcagtcaacagtagaccacatatacaaaagttgtcccataagattttaacggagaggcggagcacagtggttaacccctgtaattccagcactttgggaggccgagacaggcagatcatgaggtcaggagttcgagtccaccctggccaacatggtgaacgtctctactaaaaatacaaaaattagccgagtgtggtggtaggtgcctgtaatcccagctacttggaggctgaggcagaagaatcacttgaacctgggaggcagagtttgcagtgagctgagatgaccaccactgcactccagcctgggcaacagagcaagactccatccc

SEQ ID NO: 260743 - DNA, 550 bp, Homo sapiens
tatgaaactttcagagtagcaggggagtcttaagggactaaagcaggaggaaacacaactgaaaatgacaaggggaaatcttaccagcatgaaagcaaagttctgcgtttaagtttaaaggaagatgaaccctgtgaagccaggacacactgcggggaaggggacaagaatgcaattgaaagcccctaacggagaaaaaaaaaagcccatatgtttgttttgttttgttttgtttttgagacagagtctcgctctgtcgccaggctggagtgcagtggcgctatctcagctcactgcaccctccacctccctggttcaaacgtttctcttgcctcagcctcctgagacgctgggattacgggcatgcatcaccatgcccggctaatttctgtatttttagtagagacagggtttcaccatgttggccagtatggtctgaatttcctgacctcatgatctgcctgcttcagcctcccaaagtgctaggattacaggcgtgagccaccacgcccggcccaaaaaacccatatgtttagcatacgctaaaaac

SEQ ID NO: 260744 - DNA, 99 bp, Homo sapiens
gcttacaggtggctttttgctgtgcgcagccttttcttcaaggcaggttggttcctgtatcttgtcttaatctgttactcaacgaatgtaatctccatt

SEQ ID NO: 260745 - DNA, 431 bp, Homo sapiens
gtatttacttctttcaggtaggcagttttgaaatagatagaacatgcaaaatacaggtcaggggccaaacttatcattcagtcaatggctgctattagttcccatataaatggagaagtaacgcatttgaagaatcttctataagtgcataatggatcagacatttttaaaaagtcactgtgtgaaggagtttggacccagttaacacactcgcatgctttgtatagaggtgcttctttataacagctttttcattaccagaaatcaacttctttgatgcacgcaaactttattcattttgtcactaatattattatttataaagaaaaccctttcatggataaataatgaagaaaaagtcttacaaaacaaataaacaagcaagcattcaagtagaattaattaattatcaaaaaaccccaaaaaaacaa

SEQ ID NO: 260746 - DNA, 391 bp, Homo sapiens
ctgtgcagaaattatctaattccataacaacttatgaggtaggtattattatccccatttcacagatgagaaaaatatgatgtctggtgttaagtaatgttctctccatcactaaggctgaggttcaaatctgatgaatgtctgtgtgcttaatcatatctctacactggaggtcgaaaatgatctatgggcacatgggtaaaaatagtcataatgatctagtaaaacagatccatttaaagtaaaagggaggagtaaggattgtagcaaatgcaaactgaagagcccagacccaactaaaagggatagctttgtgacctgaggaaatgtggtctgttgaggctagaacttggagttgtttttcaagagaacctggaaatgtggaatttta

SEQ ID NO: 260747 - DNA, 395 bp, Homo sapiens
tgcccagactggagtgcagtggcagaatctcagttcactgcaacctctgcccacgggttcaagagagcttcctgcctcagcctcccgagtagctgagattacaggcacttaagtattttatttaaaagccacacttttaagaagacccaagctcaagccctggctgcaccatgtaccatccttgcaaccctgagcaagttgtttcgccaccccaaatctggttcttttcttgctagatagaagccctgatattgcccatttcacacagtggtcctgagactccaatgagagataatgtggaagcatcttgtagactaaaatgttaataaaaatgttaactaaaatgttaaatcaaaaagaaatgcgggaaataaatgttgtatttgtctaaaaga

SEQ ID NO: 260748 - DNA, 273 bp, Homo sapiens
taatgtaagcgtaactacgaagccacatgggagaggattttgaagaggttaaaatttggggtcaggaactagatttcagtcctgctttcaccgtttactgtgccttggattttaaagaggatcaaatgaggttgtgaaagtactttgtgaattcagaaaaccccttggaaatgcaaaaatgttggcacccccacccatccttccgtccctaaccacaatctccatagatggaatatatgtacattatacgtaatgtttacatattgtatatgc

SEQ ID NO: 260749 - DNA, 120 bp, Homo sapiens
aggggcacaaggagagtgggtaactctctccctgactacgtgacttgtgcttttatttgaaatatcttgaatttctagaaataccttgaatatcttgaatattcaaatgtttaagaatga

SEQ ID NO: 260750 - DNA, 448 bp, Homo sapiens
aagtagtatgggccaaatgaggaaacctagaaattagctttgtggaagtgctcataggctggacctaattggggagcagatggaagcccagccaggcaggtaaaacatagaaacataggtgcttcaggggactgaacacagtgacaaaaagaagtggttatctgggcaggaagaaagcatctagttaacaagtgctgtgatgtgctggagcaggcaccagtgaggtgtaagtagaaaggtagctagatagtcaccattagcaggcaccagtggtggtagtgagacgtagcttctagattgtattgtggcaattagacattatcaaagcaggaatggagaaaccaatcagaaattctgaaactagaacatgagatttgaaaaagtgacttttagatgacaaaaataagggcaacccaatttcttgagtaggattgtaaggttaaagaga

SEQ ID NO: 260751 - DNA, 346 bp, Homo sapiens
caggcacaaaaaaatcagatattagggaattctggtccaaagaagagtccagaaaaggatgaaaagaaaaagtaaaaaacagagagaggtgtgcatttttaaaaccattacatcaaaacaccttacctctggctcatttttgtagatattgcaaatttggccatttatattactgtttgaaatcatttttgactataataaaaatagcattccctgcattaataaatgtttcagtttattagcattaagtttacatccatggttccttcaggcacaaaacattaggaaatttttgtcatttcataacacctttattttattaagagatgcctccactttagcagta

SEQ ID NO: 260752 - DNA, 224 bp, Homo sapiens
aattcccacttatttgcaagtcatcccttattttttggtactctttttattctaaggctagaaatccgtttctaaggacaagtatagaaaattttaagccagccatggtggctcacacctgtaatctcagcactttgggaggccgaggtggaaggaactcttgagcccaggagtttgagactagcctgggcaacatggcaagaccccatctctttaaaaaaaaa

SEQ ID NO: 260753 - DNA, 691 bp, Homo sapiens
gggacactgactttgagtccaacttttgatttatgtcataattggtgcccatattcatgtaggtgggaactaaatatacaatattacccatagtcagacaaaatatagatttagacagagcctggcttacaggtagaagaattggatgagaaattgtgatgggcatttggtgttcaactcacaggtagagtacagtggatgggtttaatactatgaaaacaactggtcagcttcgtcagctctaaggacagaatgaaaggcagagtggcttggatgactcattctgagaggatgcctagtgaagggctctttcacctattgtgtgccacagacttctttgtcagtttgatgaagacattggacctattccaagattaattacttaatgcataaattaaaaatccagaatttagacttccatgtctgggaagatgaaatagagtgctttttcctctttttcccactaagtttaactaaaaaccttagacattacatgtacaacaaacagaagactctgaaagttgtagagaggagggcagataggttagtaaccttaagactgatacagtggtgagttcccagggtttgttagtttgttgtatcattcatctcatacttgtaggtgaagaagccagcaacttaaaagcaacttaaaaataccaacgggtggccgggcacggtggctcatgct

SEQ ID NO: 260754 - DNA, 311 bp, Homo sapiens
ctcccaaggggccatggggatttcgggtgttactaagctctggggcccgtctcgttccctgtgcagccttttggctcttccatcgtctgtagaactgaaacagcgcatccaactccctaaagtgggttatggtttcctgatgcgaagctgcctgatagaaagtcgcaggacacttagcagctcctgccctcggcccacccccccgccacgcctcgccgttcctgtttgttgtggggtctcacccactccctgggaagcccccagtagcctttctgctccggggtccctccaggcttcttttctacagctcc

SEQ ID NO: 260755 - DNA, 522 bp, Homo sapiens
cagcagagtgaaactctgtctcaaaataaataaataaataaaaatttaaaagttaattacctcagatttcttggtgacttatactgctttattttatgttctgattggtagtattatatttaagtgaaattgtttgtttctaagtaaatggttttaagatgttatcaaaatttactcaccttttagttaaatcttaataatttttagatgtatatttgtaattcagaaagatcatcttcttttgagaaaagtatagtgttacagtttctgtgcaaaaaaattgatagtaacatttccttttattggaatgtattaaaactttgtttccttgtttggggagaaaccattttgctttatttcattactgttaatacctgtgtatgtattaaaactagtataggctaggggcagtgactcatgccagtaatcccaacactttgggaggatgaggcaagaggatcacctgagcccaggagttcaagaccagcctgggtaacacagggagaccccatctctacatac

SEQ ID NO: 260756 - DNA, 533 bp, Homo sapiens
gtgaatgccaaaattacttaatagcataaaatgtttccttttagcagtagcctttggctgtttctctcttaagactggttcatttatttcatacaacttgaataatttctgaggttacagattttaactgtaattaagtctttcttaaaattggttttgtcagtgtagatacttgtggtagataatcgttttattttgaacttttatatttagaggattgaatattttaattgtcttcatctctatcttctattctgcccttttaaagctagtttatggctgggcgcggtaggtcatgcctataatcccagcacttagggaggccgaggtgggtggatcgcctgagctcaggagttagagaccatcctgggcaacatggcggaaccctccctctactaaaaatacaaaaaattagctgggcgtggtagtgtgtgcctgtagtcccagctacttgggaggctgaggcaggagaatcgcttgagccccggaggtggaggttgcagtcttaccactgcactctggcttgggctaca

SEQ ID NO: 260757 - DNA, 253 bp, Homo sapiens
aaagagaaaaagggaagaagaaagaaacatgcacacatcagaaaaaaatcagaaagggagactagagagacaaaagcaaagagaccatttgaatgatttcaccctgaattattagataacttaaaatggtaaggaactgttaattctggacagtgacaaaggcaaacatttaatggaacttactagggatacagcctctgcaatgatgtgctatttcatcctttcccgcttagcaggaaagagcccaaaccac

SEQ ID NO: 260758 - DNA, 722 bp, Homo sapiens
tggaatagctctcttgaagtatttattgagaggcactgggtaagaaccaaccttaccactaagcccacctgcaccagtcagtataagaagactgggaggggtgaaccttctggggagtgctttttcagagctgagctatcccctttcctcccatgagggagaagacctcaggtgttagagcagctccacttgtaggcatctggggagtggccaaggtgcaggagctggaccaatgtgtaggagtaggagtttgaagcactcaacttgaggaaaggcaaaagaatcatcgccaccccctggaagggtagcagagagggtgctgccttcagaaaaccccactcctcacctgggcagatttcttggtcaagactatactgactcagcataaaaccttgaacaccttttattcgccaggcacataaaaagaatcttttgagtgttgataatggggtaggttgtgtgtttgttgtatggtgaggttgggggacagaggacatataagaactctgtactttttgatcaattgtgctgtaaaactaaaactctaaaaaataaagtctattaaaaatggaactttatctaacaaggaggctccccatctctcagcctggcaaattgggtaaagagtcaagacccactggtgtgctgtattcaggagacccatctcaaatgcaaagacaaacataggctcaaaataaagggatggaggaagatctaccaag

SEQ ID NO: 260759 - DNA, 683 bp, Homo sapiens
acatggggagggtatgtggggggcaggggaagctggttcagaaacaaaagggctggcttccgccttcttcagccacacagatctcttggtccccctctacttctgtctgcctctcatattctgtctgtctctcttttttatgtctatctctgtcatttttctgctcacttctgtttcttatctctgtgtttcatggctctcatctcctactgtttcttgcctttctctctgacctctctgttgcccatctttcttgtctctgtttctcatttgtttctccatctctctgtctctgtgttttcccattctttttccagtctctctgcttctcaaagctcttttggtctttcctctccccatgtcttttatttctcctttcttctttctttcccatctctctttttgaccttcatttcttttctccacattttctccttcacccttttctttgtctcttatctccctttttctgtaccttttattgctctttgtctgcctgcactccaccccttaccctgtgcagcctgtgaagtgaaaggatcagcagacgagaaggatagagacacaagtcccttctttcctctggtcagaccacttgcgcacactcctctttatccttcattcttgtacctacacaagctacaggtagagctgaggaagcctcccccaagtgaggcttctgc

SEQ ID NO: 260760 - DNA, 301 bp, Homo sapiens
gcatggaaagggcttatccacccaggtgcggggagagcaggcagccaactgacttttctaccaggagacgccctccatggcagcatctacggatctttaccctgggcccatgcagtttctccagtttaaaaaaaatctccactctttcccgacctggtgatgagaccccaccatgcatgcctgccagtgtccagggcatggggctgaggcagggcgagggctccactgctgagcaggtgggccgccactctaggataaggatgaagggggatgagcttgaccaaagccccaggggatttca

SEQ ID NO: 260761 - DNA, 2164 bp, Homo sapiens
  misc_feature (1524)..(1524): n is a, c, g, or t
tagcattcagtaaatttcacaacacctttctgcctccctcttccctctcccctctccccttctccccacctcaccccacctcaccccctccctcttccttcctcttttccttccctcctcctttctttttaccctctcctgcccctgacccggtacctataccacttggattatttacagcaaatcttacagatgtcagtattgtcttgttctgaagctaaaaaggacaatgagttcccgctgacctcggtacaatggatctcgctggagcacaatatgtattttatacaggcagtgaaaagcctacaagtaattgagagagagagaaatgtcactgtagcatttctgttgacactgcactctgcgtgtggagggaagcccggggcctggcggcagaggagcagccgcggccgcgctgtgcacccaggaacctgtccttcaggaaggaggcggcggtagaaattaatctgctcagattttccaactaatgaagtattcccaggaccgaaggggccacacagagacgtctgcggcgctgcttcccattcgcgcagatgcacacggattccgggcccagcgctaactcggatgtgttttccagctccgtttattgtcttccataatgcttaacgtactgtttgtatatgttgtccttgcactatattttgatatgctctcatatattttattcatctctggctttctacgaaggcaagctcgcagcaacactgagaataattattctccgccatcaatcaagagtctccgtggttggctcctcatgggatggccttgattttaagcatgaaatgtaactcttgctctttggggccatttcattctttgttcctggggcctgcctgtgggctcgtcgggacactagagagcaggcattcccgtggccgcgggagagccgcgttcctggctggccattcccgggccctctagaagggagcggctgagagctctttagccctacttggggtttaaaagtgaaaaaggagcagctcttcctggtggaaattgcgagcagaggctgcgtgagttccgtaactcgcacacagcctccatttggagccagaatgagcacgtgagggaccccgggcagaggggccagtgctgacattatgctccatgcaacctcccatcctgttgtgggagatggtgcagaccaggggagggagtcagtgtgtgaggggatgaggctccagtcctttcctgggcaccaaagccaaatcccccctgagcacaaggatcttccctgggtgactgcagaagcaaggagacctggcccaccgtccctgctggcttcctactgcccagccgcgtctctgcctccctaccccaaagcctgcagctcctaagtgcactatttgggctgtcttgtttgcagcggatgtttgaaagacagaccctcttctctagtgctggccttgagtcctcagagagctgctgtttcctgggtttctagctccatggaggcagaaagagaccccagggtggcctttggaggaagatgagccncctgggttaaccgagcttctgcagtggtgctcctgggtcatcactgttgccactggtcagagccagagtgtgtctgcctgtgctctcctgaacacagtggagctatttccaagttcaggtgaaggggacatggaggttaagcaaggccagaaagacagagacgtcctcttcccctggtagcaggtatttagcagatgggaaaatattagcagatgggaaatcagcagatacactcagctcaagatgcaaatttaaaagccgccagcccctgtactaaatatttacactgaacatctctactccatcatccgtcttttatttttgtgagcccgtacaactgctcttattacaaagtcatgtaaaagttgaggaaagaaaatttcacccttggaaacaaattcatgatgaattaaatttcagcatgaaaatagaaaaaaaaaattcaaatttctgttgacttttgggcttatgtcctgaaagagttaacatacattcttccatacataacttattcacgtaaattaaatggtacacccccaaaacttgtttccctaagctgatattgaaacttccattattgaacagtttttaaaaatgcaattctaatccctttttaagtttcaataccaaaaaaaaaaaa

SEQ ID NO: 260762 - DNA, 489 bp, Homo sapiens
tatctgtgaactcactgagaagttgaaaagcactttctacccctgaggaagcaactgcagaggcattgccatggtgtattttagatttgtttgacctcgagggagttgtcctagcccacactgtgtttctccttcagggcatttggttttcctttctgtatttgcctttgctcccacatagattatatatatttaacaaattttgtggtcgggcatggtaactcacgcctgtggtctcagtactttaggagttcgaggcaggtggatcacttgaggccaagagttcaagaccagcatggctgacaatggcaaaaccccatctctactaaaaatacaaaaattagccgagcatggtgatgtatgcctgtaatcccatctactcaggtgcttgaggcaagagaatcgcttgaacccgggaggtagaggttgcaatgagctgaaatcacgccacagcactccagcctgggtgacagaataagtctctgtctc

SEQ ID NO: 260763 - DNA, 972 bp, Homo sapiens
  misc_feature (83)..(83): n is a, c, g, or t
cacggagctgaggaccggccggagctttgcggagggcccggcttggcgggtccgggggggagccgaacccgcggggcaccggntccgggcggggccgagccgggccggggcgggagccagccggggtggggcggggccgaggccgaggcaggcggtcggcagtgctgggggttcaggtgttgcggcggctccacgtagccaggcggcccgtgggctggagcgggcggagctcggcccgcggcttgcgtgagctcaggccggtcccagcgtccagagcgccggcccttcggcttcttctaggccatggcagggccgggcccaggcccgggggacccggacgagcagtacgatttcctgttcaagctggtgctggtgggcgacgcaagcgtgggcaagacgtgcgtggtgcagcgcttcaagaccggcgccttctcggagcgccagggaagcaccatcggcgtcgacttcaccatgaagacgctggagatccagggcaagcgggtcaagctgcagatctgggacacggccggccaggagcggttccgcaccatcacccagagctactaccgcagtgccaatggggccatccttgcctacgacatcaccaagaggagctccttcctgtcggtgcctcactggattgaggatgtgaggaagtatgcgggctccaacattgtgcagctgctgatcgggaacaagtcagacctcagcgagcttcgggaggtctccttggctgaggcacagagcctggctgagcactatgacatcctgtgtgccattgagacgtctgccaaggactcgagcaacgtggaggaggccttcctgagggtggccacggagctcatcatgcggcacgggggccccttgttcagcgagaagagccccgaccacatccagctgaacagcaaggacatcggagaaggctggggctgcgggtgctgaccaggggccgggccggcagactgggggctc

SEQ ID NO: 260764 - DNA, 1097 bp, Homo sapiens
  misc_feature (83)..(83): n is a, c, g, or t
cacggagctgaggaccggccggagctttgcggagggcccggcttggcgggtccgggggggagccgaacccgcggggcaccggntccgggcggggccgagccgggccggggcgggagccagccggggtggggcggggccgaggccgaggcaggcggtcggcagtgctgggggttcaggtgttgcggcggctccacgtagccaggcggcccgtgggctggagcgggcggagctcggcccgcggcttgcgtgagctcaggccggtcccagcgtccagagcgccggcccttcggcttcttctaggccatggcagggccgggcccaggcccgggggacccggacgagcagtacgatttcctgttcaagctggtgctggtgggcgacgcaagcgtgggcaagacgtgcgtggtgcagcgcttcaagaccggcgccttctcggagcgccagggaagcaccatcggcgtcgacttcaccatgaagacgctggagatccagggcaagcgggtcaagctgcagatctgggacacggccggccaggagcggttccgcaccatcacccagagctactaccgcagtgccaatggggccatccttgcctacgacatcaccaagaggagctccttcctgtcggtgcctcactggattgaggatgtgaggaagtatgcgggctccaacattgtgcagctgctgatcgggaacaagtcagaccgcagcactcacagacatctccctggggtctggctcactgccttatcaggacctctgagttttctgacaaaaaatgtagcttctcattttcatcagcacagcatggggtcacggcccacagctaggtggggtcacggcccacagctaggtggggactgtctgctggctcagggcccagtgttttgccactcaggttgcaaaattagctaatccttcagtgccagcactcagaagtctggcaggtgggggaatgagatgagaaagtggacatttaaggtccaagtagaagcttgcatccttgaggctcagggatgagagggcaccgcaaggcacccagccttaccccacaagcaggaatcctgccagccgagcgtgggtcccagtctagttta

SEQ ID NO: 260765 - DNA, 834 bp, Homo sapiens
caactacagcagccgggtgaagctctggagctctgcatcctgtggcctggctgcgggatggaggctctccttgaggaaggggaagcaggataccctggcgggccaccctgccagccagcagctggccctccaccatcttcacattccaagactggcctgaacccgccggtgtgggccacagtgggaggggccagcagtcctccctgtcccatgcctgctggctctgaccgtttcctctcatgggtttgctttacctgtggcagcaggttgctgctttccagggatgtgtccagtgccctgggttcttcccggtcatcctggggctctgcacagagcagcagagctagagccatgagacccacagacttggtgcctgagcgcagctccagggaagccccagccccttccaggcggggaacctgcttcctgccttcactgcccccgcagcactcacagacatctccctggggtctggctcactgccttatcaggacctctgagttttctgacaaaaaatgtagcttctcattttcatcagcacagcatggggtcacggcccacagctaggtggggtcacggcccacagctaggtggggactgtctgctggctcagggcccagtgttttgccactcaggttgcaaaattagctaatccttcagtgccagcactcagaagtctggcaggtgggggaatgagatgagaaagtggacatttaaggtccaagtagaagcttgcatccttgaggctcagggatgagagggcaccgcaaggcacccagccttaccccacaagcaggaatcctgccagccgagcgtgggtcccagtctagttta

SEQ ID NO: 260766 - DNA, 962 bp, Homo sapiens
atgcatttcttcaacagtcttgctaataagaaaatttaattgtatttctctttgctgtgatatccctttcattttttctgtcataacaaatggagattattggtattcttatttaggtttaaacttacttgctagagccttattggcacttgatttgagtggtatttttatatttttattatatttaaatgatagaaaatatttgaagtaagatgaatgaaatttcagattttttgatactgttgtagaatgatcttaaaaaattaaactggtaaatggtgactaaagcataatttaatagactaaaattgtattttaaatgtactgtagtatttttcttagatgaacactagccacaaatagatattagcattgggaatggttgaatatgaattgattaaatgtacctgtgtcagctgcacagtaattaaaggtgcaatattggtttaaaaatgaattttggactattaataatacctatgttttattggaatatttattgagattgaatattttaatgtataagtatgtctttgtattttacatttatatatagaacaaaagtggtttgcagaacagttttattttggctattatcattacctaacagtgcattcatgatggagttcaaaggtacaagtttgttttaggcacaagagcttaaatgttagttttaaaaatgtgtacagattgttgaaaaccagtatgctttaatatggagtttaatatttcatttggataatccagatagcattcatgtcataactgtcacagaagtagaaatggtacctggaactactactcagatgaatttcagtatcttttggattgccgaaggctgtggtgctagagtagacctttactgatggcctagtacagttaactttttctttatggttagacccatatttatgctatttctggaaatagtgtagtgtcaaattattaccctaccacaaagg

SEQ ID NO: 260767 - DNA, 650 bp, Homo sapiens
tccaaatgtggggctttgatttcttacagtagacatgtttaatttctacctggaggctcatagggtcaagtgctcttttggtcacccagaaccaggtacatagtttttttccgttctccttttccagaagtggcagcccttccagaatcctggttttatctagaattatccttctcaacaaggctgttttcttgcccaaatctaaggaaatctgatccccatgggagctgtgctatggtggccattcacatcatattgtagctcctctaggctggtgggtgcttgtagcctctagaaactgtattccatctgagctgtctggagaatttcctctttgttttgagctgttaagtattgacattttttttaacccatattttatccagcagttcaatgtgcttgtgattgagggagaggggtccatattagttcatttaccatattaacaaaatgtttttaaagcttttttgaaaaacttcatttaatccacctaataattatttttttcagatgataattgggggtgtggatatttagaaaagctacttagaaaagttttgtctgttgattttgtattctgtgtatcttgtggaacaaataaaagttcaatttttggggggttggttttctgtatagtcatattgcctgca

SEQ ID NO: 260768 - DNA, 528 bp, Homo sapiens
catctatggttaatgtgcatagagctcacctacttagtgacatgtttcatgttctgtatttcatcaattttaagttatcatttttttcacattgcattagttttcaaattaagaaaaattaaaatatttttgctggccagactacagccattcttgtatttgcctgggcagatgtgaaatagcatgtaactattattattttttcactttctttgaaatatgtgcatcaataattatgtttcattttaaataaatttctatttaattttcatttcattatattaccactagcatgaacacttgggtaaggggagtcatgattgagacaaaatgtttggggcagtactagagcattcttttaagaaatgatgaatcacagacaactttgatattacagaaggcaatgttatatgagaaatgaaataagagtatgtctaatcatgaaggtgctttatatatgaggaaatacaattttaagaaattttactcatatgtcttttaagaaatatcaaagttataaaatgactc

SEQ ID NO: 260769 - DNA, 376 bp, Homo sapiens
agcagtagcttacaataatacttgcttcgcagattgtttgaagattaactgtgagaccatgaagtccttggcacatagtaattgttcagcacatgctggcctctccctttacctttgttgattttttctaatagggcaatcagaggctggttgtcatggggtaggcaaggaagaaaccaagtttacagaagccaagtgacttctcacatcatcagaggaagcccaggattagaactcaaaacatgtgcatttctgtctgttcctgagagctatgtacttggctcagagtcggaggcgacctgtgttcccagagatggaaaaggacctgggacttcctagggcaaagcctcctaagtcttcctgcagcagcaacagc

SEQ ID NO: 260770 - DNA, 478 bp, Homo sapiens
gtccaaagtcgtttccctttaagagctccttttcttttaaagttgaattttaggcagcgaggactcttacactagggggcagacagatactgtacttgctctaatcttaagcaattttttccctcccagcatatgctctgatttagcactgtaaatttttcagaggacctaactctgacagcccctggtgattttcaaagtaccacaagccagtggttaaaaattgcattgacttggaagttcagagggacacaatggaagcccctttccctattcatggagctccagtgtggtggaagagaaaaacacacacggactagattgagggaaaggaggaattcaatgaatcctggaggacggaactggtttctactgagttcagagttaaactcggcatttgctggggtctgtattcatattgtgattcaatctgtaaagaaatacagcccatcaggccactttctgcaagaaaattata

SEQ ID NO: 260771 - DNA, 284 bp, Homo sapiens
ttgcctcttgcctgtggtatctcccctgataagcgttgtggattgttccagaccgtgttgacggggacagcttccttctccgcggctgccggccctgaccctgcagctttcagtctgtgggagtagagtcagctgttgagcagtttactctgtccctgtgtcaatgggattgtgcatgttttggttcctgaggggtcattgatggtgcacttttcttttgttgttagtcaatttaatttgttactaataataaaatctggaacttacctgaccccaaaggccca

SEQ ID NO: 260772 - DNA, 684 bp, Homo sapiens
taattttcatcttattccaaatgtcctgacataaaagtctgttcctgatcaaacttgaataaaatgcttagcatatagtacacatgaaacaaatatcaatttcatggccattgttaccattatttcatgatatcattaatccagtggatagaagctcattccttcagtcaacaattattgatgagcttctgccatataataggtctgaggcccaacagtgaacagacatagaccctgccctcaagaagttgacagtctagaaactgatggatgtctcaaccagcaattacaacatcgtgagatgagtactacaaaaatgctaactagccaagtgctgtggctcacaccttggcctcaactacttaggaggtggaggtggcaggactgcttgagcccaggagatggaagttgaaatgacctatgattgtaccactgcactccagccttggtgacagagtgagactccatctctgaaataaataaattaaataaataaataaataaataaataaagtggtaactgcctgcaggggaaataagggaacacataaaacggacatctaacccgcctgaagaaggaaggaaaggaaagggctatgagaaagaagtaatagcttgaggcaaggcgtggtggctcacacctgtaatcccagcattttgggaggccgaggtgggcggatcatg

SEQ ID NO: 260773 - DNA, 374 bp, Homo sapiens
ctgatgagaattgccaaggcacagcaaagcctgcagcttccatacccgtcatgagagcaaataacttatttgtaaacctaagcacttaattaactaaatggaaagcaaggcagtgagtgattcctgacatggccgaatttaagtcaagctgtgaagctccaggtgcagccagaaatggagatggacaacttgaactgaaccctgagagcttctaaaaaggctttggaccactgcttctcagcagtttttctttttttttttgagacggagtctcactctgtcacccaggctggagtgcagtggcggaagttgcagtgagccgaggtcttgccattgcactccagcctgggcgacaagagcaaaactccatctca

SEQ ID NO: 260774 - DNA, 822 bp, Homo sapiens
ctgatgagaattgccaaggcacagcaaagcctgcagcttccatacccgtcatgagagcaaataacttatttgtaaacctaagcacttaattaactaaatggaaagcaaggcagtgagtgattcctgacatggccgaatttaagtcaagctgtgaagctccaggtgcagccagaaatggagatggacaacttgaactgaaccctgagagcttctaaaaaggctttggaccactgcttctcagcagtttttcttgtaagttattcccattatctcaaagaaaaatttaaaatatggttggagaaaagtatagaactgattatccccattttgagcatagatcatcgtttaaccaacttgctttctaactgccaagaaacttgctttggatggtatttccagacataatgtctatcatagcaaatattgacaattgcattttacaaataatcagtttaatatgctttaatatgcttctatttctgattgctcttgatctcatttaatcttcgaagcaactctatcacgttggtgtgcttattaacattattttacagataaagacgcctgtaagtagcttcctcacagggtatttaaggaacttgtagaaagtccacagctagtagctgggagcccatctcatatcaatacactagcttctccccaaagaactttatatatttaggccattgatttctttttttttttttttgagacggagtctcactctgtcacccaggctggagtgcagtggcggaagttgcagtgagccgaggtcttgccattgcactccagcctgggcgacaagagcaaaactccatctca

SEQ ID NO: 260775 - DNA, 466 bp, Homo sapiens
atgcacatgccacagacaggacagaggctgagacagtgaggggcactcccggcgcagtcctggatatccccaaccggactgcagcaacgaggtcgaatagcagaggggagcgagggaagagctgcgcacagagggcaggggggaattccagcctttagtttcttcccagcagatgggtggggactggggaagcaaagcagggccttggagcacccgccgcctccctcgccgcacgcctgctgacgccaagaccacagacctgtcccgagggcctgattctttcaaaggctgcagtgtttgtgtgtctctttgaaatacaggtgatcactggctgtcacagccaacaagctgttgaaccagcctcagcggatgggaaataaaaggcgctctctctggaggaaggtatatgtgcctgccatgggcacgctcattgttcctgaacactcggtggaggaagccgttctga

SEQ ID NO: 260776 - DNA, 473 bp, Homo sapiens
atgatgtaatgaagcattaatcacagaactaatacatgtacatatttgaggtggctttgccattttatacccataattaaataaaagggcaaaatcccccctgataaataccatgtttatcatggcacataaaactttatggcagaaagccaaggccaattgacatatatatttaaaggtaccatggaaagtaaatgctaactctgaatttaaaacagtgggaagatgattagtaagagttggtttcttgaaaaggaattgttctggtaatagtcatctttaatgacttccacggattattcagtgtttctttagggatatgcataggacactggtgcttcagtagaaaccccagttttggtgtattaaagatacatccattcttgactgatctttaatctagagtgtggttttagccaagtctttgaatctcatttagtcagtaaacatttattaaatattaaccaaatgca

SEQ ID NO: 260777 - DNA, 471 bp, Homo sapiens
tgtgtgtgtgagccagattttattgcaagtgtttgaaagactattgcaaatatcggatattgccagacagttggtaaaaagcaaattgagtctattgagaaattaattcaccagctgaaggaagcacatttgccttacagtcatcagatattctacccaccagactcatctccgagatagcatcctaatgagcttcctaaaccaactaaacatgagcaggaagcatcagtcgtcaaaactgactcttttcagccaatcagctgactgcacaaactgtatggcattgaggaaaggaagaacattctgaaagtttttttttttcattctgccctcactttgttggtttctcagttttacagatgcagtgtcatgcgcagaaccctgtaaatgagcatagttcattcaagtatataaagtgctttcgtgtattattattcagtggaataaaatgaatgttaacaggcttaagtg

SEQ ID NO: 260778 - DNA, 663 bp, Homo sapiens
cattcaaagattgtcattaaacagaaaagaagccatgtagaacgtatgcattgattcttgcggtggaaatccagggaagaaacatatgcagaggcacatagtcaacatgttccttctcctaaatttactgataatacccactttttgagctgggaactaacccctctcatttcatgtggctccagtgtgattaccaatctctttctcctacttttccagccagaagtatgtaacccaaatctgaccaatcaaaacaaccatttgcctagtcagacgataccttcaggaatgggcatgtgacaaaatctgggccaagcagagtcttccctggcatttctctatcagtgctctgagaaaagatgcttttttcttaactgcattgctaagcagtagaatatgagtcttgggttaagagcagccatcatggctatcacttgtaaacagcttaagaaacagtggagatctcagatgtttctaaagctacattgccttaggacttttcagtgctatgagcaaatgcatgcccctttacacttagttagtttaagtagagtatctaacataagtacaaatcaatttattatcatagaaagcagaagagttcacaaaatagtgccctagagccttagaaaaatgaaagatggcatggactttctgaagcta

SEQ ID NO: 260779 - DNA, 321 bp, Homo sapiens
aaagatttaagaaatattacagctctagaaactatagaatatagcaagaaaatggaagagtcaaggataccatgaaattcggtgacttgaatattgtaagatttggtgactaccctaacagaggcagctggcagcgaagagaagtaagtagattatattttatgaatgagatctgagtcaataccattgtaggaagtccagtgattttatatttttgttaaacttgcttatgcaatcaaagttctggctatttatatacagtgtaacatatggtatctgcaaggcttctaagcaataaaaactccaaaattccaaagatga

SEQ ID NO: 260780 - DNA, 281 bp, Homo sapiens
gctactatttattggtcatttgatgccagatactgaactaaatgcttcacatatgtcataaagtattatccataatacacctggaaaagtatcattatcttcatctaacacaaatggaaacaaaggctcagagaagttaaacaactgttcaaggttgctttttctaatgaatagcttgtgctcttgttataatatcaagtggcctccgtccattatatgcaacagttttggctctaatttttatcttagatgtgaatacaacataatgaatatataatgaa

SEQ ID NO: 260781 - DNA, 419 bp, Homo sapiens
tttgattttctaccattttattttagtgtccctagatttgctttgttttcatatttatattgaggagtttacagagcttcttgaatctgtgggttgaaacatagctgcttttgaaattctcggcctgtatttcatcagacatttttcttctgtctcaatttctctgcaactccacttgcgggtatgtttgacctctgctatgtctttacatctcatacgctcttctataattttctccctatttgtgttccaatctgctctttattaccgacctaatttcccgttcaatgtttctcactggtagtatttacacctgattttttcaatttcaggtatactataatatttgcaatcttttcttctattttcttatatttattaacaggttatttttctttgatcattacgatgtcttgata

SEQ ID NO: 260782 - DNA, 355 bp, Homo sapiens
tagccaggcaaatttttttcagtggatatttattttaatagccatttggtttcattaccttttaatgagttctttgatagcaagttccttaattaacaaggcagtctttcaggtttcctcttctctaattgttaacatattttggtgctttcacacagatgcactgtgatgaagtttcctcttttacagctcctttttgggccattcagaagcagtgaagaagagagtggggagaatacatggcatttttcaaaaagatataaattatttaagagtatcctctcaaactgagtgaaatatttacatttcatgttctcttctctacaacgtgattaactcagtggatttctaggtg

SEQ ID NO: 260783 - DNA, 387 bp, Homo sapiens
tgctgcggctaagatgctttcatgtcccacgttgggctggttttcgtggcaaacgttagccctgaaatgtaagtcctgcaccgcacgttcagcaaggactccctcaggtccgggccaagccttgacatacatgctgggcacccacttctccaggcagagttctcatccctctggctcaccagctcagaacggcacgctcagtaaatgccagtgcttaggacgtatccatgtgaggtcttggtacaatcctggaaacttcctttgggaaatgcatgaatgtgggaccctcctcatcgccctgagagtccagagtgttgcctgcccagcgtcactccacaacccatctgtcccctggatggcaggagccaggccagacgccccatcata

SEQ ID NO: 260784 - DNA, 350 bp, Homo sapiens
tgaggggtaaacacacagatggaggggaaggagtggagaggatgccgggcccaggaagctgcctccatatcagaaagcacgatgagttaattctgccgtattgaatcggtttttaatctttcctttttcttttttgtgtttgtatgttatcttgggaggttttgttaatttgtgatggctatgttttgaagaagcaaataatttgatactgcagttttaaaagggtcgtattttaaagttactattccaaaaagtattgtacgaatgttacttttatgacacagaaaaaatgcagatgtatccactttgtgtgtttatacatgcataaagagaaattctatttaatccca

SEQ ID NO: 260785 - DNA, 571 bp, Homo sapiens
tcatcgcaggtgcctggtaaatggtggatctccccacccctcctcaacacacagaaaacagggcgggcagcgggcaccactgcactgtcaatgaataactcacctctgtagtgaaccctgggagctgagcaggagggtgaaacgggaaggccggtttcccactaactggcaggcaaggcaaatgtgggctgtcctatggcccctctgcaggtgcggaatggcggggtttgtgagccccttttgttgtcgaggacagctccacgggggtccgggaggtgcttgctctacagacagaagttgggcagtcttgcgccccctgaaaaggttcagagtagggtggccccagaagagactccagggcatgtgtgggggagcactgggcacaggcagagttaggctttggctgtgagtctgagcagggcctcagatattgggaatgggcaggagatcctggctgtgtaagttggggatgtgaggtctggttctagatcagccttttcagtctgccctggcctggtcattaataaaagtggggccaatgtgttccctttgagagaccaagtggcttgga

SEQ ID NO: 260786 - DNA, 437 bp, Homo sapiens
agccttagaaatagctccctttaggtcaccaaattaacaggagtttctaaaggatagcagcttttttgcaactgctgcatctgttagattcatgttctctttgctcccttctccccaagcttctatttcatgatctttttgttgttttgctctacttttcctctttttaaaacctctgcattggccacccaggatttaagaggagcttttctggaaagctgtctgaaacaggaacaaattacacagaaacactgagagctgtgaacttgtgtgtatacctgacatagtgggagaggggggcttccttctaagtaatagagaagagtgaatattctaatcattgagtagtggtcaggcctgtaatcactgctttttcttttgctgagctcggtatcaacggacaagctcaaaaattgtagctatttaaaattactctc

SEQ ID NO: 260787 - DNA, 421 bp, Homo sapiens
aaatatcgttttttaactgggcacactgttgtccctaacaacatggacttgtggttgacaacagaggaagcagaagagaatgcatactggaagtctctacaacagagtgctgaagacaaccagcttgatattgtatagtactctctcctgtgagtgggcctggggacaaatcatttaacttctctgtaaccagggtctacttgatgaagtaacctcattgcccacaccagaagcatcaggaagggtaccaaggagatggtagcttcaaggactttggaccacttggaggagggtattcaaagggacagaagtcacttgcttgattcttgtattaaaatcaagtgggatttcttttcattcatgcatttcaccagtacttatcacgtatccaataaagcaacaaggacaatccaaacactgt

SEQ ID NO: 260788 - DNA, 223 bp, Homo sapiens
caggagggaagcagcgcttcaggggaaggatctaatggctgtgacctgcgtgggctgcagtatgttgttctgcttgaagcagatgaaggaaatccagcctcacacagatatgttgctcaagggcagaccctgcacactccctgaaagggccctagggaaccaaagatcacactttgagaactgctgctcttgaggcaagactggattaaatttaaaggcaaca

SEQ ID NO: 260789 - DNA, 251 bp, Homo sapiens
tagaattctcagtggaatactactttataactcagtgcttcccagggccacacactttccctgtgcagtatgttccaagaatgggatgttccacatttggaaaagaaatactcatataaagtcctcacagacatttctcttttgatttccttctaccatgatttatgaagcggtcacagcatttgtctcaacctgagccgcagagttgaacagattttcagcattttcagaggagtatgcctgtgcctacc

SEQ ID NO: 260790 - DNA, 711 bp, Homo sapiens
cagaatgtatttttccagtagcaccacccaaaacttgcattaactgatgagctctgatttttatcatttgatttagttaactccacaagtttgaacctacctctatggaacaaaggccataatctatcatactttttaaaaaatggacaatcttctactgtagattattagcttttctggtatttcagctaagcttcatgcacatttactctaacacattataggtctcggtgtatcaatctgatattttacaagaggagcagaatctgctaagaatacaggcatatgtcattttattgcacttcactttattgtacctgcagatattatggtttgttggtttttttcttttttttttttaagacagagtcccactctgtcacctaggctggagtgcagtggcacaatattagctcactgcaacctcctcctcccaggttcaagtgattctcccacctcagcatttccagtagctgggattacaggcacaccaccacacccagctaatttttgtatttttagtagagacagggtttctctatgttggccaggctggtatcaaactcctgacctcaagtgatccaccccccttggccttccaaagtgctgagactacaggcatgagtcactgcaccccgctgggttttttttttttttttttttaaacgaattgaaggtttgtagcaaccttgtgttgagcaagtctatcgg

SEQ ID NO: 260791 - DNA, 124 bp, Homo sapiens
  misc_feature (1)..(2): n is a, c, g, or t
nngaccatcttcagtgtaactcagggaaatgacctcactctgttgctcctcgtccttggaaacggagctggttgtatctaccgtgcagggatgtagagggcttaaattaagatgctccaagctg

SEQ ID NO: 260792 - DNA, 496 bp, Homo sapiens
tccttcctaattctaggcttattcaccaacaaccctgtggtttagaccctggattctgagaagagaggtccctgagagcaaggatgtgtatcctggacactagaaaaatgtatccccctccataaattactagcttgatttttctaggatttgtcactctggcagaaaatatccattctccccgtcttctttagttaggcagcctgactttaattatggcagccatgtgctcagcgaaaagactacatttcccagtagcccttgcggcagggactggccaatggaatgtgagcagagccgctgggagggacttccgggaagcgggcccaaggcctcctgcctcttccccatcctcgctcttgcgctctgggaagtggactcgaaggcaggagcccctccagctatgctgggatcgtgcggatggggacaggctgggcccaggctgccttcatccattcttttatgagagaataaacctttagttgtttaagccact

SEQ ID NO: 260793 - DNA, 161 bp, Homo sapiens
actaaggatatatatcaaaacccttatggcagactgttatttgtaattgtattttatttgtcgtgcttatatgtgttgcccaagtttctatggtgaacggtatgcatcactttcagcatgagaaaataactcctaataaacgtgattcttaaaggactctc

SEQ ID NO: 260794 - DNA, 546 bp, Homo sapiens
tagtggggccctccattgcaacaaaggtgtgggtgagcctgggtgagtgtggcaagaaatgcctcggaggctgtacttggccttaaagggctgtgtgaccttgggtaaactgccttctctgaatctctggtcctttccatttcccattctccaggctgagaactgcactctgatacacggttattcccaataataataatgtgtgtatcacacataatgcactgcacctcttcaccatgctggcacctactcctctgctccccctgccagcttcctcagccccttcttctaccctgatggttctctccttgcctcctcaggccagcacttcccatgatctgagatgtctctttccttttcacctttttctccagcagtgagttcctcctcctaactcaggcttccaggaaggatatcctctgcttctcagacctgaacctgcctcgaatactcatgaggacccaggagctactcctcacctcccacttctcttctatcctgtcagataaccaaggcacggccaactgatcctccaccatccgagga

SEQ ID NO: 260795 - DNA, 439 bp, Homo sapiens
tttgctttcaaactttctgtgccatcatggtagatagtatagcatagtagacatgaactccagaaagactgactctgtcacttctagctgtgtaactggggatagttactcaacatctgctatggtctgaattttcatgtctccccaaattcatatgttaaaacctaattgccaatgagaaaatattaagaagtggggtctttagaaggtgattaggtcatgagggtggagcctttatgaataggattagtgctcttgtaaaaaaagcccaggggagcttgtttgtccttcctgctatgcaaagatgcagcaagaagatgccttctatgaaccagaagacaatcctcactggatactgaagtgaatctactggcaccttgatcttggacttcccaacctccagagttgtgagaaataaatttctgttgtttataagaaa

SEQ ID NO: 260796 - DNA, 630 bp, Homo sapiens
atgggaaaggggagagcacaaatgtgtagtttagcaatatgctttaaaaaaaaacatattaaataaaagatctggaggtaaatctaatgctataactctgaaggagggatgaatgtaaatggtagtttgaaatatctgcaataactctaacttgatttgacaatacctgtgatttctatttgggacagagtcacaggtcctggtaatattactgtagtctgtttcctacattcataattgaatatgatgttaaatttcagtgtgaagttagtgaaaacaaaatgcaatcatttccttatccgggttcacagatcagcaagaggacatagactccaggttaagaacacctgtcctatgggaaggtgagtggtagggactgagttaatgaccctaaggggaggctgtgatggacagagggaaggagggatggcaggctcagcctaggacagcaggaggaaaggtgagcatggtgtttctgaaggcatataagaagacattagaaactgtggttgacttcattcacctcaattctaccacctcaggactgacaaggagccacctttaagcctggcggtttagatgagaattttttccttcttggcttaggaggtgaaattgttctttagcacc

SEQ ID NO: 260797 - DNA, 491 bp, Homo sapiens
gatcaatttcaggaaaatcaatgtgacgttaagcaagacatttattgtgcccacagcttcaccattctggtctctatgattccctgcgaagattgctgttatcccccagagacacagctgagctgtctctctaaagggcctgtgttctactcctgaatctggtttcccctaagcttttatctcaccctggtgacagctcagaaacacacaaactctgtgttaagaaaactaagaagtcattcatctgcacatttcccgaaatcccccagaagcccgtattagactgaatggtgtccttattgcaaactctccactttagccaaggtgcaaagtcctcccagtcccccaggagcttcccttctctgagcggtacttaagttttctgtaaaaccactcagttcaacaaatgagcttctcaatcttagtttctgcttgttgactttaaagttaatctataataaacacactgcagtcctcttccctgactcatt

SEQ ID NO: 260798 - DNA, 437 bp, Homo sapiens
aagactgctggctttttaatatcttccaggtgctacaaaagccacatatagtcttgtatgttgacatgggccctgcaaggccagggcagaagagtatgactccaccatgtaaaggatgccaattggtggagccatggtagctggatttgggaggctgactagttcacaacctctgataaactgtcatccaagcctgaaccacggtcacataggagagccaggagtaaatgcattttaggtggcataactccttgtgttgcagcaaagaaagcaattatgaaaatggtcctgcattcattggaatgaaacctttgattctgaaggttactcatggactactgtgttaaatcttacttgataccatttaagtctgtataaaagtatgagtacatggtcagttttatcatgtaaaccaaatataatgcatttataaaatt

SEQ ID NO: 260799 - DNA, 533 bp, Homo sapiens
ttcttgtgctaaagctggtagtttatgtagcagacaaaatatacaaataaaagaagagactgattttgctgaaagaattatatataatcaagaagttacatattgttctttaaatatgatactgaattttaaaagcaaacgaaattcaagaatcttatctaacagcatagcagttgcttatggcatacaaggctaaaattaattcagctatttaatcttaataattattatgtagttaaaaatctttgactttaatagtgttttacatatacaaatagctgaagtaacattcctataattttaatctgacattggttagatcaagaaaacattgttaataagactgtagaatttgtaattattgctatttttcatttttaataacaaagtaatgtgtcttattttctaagaaaatggagaactttggtgtactttaatacatacaaaaatctttgtaaaaataccttaaaatgtaccaatattttctttgcatatattaaatgaaagactataattatgaaatgttaaacagt

SEQ ID NO: 260800 - DNA, 431 bp, Homo sapiens
gttgaagacactaataagttggttctcttgacatcactgaaaattgtcattagctttacatacctagaaagaagttcgccccagaagatgtcattcctacaattccctcaaacaaatagtaccgtcaggttttgccagcctgcgttcgtttgtggtttgccatcccttttccccattcacagactctgattgtatagaatttcattgaccagttagaaaaaagcataaactaaatactaaagaaaacatttgcctttaagaagttcaagaaattacttatttcatgtttgacaaagtcctaaaacagaaaaatgaataatatttctgttaattttccagatattttctttagtctctgaagcaaattcaagcattctattaatggatagtgttcatttttcttattatattctccttcaaagagctttaga

SEQ ID NO: 260801 - DNA, 213 bp, Homo sapiens
aatcctgtactaaaacttactcttctgtatctggctttttcacccagtaacaaaactaagattcatgcatgtttttgcacatatcagtagttcattctctttcattgctgtgtagaatttcattgtataagtatgtcacagtttatttactaattctactcttaagttgtttgcaacttttggatgctataaatacatttgaagattaatttt

SEQ ID NO: 260802 - DNA, 788 bp, Homo sapiens
gtggacaacagaagaggctaaagcagcatgaggaagacagactggggaagaccttacatgtcttaaggagtttgaacttttatcctgagaacaatggaaactcactgaaaagttttgcataggagtgacatgctcacattttattaaaagagtggaaagtatgtaaaaagtaaggctggatgcaaggtgaccagtttaaaggttgttaacagtcgtctgagaagcaatggtagcccagagaggggaatggaatggaagatgtggatgtactcaagtgatgctaaggaggtagatatggtaccactttctagatgtgtggataagagggaagttgagtcaaggaagatacccaggtgcgttaggggtacatagatggctgcccttactaagatacagaattctaaaggaggagtaggttactgggtaggtactgctacattcaaggtggctattaaaaaaacaaacaaacaaaaaacaaagaaaaaacccacacaaaaaaaacagcaaaaacaaaaaataagtgaaaatgtcttaaacatgtttcagttatagctaaaaaaaaaaaaaaaaattctccagtacacagataacacttgaattcaagggtatgcctaagaatgctgcatgagaggtatatgagaagaccagaggtccaggactaagcctaaaactgtacacagtaggtatgagcccatgtcaacttcctttagcatcacttgagtacatccactatcttccattccacttcccctgctctgggctaccattgcttctcagatgacctgtta

SEQ ID NO: 260803 - DNA, 900 bp, Homo sapiens
tgggaagctgcgggggcggcggcaggagtcctcaaatgcctttgccgcttttcataaatctaaaattacatccaaacagaggtttacttttttaaaaaataaaagaggccaggcatggtggctgacgcctgtaatcccagcgctttgggaggccaaagcaggagaatcactgcttgaggccaggagttcagactggcctgggcaacatagggagaaaccatctctccagaaaaaaaaaaagaggaaggaatgacccaaagaccatgcagcctgtgatgctgtggaggctccaagcaggcgaacacaggacaggccagcatcttgcagggacgcggcggggggtaccgcgtgtgcgtgcatatcacgccccgtgcatgtgtgtgcataagctccccggacacatccgggggtgtgggtcctgcgggctgcctgtgcaccagggaggggagtcagcaggagagagactgtacgtcgtgcctgcctttaagttccctgaattttaaaccctgtggtttcatcacctgttaagacaaaaatctcaaaatgactgttttctgcctcctgggtctcaaaggcaggtgcaatgcccagaggctggtcctgcacagagggacccagggcgtgctggccttcccagtgtcccactggtggctgatctaagcagtgctttccctcgtttttttattttgagacagaatcttgctctgtcccccaggctggagagcaacggcacgatctcggctcactgcagcctcccgcttcagcctcccagatagctgggattacaggcatgcgccctcatgcctggctaatttttgtatttttagtagagacggggtttcaccttgttggtcaggctggtctccagttcctggcctcaagtgatccgcccgcctcggc

SEQ ID NO: 260804 - DNA, 311 bp, Homo sapiens
tgttgtttttttattgtttgtgatttattatgacttctctttttttctggattcattgttaaattcaagctcctgctgaggaaaacgttaaaatgtatcgctttaaggaggtgcaacaggcaggagtctatggaactcttaatcttagctgctgcctccactttgatacaatgctagataaatgcgagcatctttccctaaccttcctcctgaatgcctcatcccttgatcacaaaaacatcccttaataatagggggaaaaccccaagtatgtaaccctatccatagccaaaataaagtctgcatgccac

SEQ ID NO: 260805 - DNA, 432 bp, Homo sapiens
gcccaggccagagtgcagtggtacaatcacagctcattgcagcctcaacctcctgggctcaagtgatcctctcacctcaacttctcaagtagctggcaatacaggcacataccactctggctaatttttttgtagacacagggttttgccatgttgcccagattggtctcaaactcctgggctcaagagatctgcctgcctcttcctcccaaagtgctaggattacaggcatgagccactgtgcctggccaggagctcatgttctactgtcaattcttggaaatgtcccatatacctgaatagaatgtatactcttcacttgttgggtgcagttctacatatgactgttaaatcaagttgcttttattactcaaatcatgcatttccttactgatttttgcttattatctcaatttctaaggagaggtatat

SEQ ID NO: 260806 - DNA, 485 bp, Homo sapiens
caggggcaactcgaagtaccattactatgggattcgtctgaagccggactcaccactgaaccggcctcagacgggccacgcaaccataggcaggcctgcagagttctttgaacttcagttggccattggtataaagaggaggacaagccatgcgtcatgggctgttgtgaaaagggaatgagtcaagcatctctccactggtggatgctgcagcctcctttgctcttattattgttatcgttgttactatcaagcttttagaggcgtggatcaatccatccatgagacacctggactgaatcaagcaggggaagtttccctgcagcctctgccgagttctcgctgccatgccccgatgcaaaataacgacttatctgcttttccagagtctctacatttaaaactcgattacccgtgtttacttttcatttattttccttcttaaattaacacaaagtaaaatcaactttttggtgtacagcctt

SEQ ID NO: 260807 - DNA, 509 bp, Homo sapiens
cagggatggtgagtaagaggcagccggaggcccggaggggctgtcgtctgctctgggcccaggcggccccacgatggagtcgggccagcctcagacgggccacgcaaccataggcaggcctgcagagttctttgaacttcagttggccattggtataaagaggaggacaagccatgcgtcatgggctgttgtgaaaagggaatgagtcaagcatctctccactggtggatgctgcagcctcctttgctcttattattgttatcgttgttactatcaagcttttagaggcgtggatcaatccatccatgagacacctggactgaatcaagcaggggaagtttccctgcagcctctgccgagttctcgctgccatgccccgatgcaaaataacgacttatctgcttttccagagtctctacatttaaaactcgattacccgtgtttacttttcatttattttccttcttaaattaacacaaagtaaaatcaactttttggtgtacagcctt

SEQ ID NO: 260808 - DNA, 840 bp, Homo sapiens
atttcaccggcaacaccaagagggtttttagtggcttgggtctccccagtgggggataagtcttttgtcatcaaggaggcaaattgtctccccaagacagctcaaaatatccacacctcggcaacagtctaagatgagagcctgtgacaggtggcagcgcccccaggtggggtactggcatcagagcctggtgcgcccctaggggagcctcccactggagtgcccggccaggtctccaagccccaaatgagtccttgtgaaccacaactgatccccccaggtgggtgcttgtggactgcctcggacccagccacgctgctccccgcaatgctgatggggctgtgcattgaggacccctgcttcctggttctcagtcccaccccaaaacctggcacccagaacagttggaagtgtggaaaggaggtttatcggccttcccttggagagggcctggcttcaacattgggccagtaggcatcttagcttggcaggtgtcgggggaatgggccagatggacctgctagatttggaagggcaccgagggagttttctgggtgtagagagaatggaggggaccaaaaagagtccttcctggggtgtgggaggcttcccagcttggtcctcagtgggttgttgaggccagagtatcgccctgggatgtggtggggagctgggccaggagagggactgactgtgaccctctgctggccggtcttgtgtgcgccccatgggacccccagtgttcttgcctgtgacctcttattgcgacatgcaggtggtgtttttttttttttttaaactctgagctattttatcaataaaggatattttgtaataaga

SEQ ID NO: 260809 - DNA, 175 bp, Homo sapiens
tttggagggtataggggaagatgaagagtgttttcaatgtgaaaacttaagccagtgctctctatattgttcaaatagtgagagcaggtttagcagagacagtaatgttaatgtctttgggtccgtaataacagcccagtaggataataggtcaaagaaccgacattctctgtga

SEQ ID NO: 260810 - DNA, 382 bp, Homo sapiens
cccttcattagcaagtccctcaaaactctttttatagggggaaaaaaatcaaatagcatgtcactttctacattttcagtatttcaattttaagagtaatagaccaggcacggtggttcatgcctgtaatcccagcactttgggaggctgaggtgggtggagcacgaagtcaggagattgagaccatcctggctaacacggtgaaaccccgtctctactaaaaatacaaagaaattagccgggcgtggtggcggacgcctgtagtctcagctactcaggaggctaaggcaggagaatggcgtgaacccgggaggcggagtttgcagtgagccgagatcgagccactgcactccagcctgggtgacagagcgagactccatct

SEQ ID NO: 260811 - DNA, 276 bp, Homo sapiens
gcaccctggctccagctgtcatcacatgatatgcctgatcccctttccccttctgccatgaataaaagctcccggaggccgccccagaaactgagcagatgctggcgccatgctcatccagcctgcagaactgggagccaatgccaattaaacctttttttttttttttttttttaaacggagtcttgctctgtcacccaggctggagtgcagtgagccaagattgcaccactgcactccagcctgggcaacagaacgagactccatctcaaaaaa

SEQ ID NO: 260812 - DNA, 476 bp, Homo sapiens
accttggaggcctgagtgttcttaggtaaaagactgctttggaggctgcaaatggaactagaatcccaccagatcacagccatctgacttggttgcatttttatggaaaccagcgtgttgaggatgtgagactgatataaaagcactaggatattcacagggtaaaagtcaggaggatcataacagcacagtactagagaaccagtacgtagtggtgtgatgaatgaaagccactgacataactttcgcatcttgtcttcctgtattctttctttctgtgacagttgttgagatcatgacctcttctggaatggtgttctcagaagtccttggacaatcagggtgtactaggagaaaacatgctgtgagatgggatgaaagtcttcaggatggacactatactttctgttattggaggattcggtagtttgaataagcgtttgaatgaataaaatatttgagttgaggactaaatt

SEQ ID NO: 260813 - DNA, 379 bp, Homo sapiens
gttgtgttgcagatgcctacagtattcagcacagtaacatgctgtataggtttgtagcctaggatcaataggctgtaccacataacctagggcggagtctcactctgttcaccaagctggagtgcagtggtgcagtctcagctcactgcaatttctgcctcaccctcccaagtaattgggattacagttgttgagatcatgacctcttctggaatggtgttctcagaagtccttggacaatcagggtgtactaggagaaaacatgctgtgagatgggatgaaagtcttcaggatggacactatactttctgttattggaggattcggtagtttgaataagcgtttgaatgaataaaatatttgagttgaggactaaatt

SEQ ID NO: 260814 - DNA, 429 bp, Homo sapiens
gttgtgttgcagatgcctacagtattcagcacagtaacatgctgtataggtttgtagcctaggatcaataggctgtaccacataacctagggtgagtagtaggttatgctatctctatttacacatagaatacactatatgatgttacacagtgaagaaattgcctaatgcatttctcagaatgtaatttttgtcattaagtgatgcaacattgtatttaaaacactataaataaattaagatggaaacttaacatgtttatgtaacccattggaaagcaagaaaaagacacagaggaataagaaacagaaacaaacagaaacaaataacaaagtggtagacatcaaccacaacatacaaattgttaaacataaaaggcctatagaaaccaactaaaaaacatagattggcagagtagttaaaaaaaca

SEQ ID NO: 260815 - DNA, 427 bp, Homo sapiens
gccttccatggcctactcttaaaaataggcttctctgccaagattttaagatccttcatgatctggacccacacagaccattgcaacctcacttcctaatactagtcagcatgcacatcttttatagccaaacaatcatactagcagccctatacttaaaggagtgatatgcagcactcccatgttcattgcacattactcacaatagccaagatatgaaatcaacctaagtgtccatcaacagatgaatggataagaaaatgtgctatatacacaagatacgaaatcaatctaagtgtctatcaatggataaagggataagaaaatgtggtatatatacacaatattattcagcctttaaaaagaaagatcatttgtgacatggatgaacctagaggacgtatgttagacaaaataagccaggaat

SEQ ID NO: 260816 - DNA, 405 bp, Homo sapiens
gatcatatagcatcttgcagcaccataatttatttaaccagaatcaaatgaacttttgtttccaatttttgctatgccaagtaatacagcatttcctttcctaaattctttgtctttaaaagatactaaaatctcttcatttaaatataaagcaataaaaaaattcttatgctataggtttttgtgcaatgtcatctctcctgttatcccacttaacagaaacaagagtaacaaaaaactaaaagtaaaaacgttgaagccaggcagttccagctactgaggaggctgaagtagaaagatggcttgagcccaggagttccaggctgtggtgcactagaatcacagctgtggatagccactgcactccaggactgggcaacataacaagactccatctcttttaaa

SEQ ID NO: 260817 - DNA, 245 bp, Homo sapiens
cctgtgtcccagaaaagagaaaactgcaacccccaaagcagaacctattcttctgactgcatcacatgggtgaggtaagttcccatgcctccaaggggctcatggattctccctgggcaggatggctaccggctttcgctgtgggggcatttcatgaattttctttttttttttttttttggagatggagtcttgctctgtggcccaggctggagtacagtggagcgagactcagtctcaaaaaa

SEQ ID NO: 260818 - DNA, 175 bp, Homo sapiens
ggttttccgacgcacgatgttgtccttatgaaaaattggtgatgaaggaagcaaacgtgtgggaaaatgatcctgcccttaaaactgaaaaacaataaaacagcaaagagcccagaagagcccgtgaacctcctcatggggcagtgaggagagacctcagtaatggcttgggaaa

SEQ ID NO: 260819 - DNA, 507 bp, Homo sapiens
tgccctggcagaacctccacacccactcggctagaggagatgggagcagtcctaggaaagaacgcttcagacatccactgttcttacccaacgttcagcatgttatcaagcttaaacacttctcagattgttgtatgagttttattgatttccagagcaccaaaatagttgttcttgtcaattttgttcagacttatagttgctttctggggagaggatttgctgacttttcacatggctgtagctggaaatacgcttccacccccagtgtttctgattcattagacccggggtgcaactggagaatttgcatagcccaaaaaagaagtgtgttacagttcctcccccactctctctcttgctcctgctttcaccatgtgaaatgcctgctcccacattgccttctgccatgaataaaagctccctgaggccccccccatgaagctgagtgatgttggtgccatgcttgtacagcctgcagaaccgggagccaattaaacttctttt

SEQ ID NO: 260820 - DNA, 389 bp, Homo sapiens
ggtcatagcccttagtccttgggacctcactgtgactgcacacctaccctgggtgacagcctctctgggctgttgtctccttgtcccggtcacagtctcctttgagaatttgacaaaagccatgagcctttctgaagaaaaaaggcagcgatacaattttgcttataacctcagggagtttctggggtccctgaagtacaaccgtggaccccaagctaagaatctcaaaggcctttcccagcgttgtgattctaatctcttcagccttcctggctgtgtgtggtgtgtctgctgacacctacacactagatacctatctatgggttatgaccttttcttctggcatgtactccaaaaatacaataaccatggccttagtagtctggcta

SEQ ID NO: 260821 - DNA, 587 bp, Homo sapiens
cagtgtttctcaccgctggctgctatgtattagcatcacttggaaacatttttcaaactaccaatttaggccccacctcacagatttcgacttaatttggccagggcggggatcaagtatagtggtactaaaaagcacctttctttttagatgactctaacgtggtcacctgaaccttctgaggttgactctaacgtagggccagagatgcaaaccacctatatggatgatgaaaccttttctttactccttagggaactaagattctgtgaatacaccgttcccctgggtctcaaactagctctagaggaggccctcatgataccacctcagcagaggtgagagagtaaggaaccattggtagagccagtactgtggagaaattaaaatttaactggtgagggacagcttcagggttaagagagttggacctcctaccttgaaacctggctccccacctgccactgttccatagtgcttggaaaatatgaatattttatgtgcctcagttgccccttctgtaaaattgggattatactaatgggttgttatgcatatggaaattaatatgtgaaacctgtacatga

SEQ ID NO: 260822 - DNA, 1019 bp, Homo sapiens
aatcctacatattgtatgggtatcccaaagagaaaatgaggttgcttagaatggatttgtcttatttttcaaaatttgttttcactttgcacataaacccttcaaaatgtagataacaaatgaaaaataaagtggaacccactcaataaggtgagattctgtaagcagagatgaagcttgatgttcttaatgaatagtgtcagtgtagaaagaacatgagtggtaataaaaaattacagcttacaaaagggcctagaaaaatgaggcaggccagacgagtggaaatagaacacaacagtttaaagtgctttgagaccctcagttaaacagtacacgtgaatacaaaataatgttaaggccattcatggagaagaaatacttaagcaagacatacctggcttgcttcatagagaagaggtaagagatggattttcaattcggcgtgcagcagcagggaatatggctacaacaacgctggctagtattagggcaacacacctcaaagctaactcaccataaacctaacatcttgattcacatctgcttggagtgaaaaagtttatgatcagtcttttcaggaaggtttattttatgggggatttttttgtgctttagtaccccaaaatcacatatgttcgcatacatcatatacacacacattgcatacacatttccccttgactgattcgcatctttgtagataaacactaaattttgataaagattatttacacttatttaggctattactccaatttaaaaatcagtgaaagttttcaatgtttagtctcctaatatataatgcttaaatttgcaacaggaacaatacattatcaaaagcattaacctgtatttagctttcaaatatacctgtctatattaggcagtgatatcttaagaaatcattttctcccttatattttctaaagtgctttaaaaactcatttaatctacacatttttcagaggtaggtcggaattatcctcttgttgcaaatgaggaaacaggcacagtgagca

SEQ ID NO: 260823 - DNA, 182 bp, Homo sapiens
  misc_feature (12)..(12): n is a, c, g, or t
  misc_feature (182)..(182): n is a, c, g, or t
tgtgtgtgcatnccatgtgtactgtgtgtgtgtgtgttgtgtgtttgaatgaaaaatgcttatgtattgacagaacacttctagaatgatacccaaactcctggagtgggagtggggaatgccttctacgtacacagtacactggatgcacacacactacctggtagcatgaagattgggan

SEQ ID NO: 260824 - DNA, 4505 bp, Homo sapiens
gcaccgccccgcgctccgctgccagggcgggagggaggaatggttgcttcacgccccgggggaagagacgggaagctcggctctgggttgcgggccccggcgtctccgcgtggggcgcaccgtccgacccgcccctcccggtgtgcagcgccccgcaccgccccgcctcgcctgggagaagccgccgggacgcgccgggctggagtgggcggttataggctttgagctaggccgtttccgggaggcggagctcagaccccatttcctttctccacatccaggtcaggtggcgtttgctgtggcggctaggcccgcgtgcgctggagacctccgcgctggcccccgcgagcctcctgccctggcccggcgctgcggctctgccgcggcggcagcatgggtggcccccggggcgcgggctgggtggcggcgggcctgctgctcggcgcgggcgcctgctactgcatttacaggctgacccggggtcggcggcggggcgaccgcgagctcgggatacgctcttcgaagtccgcagaagacttaactgatggttcatatgatgatgttctaaatgctgaacaacttcagaaactcctttacctgctggagtcaacggaggatcctgtaattattgaaagagctttgattactttgggtaacaatgcagccttttcagttaaccaagctattattcgtgaattgggtggtattccaattgttgcaaacaaaatcaaccattccaaccagagtattaaagagaaagctttaaatgcactaaataacctgagtgtgaatgttgaaaatcaaatcaagataaagatatacatcagtcaagtatgtgaggatgtcttctctggtcctctgaactctgctgtgcagctggctggactgacattgttgacaaacatgactgttaccaatgaccaccagcacatgcttcacagttacattacagacctgttccaggtgttacttactggaaatggaaacacgaaggtgcaagttttgaaactgcttttgaatttgtctgaaaatccagccatgacagaaggacttctccgtgcccaagtggattcatcattcctttccctttatgacagccacgtagcaaaggagattcttcttcgagtacttacgctatttcagaatataaagaactgcctcaaaatagaaggccatttagctgtgcagcctactttcactgaaggttcattgtttttcctgttacatggagaagaatgtgcccagaaaataagagctttagttgatcaccatgatgcagaggtgaaggaaaaggttgtaacaataatacccaaaatctgattggtcatatttttccaaagagtaatgcagtctggatataaatgtattttctgtcttccttataaggggattctcccagctgctaaatttaaacagtaaatatcacattttgtcattaacacagctataacttgccgtggttctcagatttattttggactattttgatgccaagtgaatataagagcttgtactgaaaccatttatttctttctattttgctatttgcaaatgcttgttatcttccctacatgaagtggcagtaacctttttcacatttaagctacccttctaccttttgaagtgatttgcagttactcatctgagacagcatcagtatttgactaaatcattgtttcacaactgaatagtcttgttcttttagtagcaatgaaatcctaagctcttgaggccattcacctgccaacctgaccatactgctttcaaaagtcttttctcatcagtagaatctattttggtcacttctagtcaatgaaaaatgtaaacttttaggagagaatgtttcctaggactcacccactccattcaatgttacatataaaatagtgtgatcaatcacaatgtccatctttagacagttggttaaataaattatctggtctttgaaaagaccgtgctgggcgcggtggctcttgcctgtaatcccagcactttgggaggctgaggcgggcagatcacctgagatcgggagtttgagaccaagcctgaccaatatggagaaaccctgtctctactaagaatacaaaattagctgggcatggtggtgcatgcctgtaatcccagctacttgggaggccgaggcaggagaattgcttgaacccgggaggcagaggttgcagtgaggtgagatagcgccattgcactccagcctgggcaacaagagcaaaactctgtctcaaaaaaaaaaaaaaatgatggagctccgaatgtgcttaagtggaaagatatctatgaaatatggtggttttttaaaacacaaaaattatagaatatgggatcccgtgtgtgtgtgtgtgtgtgtgtgtgtgtgtgttgtgtgtgtgtgtgtgtgtgtgtgtgtgtttgaatgaaaaatgcttatgtattgacagaacacttctagaatgatacccaaactcctggagtgggagtggggaatgccttctacgtacacactgttctactgtttgaattttttaatatgagcccaaattgtataatctttttttaataaaggggagaaaaatcacttacaaggttatacatattttttcccttgacagtactttattaattttcatccatattttacttgactaaaaatacaatgtatgaaaatttatctttaatagcattttccataagctactataacaatttattgatacatctgggattcagccaggtcttatagtatttaaatttataacccctgccatgcttagcattaagtaaatcagtatgcaagcagtatttaaggcaaagctttaagaatactttaaatttcatttgtaaatacatagatgcaagactgtttccataggaagtcacaaatcctcaaacagaaatatgtgtgttctcaatgttaccctgatacagaaatcaaacttggaagaaatatttttacattagaaaaaggactcagtataaggtgaaaacaaaattcccagtgggctagacatgaacaaaagtattcattccccaaaaggcacatttctttataacagttttttcaaatctacctccctatttaatgaaagcatattcattaaatatgaaactatgcatacattaaaaaccaggatttgtttttaatgtgctttagcagcagtagattctaaaactgtgtctcttgtcctctcattagtttgaataatcacactccctagagatcagagcattgagtctgaaatgtcaaaatgctagagaaaagagggagtaatttttaactacccagaaagaagatgcacaaatacatcttttcctacgtaggtcacggcatatgttggcttttataatttgggatttctcctaattgatgacccaccctattgggcagtgaggcatagcaaagtgttcctcagttatcacaggaaacttcaataaaatcttacatattgctatgggtattcacaaagaggaaaatgaagttgacttagaggataagactgattaaaagacactacaatgcatattagactgaattgaagaagagaatggatttgtcttatttttcaaaatttgttttcactttgcacataaacccttcaaaatgtagataacaaatgaaaaataaagtggaacccactcaataaggtgagattctgtaagcagagatgaagcttgatgttcttaatgaatagtgtcagtgtagaaagaacatgagtggtaataaaaaattacagcttacaaaagggcctagaaaaatgaggcaggccagacgagtggaaatagaacacaacagtttaaagtgctttgagaccctcagttaaacagtacacgtgaatacaaaataatgttaaggccattcatggagaagaaatacttaagcaagacatacctggcttgcttcatagagaagaggtaagagatggattttcaattcggcgtgcagcagcagggaatatggctacaacaacgctggctagtattagggcaacacacctcaaagctaactcaccataaacctaacatcttgattcacatctgcttggagtgaaaaagtttatgatcagtcttttcaggaaggtttattttatgggggatttttttgtgctttagtaccccaaaatcacatatgttcgcatacatcatatacacacacattgcatacacatttccccttgactgattcgcatctttgtagataaacactaaattttgataaagattatttacacttatttaggctattactccaatttaaaaatcagtgaaagttttcaatgtttagtctcctaatatataatgcttaaatttgcaacaggaacaatacattatcaaaagcattaacctgtatttagctttcaaatatacctgtctatattaggcagtgatatcttaagaaatcattttctcccttatattttctaaagtgctttaaaaactcatttaatctacacatttttcagaggtaggtcggaattatcctcttgttgcaaatgaggaaacaggcacagtgagca

SEQ ID NO: 260825 - DNA, 2532 bp, Homo sapiens
gcaccgccccgcgctccgctgccagggcgggagggaggaatggttgcttcacgccccgggggaagagacgggaagctcggctctgggttgcgggccccggcgtctccgcgtggggcgcaccgtccgacccgcccctcccggtgtgcagcgccccgcaccgccccgcctcgcctgggagaagccgccgggacgcgccgggctggagtgggcggttataggctttgagctaggccgtttccgggaggcggagctcagaccccatttcctttctccacatccaggtcaggtggcgtttgctgtggcggctaggcccgcgtgcgctggagacctccgcgctggcccccgcgagcctcctgccctggcccggcgctgcggctctgccgcggcggcagcatgggtggcccccggggcgcgggctgggtggcggcgggcctgctgctcggcgcgggcgcctgctactgcatttacaggctgacccggggtcggcggcggggcgaccgcgagctcgggatacgctcttcgaagtccgcagaagacttaactgatggttcatatgatgatgttctaaatgctgaacaacttcagaaactcctttacctgctggagtcaacggaggatcctgtaattattgaaagagctttgattactttgggtaacaatgcagccttttcagttaaccaagctattattcgtgaattgggtggtattccaattgttgcaaacaaaatcaaccattccaaccagagtattaaagagaaagctttaaatgcactaaataacctgagtgtgaatgttgaaaatcaaatcaagataaagatatacatcagtcaagtatgtgaggatgtcttctctggtcctctgaactctgctgtgcagctggctggactgacattgttgacaaacatgactgttaccaatgaccaccagcacatgcttcacagttacattacagacctgttccaggtgttacttactggaaatggaaacacgaaggtgcaagttttgaaactgcttttgaatttgtctgaaaatccagccatgacagaaggacttctccgtgcccaagtggattcatcattcctttccctttatgacagccacgtagcaaaggagattcttcttcgagtacttacgctatttcagaatataaagaactgcctcaaaatagaaggccatttagctgtgcagcctactttcactgaaggttcattgtttttcctgttacatggagaagaatgtgcccagaaaataagagctttagttgatcaccatgatgcagaggtgaaggaaaaggttgtaacaataatacccaaaatctgattggtcatatttttccaaagagtaatgcagtctggatataaatgtattttctgtcttccttataaggggattctcccagctgctaaatttaaacagtaaatatcacattttgtcattaacacagctataacttgccgtggttctcagatttattttggactattttgatgccaagtgaatataagagcttgtactgaaaccatttatttctttctattttgctatttgcaaatgcttgttatcttccctacatgaagtggcagtaacctttttcacatttaagctacccttctaccttttgaagtgatttgcagttactcatctgagacagcatcagtatttgactaaatcattgtttcacaactgaatagtcttgttcttttagtagcaatgaaatcctaagctcttgaggccattcacctgccaacctgaccatactgctttcaaaagtcttttctcatcagtagaatctattttggtcacttctagtcaatgaaaaatgtaaacttttaggagagaatgtttcctaggactcacccactccattcaatgttacatataaaatagtgtgatcaatcacaatgtccatctttagacagttggttaaataaattatctggtctttgaaaagaccgtgctgggcgcggtggctcttgcctgtaatcccagcactttgggaggctgaggcgggcagatcacctgagatcgggagtttgagaccaagcctgaccaatatggagaaaccctgtctctactaagaatacaaaattagctgggcatggtggtgcatgcctgtaatcccagctacttgggaggccgaggcaggagaattgcttgaacccgggaggcagaggttgcagtgaggtgagatagcgccattgcactccagcctgggcaacaagagcaaaactctgtctcaaaaaaaaaaaaaaatgatggagctccgaatgtgcttaagtggaaagatatctatgaaatatggtggttttttaaaacacaaaaattatagaatatgggatcccgtgtgtgtgtgtgtgtgtgtgtgtttgaatgaaaaatgcttatgtattgacagaacacttctagaatgatacccaaactcctggagtgggagtggggaatgccttctacgtacacactgttctactgtttgaattttttaatatgagcccaaattgtataatctttttttaataaaggggagaaaaatca

SEQ ID NO: 260826 - DNA, 4328 bp, Homo sapiens
gcaccgccccgcgctccgctgccagggcgggagggaggaatggttgcttcacgccccgggggaagagacgggaagctcggctctgggttgcgggccccggcgtctccgcgtggggcgcaccgtccgacccgcccctcccggtgtgcagcgccccgcaccgccccgcctcgcctgggagaagccgccgggacgcgccgggctggagtgggcggttataggctttgagctaggccgtttccgggaggcggagctcagaccccatttcctttctccacatccaggtcaggtggcgtttgctgtggcggctaggcccgcgtgcgctggagacctccgcgctggcccccgcgagcctcctgccctggcccggcgctgcggctctgccgcggcggcagcatgggtggcccccggggcgcgggctgggtggcggcgggcctgctgctcggcgcgggcgcctgctactgcatttacaggctgacccggggtcggcggcggggcgaccgcgagctcgggatacgctcttcgaagtccgcagaagacttaactgatggttcatatgatgatgttctaaatgctgaacaacttcagaaactcctttacctgctggagtcaacggaggatcctgtaattattgaaagagctttgattactttgggtaacaatgcagccttttcagttaaccaagctattattcgtgaattgggtggtattccaattgttgcaaacaaaatcaaccattccaaccagagtattaaagagaaagctttaaatgcactaaataacctgagtgtgaatgttgaaaatcaaatcaagataaaggtgcaagttttgaaactgcttttgaatttgtctgaaaatccagccatgacagaaggacttctccgtgcccaagtggattcatcattcctttccctttatgacagccacgtagcaaaggagattcttcttcgagtacttacgctatttcagaatataaagaactgcctcaaaatagaaggccatttagctgtgcagcctactttcactgaaggttcattgtttttcctgttacatggagaagaatgtgcccagaaaataagagctttagttgatcaccatgatgcagaggtgaaggaaaaggttgtaacaataatacccaaaatctgattggtcatatttttccaaagagtaatgcagtctggatataaatgtattttctgtcttccttataaggggattctcccagctgctaaatttaaacagtaaatatcacattttgtcattaacacagctataacttgccgtggttctcagatttattttggactattttgatgccaagtgaatataagagcttgtactgaaaccatttatttctttctattttgctatttgcaaatgcttgttatcttccctacatgaagtggcagtaacctttttcacatttaagctacccttctaccttttgaagtgatttgcagttactcatctgagacagcatcagtatttgactaaatcattgtttcacaactgaatagtcttgttcttttagtagcaatgaaatcctaagctcttgaggccattcacctgccaacctgaccatactgctttcaaaagtcttttctcatcagtagaatctattttggtcacttctagtcaatgaaaaatgtaaacttttaggagagaatgtttcctaggactcacccactccattcaatgttacatataaaatagtgtgatcaatcacaatgtccatctttagacagttggttaaataaattatctggtctttgaaaagaccgtgctgggcgcggtggctcttgcctgtaatcccagcactttgggaggctgaggcgggcagatcacctgagatcgggagtttgagaccaagcctgaccaatatggagaaaccctgtctctactaagaatacaaaattagctgggcatggtggtgcatgcctgtaatcccagctacttgggaggccgaggcaggagaattgcttgaacccgggaggcagaggttgcagtgaggtgagatagcgccattgcactccagcctgggcaacaagagcaaaactctgtctcaaaaaaaaaaaaaaatgatggagctccgaatgtgcttaagtggaaagatatctatgaaatatggtggttttttaaaacacaaaaattatagaatatgggatcccgtgtgtgtgtgtgtgtgtgtgtgtgtgtgtgttgtgtgtgtgtgtgtgtgtgtgtgtgtgtttgaatgaaaaatgcttatgtattgacagaacacttctagaatgatacccaaactcctggagtgggagtggggaatgccttctacgtacacactgttctactgtttgaattttttaatatgagcccaaattgtataatctttttttaataaaggggagaaaaatcacttacaaggttatacatattttttcccttgacagtactttattaattttcatccatattttacttgactaaaaatacaatgtatgaaaatttatctttaatagcattttccataagctactataacaatttattgatacatctgggattcagccaggtcttatagtatttaaatttataacccctgccatgcttagcattaagtaaatcagtatgcaagcagtatttaaggcaaagctttaagaatactttaaatttcatttgtaaatacatagatgcaagactgtttccataggaagtcacaaatcctcaaacagaaatatgtgtgttctcaatgttaccctgatacagaaatcaaacttggaagaaatatttttacattagaaaaaggactcagtataaggtgaaaacaaaattcccagtgggctagacatgaacaaaagtattcattccccaaaaggcacatttctttataacagttttttcaaatctacctccctatttaatgaaagcatattcattaaatatgaaactatgcatacattaaaaaccaggatttgtttttaatgtgctttagcagcagtagattctaaaactgtgtctcttgtcctctcattagtttgaataatcacactccctagagatcagagcattgagtctgaaatgtcaaaatgctagagaaaagagggagtaatttttaactacccagaaagaagatgcacaaatacatcttttcctacgtaggtcacggcatatgttggcttttataatttgggatttctcctaattgatgacccaccctattgggcagtgaggcatagcaaagtgttcctcagttatcacaggaaacttcaataaaatcttacatattgctatgggtattcacaaagaggaaaatgaagttgacttagaggataagactgattaaaagacactacaatgcatattagactgaattgaagaagagaatggatttgtcttatttttcaaaatttgttttcactttgcacataaacccttcaaaatgtagataacaaatgaaaaataaagtggaacccactcaataaggtgagattctgtaagcagagatgaagcttgatgttcttaatgaatagtgtcagtgtagaaagaacatgagtggtaataaaaaattacagcttacaaaagggcctagaaaaatgaggcaggccagacgagtggaaatagaacacaacagtttaaagtgctttgagaccctcagttaaacagtacacgtgaatacaaaataatgttaaggccattcatggagaagaaatacttaagcaagacatacctggcttgcttcatagagaagaggtaagagatggattttcaattcggcgtgcagcagcagggaatatggctacaacaacgctggctagtattagggcaacacacctcaaagctaactcaccataaacctaacatcttgattcacatctgcttggagtgaaaaagtttatgatcagtcttttcaggaaggtttattttatgggggatttttttgtgctttagtaccccaaaatcacatatgttcgcatacatcatatacacacacattgcatacacatttccccttgactgattcgcatctttgtagataaacactaaattttgataaagattatttacacttatttaggctattactccaatttaaaaatcagtgaaagttttcaatgtttagtctcctaatatataatgcttaaatttgcaacaggaacaatacattatcaaaagcattaacctgtatttagctttcaaatatacctgtctatattaggcagtgatatcttaagaaatcattttctcccttatattttctaaagtgctttaaaaactcatttaatctacacatttttcagaggtaggtcggaattatcctcttgttgcaaatgaggaaacaggcacagtgagca

SEQ ID NO: 260827 - DNA, 4643 bp, Homo sapiens
gcaccgccccgcgctccgctgccagggcgggagggaggaatggttgcttcacgccccgggggaagagacgggaagctcggctctgggttgcgggccccggcgtctccgcgtggggcgcaccgtccgacccgcccctcccggtgtgcagcgccccgcaccgccccgcctcgcctgggagaagccgccgggacgcgccgggctggagtgggcggttataggctttgagctaggccgtttccgggaggcggagctcagaccccatttcctttctccacatccaggtcaggtggcgtttgctgtggcggctaggcccgcgtgcgctggagacctccgcgctggcccccgcgagcctcctgccctggcccggcgctgcggctctgccgcggcggcagcatgggtggcccccggggcgcgggctgggtggcggcgggcctgctgctcggcgcgggcgcctgctactgcatttacaggctgacccggggtcggcggcggggcgaccgcgagctcgggatacgctcttcgaagtccgcaggtgccctggaagaagggacgtcagagggtcagttgtgcgggcgctcggcccggcctcagacgggaggtacctgggagtcacagtggtccaagacctcgcagcctgaagacttaactgatggttcatatgatgatgttctaaatgctgaacaacttcagaaactcctttacctgctggagtcaacggaggatcctgtaattattgaaagagctttgattactttgggtaacaatgcagccttttcagttaaccaaatccctatgaagttggtcactggcatcacattcgctattattcgtgaattgggtggtattccaattgttgcaaacaaaatcaaccattccaaccagagtattaaagagaaagctttaaatgcactaaataacctgagtgtgaatgttgaaaatcaaatcaagataaagatatacatcagtcaagtatgtgaggatgtcttctctggtcctctgaactctgctgtgcagctggctggactgacattgttgacaaacatgactgttaccaatgaccaccagcacatgcttcacagttacattacagacctgttccaggtgttacttactggaaatggaaacacgaaggtgcaagttttgaaactgcttttgaatttgtctgaaaatccagccatgacagaaggacttctccgtgcccaagtggattcatcattcctttccctttatgacagccacgtagcaaaggagattcttcttcgagtacttacgctatttcagaatataaagaactgcctcaaaatagaaggccatttagctgtgcagcctactttcactgaaggttcattgtttttcctgttacatggagaagaatgtgcccagaaaataagagctttagttgatcaccatgatgcagaggtgaaggaaaaggttgtaacaataatacccaaaatctgattggtcatatttttccaaagagtaatgcagtctggatataaatgtattttctgtcttccttataaggggattctcccagctgctaaatttaaacagtaaatatcacattttgtcattaacacagctataacttgccgtggttctcagatttattttggactattttgatgccaagtgaatataagagcttgtactgaaaccatttatttctttctattttgctatttgcaaatgcttgttatcttccctacatgaagtggcagtaacctttttcacatttaagctacccttctaccttttgaagtgatttgcagttactcatctgagacagcatcagtatttgactaaatcattgtttcacaactgaatagtcttgttcttttagtagcaatgaaatcctaagctcttgaggccattcacctgccaacctgaccatactgctttcaaaagtcttttctcatcagtagaatctattttggtcacttctagtcaatgaaaaatgtaaacttttaggagagaatgtttcctaggactcacccactccattcaatgttacatataaaatagtgtgatcaatcacaatgtccatctttagacagttggttaaataaattatctggtctttgaaaagaccgtgctgggcgcggtggctcttgcctgtaatcccagcactttgggaggctgaggcgggcagatcacctgagatcgggagtttgagaccaagcctgaccaatatggagaaaccctgtctctactaagaatacaaaattagctgggcatggtggtgcatgcctgtaatcccagctacttgggaggccgaggcaggagaattgcttgaacccgggaggcagaggttgcagtgaggtgagatagcgccattgcactccagcctgggcaacaagagcaaaactctgtctcaaaaaaaaaaaaaaatgatggagctccgaatgtgcttaagtggaaagatatctatgaaatatggtggttttttaaaacacaaaaattatagaatatgggatcccgtgtgtgtgtgtgtgtgtgtgtgtgtgtgtgttgtgtgtgtgtgtgtgtgtgtgtgtgtgtttgaatgaaaaatgcttatgtattgacagaacacttctagaatgatacccaaactcctggagtgggagtggggaatgccttctacgtacacactgttctactgtttgaattttttaatatgagcccaaattgtataatctttttttaataaaggggagaaaaatcacttacaaggttatacatattttttcccttgacagtactttattaattttcatccatattttacttgactaaaaatacaatgtatgaaaatttatctttaatagcattttccataagctactataacaatttattgatacatctgggattcagccaggtcttatagtatttaaatttataacccctgccatgcttagcattaagtaaatcagtatgcaagcagtatttaaggcaaagctttaagaatactttaaatttcatttgtaaatacatagatgcaagactgtttccataggaagtcacaaatcctcaaacagaaatatgtgtgttctcaatgttaccctgatacagaaatcaaacttggaagaaatatttttacattagaaaaaggactcagtataaggtgaaaacaaaattcccagtgggctagacatgaacaaaagtattcattccccaaaaggcacatttctttataacagttttttcaaatctacctccctatttaatgaaagcatattcattaaatatgaaactatgcatacattaaaaaccaggatttgtttttaatgtgctttagcagcagtagattctaaaactgtgtctcttgtcctctcattagtttgaataatcacactccctagagatcagagcattgagtctgaaatgtcaaaatgctagagaaaagagggagtaatttttaactacccagaaagaagatgcacaaatacatcttttcctacgtaggtcacggcatatgttggcttttataatttgggatttctcctaattgatgacccaccctattgggcagtgaggcatagcaaagtgttcctcagttatcacaggaaacttcaataaaatcttacatattgctatgggtattcacaaagaggaaaatgaagttgacttagaggataagactgattaaaagacactacaatgcatattagactgaattgaagaagagaatggatttgtcttatttttcaaaatttgttttcactttgcacataaacccttcaaaatgtagataacaaatgaaaaataaagtggaacccactcaataaggtgagattctgtaagcagagatgaagcttgatgttcttaatgaatagtgtcagtgtagaaagaacatgagtggtaataaaaaattacagcttacaaaagggcctagaaaaatgaggcaggccagacgagtggaaatagaacacaacagtttaaagtgctttgagaccctcagttaaacagtacacgtgaatacaaaataatgttaaggccattcatggagaagaaatacttaagcaagacatacctggcttgcttcatagagaagaggtaagagatggattttcaattcggcgtgcagcagcagggaatatggctacaacaacgctggctagtattagggcaacacacctcaaagctaactcaccataaacctaacatcttgattcacatctgcttggagtgaaaaagtttatgatcagtcttttcaggaaggtttattttatgggggatttttttgtgctttagtaccccaaaatcacatatgttcgcatacatcatatacacacacattgcatacacatttccccttgactgattcgcatctttgtagataaacactaaattttgataaagattatttacacttatttaggctattactccaatttaaaaatcagtgaaagttttcaatgtttagtctcctaatatataatgcttaaatttgcaacaggaacaatacattatcaaaagcattaacctgtatttagctttcaaatatacctgtctatattaggcagtgatatcttaagaaatcattttctcccttatattttctaaagtgctttaaaaactcatttaatctacacatttttcagaggtaggtcggaattatcctcttgttgcaaatgaggaaacaggcacagtgagca

SEQ ID NO: 260828 - DNA, 4397 bp, Homo sapiens
gcaccgccccgcgctccgctgccagggcgggagggaggaatggttgcttcacgccccgggggaagagacgggaagctcggctctgggttgcgggccccggcgtctccgcgtggggcgcaccgtccgacccgcccctcccggtgtgcagcgccccgcaccgccccgcctcgcctgggagaagccgccgggacgcgccgggctggagtgggcggttataggctttgagctaggccgtttccgggaggcggagctcagaccccatttcctttctccacatccaggtcaggtggcgtttgctgtggcggctaggcccgcgtgcgctggagacctccgcgctggcccccgcgagcctcctgccctggcccggcgctgcggctctgccgcggcggcagcatgggtggcccccggggcgcgggctgggtggcggcgggcctgctgctcggcgcgggcgcctgctactgcatttacaggctgacccggggtcggcggcggggcgaccgcgagctcgggatacgctcttcgaagtccgcagaagacttaactgatggttcatatgatgatgttctaaatgctgaacaacttcagaaactcctttacctgctggagtcaacggaggatcctgtaattattgaaagagctttgattactttgggtaacaatgcagccttttcagttaaccaagctattattcgtgaattgggtggtattccaattgttgcaaacaaaatcaaccattccaaccagagtattaaagagaaagctttaaatgcactaaataacctgagtgtgaatgttgaaaatcaaatcaagataaagccaaggattacctttagaggaatggagaataagacagaagagggagggacctgaactagccaataagaggtgcaagttttgaaactgcttttgaatttgtctgaaaatccagccatgacagaaggacttctccgtgcccaagtggattcatcattcctttccctttatgacagccacgtagcaaaggagattcttcttcgagtacttacgctatttcagaatataaagaactgcctcaaaatagaaggccatttagctgtgcagcctactttcactgaaggttcattgtttttcctgttacatggagaagaatgtgcccagaaaataagagctttagttgatcaccatgatgcagaggtgaaggaaaaggttgtaacaataatacccaaaatctgattggtcatatttttccaaagagtaatgcagtctggatataaatgtattttctgtcttccttataaggggattctcccagctgctaaatttaaacagtaaatatcacattttgtcattaacacagctataacttgccgtggttctcagatttattttggactattttgatgccaagtgaatataagagcttgtactgaaaccatttatttctttctattttgctatttgcaaatgcttgttatcttccctacatgaagtggcagtaacctttttcacatttaagctacccttctaccttttgaagtgatttgcagttactcatctgagacagcatcagtatttgactaaatcattgtttcacaactgaatagtcttgttcttttagtagcaatgaaatcctaagctcttgaggccattcacctgccaacctgaccatactgctttcaaaagtcttttctcatcagtagaatctattttggtcacttctagtcaatgaaaaatgtaaacttttaggagagaatgtttcctaggactcacccactccattcaatgttacatataaaatagtgtgatcaatcacaatgtccatctttagacagttggttaaataaattatctggtctttgaaaagaccgtgctgggcgcggtggctcttgcctgtaatcccagcactttgggaggctgaggcgggcagatcacctgagatcgggagtttgagaccaagcctgaccaatatggagaaaccctgtctctactaagaatacaaaattagctgggcatggtggtgcatgcctgtaatcccagctacttgggaggccgaggcaggagaattgcttgaacccgggaggcagaggttgcagtgaggtgagatagcgccattgcactccagcctgggcaacaagagcaaaactctgtctcaaaaaaaaaaaaaaatgatggagctccgaatgtgcttaagtggaaagatatctatgaaatatggtggttttttaaaacacaaaaattatagaatatgggatcccgtgtgtgtgtgtgtgtgtgtgtgtgtgtgtgttgtgtgtgtgtgtgtgtgtgtgtgtgtgtttgaatgaaaaatgcttatgtattgacagaacacttctagaatgatacccaaactcctggagtgggagtggggaatgccttctacgtacacactgttctactgtttgaattttttaatatgagcccaaattgtataatctttttttaataaaggggagaaaaatcacttacaaggttatacatattttttcccttgacagtactttattaattttcatccatattttacttgactaaaaatacaatgtatgaaaatttatctttaatagcattttccataagctactataacaatttattgatacatctgggattcagccaggtcttatagtatttaaatttataacccctgccatgcttagcattaagtaaatcagtatgcaagcagtatttaaggcaaagctttaagaatactttaaatttcatttgtaaatacatagatgcaagactgtttccataggaagtcacaaatcctcaaacagaaatatgtgtgttctcaatgttaccctgatacagaaatcaaacttggaagaaatatttttacattagaaaaaggactcagtataaggtgaaaacaaaattcccagtgggctagacatgaacaaaagtattcattccccaaaaggcacatttctttataacagttttttcaaatctacctccctatttaatgaaagcatattcattaaatatgaaactatgcatacattaaaaaccaggatttgtttttaatgtgctttagcagcagtagattctaaaactgtgtctcttgtcctctcattagtttgaataatcacactccctagagatcagagcattgagtctgaaatgtcaaaatgctagagaaaagagggagtaatttttaactacccagaaagaagatgcacaaatacatcttttcctacgtaggtcacggcatatgttggcttttataatttgggatttctcctaattgatgacccaccctattgggcagtgaggcatagcaaagtgttcctcagttatcacaggaaacttcaataaaatcttacatattgctatgggtattcacaaagaggaaaatgaagttgacttagaggataagactgattaaaagacactacaatgcatattagactgaattgaagaagagaatggatttgtcttatttttcaaaatttgttttcactttgcacataaacccttcaaaatgtagataacaaatgaaaaataaagtggaacccactcaataaggtgagattctgtaagcagagatgaagcttgatgttcttaatgaatagtgtcagtgtagaaagaacatgagtggtaataaaaaattacagcttacaaaagggcctagaaaaatgaggcaggccagacgagtggaaatagaacacaacagtttaaagtgctttgagaccctcagttaaacagtacacgtgaatacaaaataatgttaaggccattcatggagaagaaatacttaagcaagacatacctggcttgcttcatagagaagaggtaagagatggattttcaattcggcgtgcagcagcagggaatatggctacaacaacgctggctagtattagggcaacacacctcaaagctaactcaccataaacctaacatcttgattcacatctgcttggagtgaaaaagtttatgatcagtcttttcaggaaggtttattttatgggggatttttttgtgctttagtaccccaaaatcacatatgttcgcatacatcatatacacacacattgcatacacatttccccttgactgattcgcatctttgtagataaacactaaattttgataaagattatttacacttatttaggctattactccaatttaaaaatcagtgaaagttttcaatgtttagtctcctaatatataatgcttaaatttgcaacaggaacaatacattatcaaaagcattaacctgtatttagctttcaaatatacctgtctatattaggcagtgatatcttaagaaatcattttctcccttatattttctaaagtgctttaaaaactcatttaatctacacatttttcagaggtaggtcggaattatcctcttgttgcaaatgaggaaacaggcacagtgagca

SEQ ID NO: 260829 - DNA, 4502 bp, Homo sapiens
gcaccgccccgcgctccgctgccagggcgggagggaggaatggttgcttcacgccccgggggaagagacgggaagctcggctctgggttgcgggccccggcgtctccgcgtggggcgcaccgtccgacccgcccctcccggtgtgcagcgccccgcaccgccccgcctcgcctgggagaagccgccgggacgcgccgggctggagtgggcggttataggctttgagctaggccgtttccgggaggcggagctcagaccccatttcctttctccacatccaggtcaggtggcgtttgctgtggcggctaggcccgcgtgcgctggagacctccgcgctggcccccgcgagcctcctgccctggcccggcgctgcggctctgccgcggcggcagcatgggtggcccccggggcgcgggctgggtggcggcgggcctgctgctcggcgcgggcgcctgctactgcatttacaggctgacccggggtcggcggcggggcgaccgcgagctcgggatacgctcttcgaagtccgcaggtgccctggaagaagggacgtcagagggtcagttgtgcgggcgctcggcccggcctcagacgggaggtacctgggagtcacagtggtccaagacctcgcagcctgaagacttaactgatggttcatatgatgatgttctaaatgctgaacaacttcagaaactcctttacctgctggagtcaacggaggatcctgtaattattgaaagagctttgattactttgggtaacaatgcagccttttcagttaaccaagctattattcgtgaattgggtggtattccaattgttgcaaacaaaatcaaccattccaaccagagtattaaagagaaagctttaaatgcactaaataacctgagtgtgaatgttgaaaatcaaatcaagataaagccaaggattacctttagaggaatggagaataagacagaagagggagggacctgaactagccaataagaggtgcaagttttgaaactgcttttgaatttgtctgaaaatccagccatgacagaaggacttctccgtgcccaagtggattcatcattcctttccctttatgacagccacgtagcaaaggagattcttcttcgagtacttacgctatttcagaatataaagaactgcctcaaaatagaaggccatttagctgtgcagcctactttcactgaaggttcattgtttttcctgttacatggagaagaatgtgcccagaaaataagagctttagttgatcaccatgatgcagaggtgaaggaaaaggttgtaacaataatacccaaaatctgattggtcatatttttccaaagagtaatgcagtctggatataaatgtattttctgtcttccttataaggggattctcccagctgctaaatttaaacagtaaatatcacattttgtcattaacacagctataacttgccgtggttctcagatttattttggactattttgatgccaagtgaatataagagcttgtactgaaaccatttatttctttctattttgctatttgcaaatgcttgttatcttccctacatgaagtggcagtaacctttttcacatttaagctacccttctaccttttgaagtgatttgcagttactcatctgagacagcatcagtatttgactaaatcattgtttcacaactgaatagtcttgttcttttagtagcaatgaaatcctaagctcttgaggccattcacctgccaacctgaccatactgctttcaaaagtcttttctcatcagtagaatctattttggtcacttctagtcaatgaaaaatgtaaacttttaggagagaatgtttcctaggactcacccactccattcaatgttacatataaaatagtgtgatcaatcacaatgtccatctttagacagttggttaaataaattatctggtctttgaaaagaccgtgctgggcgcggtggctcttgcctgtaatcccagcactttgggaggctgaggcgggcagatcacctgagatcgggagtttgagaccaagcctgaccaatatggagaaaccctgtctctactaagaatacaaaattagctgggcatggtggtgcatgcctgtaatcccagctacttgggaggccgaggcaggagaattgcttgaacccgggaggcagaggttgcagtgaggtgagatagcgccattgcactccagcctgggcaacaagagcaaaactctgtctcaaaaaaaaaaaaaaatgatggagctccgaatgtgcttaagtggaaagatatctatgaaatatggtggttttttaaaacacaaaaattatagaatatgggatcccgtgtgtgtgtgtgtgtgtgtgtgtgtgtgtgttgtgtgtgtgtgtgtgtgtgtgtgtgtgtttgaatgaaaaatgcttatgtattgacagaacacttctagaatgatacccaaactcctggagtgggagtggggaatgccttctacgtacacactgttctactgtttgaattttttaatatgagcccaaattgtataatctttttttaataaaggggagaaaaatcacttacaaggttatacatattttttcccttgacagtactttattaattttcatccatattttacttgactaaaaatacaatgtatgaaaatttatctttaatagcattttccataagctactataacaatttattgatacatctgggattcagccaggtcttatagtatttaaatttataacccctgccatgcttagcattaagtaaatcagtatgcaagcagtatttaaggcaaagctttaagaatactttaaatttcatttgtaaatacatagatgcaagactgtttccataggaagtcacaaatcctcaaacagaaatatgtgtgttctcaatgttaccctgatacagaaatcaaacttggaagaaatatttttacattagaaaaaggactcagtataaggtgaaaacaaaattcccagtgggctagacatgaacaaaagtattcattccccaaaaggcacatttctttataacagttttttcaaatctacctccctatttaatgaaagcatattcattaaatatgaaactatgcatacattaaaaaccaggatttgtttttaatgtgctttagcagcagtagattctaaaactgtgtctcttgtcctctcattagtttgaataatcacactccctagagatcagagcattgagtctgaaatgtcaaaatgctagagaaaagagggagtaatttttaactacccagaaagaagatgcacaaatacatcttttcctacgtaggtcacggcatatgttggcttttataatttgggatttctcctaattgatgacccaccctattgggcagtgaggcatagcaaagtgttcctcagttatcacaggaaacttcaataaaatcttacatattgctatgggtattcacaaagaggaaaatgaagttgacttagaggataagactgattaaaagacactacaatgcatattagactgaattgaagaagagaatggatttgtcttatttttcaaaatttgttttcactttgcacataaacccttcaaaatgtagataacaaatgaaaaataaagtggaacccactcaataaggtgagattctgtaagcagagatgaagcttgatgttcttaatgaatagtgtcagtgtagaaagaacatgagtggtaataaaaaattacagcttacaaaagggcctagaaaaatgaggcaggccagacgagtggaaatagaacacaacagtttaaagtgctttgagaccctcagttaaacagtacacgtgaatacaaaataatgttaaggccattcatggagaagaaatacttaagcaagacatacctggcttgcttcatagagaagaggtaagagatggattttcaattcggcgtgcagcagcagggaatatggctacaacaacgctggctagtattagggcaacacacctcaaagctaactcaccataaacctaacatcttgattcacatctgcttggagtgaaaaagtttatgatcagtcttttcaggaaggtttattttatgggggatttttttgtgctttagtaccccaaaatcacatatgttcgcatacatcatatacacacacattgcatacacatttccccttgactgattcgcatctttgtagataaacactaaattttgataaagattatttacacttatttaggctattactccaatttaaaaatcagtgaaagttttcaatgtttagtctcctaatatataatgcttaaatttgcaacaggaacaatacattatcaaaagcattaacctgtatttagctttcaaatatacctgtctatattaggcagtgatatcttaagaaatcattttctcccttatattttctaaagtgctttaaaaactcatttaatctacacatttttcagaggtaggtcggaattatcctcttgttgcaaatgaggaaacaggcacagtgagca

SEQ ID NO: 260830 - DNA, 1535 bp, Homo sapiens
gcaccgccccgcgctccgctgccagggcgggagggaggaatggttgcttcacgccccgggggaagagacgggaagctcggctctgggttgcgggccccggcgtctccgcgtggggcgcaccgtccgacccgcccctcccggtgtgcagcgccccgcaccgccccgcctcgcctgggagaagccgccgggacgcgccgggctggagtgggcggttataggctttgagctaggccgtttccgggaggcggagctcagaccccatttcctttctccacatccaggtcaggtggcgtttgctgtggcggctaggcccgcgtgcgctggagacctccgcgctggcccccgcgagcctcctgccctggcccggcgctgcggctctgccgcggcggcagcatgggtggcccccggggcgcgggctgggtggcggcgggcctgctgctcggcgcgggcgcctgctactgcatttacaggctgacccggggtcggcggcggggcgaccgcgagctcgggatacgctcttcgaagtccgcagaagacttaactgatggttcatatgatgatgttctaaatgctgaacaacttcagaaactcctttacctgctggagtcaacggaggatcctgtaattattgaaagagctttgattactttgggtaacaatgcagccttttcagttaaccaagctattattcgtgaattgggtggtattccaattgttgcaaacaaaatcaaccattccaaccagagtattaaagagaaagctttaaatgcactaaataacctgagtgtgaatgttgaaaatcaaatcaagataaagatatacatcagtcaagtatgtgaggatgtcttctctggtcctctgaactctgctgtgcagctggctggactgacattgttgacaaacatgactgttaccaatgaccaccagcacatgcttcacagttacattacagacctgttccaggtgttacttactggaaatggaaacacgaaggtgcaagttttgaaactgcttttgaatttgtctgaaaatccagccatgacagaaggacttctccgtgcccaagtggattcatcattcctttccctttatgacagccacgtagcaaaggagattcttcttcgagtacttacgctatttcagaatataaagaactgcctcaaaatagaaggccatttagctgtgcagcctactttcactgaaggttcattgtttttcctgttacatggagaagaatgtgcccagaaaataagagctttagttgatcaccatgatgcagaggtgaaggaaaaggttgtaacaataatacccaaaatctgattggtcatatttttccaaagagtaatgcagtctggatataaatgtattttctgtcttccttataaggggattctcccagctgctaaatttaaacagtaaatatcacattttgtcattaacacagctataacttgccgtggttctcagatttattttggactattttgatgccaagtgaatataagagcttgtactgaaaccatttatttctttct

SEQ ID NO: 260831 - DNA, 4394 bp, Homo sapiens
gcaccgccccgcgctccgctgccagggcgggagggaggaatggttgcttcacgccccgggggaagagacgggaagctcggctctgggttgcgggccccggcgtctccgcgtggggcgcaccgtccgacccgcccctcccggtgtgcagcgccccgcaccgccccgcctcgcctgggagaagccgccgggacgcgccgggctggagtgggcggttataggctttgagctaggccgtttccgggaggcggagctcagaccccatttcctttctccacatccaggtcaggtggcgtttgctgtggcggctaggcccgcgtgcgctggagacctccgcgctggcccccgcgagcctcctgccctggcccggcgctgcggctctgccgcggcggcagcatgggtggcccccggggcgcgggctgggtggcggcgggcctgctgctcggcgcgggcgcctgctactgcatttacaggctgacccggggtcggcggcggggcgaccgcgagctcgggatacgctcttcgaagtccgcaggtgccctggaagaagggacgtcagagggtcagttgtgcgggcgctcggcccggcctcagacgggaggtacctgggagtcacagtggtccaagacctcgcagcctgaagacttaactgatggttcatatgatgatgttctaaatgctgaacaacttcagaaactcctttacctgctggagtcaacggaggatcctgtaattattgaaagagctttgattactttgggtaacaatgcagccttttcagttaaccaaatccctatgaagttggtcactggcatcacattcgctattattcgtgaattgggtggtattccaattgttgcaaacaaaatcaaccattccaaccagagtattaaagagaaagctttaaatgcactaaataacctgagtgtgaatgttgaaaatcaaatcaagataaaggtggattcatcattcctttccctttatgacagccacgtagcaaaggagattcttcttcgagtacttacgctatttcagaatataaagaactgcctcaaaatagaaggccatttagctgtgcagcctactttcactgaaggttcattgtttttcctgttacatggagaagaatgtgcccagaaaataagagctttagttgatcaccatgatgcagaggtgaaggaaaaggttgtaacaataatacccaaaatctgattggtcatatttttccaaagagtaatgcagtctggatataaatgtattttctgtcttccttataaggggattctcccagctgctaaatttaaacagtaaatatcacattttgtcattaacacagctataacttgccgtggttctcagatttattttggactattttgatgccaagtgaatataagagcttgtactgaaaccatttatttctttctattttgctatttgcaaatgcttgttatcttccctacatgaagtggcagtaacctttttcacatttaagctacccttctaccttttgaagtgatttgcagttactcatctgagacagcatcagtatttgactaaatcattgtttcacaactgaatagtcttgttcttttagtagcaatgaaatcctaagctcttgaggccattcacctgccaacctgaccatactgctttcaaaagtcttttctcatcagtagaatctattttggtcacttctagtcaatgaaaaatgtaaacttttaggagagaatgtttcctaggactcacccactccattcaatgttacatataaaatagtgtgatcaatcacaatgtccatctttagacagttggttaaataaattatctggtctttgaaaagaccgtgctgggcgcggtggctcttgcctgtaatcccagcactttgggaggctgaggcgggcagatcacctgagatcgggagtttgagaccaagcctgaccaatatggagaaaccctgtctctactaagaatacaaaattagctgggcatggtggtgcatgcctgtaatcccagctacttgggaggccgaggcaggagaattgcttgaacccgggaggcagaggttgcagtgaggtgagatagcgccattgcactccagcctgggcaacaagagcaaaactctgtctcaaaaaaaaaaaaaaatgatggagctccgaatgtgcttaagtggaaagatatctatgaaatatggtggttttttaaaacacaaaaattatagaatatgggatcccgtgtgtgtgtgtgtgtgtgtgtgtgtgtgtgttgtgtgtgtgtgtgtgtgtgtgtgtgtgtttgaatgaaaaatgcttatgtattgacagaacacttctagaatgatacccaaactcctggagtgggagtggggaatgccttctacgtacacactgttctactgtttgaattttttaatatgagcccaaattgtataatctttttttaataaaggggagaaaaatcacttacaaggttatacatattttttcccttgacagtactttattaattttcatccatattttacttgactaaaaatacaatgtatgaaaatttatctttaatagcattttccataagctactataacaatttattgatacatctgggattcagccaggtcttatagtatttaaatttataacccctgccatgcttagcattaagtaaatcagtatgcaagcagtatttaaggcaaagctttaagaatactttaaatttcatttgtaaatacatagatgcaagactgtttccataggaagtcacaaatcctcaaacagaaatatgtgtgttctcaatgttaccctgatacagaaatcaaacttggaagaaatatttttacattagaaaaaggactcagtataaggtgaaaacaaaattcccagtgggctagacatgaacaaaagtattcattccccaaaaggcacatttctttataacagttttttcaaatctacctccctatttaatgaaagcatattcattaaatatgaaactatgcatacattaaaaaccaggatttgtttttaatgtgctttagcagcagtagattctaaaactgtgtctcttgtcctctcattagtttgaataatcacactccctagagatcagagcattgagtctgaaatgtcaaaatgctagagaaaagagggagtaatttttaactacccagaaagaagatgcacaaatacatcttttcctacgtaggtcacggcatatgttggcttttataatttgggatttctcctaattgatgacccaccctattgggcagtgaggcatagcaaagtgttcctcagttatcacaggaaacttcaataaaatcttacatattgctatgggtattcacaaagaggaaaatgaagttgacttagaggataagactgattaaaagacactacaatgcatattagactgaattgaagaagagaatggatttgtcttatttttcaaaatttgttttcactttgcacataaacccttcaaaatgtagataacaaatgaaaaataaagtggaacccactcaataaggtgagattctgtaagcagagatgaagcttgatgttcttaatgaatagtgtcagtgtagaaagaacatgagtggtaataaaaaattacagcttacaaaagggcctagaaaaatgaggcaggccagacgagtggaaatagaacacaacagtttaaagtgctttgagaccctcagttaaacagtacacgtgaatacaaaataatgttaaggccattcatggagaagaaatacttaagcaagacatacctggcttgcttcatagagaagaggtaagagatggattttcaattcggcgtgcagcagcagggaatatggctacaacaacgctggctagtattagggcaacacacctcaaagctaactcaccataaacctaacatcttgattcacatctgcttggagtgaaaaagtttatgatcagtcttttcaggaaggtttattttatgggggatttttttgtgctttagtaccccaaaatcacatatgttcgcatacatcatatacacacacattgcatacacatttccccttgactgattcgcatctttgtagataaacactaaattttgataaagattatttacacttatttaggctattactccaatttaaaaatcagtgaaagttttcaatgtttagtctcctaatatataatgcttaaatttgcaacaggaacaatacattatcaaaagcattaacctgtatttagctttcaaatatacctgtctatattaggcagtgatatcttaagaaatcattttctcccttatattttctaaagtgctttaaaaactcatttaatctacacatttttcagaggtaggtcggaattatcctcttgttgcaaatgaggaaacaggcacagtgagca

SEQ ID NO: 260832 - DNA, 1358 bp, Homo sapiens
gcaccgccccgcgctccgctgccagggcgggagggaggaatggttgcttcacgccccgggggaagagacgggaagctcggctctgggttgcgggccccggcgtctccgcgtggggcgcaccgtccgacccgcccctcccggtgtgcagcgccccgcaccgccccgcctcgcctgggagaagccgccgggacgcgccgggctggagtgggcggttataggctttgagctaggccgtttccgggaggcggagctcagaccccatttcctttctccacatccaggtcaggtggcgtttgctgtggcggctaggcccgcgtgcgctggagacctccgcgctggcccccgcgagcctcctgccctggcccggcgctgcggctctgccgcggcggcagcatgggtggcccccggggcgcgggctgggtggcggcgggcctgctgctcggcgcgggcgcctgctactgcatttacaggctgacccggggtcggcggcggggcgaccgcgagctcgggatacgctcttcgaagtccgcagaagacttaactgatggttcatatgatgatgttctaaatgctgaacaacttcagaaactcctttacctgctggagtcaacggaggatcctgtaattattgaaagagctttgattactttgggtaacaatgcagccttttcagttaaccaagctattattcgtgaattgggtggtattccaattgttgcaaacaaaatcaaccattccaaccagagtattaaagagaaagctttaaatgcactaaataacctgagtgtgaatgttgaaaatcaaatcaagataaaggtgcaagttttgaaactgcttttgaatttgtctgaaaatccagccatgacagaaggacttctccgtgcccaagtggattcatcattcctttccctttatgacagccacgtagcaaaggagattcttcttcgagtacttacgctatttcagaatataaagaactgcctcaaaatagaaggccatttagctgtgcagcctactttcactgaaggttcattgtttttcctgttacatggagaagaatgtgcccagaaaataagagctttagttgatcaccatgatgcagaggtgaaggaaaaggttgtaacaataatacccaaaatctgattggtcatatttttccaaagagtaatgcagtctggatataaatgtattttctgtcttccttataaggggattctcccagctgctaaatttaaacagtaaatatcacattttgtcattaacacagctataacttgccgtggttctcagatttattttggactattttgatgccaagtgaatataagagcttgtactgaaaccatttatttctttct

SEQ ID NO: 260833 - DNA, 3361 bp, Homo sapiens
cggacgcgtgggtcgacccacgcgtccgccatttagctgtgcagcctactttcactgaaggttcattgtttttcctgttacatggagaagaatgtgcccagaaaataagagctttagttgatcaccatgatgcagaggtgaaggaaaaggttgtaacaataatacccaaaatctgattggtcatatttttccaaagagtaatgcagtctggatataaatgtattttctgtcttccttataaggggattctcccagctgctaaatttaaacagtaaatatcacattttgtcattaacacagctataacttgccgtggttctcagatttattttggactattttgatgccaagtgaatataagagcttgtactgaaaccatttatttctttctattttgctatttgcaaatgcttgttatcttccctacatgaagtggcagtaacctttttcacatttaagctacccttctaccttttgaagtgatttgcagttactcatctgagacagcatcagtatttgactaaatcattgtttcacaactgaatagtcttgttcttttagtagcaatgaaatcctaagctcttgaggccattcacctgccaacctgaccatactgctttcaaaagtcttttctcatcagtagaatctattttggtcacttctagtcaatgaaaaatgtaaacttttaggagagaatgtttcctaggactcacccactccattcaatgttacatataaaatagtgtgatcaatcacaatgtccatctttagacagttggttaaataaattatctggtctttgaaaagaccgtgctgggcgcggtggctcttgcctgtaatcccagcactttgggaggctgaggcgggcagatcacctgagatcgggagtttgagaccaagcctgaccaatatggagaaaccctgtctctactaagaatacaaaattagctgggcatggtggtgcatgcctgtaatcccagctacttgggaggccgaggcaggagaattgcttgaacccgggaggcagaggttgcagtgaggtgagatagcgccattgcactccagcctgggcaacaagagcaaaactctgtctcaaaaaaaaaaaaaaatgatggagctccgaatgtgcttaagtggaaagatatctatgaaatatggtggttttttaaaacacaaaaattatagaatatgggatcccgtgtgtgtgtgtgtgtgtgtgtgtgtgtgtgttgtgtgtgtgtgtgtgtgtgtgtgtgtgtttgaatgaaaaatgcttatgtattgacagaacacttctagaatgatacccaaactcctggagtgggagtggggaatgccttctacgtacacactgttctactgtttgaattttttaatatgagcccaaattgtataatctttttttaataaaggggagaaaaatcacttacaaggttatacatattttttcccttgacagtactttattaattttcatccatattttacttgactaaaaatacaatgtatgaaaatttatctttaatagcattttccataagctactataacaatttattgatacatctgggattcagccaggtcttatagtatttaaatttataacccctgccatgcttagcattaagtaaatcagtatgcaagcagtatttaaggcaaagctttaagaatactttaaatttcatttgtaaatacatagatgcaagactgtttccataggaagtcacaaatcctcaaacagaaatatgtgtgttctcaatgttaccctgatacagaaatcaaacttggaagaaatatttttacattagaaaaaggactcagtataaggtgaaaacaaaattcccagtgggctagacatgaacaaaagtattcattccccaaaaggcacatttctttataacagttttttcaaatctacctccctatttaatgaaagcatattcattaaatatgaaactatgcatacattaaaaaccaggatttgtttttaatgtgctttagcagcagtagattctaaaactgtgtctcttgtcctctcattagtttgaataatcacactccctagagatcagagcattgagtctgaaatgtcaaaatgctagagaaaagagggagtaatttttaactacccagaaagaagatgcacaaatacatcttttcctacgtaggtcacggcatatgttggcttttataatttgggatttctcctaattgatgacccaccctattgggcagtgaggcatagcaaagtgttcctcagttatcacaggaaacttcaataaaatcttacatattgctatgggtattcacaaagaggaaaatgaagttgacttagaggataagactgattaaaagacactacaatgcatattagactgaattgaagaagagaatggatttgtcttatttttcaaaatttgttttcactttgcacataaacccttcaaaatgtagataacaaatgaaaaataaagtggaacccactcaataaggtgagattctgtaagcagagatgaagcttgatgttcttaatgaatagtgtcagtgtagaaagaacatgagtggtaataaaaaattacagcttacaaaagggcctagaaaaatgaggcaggccagacgagtggaaatagaacacaacagtttaaagtgctttgagaccctcagttaaacagtacacgtgaatacaaaataatgttaaggccattcatggagaagaaatacttaagcaagacatacctggcttgcttcatagagaagaggtaagagatggattttcaattcggcgtgcagcagcagggaatatggctacaacaacgctggctagtattagggcaacacacctcaaagctaactcaccataaacctaacatcttgattcacatctgcttggagtgaaaaagtttatgatcagtcttttcaggaaggtttattttatgggggatttttttgtgctttagtaccccaaaatcacatatgttcgcatacatcatatacacacacattgcatacacatttccccttgactgattcgcatctttgtagataaacactaaattttgataaagattatttacacttatttaggctattactccaatttaaaaatcagtgaaagttttcaatgtttagtctcctaatatataatgcttaaatttgcaacaggaacaatacattatcaaaagcattaacctgtatttagctttcaaatatacctgtctatattaggcagtgatatcttaagaaatcattttctcccttatattttctaaagtgctttaaaaactcatttaatctacacatttttcagaggtaggtcggaattatcctcttgttgcaaatgaggaaacaggcacagtgagca

SEQ ID NO: 260834 - DNA, 407 bp, Homo sapiens
gggagggacctgaactagccaataagaggtacaataagacttttgtttcagtaaaataatgcttgtttattctacaggttatcctctacatcagggacaggcactggtgacagtaatagccttaaggctataggcaccaaccaaatagtgaatatagttggctgaaagttgggacaagactttgcgctagaactagaactagtattacaagagattcattcagggagcatatccgatgctacatattcataaatatggttgttaatgcatacagtttggctagttttgcctttgaaattaagtgtactgtatgagtgtattgcaaagtgttaagtcactgtatgctttagctctttcaatggatgaggcaaatgtgcaaatagattaaactgacttttacagaataa

SEQ ID NO: 260835 - DNA, 1430 bp, Homo sapiens
gcaccgccccgcgctccgctgccagggcgggagggaggaatggttgcttcacgccccgggggaagagacgggaagctcggctctgggttgcgggccccggcgtctccgcgtggggcgcaccgtccgacccgcccctcccggtgtgcagcgccccgcaccgccccgcctcgcctgggagaagccgccgggacgcgccgggctggagtgggcggttataggctttgagctaggccgtttccgggaggcggagctcagaccccatttcctttctccacatccaggtcaggtggcgtttgctgtggcggctaggcccgcgtgcgctggagacctccgcgctggcccccgcgagcctcctgccctggcccggcgctgcggctctgccgcggcggcagcatgggtggcccccggggcgcgggctgggtggcggcgggcctgctgctcggcgcgggcgcctgctactgcatttacaggctgacccggggtcggcggcggggcgaccgcgagctcgggatacgctcttcgaagtccgcagaagacttaactgatggttcatatgatgatgttctaaatgctgaacaacttcagaaactcctttacctgctggagtcaacggaggatcctgtaattattgaaagagctttgattactttgggtaacaatgcagccttttcagttaaccaagctattattcgtgaattgggtggtattccaattgttgcaaacaaaatcaaccattccaaccagagtattaaagagaaagctttaaatgcactaaataacctgagtgtgaatgttgaaaatcaaatcaagataaagatatacatcagtcaagtatgtgaggatgtcttctctggtcctctgaactctgctgtgcagctggctggactgacattgttgacaaacatgactgttaccaatgaccaccagcacatgcttcacagttacattacagacctgttccaggtgttacttactggaaatggaaacacgaaggtgcaagttttgaaactgcttttgaatttgtctgaaaatccagccatgacagaaggacttctccgtgcccaagtggattcatcattcctttccctttatgacagccacgtagcaaaggagattcttcttcgagtacttacgctatttcagaatataaagaactgcctcaaaatagaaggccatttagctgtgcagcctactttcactgaaggttcattgtttttcctgttacatggagaagaatgtgcccagaaaataagagctttagttgatcaccatgatgcagaggtgaaggaaaaggttgtaacaataatacccaaaatctgattggtcatatttttccaaagagtaatgcagtctggatataaatgtattttctgtcttccttataaggggattctcccagctgctaaatttaaacagtaaatatcacattt

SEQ ID NO: 260836 - DNA, 4468 bp, Homo sapiens
gcaccgccccgcgctccgctgccagggcgggagggaggaatggttgcttcacgccccgggggaagagacgggaagctcggctctgggttgcgggccccggcgtctccgcgtggggcgcaccgtccgacccgcccctcccggtgtgcagcgccccgcaccgccccgcctcgcctgggagaagccgccgggacgcgccgggctggagtgggcggttataggctttgagctaggccgtttccgggaggcggagctcagaccccatttcctttctccacatccaggtcaggtggcgtttgctgtggcggctaggcccgcgtgcgctggagacctccgcgctggcccccgcgagcctcctgccctggcccggcgctgcggctctgccgcggcggcagcatgggtggcccccggggcgcgggctgggtggcggcgggcctgctgctcggcgcgggcgcctgctactgcatttacaggctgacccggggtcggcggcggggcgaccgcgagctcgggatacgctcttcgaagtccgcagaagacttaactgatggttcatatgatgatgttctaaatgctgaacaacttcagaaactcctttacctgctggagtcaacggaggatcctgtaattattgaaagagctttgattactttgggtaacaatgcagccttttcagttaaccaagctattattcgtgaattgggtggtattccaattgttgcaaacaaaatcaaccattccaaccagagtattaaagagaaagctttaaatgcactaaataacctgagtgtgaatgttgaaaatcaaatcaagataaagatatacatcagtcaagtatgtgaggatgtcttctctggtcctctgaactctgctgtgcagctggctggactgacattgttgacaaacatgactgttaccaatgaccaccagcacatgcttcacagttacattacagacctgttccaggtgttacttactggaaatggaaacacgaaggtgcaagttttgaaactgcttttgaatttgtctgaaaatccagccatgacagaaggacttctccgtgcccaagtggattcatcattcctttccctttatgacagccacgtagcaaaggagattcttcttcgagtacttacgctatttcagaatataaagaactgcctcaaaatagaaggccatttagctgtgcagcctactttcactgaaggttcattgtttttcctgttacatggagaagaatgtgcccagaaaataagagctttagttgatcaccatgatgcagaggtgaaggaaaaggttgtaacaataatacccaaaatctgattggtcatatttttccaaagagtaatgcagtctggatataaatgtattttctgtcttccttataaggggattctcccagctgctaaatttaaacagtaaatatcacattttgtcattaacacagctataacttgccgtggttctcagatttattttggactattttgatgccaagtgaatataagagcttgtactgaaaccatttatttctttctattttgctatttgcaaatgcttgttatcttccctacatgaagtggcagtaacctttttcacatttaagctacccttctaccttttgaagtgatttgcagttactcatctgagacagcatcagtatttgactaaatcattgtttcacaactgaatagtcttgttcttttagtagcaatgaaatcctaagctcttgaggccattcacctgccaacctgaccatactgctttcaaaagtcttttctcatcagtagaatctattttggtcacttctagtcaatgaaaaatgtaaacttttaggagagaatgtttcctaggactcacccactccattcaatgttacatataaaatagtgtgatcaatcacaatgtccatctttagacagttggttaaataaattatctggtctttgaaaagaccgtgctgggcgcggtggctcttgcctgtaatcccagcactttgggaggctgaggcgggcagatcacctgagatcgggagtttgagaccaagcctgaccaatatggagaaaccctgtctctactaagaatacaaaattagctgggcatggtggtgcatgcctgtaatcccagctacttgggaggccgaggcaggagaattgcttgaacccgggaggcagaggttgcagtgaggtgagatagcgccattgcactccagcctgggcaacaagagcaaaactctgtctcaaaaaaaaaaaaaaatgatggagctccgaatgtgcttaagtggaaagatatctatgaaatatggtggttttttaaaacacaaaaattatagaatatgggatcccgtgtgtgtgtgtgtgtgtgtgtgtttgaatgaaaaatgcttatgtattgacagaacacttctagaatgatacccaaactcctggagtgggagtggggaatgccttctacgtacacactgttctactgtttgaattttttaatatgagcccaaattgtataatctttttttaataaaggggagaaaaatcacttacaaggttatacatattttttcccttgacagtactttattaattttcatccatattttacttgactaaaaatacaatgtatgaaaatttatctttaatagcattttccataagctactataacaatttattgatacatctgggattcagccaggtcttatagtatttaaatttataacccctgccatgcttagcattaagtaaatcagtatgcaagcagtatttaaggcaaagctttaagaatactttaaatttcatttgtaaatacatagatgcaagactgtttccataggaagtcacaaatcctcaaacagaaatatgtgtgttctcaatgttaccctgatacagaaatcaaacttggaagaaatatttttacattagaaaaaggactcagtataaggtgaaaacaaaattcccagtgggctagacatgaacaaaagtattcattccccaaaaggcacatttctttataacagttttttcaaatctacctccctatttaatgaaagcatattcattaaatatgaaactatgcatacattaaaaaccaggatttgtttttaatgtgctttagcagcagtagattctaaaactgtgtctcttgtcctctcattagtttgaataatcacactccctagagatcagagcattgagtctgaaatgtcaaaatgctagagaaaagagggagtaatttttaactacccagaaagaagatgcacaaatacatcttttcctacgtaggtcacggcatatgttggcttttataatttgggatttctcctaattgatgacccaccctattgggcagtgaggcatagcaaagtgttcctcagttatcacaggaaacttcaataaaatcttacatattgctatgggtattcacaaagaggaaaatgaagttgacttagaggataagactgattaaaagacactacaatgcatattagactgaattgaagaagagaatggatttgtcttatttttcaaaatttgttttcactttgcacataaacccttcaaaatgtagataacaaatgaaaaataaagtggaacccactcaataaggtgagattctgtaagcagagatgaagcttgatgttcttaatgaatagtgtcagtgtagaaagaacatgagtggtaataaaaaattacagcttacaaaagggcctagaaaaatgaggcaggccagacgagtggaaatagaacacaacagtttaaagtgctttgagaccctcagttaaacagtacacgtgaatacaaaataatgttaaggccattcatggagaagaaatacttaagcaagacatacctggcttgcttcatagagaagaggtaagagatggattttcaattcggcgtgcagcagcagggaatatggctacaacaacgctggctagtattagggcaacacacctcaaagctaactcaccataaacctaacatcttgattcacatctgcttggagtgaaaaagtttatgatcagtcttttcaggaaggtttattttatgggggatttttttgtgctttagtaccccaaaatcacatatgttcgcatacatcatatacacacacattgcatacacatttccccttgactgattcgcatctttgtagataaacactaaattttgataaagattatttacacttatttaggctattactccaatttaaaaatcagtgaaagttttcaatgtttagtctcctaatatataatgcttaaatttgcaacaggaacaatacattatcaaaagcattaacctgtatttagctttcaaatatacctgtctatattaggcagtgatatcttaagaaatcattttctcccttatattttctaaagtgctttaaaaactcatttaatctacacatttttcagaggtaggtcggaattatcctcttgttgcaaatgaggaaacaggcacagtgagca

SEQ ID NO: 260837 - DNA, 4610 bp, Homo sapiens
gcaccgccccgcgctccgctgccagggcgggagggaggaatggttgcttcacgccccgggggaagagacgggaagctcggctctgggttgcgggccccggcgtctccgcgtggggcgcaccgtccgacccgcccctcccggtgtgcagcgccccgcaccgccccgcctcgcctgggagaagccgccgggacgcgccgggctggagtgggcggttataggctttgagctaggccgtttccgggaggcggagctcagaccccatttcctttctccacatccaggtcaggtggcgtttgctgtggcggctaggcccgcgtgcgctggagacctccgcgctggcccccgcgagcctcctgccctggcccggcgctgcggctctgccgcggcggcagcatgggtggcccccggggcgcgggctgggtggcggcgggcctgctgctcggcgcgggcgcctgctactgcatttacaggctgacccggggtcggcggcggggcgaccgcgagctcgggatacgctcttcgaagtccgcaggtgccctggaagaagggacgtcagagggtcagttgtgcgggcgctcggcccggcctcagacgggaggtacctgggagtcacagtggtccaagacctcgcagcctgaagacttaactgatggttcatatgatgatgttctaaatgctgaacaacttcagaaactcctttacctgctggagtcaacggaggatcctgtaattattgaaagagctttgattactttgggtaacaatgcagccttttcagttaaccaagctattattcgtgaattgggtggtattccaattgttgcaaacaaaatcaaccattccaaccagagtattaaagagaaagctttaaatgcactaaataacctgagtgtgaatgttgaaaatcaaatcaagataaagatatacatcagtcaagtatgtgaggatgtcttctctggtcctctgaactctgctgtgcagctggctggactgacattgttgacaaacatgactgttaccaatgaccaccagcacatgcttcacagttacattacagacctgttccaggtgttacttactggaaatggaaacacgaaggtgcaagttttgaaactgcttttgaatttgtctgaaaatccagccatgacagaaggacttctccgtgcccaagtggattcatcattcctttccctttatgacagccacgtagcaaaggagattcttcttcgagtacttacgctatttcagaatataaagaactgcctcaaaatagaaggccatttagctgtgcagcctactttcactgaaggttcattgtttttcctgttacatggagaagaatgtgcccagaaaataagagctttagttgatcaccatgatgcagaggtgaaggaaaaggttgtaacaataatacccaaaatctgattggtcatatttttccaaagagtaatgcagtctggatataaatgtattttctgtcttccttataaggggattctcccagctgctaaatttaaacagtaaatatcacattttgtcattaacacagctataacttgccgtggttctcagatttattttggactattttgatgccaagtgaatataagagcttgtactgaaaccatttatttctttctattttgctatttgcaaatgcttgttatcttccctacatgaagtggcagtaacctttttcacatttaagctacccttctaccttttgaagtgatttgcagttactcatctgagacagcatcagtatttgactaaatcattgtttcacaactgaatagtcttgttcttttagtagcaatgaaatcctaagctcttgaggccattcacctgccaacctgaccatactgctttcaaaagtcttttctcatcagtagaatctattttggtcacttctagtcaatgaaaaatgtaaacttttaggagagaatgtttcctaggactcacccactccattcaatgttacatataaaatagtgtgatcaatcacaatgtccatctttagacagttggttaaataaattatctggtctttgaaaagaccgtgctgggcgcggtggctcttgcctgtaatcccagcactttgggaggctgaggcgggcagatcacctgagatcgggagtttgagaccaagcctgaccaatatggagaaaccctgtctctactaagaatacaaaattagctgggcatggtggtgcatgcctgtaatcccagctacttgggaggccgaggcaggagaattgcttgaacccgggaggcagaggttgcagtgaggtgagatagcgccattgcactccagcctgggcaacaagagcaaaactctgtctcaaaaaaaaaaaaaaatgatggagctccgaatgtgcttaagtggaaagatatctatgaaatatggtggttttttaaaacacaaaaattatagaatatgggatcccgtgtgtgtgtgtgtgtgtgtgtgtgtgtgtgttgtgtgtgtgtgtgtgtgtgtgtgtgtgtttgaatgaaaaatgcttatgtattgacagaacacttctagaatgatacccaaactcctggagtgggagtggggaatgccttctacgtacacactgttctactgtttgaattttttaatatgagcccaaattgtataatctttttttaataaaggggagaaaaatcacttacaaggttatacatattttttcccttgacagtactttattaattttcatccatattttacttgactaaaaatacaatgtatgaaaatttatctttaatagcattttccataagctactataacaatttattgatacatctgggattcagccaggtcttatagtatttaaatttataacccctgccatgcttagcattaagtaaatcagtatgcaagcagtatttaaggcaaagctttaagaatactttaaatttcatttgtaaatacatagatgcaagactgtttccataggaagtcacaaatcctcaaacagaaatatgtgtgttctcaatgttaccctgatacagaaatcaaacttggaagaaatatttttacattagaaaaaggactcagtataaggtgaaaacaaaattcccagtgggctagacatgaacaaaagtattcattccccaaaaggcacatttctttataacagttttttcaaatctacctccctatttaatgaaagcatattcattaaatatgaaactatgcatacattaaaaaccaggatttgtttttaatgtgctttagcagcagtagattctaaaactgtgtctcttgtcctctcattagtttgaataatcacactccctagagatcagagcattgagtctgaaatgtcaaaatgctagagaaaagagggagtaatttttaactacccagaaagaagatgcacaaatacatcttttcctacgtaggtcacggcatatgttggcttttataatttgggatttctcctaattgatgacccaccctattgggcagtgaggcatagcaaagtgttcctcagttatcacaggaaacttcaataaaatcttacatattgctatgggtattcacaaagaggaaaatgaagttgacttagaggataagactgattaaaagacactacaatgcatattagactgaattgaagaagagaatggatttgtcttatttttcaaaatttgttttcactttgcacataaacccttcaaaatgtagataacaaatgaaaaataaagtggaacccactcaataaggtgagattctgtaagcagagatgaagcttgatgttcttaatgaatagtgtcagtgtagaaagaacatgagtggtaataaaaaattacagcttacaaaagggcctagaaaaatgaggcaggccagacgagtggaaatagaacacaacagtttaaagtgctttgagaccctcagttaaacagtacacgtgaatacaaaataatgttaaggccattcatggagaagaaatacttaagcaagacatacctggcttgcttcatagagaagaggtaagagatggattttcaattcggcgtgcagcagcagggaatatggctacaacaacgctggctagtattagggcaacacacctcaaagctaactcaccataaacctaacatcttgattcacatctgcttggagtgaaaaagtttatgatcagtcttttcaggaaggtttattttatgggggatttttttgtgctttagtaccccaaaatcacatatgttcgcatacatcatatacacacacattgcatacacatttccccttgactgattcgcatctttgtagataaacactaaattttgataaagattatttacacttatttaggctattactccaatttaaaaatcagtgaaagttttcaatgtttagtctcctaatatataatgcttaaatttgcaacaggaacaatacattatcaaaagcattaacctgtatttagctttcaaatatacctgtctatattaggcagtgatatcttaagaaatcattttctcccttatattttctaaagtgctttaaaaactcatttaatctacacatttttcagaggtaggtcggaattatcctcttgttgcaaatgaggaaacaggcacagtgagca

SEQ ID NO: 260838 - DNA, 4433 bp, Homo sapiens
gcaccgccccgcgctccgctgccagggcgggagggaggaatggttgcttcacgccccgggggaagagacgggaagctcggctctgggttgcgggccccggcgtctccgcgtggggcgcaccgtccgacccgcccctcccggtgtgcagcgccccgcaccgccccgcctcgcctgggagaagccgccgggacgcgccgggctggagtgggcggttataggctttgagctaggccgtttccgggaggcggagctcagaccccatttcctttctccacatccaggtcaggtggcgtttgctgtggcggctaggcccgcgtgcgctggagacctccgcgctggcccccgcgagcctcctgccctggcccggcgctgcggctctgccgcggcggcagcatgggtggcccccggggcgcgggctgggtggcggcgggcctgctgctcggcgcgggcgcctgctactgcatttacaggctgacccggggtcggcggcggggcgaccgcgagctcgggatacgctcttcgaagtccgcaggtgccctggaagaagggacgtcagagggtcagttgtgcgggcgctcggcccggcctcagacgggaggtacctgggagtcacagtggtccaagacctcgcagcctgaagacttaactgatggttcatatgatgatgttctaaatgctgaacaacttcagaaactcctttacctgctggagtcaacggaggatcctgtaattattgaaagagctttgattactttgggtaacaatgcagccttttcagttaaccaagctattattcgtgaattgggtggtattccaattgttgcaaacaaaatcaaccattccaaccagagtattaaagagaaagctttaaatgcactaaataacctgagtgtgaatgttgaaaatcaaatcaagataaaggtgcaagttttgaaactgcttttgaatttgtctgaaaatccagccatgacagaaggacttctccgtgcccaagtggattcatcattcctttccctttatgacagccacgtagcaaaggagattcttcttcgagtacttacgctatttcagaatataaagaactgcctcaaaatagaaggccatttagctgtgcagcctactttcactgaaggttcattgtttttcctgttacatggagaagaatgtgcccagaaaataagagctttagttgatcaccatgatgcagaggtgaaggaaaaggttgtaacaataatacccaaaatctgattggtcatatttttccaaagagtaatgcagtctggatataaatgtattttctgtcttccttataaggggattctcccagctgctaaatttaaacagtaaatatcacattttgtcattaacacagctataacttgccgtggttctcagatttattttggactattttgatgccaagtgaatataagagcttgtactgaaaccatttatttctttctattttgctatttgcaaatgcttgttatcttccctacatgaagtggcagtaacctttttcacatttaagctacccttctaccttttgaagtgatttgcagttactcatctgagacagcatcagtatttgactaaatcattgtttcacaactgaatagtcttgttcttttagtagcaatgaaatcctaagctcttgaggccattcacctgccaacctgaccatactgctttcaaaagtcttttctcatcagtagaatctattttggtcacttctagtcaatgaaaaatgtaaacttttaggagagaatgtttcctaggactcacccactccattcaatgttacatataaaatagtgtgatcaatcacaatgtccatctttagacagttggttaaataaattatctggtctttgaaaagaccgtgctgggcgcggtggctcttgcctgtaatcccagcactttgggaggctgaggcgggcagatcacctgagatcgggagtttgagaccaagcctgaccaatatggagaaaccctgtctctactaagaatacaaaattagctgggcatggtggtgcatgcctgtaatcccagctacttgggaggccgaggcaggagaattgcttgaacccgggaggcagaggttgcagtgaggtgagatagcgccattgcactccagcctgggcaacaagagcaaaactctgtctcaaaaaaaaaaaaaaatgatggagctccgaatgtgcttaagtggaaagatatctatgaaatatggtggttttttaaaacacaaaaattatagaatatgggatcccgtgtgtgtgtgtgtgtgtgtgtgtgtgtgtgttgtgtgtgtgtgtgtgtgtgtgtgtgtgtttgaatgaaaaatgcttatgtattgacagaacacttctagaatgatacccaaactcctggagtgggagtggggaatgccttctacgtacacactgttctactgtttgaattttttaatatgagcccaaattgtataatctttttttaataaaggggagaaaaatcacttacaaggttatacatattttttcccttgacagtactttattaattttcatccatattttacttgactaaaaatacaatgtatgaaaatttatctttaatagcattttccataagctactataacaatttattgatacatctgggattcagccaggtcttatagtatttaaatttataacccctgccatgcttagcattaagtaaatcagtatgcaagcagtatttaaggcaaagctttaagaatactttaaatttcatttgtaaatacatagatgcaagactgtttccataggaagtcacaaatcctcaaacagaaatatgtgtgttctcaatgttaccctgatacagaaatcaaacttggaagaaatatttttacattagaaaaaggactcagtataaggtgaaaacaaaattcccagtgggctagacatgaacaaaagtattcattccccaaaaggcacatttctttataacagttttttcaaatctacctccctatttaatgaaagcatattcattaaatatgaaactatgcatacattaaaaaccaggatttgtttttaatgtgctttagcagcagtagattctaaaactgtgtctcttgtcctctcattagtttgaataatcacactccctagagatcagagcattgagtctgaaatgtcaaaatgctagagaaaagagggagtaatttttaactacccagaaagaagatgcacaaatacatcttttcctacgtaggtcacggcatatgttggcttttataatttgggatttctcctaattgatgacccaccctattgggcagtgaggcatagcaaagtgttcctcagttatcacaggaaacttcaataaaatcttacatattgctatgggtattcacaaagaggaaaatgaagttgacttagaggataagactgattaaaagacactacaatgcatattagactgaattgaagaagagaatggatttgtcttatttttcaaaatttgttttcactttgcacataaacccttcaaaatgtagataacaaatgaaaaataaagtggaacccactcaataaggtgagattctgtaagcagagatgaagcttgatgttcttaatgaatagtgtcagtgtagaaagaacatgagtggtaataaaaaattacagcttacaaaagggcctagaaaaatgaggcaggccagacgagtggaaatagaacacaacagtttaaagtgctttgagaccctcagttaaacagtacacgtgaatacaaaataatgttaaggccattcatggagaagaaatacttaagcaagacatacctggcttgcttcatagagaagaggtaagagatggattttcaattcggcgtgcagcagcagggaatatggctacaacaacgctggctagtattagggcaacacacctcaaagctaactcaccataaacctaacatcttgattcacatctgcttggagtgaaaaagtttatgatcagtcttttcaggaaggtttattttatgggggatttttttgtgctttagtaccccaaaatcacatatgttcgcatacatcatatacacacacattgcatacacatttccccttgactgattcgcatctttgtagataaacactaaattttgataaagattatttacacttatttaggctattactccaatttaaaaatcagtgaaagttttcaatgtttagtctcctaatatataatgcttaaatttgcaacaggaacaatacattatcaaaagcattaacctgtatttagctttcaaatatacctgtctatattaggcagtgatatcttaagaaatcattttctcccttatattttctaaagtgctttaaaaactcatttaatctacacatttttcagaggtaggtcggaattatcctcttgttgcaaatgaggaaacaggcacagtgagca

SEQ ID NO: 260839 - DNA, 4433 bp, Homo sapiens
gcaccgccccgcgctccgctgccagggcgggagggaggaatggttgcttcacgccccgggggaagagacgggaagctcggctctgggttgcgggccccggcgtctccgcgtggggcgcaccgtccgacccgcccctcccggtgtgcagcgccccgcaccgccccgcctcgcctgggagaagccgccgggacgcgccgggctggagtgggcggttataggctttgagctaggccgtttccgggaggcggagctcagaccccatttcctttctccacatccaggtcaggtggcgtttgctgtggcggctaggcccgcgtgcgctggagacctccgcgctggcccccgcgagcctcctgccctggcccggcgctgcggctctgccgcggcggcagcatgggtggcccccggggcgcgggctgggtggcggcgggcctgctgctcggcgcgggcgcctgctactgcatttacaggctgacccggggtcggcggcggggcgaccgcgagctcgggatacgctcttcgaagtccgcagaagacttaactgatggttcatatgatgatgttctaaatgctgaacaacttcagaaactcctttacctgctggagtcaacggaggatcctgtaattattgaaagagctttgattactttgggtaacaatgcagccttttcagttaaccaagctattattcgtgaattgggtggtattccaattgttgcaaacaaaatcaaccattccaaccagagtattaaagagaaagctttaaatgcactaaataacctgagtgtgaatgttgaaaatcaaatcaagataaagatatacatcagtcaagtatgtgaggatgtcttctctggtcctctgaactctgctgtgcagctggctggactgacattgttgacaaacatgactgttaccaatgaccaccagcacatgcttcacagttacattacagacctgttccaggtgttacttactggaaatggaaacacgaaggtggattcatcattcctttccctttatgacagccacgtagcaaaggagattcttcttcgagtacttacgctatttcagaatataaagaactgcctcaaaatagaaggccatttagctgtgcagcctactttcactgaaggttcattgtttttcctgttacatggagaagaatgtgcccagaaaataagagctttagttgatcaccatgatgcagaggtgaaggaaaaggttgtaacaataatacccaaaatctgattggtcatatttttccaaagagtaatgcagtctggatataaatgtattttctgtcttccttataaggggattctcccagctgctaaatttaaacagtaaatatcacattttgtcattaacacagctataacttgccgtggttctcagatttattttggactattttgatgccaagtgaatataagagcttgtactgaaaccatttatttctttctattttgctatttgcaaatgcttgttatcttccctacatgaagtggcagtaacctttttcacatttaagctacccttctaccttttgaagtgatttgcagttactcatctgagacagcatcagtatttgactaaatcattgtttcacaactgaatagtcttgttcttttagtagcaatgaaatcctaagctcttgaggccattcacctgccaacctgaccatactgctttcaaaagtcttttctcatcagtagaatctattttggtcacttctagtcaatgaaaaatgtaaacttttaggagagaatgtttcctaggactcacccactccattcaatgttacatataaaatagtgtgatcaatcacaatgtccatctttagacagttggttaaataaattatctggtctttgaaaagaccgtgctgggcgcggtggctcttgcctgtaatcccagcactttgggaggctgaggcgggcagatcacctgagatcgggagtttgagaccaagcctgaccaatatggagaaaccctgtctctactaagaatacaaaattagctgggcatggtggtgcatgcctgtaatcccagctacttgggaggccgaggcaggagaattgcttgaacccgggaggcagaggttgcagtgaggtgagatagcgccattgcactccagcctgggcaacaagagcaaaactctgtctcaaaaaaaaaaaaaaatgatggagctccgaatgtgcttaagtggaaagatatctatgaaatatggtggttttttaaaacacaaaaattatagaatatgggatcccgtgtgtgtgtgtgtgtgtgtgtgtgtgtgtgttgtgtgtgtgtgtgtgtgtgtgtgtgtgtttgaatgaaaaatgcttatgtattgacagaacacttctagaatgatacccaaactcctggagtgggagtggggaatgccttctacgtacacactgttctactgtttgaattttttaatatgagcccaaattgtataatctttttttaataaaggggagaaaaatcacttacaaggttatacatattttttcccttgacagtactttattaattttcatccatattttacttgactaaaaatacaatgtatgaaaatttatctttaatagcattttccataagctactataacaatttattgatacatctgggattcagccaggtcttatagtatttaaatttataacccctgccatgcttagcattaagtaaatcagtatgcaagcagtatttaaggcaaagctttaagaatactttaaatttcatttgtaaatacatagatgcaagactgtttccataggaagtcacaaatcctcaaacagaaatatgtgtgttctcaatgttaccctgatacagaaatcaaacttggaagaaatatttttacattagaaaaaggactcagtataaggtgaaaacaaaattcccagtgggctagacatgaacaaaagtattcattccccaaaaggcacatttctttataacagttttttcaaatctacctccctatttaatgaaagcatattcattaaatatgaaactatgcatacattaaaaaccaggatttgtttttaatgtgctttagcagcagtagattctaaaactgtgtctcttgtcctctcattagtttgaataatcacactccctagagatcagagcattgagtctgaaatgtcaaaatgctagagaaaagagggagtaatttttaactacccagaaagaagatgcacaaatacatcttttcctacgtaggtcacggcatatgttggcttttataatttgggatttctcctaattgatgacccaccctattgggcagtgaggcatagcaaagtgttcctcagttatcacaggaaacttcaataaaatcttacatattgctatgggtattcacaaagaggaaaatgaagttgacttagaggataagactgattaaaagacactacaatgcatattagactgaattgaagaagagaatggatttgtcttatttttcaaaatttgttttcactttgcacataaacccttcaaaatgtagataacaaatgaaaaataaagtggaacccactcaataaggtgagattctgtaagcagagatgaagcttgatgttcttaatgaatagtgtcagtgtagaaagaacatgagtggtaataaaaaattacagcttacaaaagggcctagaaaaatgaggcaggccagacgagtggaaatagaacacaacagtttaaagtgctttgagaccctcagttaaacagtacacgtgaatacaaaataatgttaaggccattcatggagaagaaatacttaagcaagacatacctggcttgcttcatagagaagaggtaagagatggattttcaattcggcgtgcagcagcagggaatatggctacaacaacgctggctagtattagggcaacacacctcaaagctaactcaccataaacctaacatcttgattcacatctgcttggagtgaaaaagtttatgatcagtcttttcaggaaggtttattttatgggggatttttttgtgctttagtaccccaaaatcacatatgttcgcatacatcatatacacacacattgcatacacatttccccttgactgattcgcatctttgtagataaacactaaattttgataaagattatttacacttatttaggctattactccaatttaaaaatcagtgaaagttttcaatgtttagtctcctaatatataatgcttaaatttgcaacaggaacaatacattatcaaaagcattaacctgtatttagctttcaaatatacctgtctatattaggcagtgatatcttaagaaatcattttctcccttatattttctaaagtgctttaaaaactcatttaatctacacatttttcagaggtaggtcggaattatcctcttgttgcaaatgaggaaacaggcacagtgagca

SEQ ID NO: 260840 - DNA, 1597 bp, Homo sapiens
gcaccgccccgcgctccgctgccagggcgggagggaggaatggttgcttcacgccccgggggaagagacgggaagctcggctctgggttgcgggccccggcgtctccgcgtggggcgcaccgtccgacccgcccctcccggtgtgcagcgccccgcaccgccccgcctcgcctgggagaagccgccgggacgcgccgggctggagtgggcggttataggctttgagctaggccgtttccgggaggcggagctcagaccccatttcctttctccacatccaggtcaggtggcgtttgctgtggcggctaggcccgcgtgcgctggagacctccgcgctggcccccgcgagcctcctgccctggcccggcgctgcggctctgccgcggcggcagcatgggtggcccccggggcgcgggctgggtggcggcgggcctgctgctcggcgcgggcgcctgctactgcatttacaggctgacccggggtcggcggcggggcgaccgcgagctcgggatacgctcttcgaagtccgcagaagacttaactgatggttcatatgatgatgttctaaatgctgaacaacttcagaaactcctttacctgctggagtcaacggaggatcctgtaattattgaaagagctttgattactttgggtaacaatgcagccttttcagttaaccaagctattattcgtgaattgggtggtattccaattgttgcaaacaaaatcaaccattccaaccagagtattaaagagaaagctttaaatgcactaaataacctgagtgtgaatgttgaaaatcaaatcaagataaagatatacatcagtcaagtatgtgaggatgtcttctctggtcctctgaactctgctgtgcagctggctggactgacattgttgacaaacatgactgttaccaatgaccaccagcacatgcttcacagttacattacagacctgttccaggtgttacttactggaaatggaaacacgaaggtgcaagttttgaaactgcttttgaatttgtctgaaaatccagccatgacagaaggacttctccgtgcccaagtggattcatcattcctttccctttatgacagccacgtagcaaaggagattcttcttcgagtacttacgctatttcagaatataaagaactgcctcaaaatagaaggccatttagctgtgcagcctactttcactgaaggttcattgtttttcctgttacatggagaagaatgtgcccagaaaataagagctttagttgatcaccatgatgcagaggtgaaggaaaaggttgtaacaataatacccaaaatctgattggtcatatttttccaaagagtaatgcagtctggatataaatgtattttctgtcttccttataaggggattctcccagctgctaaatttaaacagtaaatatcacattttgtcattaacacagctataacttgccgtggttctcagatttattttggactattttgatgccaagtgaatataagagcttgtactgaaaccatttatttctttctcggcctgctgaatcgcgaagtgcatgttatcagccgttcctggatgggcagcgaccgccagt

SEQ ID NO: 260841 - DNA, 3763 bp, Homo sapiens
gcgaccgcgagctcgggatacgctcttcgaagtccgcagaagacttaactgatggttcatatgatgatgttctaaatgctgaacaacttcagaaactcctttacctgctggagtcaacggaggatcctgtaattattgaaagagctttgattactttgggtaacaatgcagccttttcagttaaccaagctattattcgtgaattgggtggtattccaattgttgcaaacaaaatcaaccattccaaccagagtattaaagagaaagctttaaatgcactaaataacctgagtgtgaatgttgaaaatcaaatcaagataaaggtggattcatcattcctttccctttatgacagccacgtagcaaaggagattcttcttcgagtacttacgctatttcagaatataaagaactgcctcaaaatagaaggccatttagctgtgcagcctactttcactgaaggttcattgtttttcctgttacatggagaagaatgtgcccagaaaataagagctttagttgatcaccatgatgcagaggtgaaggaaaaggttgtaacaataatacccaaaatctgattggtcatatttttccaaagagtaatgcagtctggatataaatgtattttctgtcttccttataaggggattctcccagctgctaaatttaaacagtaaatatcacattttgtcattaacacagctataacttgccgtggttctcagatttattttggactattttgatgccaagtgaatataagagcttgtactgaaaccatttatttctttctattttgctatttgcaaatgcttgttatcttccctacatgaagtggcagtaacctttttcacatttaagctacccttctaccttttgaagtgatttgcagttactcatctgagacagcatcagtatttgactaaatcattgtttcacaactgaatagtcttgttcttttagtagcaatgaaatcctaagctcttgaggccattcacctgccaacctgaccatactgctttcaaaagtcttttctcatcagtagaatctattttggtcacttctagtcaatgaaaaatgtaaacttttaggagagaatgtttcctaggactcacccactccattcaatgttacatataaaatagtgtgatcaatcacaatgtccatctttagacagttggttaaataaattatctggtctttgaaaagaccgtgctgggcgcggtggctcttgcctgtaatcccagcactttgggaggctgaggcgggcagatcacctgagatcgggagtttgagaccaagcctgaccaatatggagaaaccctgtctctactaagaatacaaaattagctgggcatggtggtgcatgcctgtaatcccagctacttgggaggccgaggcaggagaattgcttgaacccgggaggcagaggttgcagtgaggtgagatagcgccattgcactccagcctgggcaacaagagcaaaactctgtctcaaaaaaaaaaaaaaatgatggagctccgaatgtgcttaagtggaaagatatctatgaaatatggtggttttttaaaacacaaaaattatagaatatgggatcccgtgtgtgtgtgtgtgtgtgtgtgtgtgtgtgttgtgtgtgtgtgtgtgtgtgtgtgtgtgtttgaatgaaaaatgcttatgtattgacagaacacttctagaatgatacccaaactcctggagtgggagtggggaatgccttctacgtacacactgttctactgtttgaattttttaatatgagcccaaattgtataatctttttttaataaaggggagaaaaatcacttacaaggttatacatattttttcccttgacagtactttattaattttcatccatattttacttgactaaaaatacaatgtatgaaaatttatctttaatagcattttccataagctactataacaatttattgatacatctgggattcagccaggtcttatagtatttaaatttataacccctgccatgcttagcattaagtaaatcagtatgcaagcagtatttaaggcaaagctttaagaatactttaaatttcatttgtaaatacatagatgcaagactgtttccataggaagtcacaaatcctcaaacagaaatatgtgtgttctcaatgttaccctgatacagaaatcaaacttggaagaaatatttttacattagaaaaaggactcagtataaggtgaaaacaaaattcccagtgggctagacatgaacaaaagtattcattccccaaaaggcacatttctttataacagttttttcaaatctacctccctatttaatgaaagcatattcattaaatatgaaactatgcatacattaaaaaccaggatttgtttttaatgtgctttagcagcagtagattctaaaactgtgtctcttgtcctctcattagtttgaataatcacactccctagagatcagagcattgagtctgaaatgtcaaaatgctagagaaaagagggagtaatttttaactacccagaaagaagatgcacaaatacatcttttcctacgtaggtcacggcatatgttggcttttataatttgggatttctcctaattgatgacccaccctattgggcagtgaggcatagcaaagtgttcctcagttatcacaggaaacttcaataaaatcttacatattgctatgggtattcacaaagaggaaaatgaagttgacttagaggataagactgattaaaagacactacaatgcatattagactgaattgaagaagagaatggatttgtcttatttttcaaaatttgttttcactttgcacataaacccttcaaaatgtagataacaaatgaaaaataaagtggaacccactcaataaggtgagattctgtaagcagagatgaagcttgatgttcttaatgaatagtgtcagtgtagaaagaacatgagtggtaataaaaaattacagcttacaaaagggcctagaaaaatgaggcaggccagacgagtggaaatagaacacaacagtttaaagtgctttgagaccctcagttaaacagtacacgtgaatacaaaataatgttaaggccattcatggagaagaaatacttaagcaagacatacctggcttgcttcatagagaagaggtaagagatggattttcaattcggcgtgcagcagcagggaatatggctacaacaacgctggctagtattagggcaacacacctcaaagctaactcaccataaacctaacatcttgattcacatctgcttggagtgaaaaagtttatgatcagtcttttcaggaaggtttattttatgggggatttttttgtgctttagtaccccaaaatcacatatgttcgcatacatcatatacacacacattgcatacacatttccccttgactgattcgcatctttgtagataaacactaaattttgataaagattatttacacttatttaggctattactccaatttaaaaatcagtgaaagttttcaatgtttagtctcctaatatataatgcttaaatttgcaacaggaacaatacattatcaaaagcattaacctgtatttagctttcaaatatacctgtctatattaggcagtgatatcttaagaaatcattttctcccttatattttctaaagtgctttaaaaactcatttaatctacacatttttcagaggtaggtcggaattatcctcttgttgcaaatgaggaaacaggcacagtgagca

SEQ ID NO: 260842 - DNA, 1301 bp, Homo sapiens
gcaccgccccgcgctccgctgccagggcgggagggaggaatggttgcttcacgccccgggggaagagacgggaagctcggctctgggttgcgggccccggcgtctccgcgtggggcgcaccgtccgacccgcccctcccggtgtgcagcgccccgcaccgccccgcctcgcctgggagaagccgccgggacgcgccgggctggagtgggcggttataggctttgagctaggccgtttccgggaggcggagctcagaccccatttcctttctccacatccaggtcaggtggcgtttgctgtggcggctaggcccgcgtgcgctggagacctccgcgctggcccccgcgagcctcctgccctggcccggcgctgcggctctgccgcggcggcagcatgggtggcccccggggcgcgggctgggtggcggcgggcctgctgctcggcgcgggcgcctgctactgcatttacaggctgacccggggtcggcggcggggcgaccgcgagctcgggatacgctcttcgaagtccgcagaagacttaactgatggttcatatgatgatgttctaaatgctgaacaacttcagaaactcctttacctgctggagtcaacggaggatcctgtaattattgaaagagctttgattactttgggtaacaatgcagccttttcagttaaccaagctattattcgtgaattgggtggtattccaattgttgcaaacaaaatcaaccattccaaccagagtattaaagagaaagctttaaatgcactaaataacctgagtgtgaatgttgaaaatcaaatcaagataaagatatacatcagtcaagtatgtgaggatgtcttctctggtcctctgaactctgctgtgcagctggctggactgacattgttgacaaacatgactgttaccaatgaccaccagcacatgcttcacagttacattacagacctgttccaggtgttacttactggaaatggaaacacgaaggtgcaagttttgaaactgcttttgaatttgtctgaaaatccagccatgacagaaggacttctccgtgcccaagtggattcatcattcctttccctttatgacagccacgtagcaaaggagattcttcttcgagtacttacgctatttcatgatgcagaggtgaaggaaaaggttgtaacaataatacccaaaatctgattggtcatatttttccaaagagtaatgcagtctggatataaatgtattttctgtcttccttataaggggattctcccagctgctaaatttaaacagtaaatatcacattt

SEQ ID NO: 260843 - DNA, 388 bp, Homo sapiens
cagagctttgtcaggaatctactgagctgctgtttccttcccagcaggtcctaactgctttagatgagtcccagctaagacatccaaattactaactgcttatgatggccttctcaagaaatgggctatttgaaagagacatcaaagcatttatgggactctgtctgacatctggaaatcggcttcgtggtataaagaaaagatatccatctgaagtcaaactacatcagctgaaaaatcaggagtttggaagtttgactctaaatctactgttctctccaagaagttatcaatgtcttcaaaacgttgattactttaagacaggcttttctgcaaactactatcaatgtttataatattaaatgtttacaatattatatgttcataa

SEQ ID NO: 260844 - DNA, 848 bp, Homo sapiens
gtggttacttagatcccagcactagtggtgctgggccagacaccggaaaggcagctctgatattgaggagggtgtgacctgagccccttgagacttagaatcacctctcccctacaggctcagctactcagataaagctgaccctggcatcagggggacggaaaggactctagcctcagctgtgagtctggattctccccagggctctgcttccctgctttgcagcttctgacaagttatctgcccacccacctctgggcctcagcttttctatctggaaaaaggaggtggggattggagtcagctgcctcctggggcccttccaaccctgctctgggtccccgtaagccttcctcagccaggataggtgtgatagaactacatgctcagaggaagccaggcctgtgatgtatgggacacggaggagctgggtgaactcttaaggagtcttctttaattactaaattctctaagttaagcaggaacaatgaggacacaaagcacttaatcagaaatacacaagccttgaaggctgacaaacagaatgggagtgatggctcccaaagaggctagctcaagtctctgcaggacaggctgaacctccctcagggctactcttaccttccatcctactaggattcccaaggtagggaatagctgggcggcttctatccaagttgcttctgcctaattcactcttgcctggtgaggctcagaatttgagggtagttggccgggcatggtggctcacgcctataatcccagcactttgggaggccgaggcgggtggatcactaggtcaggagattgagaccatcctggctaacatggtgaaaccccatcttcac

SEQ ID NO: 260845 - DNA, 451 bp, Homo sapiens
ctacctgacttcaaactatactacaaggctacagtaaccaaaacaggatggcactggtaccaaaacagagatatagaccaatggaacagaacagagccctcaaaaattcggcacgaggtcttgctatgttgaccaggctggtctcaaacgtctgaactcaagcaattctcccacctcagcctcccaaagtgttgggattacaggtgtgagccattacacccagcccactattccttcttatttgtctctgggccacactgaccctctgtctctttcacagcctaggtggaacttttttttctttttaaacgaagtccttttgatggtgacttacatcagagtctgttttttctacttgctgcttgttaggaggcaccaggttttgaatgtcctacatccttttttttctgggggtttcagggcagccagtcttcgttttctggatctaact

SEQ ID NO: 260846 - DNA, 1650 bp, Homo sapiens
  misc_feature (1035)..(1035): n is a, c, g, or t
  misc_feature (1127)..(1127): n is a, c, g, or t
  misc_feature (1235)..(1235): n is a, c, g, or t
cggcgagagccgcgctaggctgtaagacctgagccgggcggagaagcaaaggagagggaagctggaagcacctttggcccgggacagaaatctggagagcttggctacctccatcctcctcaggccggagcaggcttcctgagagagtccaggtcgtaggagttttacgacttagaaaagcgggctgcagattccttcctgggtgtttggttcaagccttggctccagcctcactctcagtcttcccgggagttcgtgggatttggaccttagattattagtattattttgagggcctcctgtgtgtaagcactggttgtgcgcagatggctgtgcagagggccatgaggtagaggctggggaaatgagggcttggaggtgcttgaggtatggtctttacctacgtgaaatgttggaggttgagatgaaaactcttgctttgaattcttcatggaggactacatcatttcaatcctgaatctggctcaattctattattcacttattactgtattaaaaacgtttaattggccaggcacagtggttcacgcctgtaatcccagcactttgggaggccaaggcaggcggatcacttgaggtcaggagttcgacaccagcctggccaacatggcaaaaccccgcctctactaaaaatacaaaaattagccaggcgtggtggcacgcacctgtaatcacagctacttaggaggctgaggtggcagaattgtttgaacccaggaggtggaggttgcagtgagccgagatcacaccactgcactcaagccttggcatcagagtgagactctgtctcagtaaaaaaaaaataaataaataaaaatgtttaattaaccatgatatttgctttggtaaaacctttgaggtttaatgagaattttaaaattcattatacttttcttatggcataccatacctcttacatcaatccattctcacaactcctaattgtgcaggatcatcctaacaatccgctcaaacaacattgtcgccccactttgcacacactctttaaactcnggcaggcttttcaacgcgcccaaattgggcccaattgccacatttcccttatgggcgggctatacaattcacctgccggcttttacaacgcntcattgggccctggggtccccaacttaacccctttcgacaaacccccttttgccaactgggccaatatttaaaggctcgaacagtgcgcttttcaacactttgccacnctgtatcgccaggctattcccgcgcctacattttctcaaatcgcgggaaacttttgtaacctcctatttttccccatgccggatctggtcccttttaacccatgataatccgcgtcagcttgatgtttccaccttcaacatgacctcttttaagcgcggcgcccctctacaacgctgaacctctctacgcgcgtgccctcccggccctcctcttatcattctttgcgttctccctccatgactactctctccctcacggctcccctctatttcctctctcgctcctctctctcttgagcccgctacatctccattcactgcgcttacagcatcgtccctatcctacctctcttctctctcatctcgctctcctctctcgcgtctcccacctcttctgctcctactcgctcacccc

SEQ ID NO: 260847 - DNA, 1548 bp, Homo sapiens
cggcgagagccgcgctaggctgtaagacctgagccgggcggagaagcaaaggagagggaagctggaagcacctttggcccgggacagaaatctggagagcttggctacctccatcctcctcaggccggagcaggcttcctgagagagtccaggtcgtaggagttttacgacttagaaaagcgggctgcagattccttcctgggtgtttggttcaagccttggctccagcctcactctcagtcttcccgggagttcgtgggatttggaccttagattattagtattattttgagggcctcctgtgtgtaagcactggttgtgcgcagatggctgtgcagagggccatgaggtagaggctggggaaatgagggcttggaggtgcttgaggtatggtctttacctacgtgaaatgttggaggttgagatgaaaactcttgctttgaattcttcatggaggactacatcatttcaatcctgaatctggctcaattctattattcacttattactgtattaaaaacgtttaattggccaggcacagtggttcacgcctgtaatcccagcactttgggaggccaaggcaggcggatcacttgaggtcaggagttcgacaccagcctggccaacatggcaaaaccccgcctctactaaaaatacaaaaattagccaggcgtggtggcacgcacctgtaatcacagctacttaggaggctgaggtggcagaattgtttgaacccaggaggtggaggttgcagtgagccgagatcacaccactgcactcaagccttggcatcagagtgagactctgtctcagtaaaaaaaaaataaataaataaaaatgtttaattaaccatgatatttgctttggtaaaacctttgaggtttaatgagaattttaaaattcattatacttttcttatggcatataaaagttttaatatttttttattgtctcaactaacatcataaatgtcttaatgttaaaatccatgggatattctatttaaaattttagctttatcacctttgtgctatcagagaatgtgctttgaactggtaaaatgagttaaagtattggaaaacacttatgtcagcagaggctcttaaaaatcattttcatccttcctcttctagtgatgatttttttttaacccatgttttcaccagtctaccaatccaatggcataaatgctcctacataggcaacttaagtgtttcttaagttgatgcaaggtattttgcatgaggctgaattcttgttgtcggagcagaggatttttgttccaactactgaattggcaaaatgttaaatataaaaacacctcaaaaagtcaaaggtagtctgaatgaaaaatttattttaaacacctcaagtaatctttacatttctacaaaatcataacatagttcttttccagaaacatttattcttaaaatctacttaagtgtttcatagaaactttagtaataaccagaataattcatgacactttagcaaactcttagcagcaagcagaaagaacttattaaaatatcctttctttacaca

SEQ ID NO: 260848 - DNA, 624 bp, Homo sapiens
gagagggaagctggaagcacctttggcccgggacagaaatctggagagcttggctacctccatcctcctcaggccggagcaggcttcctgagagagtccaggtcgtaggagttttacgacttagaaaagcgggctgcagattccttcctgggtgtttggttcaagccttggctccagcctcactctcagtcttcccgggagttcgtgggatttggaccttagattattagtattattttgagggcctcctgtgtgtaagcactggttgtgcgcagatggctgtgcagagggccatgaggtagaggctggggaaatgagggcttggaggtgcttgaggtatggtctttacctacgtgaaatgttggaggtaagtcggatttataacttgtgttgatgcttttataatctaggagcttagggtttagtaggaagagtcgctcattcaatgaattaaacgctcattcctatgtactaggcaccattccgagtgcagtggctacaaagactagtagaacatagtcctggttctttaggaactctgtgattgggcaagtgggagagagggcggaaaacgtgaactggtgagtagttggcgtgtgatgcgtgccgtagtggaagaaagtg

SEQ ID NO: 260849 - DNA, 368 bp, Homo sapiens
ttctcatattcttagaggtgaaagcactagtcaggacgcttggctgtgattgccaacaactgccacattgtgttaatatgagcaagtcattaaaattcttagtttcggcttttccaactgtaaaatcaaaatgatgttacctgtatccattaagatactcttttgtctgcaggtcaaggaaaaccctaactccaaatgacttaaaccagaactttctaatggaagtataatatgaactatgtatgtaacttaaaaatttttagtagccatatttaaaaaggtgaaaccaattttaataatacattttatttaactcattatccacaatattttttttgtgtgtaaacaatatacaatcattaatgaga

SEQ ID NO: 260850 - DNA, 440 bp, Homo sapiens
gagagagagagagaaggcattttaagactggggagccgggtgcggtggctcacgcctgtaatcccaaagtgctggaattagaggcatgagcctccatgcctatcctagactatcttttaaaaagttttatttttaaagaagcagaactttctagtttgttttatcatgcctttatcaagaactttttaagaatttagggacaaaaacatcttatgctctgccccaatatttcatatgtagaaacataaacatcaaattttatatgttgacctttttttaaatcactgcctaaaaaagaactatattttgtggtcatgtgaagtttcagtggtagaattttctttctgttgtggccaatcatgaatcttgctccagtgtttttgtatttaccagacggcagctggggagtgagttagacagaaatataaagacagatatac

SEQ ID NO: 260851 - DNA, 220 bp, Homo sapiens
tctgtaaaacaactgtaaaggaataccaacaatctagtgcagaaattcttctgtaagaacaagctaccctgatgtcatgtcgtgttttaggactgtttgcttctcaacctgatgaagttgttcttagctgtttgctttgttttctcatccacagcagtattcctttctttgtatcttgagcaggcttgttaaatcccgtgggaggcttttttttttttta

SEQ ID NO: 260852 - DNA, 209 bp, Homo sapiens
gcccctccagccaaaaaatggagcacagagattcaaaatccttagagggaaatggataaaggtgctttccgttcatgtctcagtttttgggatatcaaaaatgggagtatgaagagacctctagaggtagattttgggagtacattcaggaaaatttcacaagcccctttcctgcctctacaaagccacttattaaatataaggactgt

SEQ ID NO: 260853 - DNA, 321 bp, Homo sapiens
tacttccttacccccaattcttgcctcaaagcctgtattacgttacccaattttaatttcttcaaagcatttatttcaaaataaaattccacatatttgtttacttctttattttctgtctttcctattaaaatgtaagttccatgagaggaaggatttggtcttgttcaccaccatatccccagcacccagaaaagtacttgacactgagcaggtggctcaataagcatgtgttaagtgaataaatgacagaggtatacacacacgcgtgcgcgcgcacacacacacacacacacacatacacacatgtaattttttgta

SEQ ID NO: 260854 - DNA, 879 bp, Homo sapiens
ggtgaagacggaggtgggttctggacagacctacgctgtcagggagtgtttacttcgcctacacttctgttcctccccgccctggtgctgctccaggtcacatactcgtcctgagctggcttcagcctctctgcacagaagtctcccggagccatggcctagtactcttatgtgaagtctaccaagcttgtgctcaagggaaccgaggtgaagagctgggtcctgcagctccggcgggagcctcctcagttcttttcggacgcactccacccccgcgaatccggtgggagccgtggtgcggagagccggcttcgtggcctcccaggcttcgctctgaccctgtctgggctggacggaggccggaccacccttcctggcgcctgtgcagagaggggaagcctcctgcgcggacgaccctggaaacaggatagacaggcgggtgacccgtggccccgtacccacgagtttgggtcccctgaggcatctctccaggcctctgcctgatttgcctgaggttgactgtacatacaaatattgagcatttcctcctggcctccgtgataaacagaagttttgatattgttaggcgagatggaaagaaagtatcaaggagtgagctgaagccactgcccttgagaaccctctcgaggagtctggcctcatgaagatgccagaataaatggcagtaagaagaaaaagagcaaagataagaagagaaaaagagaagaagatgaagaaaccagcttgatatgttggaacgcagctgctcaccagcaacggaacaaagctggacggagaatgactttgaagagctgagagaagaaggcttcagatgatcaaattactctgagctacgggaggacattcaaaccaaaggca

SEQ ID NO: 260855 - DNA, 450 bp, Homo sapiens
gctattccaggcagtttgttaggcatgagttataggcttgtacggccaggaatgaaattggtcagttctgcaattagaaggcaatgcttgtgatgttttatgctgagtggcctttagagcttaaagactgtcagctgtcttgtctgcactgtaacctcagttgccttctctgagcagggcacgctttctttaggaaattatggcactaacttggcaggtggtttcactgttcaagggctccagctcctggcacaagtgatctccagagttaaaattggagcagctgctgagacttgacttgctgcctgctttacctgttccctccccaaagagaggaagcacttttcattcattgccagtgtgtatgtgggagctaaacatatatagcattttagtaaatgccactgcctactctttttcttttccttttttaaaaaagttactgaggcg

SEQ ID NO: 260856 - DNA, 343 bp, Homo sapiens
ggcaaacataattacagtttattcgtacacgtgcacgcacacacaaatcctctacggaaaattatctttctcaccactcatccgaatataaacgtggacaatttatcaggggtaaatggtgaaggtaggataacgtcgtgatttcaattccttttcaaaccaaatacaagttttcctaaaatgggggtgacatgtccatgtaagaataccaaaaatggcactgtaagcaaaaatgtacctgtaatgttaaagatttcatgcgcctggaatcataaacactttgtaagtgtagtcttctatctagcaacccctccggacattattttccatttagaaaaagaag

SEQ ID NO: 260857 - DNA, 463 bp, Homo sapiens
tccaaacactgtgctcctaacaattatggtaagctgtctcctgcattctggagggtgtcaagagctgaaacccaacagccaacactgtaggactctccagagcctgttggggtacaggagaagcaggagggaactcctggtcaaagtagctcttccagttatataaaagtcactatctttttatgtttagagccagtggtactctgaccctgtcttgccaggctgtctgatttgaagagcctttactgatctctgatttggctttttctctgcagtaaaccctttggaaggtcagcaagggctccaaagaggactgtcatatcttagaacactccagcactaggtctgcctctgctggtgcctctaagagctgggcaagggtcttggggaccaaatccctgatggttaacccaggaaagtgaaagcacggggtgtgtagtacattctcaggaaagacatgtag

SEQ ID NO: 260858 - DNA, 272 bp, Homo sapiens
taaatcttgtcattccctaaataatgcactataacagcgatttacctagcatttacattgtactgcattaggtattataagtaacttagagatgatttaaagtgtatgggcagatgtgcataagttatatgcaaatactatgccactttatatcagggactgcagtatttgcagattttcaaatctgtggtaggtcctggaaccagtcccttgtgggtaccgagggacaactgcatatatatcatttatacgttaagcataataagcatcta

SEQ ID NO: 260859 - DNA, 422 bp, Homo sapiens
aaaaaaatccccacttaagtaaacaaatccggaaaacacaaccccatcacccaaaatattgaaatggaaaacaaatctacactctggagatttgatctgaaacataccagagctggaactgtgtacggtggccagaaatgtgttagtctgggcaaatctgtggccccgtagaggaaaaagctaacattttccaaataacaatgtgggcacgtaacaactacatacaatcatgtgctgttgttgcctaaacctgggaatagggttaggcagctccatatcttgacatagattccctctctccagcactcagtcatcctaaaaagcacaaggtgtgatgtctggaccaactctgggctgctctcagcccttatggtctctgcctcaggtgggctgcttctagggttgtgagcaggttttgaaac

SEQ ID NO: 260860 - DNA, 390 bp, Homo sapiens
tttcgttctcccatgttctttatcctcacagccctactcagccctatctttcagcctttcctttctcttgttctaatccccagccataaaaatttctcccagacatgtgaccatctcaagctgttttctgtctccatggctttacacgtactattcccccatctggaaaatcctttctaatcttgtctgcaattaggcatttatgattgtttattttcattatccatttacatgtctgccctccccacttaaccaaatgccttaagttcaggatcctgtgtatgatgcaactttgtttcttcatcccctggcccattaccaaacacataataaaagctcagagagtatttttggaatgagtaaatgaacaaataaatgaatacatggcta

SEQ ID NO: 260861 - DNA, 690 bp, Homo sapiens
gaagaagacagtgaataactaaacacatctagacatgataaaattttggtagtgatatacagttcaaaatgtctaaaatgttgttagttcaaattagtctgaatggagccattctatgtctgagctccccttcctagagttagtattattaacaccagaagtaaaatttttatctgttgttgttttgcttctgaaataaatgtcagtcctttcaaatgcctgcatactgtacatttttctcaattgccatattttctagttcaaataacagggcaagtgatctcataagagcattcattttgattttctatgtttgtgaatatattgatagaaagcatgacaaaagaaaaattaactgaaatttagctaatggtttgctcagtcattattgaaaagcatatacagataatcatggaaaatctagggatactgtatcattatctgggatctgtggcatttttctacgttgaactagaaagacggcatctatgtatttctatctttaaaagcagatcagttttagaaaatgcacaactttgtcaatcctataatcatattatgaactaagtaagagagaaagaagagagagttaaacaccaccacctgattagatagcatcatcaccttgctttaatgtaaacttttggtttagagaagcattattatgtaatgctcttagcttaaaaatct

SEQ ID NO: 260862 - DNA, 635 bp, Homo sapiens
aatgataggaaacccctctacttgttaaaaaaaaaaaacacaaaaacctcaaaaaaagctcttaagatctttatagtaggaagaaaacaaccaactgcttttcaaattatggggttggtcccatgttttgaaagttaccatctcagttgatctcttaatgagatgtctgtgtacatgagacaaaggtcgataagaacttgagggcttctcatctatcccttctcagttaacaatccagtagcttcagaagacaaatttaggacccttgcctttgtccactgggtgaagcattcatcatcctaaagctgcactggaaacttcctggaggtttgtcttctttttggaggaatgttctgatatgggattcactttgtttttctccttttgctttctggtgcatacatgttttccctcttatgttcatttcttaatcattatctgtaacattttggcttccttttcctctggctttgatttccaagtatggaattgaaccttcttgtctgaataccattatgtaagtactgacaacatcacatctttttattactgacactgaaggatgtattttttgtgggtagaaatggggtagagatgggataggtataattcttattaaacttatttttaatcta

SEQ ID NO: 260863 - DNA, 603 bp, Homo sapiens
gtagccatgaaagaaaacttgaggcccagatgacttcacttaaaacttttccaaatacttaaggaataaataataccaatcttacaaacactcctcctgagaatagagaatgactaaagcatcacaatttatttaatggagccagtatattaattgacctaaaacctaataaggaattaaaagaaaattatagaccaacttcttccataaatgtaaataaaaaattttaaaaatacacaagcaaatcaaatccagtgatacataggaaggataatattttatgatcaaactgtttattccaggaatgcaaggttaaacattcaactttcactcaatgtgcttgacaatagtaacagtaaaataggtagtaaaaactaagcaaactaaggataagaaaattttcctaatatcataaaaggtatctataaaacacctaactctaatatattaaaaggagaaataaaggatgactattgaggcaaaaatcttgatcaaaataccagttaaagcatattgaactgatttgacaccaaaacaactgagatttattcctgtaatacaaggatagttcaacatatgcaaattaatgtcatagtaacagaa

SEQ ID NO: 260864 - DNA, 174 bp, Homo sapiens
cttgactagcatctgggaactttaatggtaaacagttccctacaatgatataaaactttaactacatgaaaaaagtggcttggtatgcctagctgtgtaaaatgtggtttaacacctggttttccttctaggagtctagagttttgctaaagactgggcagagagtatttatgt

SEQ ID NO: 260865 - DNA, 525 bp, Homo sapiens
tcatcaagccagccttacaaatgcctccttgattcctcgagcctcatcattgaagggattgtggctgtgctccagggtattattcatgtctcactatgtaggcagaatgtcccagcccagtgctgggacagggaaggatgggaagacagggccattccaggaggcagaggccaaggtgtggaagatcaccaggcccagttcccccatccctagcctcggataatgcagaatcactcctttgttgttttatgggggtcttccctggcatggatgaaaataagcccccttctcactttcccccacatggctctccatctggggccactgagggggtatgcctacctctccccactgagccccacctggttcttttacccatccacactggcctccacctccagaaccctcgccaccctgatgtctgcccttttttccaaagttgggagaacaaactacagcccaagggccaaatctggcccaccacttgtttttgtaaataaagttttattggagcacagccacacg

SEQ ID NO: 260866 - DNA, 297 bp, Homo sapiens
gtacctttatcatttttttactattatttataagacaagtaagacatgccccctgcactagaggaattcacaggagagacagtctgattttgatttagtatgatgggccgatgcacttcaagagttactaccgttacgtactgttgcaagtcagaggagggaaaattaatcctgtttgttttttgaccagagaaggtcttacagggtagattggtcctgcccctagatacagcagtttatacccacacacctgtctacagtgtcattcaataaagtgcacgtgcttgtgaaaaaaaa

SEQ ID NO: 260867 - DNA, 465 bp, Homo sapiens
ttcatcatgttgcccaggctggtctccaactccttagctcaagccattctctcaccttggcctcccagagtgcagggattacagacaggagccacctcgaggggccgaccctcaccgtgtgtacgtgtgttttaacatttcctatggtgctaaactatttatgtttatttttgctgtgggatgatcagaagatgttcaggaacaagcaagaaaaaaaaatgagccaaatcatttaaagacgtgggaaaccaaaccaaaatcaaacccaaatcagaatgctcacaaaatttcaaccaaggtgtacacatcaaacataatattcagtcaggcatccagaaccaaaagtgaattcaccaggaaagacttgcctcatggacagaacataaattctttagaactcagagtcctcaaaccagaagggcactgctctttacaccagaaagtgcttgccaaaagcaaagaagc

SEQ ID NO: 260868 - DNA, 247 bp, Homo sapiens
tgaagtgggacctaatgggaggtgtttaggtcatgagggctctcccctcatgaatggattaatgctgccatataaagggtttctgggagtgggctctctctcatcctgccttccatcatgtgaggacacaacgtgcaaggcaccatcgtggaagaacagaatgtcttcatctgacatcgaacctgctgatgccttgacctcagacttctcagccttcagaactgtgagacaataaatttctgtttac

SEQ ID NO: 260869 - DNA, 271 bp, Homo sapiens
tgcctgagcccaggatgagacccatctctccccaccaaaaaaagaatccaagtggactgtctgttaacacaactaaagatataaagctggatatcaggtgagtgagtagatctctgtcactgctaccactctaatccaagcttctgtcatgtctcccctggattactataagagcctcccggttccagccctgccccgactccatggtctcttctcaacctaccagtcagagtaggtctttaacatgtaaatcaaattatatcactattct

SEQ ID NO: 260870 - DNA, 271 bp, Homo sapiens
agcccatagcaacactcattagaacggccaatatccaaaaccctggtttgcaaagaggaatgccctctccaaacatgcctatcgaataaggtcctgttcatgatgcaaatctctatgtgatcttcctccggaattcttgagcccatgatgcgaaatagcagtagctctcattcattgctggtggaaatgcaaaatgatacagaccctttgcaaaacggttcagcaacttcataggaaaagagtatgctgagtgttgttctatctcattgtt

SEQ ID NO: 260871 - DNA, 284 bp, Homo sapiens
tacgacccgtaggccggcgtccggtggagcccccctcagcaagattggcaacctgcaactccggtcaccgcacagccggcttcccttcgtgcacttagttcctacatcaaatgttatttctgtgcaaccttccttgtctctctaccgccttccaccctgtgcccttcagccgccaagtctgggtttctcctatgcatctctatcatggcacctaccacgctgtataattgctagtgacttacaaatctctcttatcagaatgaatttgactcatctttgcacca

SEQ ID NO: 260872 - DNA, 273 bp, Homo sapiens
aatgtgagctgcacaatggaatattactcagccttgaaaaggaaggaaattctgacccatgctaccacatggatgaaccttgaggacattatattgagtgaaataagttgtgaaaagacaaatactgatattcaaatgtgatttttctgagatttagtctgccatacttgggctggatgacatgccaagttccttcaaagctctaaagttagtgttcagtaataatatagtgttttttttttttttaaaaagacttattattcttgaaatcca

SEQ ID NO: 260873 - DNA, 541 bp, Homo sapiens
gaggtcctcatgcaaacacggcccaccctacaactcataacatgtgactgcaactaggacatcatcaacaacttggttaatgagtgtcgttaattcaaagagaatagaagttgagtcaccacataagaaaattagaaacgccccccaaatcttataggtcatgtacaaaagaacactaaatagaattatttcccaaatttgataatccagaaaacttataaggtaaaagaacttataaatatcagccatacaaggctgggcatggtggctcatgcctgtaatcccaacgctttgggaggccaaggcaggtggatcgaatcacttgagctcaggagtttgagaccagcctgggcaacatagtgaaaccctgtctctactaaaaacagaaaaaattagctgggcatggtggtacacacctgtgttcccagctaccagaaaggctgaggtgggaggatcgcttgagcccaggaggcggaggttgcagtgagctgagatcacaccactgcactccagcctgggtgatggagagagattctgtctc

SEQ ID NO: 260874 - DNA, 169 bp, Homo sapiens
ggatgagttcataatgagccctttagtgtagttctgactaaacatgggaaattgatccattcatcatttattcattcattcactgatttatgcctacattaaatgtttattgttatgtgccaggcaccatgctcaataatgggcatattgttgtaaaaaagaaaaaaca

SEQ ID NO: 260875 - DNA, 632 bp, Homo sapiens
acatgagttccttttagaatcataaatgaaagaagtaaaactttaagatgggaatgaataattgaaaagagaattatatttactattataattgatattattcgctattatgattacacttgtctagatcagagcccagcaaacattttttttgtaaagggtcagatagtacatagttttggctttgcagggcatgtgggctctattgcatttactcaactctgccattgtagtatgaaagcaaccacatacaaaatgtaaatggatgggcgtggctgcattccaataaaactttatttatggacactgaaatttgagtttcagttaaatttcatgtgtcatgaaatcttttgatgtctttctaactatttaaagatgtaaaagccttcttagctctcaggtcttacaaaaacaggtgatgggctaggatttggcctaatggttatagtttgttgacccctggtttagatcactgtaatctaccacagactattcagaagaatctgtttgcacacaggttcttttccctttagaagcttagcacctaaaaagtttgtcaagtcttcagagttgttcaaaaggaaaataactcatcacgtgcacttgatgatttaatcacttacccaatacaa

SEQ ID NO: 260876 - DNA, 430 bp, Homo sapiens
tagtttagaaagttctgtaatttggagcagagtgctatagttctttggggtatgtcttctcttttgcctcatccacttgccaggtagcagtggctttttattcttaagtcttagagatgcatttagagttacatacagacatatggtggaaaggggtcttgagttgatttggggcaaaaggcaaccgtccccatgcactagagatgaatcatgcctacctccctttgtcatgggaagtggcggccactgccacatctgctatgaggctcttcgccatcgttggctgctggaaatttggatacaggtaaatggtatataaggcttctttttgcttgtgcaccagaagtctttgtcccagcctccagatcagcagtcagtactcccctctcccaacctgtaggaagtacttgtgaaaagttatctatccctg

SEQ ID NO: 260877 - DNA, 294 bp, Homo sapiens
taaatagtataggtggtttcatttgagggttgagtgcatgaatgtgtgatgtatagcaaacaaacaaatcagaaagtgaatatttttaaaagagcttcgtattaattagtaagaacaactttagagtgtaactggcatcacacctgtaaaatgtaactaatcttttaaaatgagaactagtggctgatgatttatcttgtacatttatgtttcaggagctagaaaagaacattaagcactgaactacaatatatgtgttgccttttgattaaaagcaaatctatttttaagtga

SEQ ID NO: 260878 - DNA, 523 bp, Homo sapiens
  misc_feature (13)..(13): n is a, c, g, or t
  misc_feature (17)..(18): n is a, c, g, or t
ctgcaagtaaccntgannaaaggagaagaagggaagggaaaatcacacaagaagcctggaaagtgaggaggtagtctcagatcagatgcactgtggagcctatgtctagaagtgactctccaggggagctaaaatccatgtatttgggcacacacttgaacaatattgctagagaaatttaagcaagaacacaaagattgccggaggccagaaagtaagacaaataacagctcacctgcctggcttgttggagcaacaagaaactttaagagcaatcctccatttgccaggttccttggtaattagacttgtcaatagaacagatttctgtgtccataatgcataaggttaagtaaggggaagataactggaaagctgagctggagtttgaaagacaagatgtatttcaaacttcccttgaactttctccagtaagtataattgtgtgcttgttgtcaatccggccttagtccttgtcattacaggttcagtagctgcaaaggtgaaatgttttgacaaatat

SEQ ID NO: 260879 - DNA, 494 bp, Homo sapiens
tagagataaaaggtgactttcagaaagaaaaataggcaacagtgcaaaggtagtgagggccaaagaaacatcagggttcctcatgctttgggaaaatacaatgttctgcagggatcctgacatttaaatcaacaatttcaagcaactttaatgtgcttggcttgcagattgccggaggccagaaagtaagacaaataacagctcacctgcctggcttgttggagcaacaagaaactttaagagcaatcctccatttgccaggttccttggtaattagacttgtcaatagaacagatttctgtgtccataatgcataaggttaagtaaggggaagataactggaaagctgagctggagtttgaaagacaagatgtatttcaaacttcccttgaactttctccagtaagtataattgtgtgcttgttgtcaatccggccttagtccttgtcattacaggttcagtagctgcaaaggtgaaatgttttgacaaatat

SEQ ID NO: 260880 - DNA, 260 bp, Homo sapiens
tttgggggctgacgccattttacgcctcagcccgccggcacccaggctcttgttaaaacgcaccgcttcgtgttagctgttggggagctctcgggattccaaccgatacaagaacctttcaggttccttcttaactttgtgcctttgcagcgtgtgctgttccctctgtctgaaacgttattccccgcctcttcacctgattcatactagtctttcaaggctcaactctggttctgccacctcaaaaaattttgtttaaa

SEQ ID NO: 260881 - DNA, 512 bp, Homo sapiens
atgctcatcctgcatgactcctccttgagcctttgtattttcccagctagacctttcaggcttcctatttatacatttatctcgagtacaccgagtggtgacaaagatgcgaatcggccagcacattttcactcagtgtagagagaagccatttaaagactgagataacatttcaagaaaacaataaaacctgacaataagggaagatgagaaaaaaggaacattcctgactgtggttctgacattcacaatgtttccatctgtttgtttcactgaaatgatgttctcccgttcctgtttggcttattaaaaagtgtataggttaaaagatctgttaaaaatggtccatatctgtaaaattgtctggaaagttccacagaaagttacaagtttttttcctctggctgcaaatgaaaaataacatatgaagatcgttttaaaaaatttattcaattacttccagtgttattttatgacccagttatatatcaataaaattaataggaaaatta

SEQ ID NO: 260882 - DNA, 380 bp, Homo sapiens
cttccccaaagccaagccaagccacccaacatcacctcccagaatggtgcattggttacaatcagtgcacctcaggccaggcactgtggctcgcgcctgtagtctcagcactttgggaggctgaggcgggaggatcacttgagcccgggagttggagaccagcctgggcaacatggcaaaaccccatctctaagaaaaaatttttagattagccaggcggtggcgtgcacctgtggtctcagctactcaggaggctaaggcgggaggattactggagcctaggagattgaggctgcagtgagctatgatcatgccactgcactgcaacctgggcgacagagcaggaccctgtctctaaaaataaatacataaaacgcacc

SEQ ID NO: 260883 - DNA, 426 bp, Homo sapiens
attaatataaatatctatgcatgagggggaaataattgggaaattttatctcctctgacaaaggggaaaaaggccatttaaaaatattactttttccccttcagacagagagcagaggtgagccacacgaaatctaagttcgcatgaaagagcgatgataaaaaatgcaggtgctgtgaaacatttatatggaccaagtgtaagacagtatgtaggcctgaatttgaaatgacattttggtataaaacagatctcccaaaggcaaatttgaaacttccagaaaagtcttaaaatgacatctttcaaaatgaagaatcatcaaataaatatgcccaagtcattacctcgaagtacttttctaatgagacaggctgaagaaacagctaaaaataattgaccccagttttacagctgaaagttgtaaaa

SEQ ID NO: 260884 - DNA, 336 bp, Homo sapiens
ggtgaagggaacatttcaccccattcactcccttgtctttaactggtatcttattcaaacagatttttttcctgcaattgttaaaaatttcaaacacaaaacatcaaacaggatatagggtccttactgagccaaaggaaaatagaaaatgattttggattaagaaacttgctcaatgaagagatgctactttgagacctgcagaatggagtcaggaaaccatgagatttattataaggaaagggaaaaggaagggcccccgaccgctcctccatatgctaagacatttatatatgttaactcatttaaatacacagccactggattggataacta

SEQ ID NO: 260885 - DNA, 1044 bp, Homo sapiens
agtccacctgcttctccttgggcaagtcgttccaaaccatggcacttttacatcactcctgcctagtttagctctgtggttcctggaagctgcagatgccctactagtatacctgtagtagcccagacttccttatgtatcaaagttgccgcctcatgtccctcaccctcatgacccttgagttcaattgtcaaggaggtgaaagcataatagggttccaggtagtgcttgataaaggcaatatttggaagcaggtcaagtttacctttggtgtccttccacccactgctgccctcaacccacactgaggctctgttgccacctttgtttttccgggtctcagaaacacatcccaagctgtggacctttcctactttctaaacctgcccttgtctctttttatcagatctggtgccttcctgtcatgtcaccacaggtgatgactaatccgataaatgaattagttgtcctatgttgatgggctccttggttttactgcccttcccaggtaatcaggtaatgcatatatatatacatgtattttttaaagagacaggatctcgctctgttgcccacgctggagtgcagtggtgtgaccttggtcccctgtagcttcaacctcctgggctcaagcaatcctcccacctcagcctctcaagtagctgggactacaggtgcatgccgctatgcctggctaatgtttgtattttctgtagagacagagtcttgctacgttgcccaggctggtcttgaactcctgggctcccgcctttgccccacaaagtgctggaattacaggtgtgagcccctgtgcccagcagtaatacatatatcttacagttttaacctttaaccataaaatcataatggtgatgattcctagcactgtaataagttagctagggagatatttcaggacaaggagaactcattggtttcccttaaactacatcctgtaagtaactttctaggcttgaggcttacctctcaaccctcacttcctccctttattatctttattcctttgaggcccctcctaactct

SEQ ID NO: 260886 - DNA, 895 bp, Homo sapiens
gttaaatctaataaagtttatttgcacgagcgcacgtgcacacacacacacgatttatgaggcattcatcaggcagcagcacttaacagggagaggttcagagagctctacccagcactgtgggcaggcagtatttatagacagaaaaaggaagtgccccacagaaacagcttgattgcttacagttgggctagtcttatttgggcaggacattatgacgtatttgccttatatgcacatagtctgatcagttggcagcctgtgattggctgaagctcagctacttgtcacaagaatatactctcagttgcagttaatttacatactaagttaggttgcagttccctacatagcaactcagagtagggaggaaattttaggccaaatttaatttaaattatgttggagcatgaccaaagttggtcatgaccagaagctgaacacagatatggaagctaacacaatatccagtggagagagattgtggtagagtacatggggcgaaatggttgatttctgcatttttgttggtgacgccatcaggatttgctgaagaaccaaacgtgtgacaggaaaggacaacacaaggagctgccagctttggaaaccagttctactctcagtattaccttcgcaaaagatagagctttgtaaatttctagattcctcgttcttattatcctagactatttaaccagaatctccagggtcgtggtcctggaaacaatacgtttaaaactcttcccaaggatccttcagcagccaacttgactttggctaaggagtccgccagctctgggctcacttgggttgtttgcaaggaagagcccatgcccagagtataaattgggagaacagcgctgtgcaaagagcgtgggttggtgagctagtggat

SEQ ID NO: 260887 - DNA, 428 bp, Homo sapiens
actaaactcagaaataagcttaaatatcacgttattagggttgtttgatatacctgttccttagagtaagtggtgggtactaaattttgttattgcaaactctcttaaactattttagtgtttcagtgtagtaagatttagttgtgtttttctaaacaaaacccccaggaaaataagaaaacaaatctgataagacgtgaaagtagtctttccttagtaaaacttttcctttatgtataaaagtgaaatgaagcagagagtataaagaaaaactggtaactagagtaatccttaactactaaaaacttagaattatgaaaggcatttggttaatgaattctatgtaatgagagtaatgttctgagattagtaattgaacaaagtataaggttaaattgacttaaaaacattactgaggggccgggcgc

SEQ ID NO: 260888 - DNA, 527 bp, Homo sapiens
atgatgaagcaccttgtaccctaagattaaccaaaaataacagcgttaccctgtcaatttctggtcccaaaataatgaaacattgagtatttcttataatcccagatccccagcaaacaccattttattcttgacttttatttagctcatgttgcaagatctttctgaatatgatcatcatgtgataagattttgttttttctccatgaacaaattaatgcaaacttagtaatcatggtaatcttctttatatttttctttaaatacctgttatatttttcacttgcttatccagtttttctgaagtctgactcccttgaaccttttcaagtaaactctttttcttttcaaaatgctttggctctgactcttcctttgaaatttttggggaaaaaatgttctctgatcttaaaagggattgtaagaaaacatgaaaagcctctcactgttgttgatgtttcattaatttgttgctctgtttggcactgtcaatttaaaataaatttctatgcctctttcagcaatca

SEQ ID NO: 260889 - DNA, 594 bp, Homo sapiens
aagtctgggtctgtttagtaaacattattaatttgttcccttaaccttaaacatctagaggctatgaatgcctgactttctgggaatgcagcccagcaaggcccagcctcactttcctagccctcactcaagatggagttgctctcgttcgaacgcctctgatacaaaggtggctacaacctgcaggtacccctaatccaaataaggcaagcgatcactaagaacaagatagaaaaatccgttcatgtaaaccttgaagctctagttaaaatttaagtttaaaagcttgtctattccacagcccaatacaaattcgtaaactttcttaaaacattatgagatttttttttggttatttatttatttatttttagttcatcagctattgtgtggcccaagacaattcttccattgtgggccaggaagccgaaagagtggacacccttgatagtctgaaaactgtttagaccacctaatggttttattttttatttatttatttttgagacggagtttcactcttgttgcccaggttggagtgagccaatatcgcccactacactccagcctgggcgacagagggagactccatcc

SEQ ID NO: 260890 - DNA, 610 bp, Homo sapiens
agctcatttgggtattattgatgactctcctttctccttctgcaaccatctctctgcttcttttcccccaacatgcacagttggtgagttccaatatggatatttataagtctataacagccggcttcaaccttgttttcatccacatacacacaccccaacctgccctacacatgatggagatgtctccatcttgggggactcttgttaccaatgctgtccttgacttctaagatacctaatactaatagacatggagaaggctgggaagaagtggggccaccttacactggaatgggataaagaaccctattcagggccgggcgcggtagctcatgcctataatcccagtgctttgggatgccgaggctggtggatcacctgaggtcagaagtttgagaccagcctggccaacatggtgaaaacccgtctctactaaaaatacaaaaattagccacttagccgggcgttgtggtgggtgcctgtagtcccagctacttgggaggctgaggcaggagaatcgcttgaacccaggaggcggaggttgcagtgagccgagattgtgcacattgcactccagcctgggcaacaagaaagaaaccccatctca

SEQ ID NO: 260891 - DNA, 322 bp, Homo sapiens
gcctatttaggcccataccctacgtcacggcagcctccgcagatgaggctactgcctcacaacagcctccacaggcacagctccatcgttacaatggcctctttagacccagctcctgcctcccagccttctctccaggccctgaacattctcaggtctccctctgttgtccaaggctggagtgtagtagtgctatcgcagctgactgcagcctcaaccttccaggctgaagcgatcctcccacctcaacctcccacgtggctgagactacaggtgcttgccactatgcccaactaacatttggaattttcgtatacgtgga

SEQ ID NO: 260892 - DNA, 249 bp, Homo sapiens
gcctatttaggcccataccctacgtcacggcagcctccgcagatgaggctactgcctcacaacagcctccacaggcacagctccatcgttacaatggcctctttagacccagctcctgcctcccagccttctctccaggccctgaacattctcagtaagttcaggtagctgggactgtaggtatacatgatgatacttggctaatttttaaattgttttgtagacacggggtctcactttgttggccag

SEQ ID NO: 260893 - DNA, 392 bp, Homo sapiens
tgaggttgccggctggtgggatgcccgccggcatggcgaggggtgttcttcgggatccggctggcccagggcctggggctggctagagtgtagctgctgttggagagtgtggacagactcgggtccggttccatctttgccacctgtttgctgtgtgaccttgggcaggcaactcaccttctctgagcccaggtcatttgtgcaatgcagataacagggttgctgagggttcattcaatgacactgtgtttataaaaagtttagagcagactgggtgtggtggctcatgcttgtaatcccagcactctgggaggccaaggcgggatggtcacttgaggccaggtgttcaagatcagcctgggcaacatggtgacaccctgtctctctttaaa

SEQ ID NO: 260894 - DNA, 472 bp, Homo sapiens
aaaaaaaagaattgataattgctagaagaaagaaaaaaaggagagaaattatcatttgataaataaagatatgtaaaccttaagctaataggacatacatttttaccatatttcatataattttgtgtcttgtaaagaaagttaactagccctttctccatattttgctctaaattaagctatttttaattaatttttttgcttctttattaagcataaaaatagaacacatcccatataaatctgttttatagactggttaaaactaaacctgggtgaccctgtccttctgatcctccacactgatagacaggtaaagtgtaattgttctcgtgtctaaattgggtgaaggtatttgagtgggaatttacggtgagaattagcagtctttatgtaagcacctacagtcatatccacatatattatttttcaaaaaactttctcacaattgtgtatgggatttctctaaaca

SEQ ID NO: 260895 - DNA, 654 bp, Homo sapiens
aagagtaaatagtaggatgaacaagaaatatatgggcatggcagtcttcttctcagtgtaaggccataaggctccaccagactccatggatggcactagccaccaccaaccagtgattgaatctgcattacctgaaagagatctacagccacccacccaaaaaaggagccacaactatgttggcaagtagagattatgctttttgccccataaataaaagcaataggagaaaaatcgcaatgccaaaaaaagattgcagactgctcacctgatttagtgtaaagtactttgctcctggctggctcaccacagagctgaagtcagagggcttaggtgggccttcagatgccagacagaccctagacccagccaatgttccaggttcttgacactatcacaaaaaataattcagggatggatcagaatcatgcaaaaggcaaaaaaacttctatggcaaagaaaaagtaaacacttgaaagaagtgtgggcagactcaggagagtgagatgtgcaatggagtttggatttctaattttacaggctcttctaattagagggcggaataatcatgagttcttttaagaaaaagatggagatttcttagaactgggatgccaccatttttatactaaatctgggaatgtttggatctgt

SEQ ID NO: 260896 - DNA, 1419 bp, Homo sapiens
tggcggcgttcccggccggacaggcggggcgtcggggcgcgggctggggccgctgtcagtcagtccactggctcccgcgccgcgtctgtgtccgtcgctcggagggtggaagccggggtctcgcgggccgcgggccgcatgactcctctctgcctcaattgctctgtcctccctggagacctgtacccagggggtgcaaggaaccccatggcttgcaatggcagtgcggccagggggcactttgaccctgaggacttgaacctgactgacgaggcactgagactcaagtacctggggccccagcagacagagctgttcatgcccatctgtgccacatacctgctgatcttcgtggtgggcgctgtgggcaatgggctgacctgtctggtcatcctgcgccacaaggccatgcgcacgcctaccaactactacctcttcagcctggccgtgtcggacctgctggtgctgctggtgggcctgcccctggagctctatgagatgtggcacaactaccccttcctgctgggcgttggtggctgctatttccgcacgctactgtttgagatggtctgcctggcctcagtgctcaacgtcactgccctgagcgtggaacgctatgtggccgtggtgcacccactccaggccaggtccatggtgacgcgggcccatgtgcgccgagtgcttggggccgtctggggtcttgccatgctctgctccctgcccaacaccagcctgcacggcatccggcagctgcacgtgccctgccggggcccagtgccagactcagctgtttgcatgctggtccgcccacgggccctctacaacatggtagtgcagaccaccgcgctgctcttcttctgcctgcccatggccatcatgagcgtgctctacctgctcattgggctgcgactgcggcgggagaggctgctgctcatgcaggaggccaagggcaggggctctgcagcagccaggtccagatacacctgcaggctccagcagcacgatcggggccggagacaagtgaccaagatgctgtttgtcctggtcgtggtgtttggcatctgctgggccccgttccacgccgaccgcgtcatgtggagcgtcgtgtcacagtggacagatggcctgcacctggccttccagcacgtgcacgtcatctccggcatcttcttctacctgggctcggcggccaaccccgtgctctatagcctcatgtccagccgcttccgagagaccttccaggaggccctgtgcctcggggcctgctgccatcgcctcagaccccgccacagctcccacagcctcagcaggatgaccacaggcagcaccctgtgtgatgtgggctccctgggcagctgggtccaccccctggctgggaacgatggcccagaggcgcagcaagagaccgatccatcctga

SEQ ID NO: 260897 - DNA, 237 bp, Homo sapiens
gagggggagcaggcctgcagccccagaagcacccagagggcctgtgggtagatttgaataaaggtggtccatgggagtggcttcccagggagaaggcaagccccagaactggacagggaagaaagcaaaccatgttggactcgcaatcagtgatgatctagagcagaggtcatcaaaatacaggccacaggcctggcctgtcaccagttttttgtaaataaagttttattgaaacat

SEQ ID NO: 260898 - DNA, 134 bp, Homo sapiens
catttctctctaatgtgacgtaaagttaatagaccccttgaacagattcatcttgaaatatgaagatcaatcatccatggttcaggtcaaatacctgctcacacatatttactgagcagactagtccaaatttt

SEQ ID NO: 260899 - DNA, 453 bp, Homo sapiens
caactctcagggaactaacagtgagaactcactcactgctcaccaccctgcccccacccccactggcattcatctgtacatgagggatccaccaccatgacccaacacttttcattaggcccacttacaacattggggatcaaatttcaacatgaggcttggtggacaaacatccaaactgtagcagtacatttactgttatatacttgtttttgtttttagtgtgtgtaccctctaataaatttaaaagttaactgtaaaatagcctcagtcaggtcctttaggaggcattccagaagaaggcgttgttaccataggagatgacagccccattcaggttagcgttcccgaagactttccagtgggacaagatgtgaaggttgaagacagtgatgatgatcctgaccctgtggaggcctaggctagtgtgtatgtgtgtcttagtttttaatg

SEQ ID NO: 260900 - DNA, 460 bp, Homo sapiens
cgccgtcttaccctcgcgcccacgggcctgtgtgtggttgtgcacgtggcctgctttcctgactccccagagcactgcaggcagaggaggcaccagtggacagtgggaatgttcttggatatgaagccggaggacctggtttccaggtcccacttggccacttagtagccatgtggccttgagcaagtcatgtatccctccaagccctgaagatgatgaaagtgcctagttagttgagttgttacaattaagggataacatgtgcatgaatgtgccttgtaagttggtaaatgctataaaattggaagttttagaaatagtgggcactgatgttcttactaagtcagctctccagagtggttttcccatttttatcccccatgagggatctgtcatcagtgaaaggaatgatacaggattcctacgtgaagctagagacttgctaggacttcctccccac

SEQ ID NO: 260901 - DNA, 731 bp, Homo sapiens
acttatttttaaaagggtcatatgtacaaatatatagtccagaaaaattttaaatataactatctataaaagtatgtgacaaaatcccattcacagtcttattctccttccacagccacttttaattcatttcttgtatatcatttcagaatttatctttgcaaatacacatgtatattcttattctacccttctctctcaacacaaaaagtagcataccacacatacgataccattccttctcccttttaaaaaaacacacagaatacatccaagttctaggtgagtacagagtctttctcattcttcttttcagctacacagtatgcatcatttggatgtacctcagtttacttaaccaattcccttttggcagacactgaaatcatccctatcatactattacaggcaataatgccaagcataaccacctatcacacaccaagttcattgctgaatctgcctttgatgaagcctctgtttgaatcaccataacgtcacaaggctgaaaagttagccccttttttagttttcattatgtacagcagtatgtagcaaaagactccctcgggcaaaggaaatgtactctttggggatttacttcataacaataaatggataaacagaacaccaaggagaactgtttatatttaaccatgaacatgtatgtatacaatacatgcatacgcatagaaagtataaaataaataaattcatcaaagcattaagca

SEQ ID NO: 260902 - DNA, 627 bp, Homo sapiens
gcggccgcggctcctccccgccccgcgcgccccgattggcctggccgcgcgccagggccgagcctgcagcgcctccggttataagttgaagaaataagaccagtttccaaataaatgacaaagagcttggtattcctgcaggcatcagaatcacctggaggaggagatgctgctgctggtggtggcccagagaccacacattgagaaccactgctctagaaaaccatttgtctttgctgatggagaaacctggctctaatagaagggcttgtatgtgtccaggaagtctagtgaattcgaccatgaatccagacatggccagtggctaaatcctgtgggaagacactgtgcttctctctgacccatgaacactctgctagtcaagctctctgtcacaaagacaacttgaagagacagagtggacctcacagaagataccatcgtcactcttaccaatgcaactgtggtgaacaggaccactattattccttagatcaaaaggacagcacattcaacagcatcctcatggcatgccagcaatttgcataggatgttcacaattaaactttgattatctagtgctttgtggatgtattatgtattacagaaatctatttgcaacatgga

SEQ ID NO: 260903 - DNA, 757 bp, Homo sapiens
gcggccgcggctcctccccgccccgcgcgccccgattggcctggccgcgcgccagggccgagcctgcagcgcctccggttataagttgaagaaataagaccagtttccaaataaatgacaaagagcttggtattcctgcaggcatcagaatcacctggaggaggagatgctgctgctggtggtggcccagagaccacacattgagaaccactgctctagaaaaccatttgtctttgctgatggagaaacctggctctaatagaaggtcctctgtggacagtgagctggactgacctcacaaccctccagtatgtgcagtggctgagaatgacccactcccagcaactttctgcagccaaggggttaatcctccctgagctgaagcctgacatgggggcttgtatgtgtccaggaagtctagtgaattcgaccatgaatccagacatggccagtggctaaatcctgtgggaagacactgtgcttctctctgacccatgaacactctgctagtcaagctctctgtcacaaagacaacttgaagagacagagtggacctcacagaagataccatcgtcactcttaccaatgcaactgtggtgaacaggaccactattattccttagatcaaaaggacagcacattcaacagcatcctcatggcatgccagcaatttgcataggatgttcacaattaaactttgattatctagtgctttgtggatgtattatgtattacagaaatctatttgcaacatgga

SEQ ID NO: 260904 - DNA, 433 bp, Homo sapiens
aaagtggtttgctcaaatggctgatgctttggttttaattctctccacctggaccactctgcggggctgcttgagtctcctcacaagatggcgctggcttcccccagagagtaagataggagtggcagtgctttttatgccccacctttggaactcacattctgtcatctcagctacatgctgttctttagaagtgaactagcaggtccagccctcactggtgctagtggtagcgcaattgggctcacactttaaagggatgagtgataaaaagtttttcagacttattttaaaacccaccatatccctaaacttatcattgctgttagagggataaactctgccgactgatgaggctatattagttcttgtgggcagttaccagaaaatggcagaaaagattcctgttacaatttcctcccctgcccccccc

SEQ ID NO: 260905 - DNA, 385 bp, Homo sapiens
tgagatcccagaggccacagcctgctccctgctgtcctccatccctcacacaggctgaggagagaggccatccgagatgacctgcaaagccacctcactaagcagtctcagccccgtgtcgggggacatggtgtggtggctgcctatagccctcctctgcccaaaccctttcttctagcagattctgtaactggcaggtcacttttgagtattaggactcaaaataccccaaagtggtcttgtccactgcctgcaggcccatgttgggatgggagcgggcctggcttctccctctccacagcccagctcctctgttgctttggggcaggaggagagggagagacagatttgttagtaaatgtgccttctcatttgagttgctgcc

SEQ ID NO: 260906 - DNA, 333 bp, Homo sapiens
gccaccgcgcccggcctacctcttactatttcagtgtatatttcctaagatcaaagatattctcttgtataaccatagcacaaatacagatttcaggaaattgaatttagatacaatccttttatctaatacatagactatattccaatttcattcattggcacaatcataactttcaaagcagtattgttcctggcccaggagccagtccggagtcgaggattgcgttcagctgttatgttcctgtgtggctgggaagcgggtctcagacggtttcatctgtaaatgtcagtatcagcgtctaataaagataagcctctttttaagcagcca

SEQ ID NO: 260907 - DNA, 316 bp, Homo sapiens
tttttttttaattcttaagaaaagcagtgtgccagggcctgccctcacacttggagtgacccaggaggtgctgcgtgctgcctcactgggtctcactccagccgcgctttgctcctctctgttcttgcacttgcctcagtggcctctgcagcagagcctcatgccagctcttccctcttcttgggatgcccctgttatttttccctgcagtcttggagggccggctccttggtcattattcacatgtcatctctgtgccacctcctagactgctgacttgcccccacagcaacccccttctgtcgtcttctgcagg

SEQ ID NO: 260908 - DNA, 335 bp, Homo sapiens
gggaatcgcttgaacctggaggcagaggttgcagtgcgccgagatcacacctttgcactccagcctgggcaactaaagcgaaactctgtctcaaaagaaaaaaagaaaagaaagaaagaaatttgtgattctaagaaattgaaattggctcacacagttacggagctgacaagtccaccaccacctgcaaggtgagtcagcaagctggggcccaagagagccaacgtgtagttcccgtgccaacgtaggcagactcaagacccagggagaggtaatgtttcagttcaagtccaaaggcagcaaaaagctgatgttccagttcggaggccgtccgg

SEQ ID NO: 260909 - DNA, 377 bp, Homo sapiens
ttttttttttagatggagtttcactcttgtcaccctgctggagtgcaatagtgcaatctcggcccactgcaacctgggtctctcgggttcaagcaattctcctgcctcagcctcccaaggagctggattacaggtgtgcaccaccacgcctggctaatttttgtatttttactagagacggggtttccccatgttggccaggctggtctcgaactcctgacgtcaggtgatgcacctgcctcggcctctcaaagtgctgggattacaggtgtgagccactgcgcccagccgaaaagctgattctttaatgtctccaattgaagaggtattctttttttgcgggcggagagggtctcgctttgtcacccaggctgcag

SEQ ID NO: 260910 - DNA, 361 bp, Homo sapiens
gtgaccctcccacctcaccctcccgagtagctgggactacaggcatgtgtcatcatgctgggctaattttttgtattttttgtagagacaaggttttgccatgttgcccaggctggtctcgagctcctgagctcaaacaatcctcctgcctcggcctcccaaagtgcaggaattacagatgtgggccaccatgcctggcctactgtgtttttcaatgacttaaaatttattttaaaaattaccacaagtgtatagcatattcacacctttacaagtcatcatcaagtttttaaagaaaatagtattgtttgtgttgtattttcatgtaatttctatattgtttcaattctgcaatttgctt

SEQ ID NO: 260911 - DNA, 260 bp, Homo sapiens
cctcactggcctccttcccctaaacctataaccctggtctagtcctgagaaaacaccagacaaacccaaactgagggacaatgacacctgactggtattcttcaaaagtgtcaagttaatgaagaacaagactgagaagcccgtcaccgatcagagatgacaataaatgtaatgatcgatcctagatgggatcttggaacagaaaaaggacattagtagttaaactggggaaatccaaataaatttataactctagctta

SEQ ID NO: 260912 - DNA, 199 bp, Homo sapiens
gaagataatgtaaagcatgaacaagttaaggagagccataaaaaattttaaaaactcaattctaacttatagagatgaaaaatacaatgtctgtgaagaaagagggcctggatgggttaacaacacattagacactgcaaaagaaaagattagtaaacttgaagacaaagcaatagaaactatccaaaatgaaacagag

SEQ ID NO: 260913 - DNA, 320 bp, Homo sapiens
gtgaaacctcctctctactaaaaatacaaaaattagccaggcatggtggcaggcgcctatagttccagctactcagaaggctgatgcaggagaatcgcttgaacctgggaggcagagttgcagtgagctgagatcacgccgttgcactccagcctggcgacagagcaagattccttctcaaagaaaaaaacaaaagtgaggaagttgtaatcctcccccacgaggagctggcattcaaggtatgggagacaaataagccagctagttacaaacaaacctctgaataatctttattattattcataatctattcaattatt

SEQ ID NO: 260914 - DNA, 683 bp, Homo sapiens
ctggaattcagccttctcttgaaaaataaaatcagggattataaataagaaatttgcacagcagtgaacatgcaagagaatactcatttaataagtgccaacatttagttttctaataggcctaggaaacaacaacccagtggccagttaccctttgattcacttgcctccaatggttccgataacaaggatgtgatcaaacagccagcagctgatgagaagtgatggcttgtggatctgtttgtccacatacctattgatatattatcttcagcaaggtgcacatcctgactactggtggtataggactaccaggtcaccaaattggaaactaacattatgtaaaagattgtatcaaaacaaggacatttttacatttcctcatcatatgtttttcaaattagtgggtctgaggggatttcaaggagcagtatttgatttacttaaagaactttcttggttgtagacattgtacactcaaaaattaaaccagctgtggccagacacggaagctcatgcctgtaatcccagcagtctgggaggctgaggtgcaaggatcatttaagcccaggattttgagaccagccttggcaacacagtgagatcccctctctattattaataaataaataataaaccaaattaccagctgattactatcaacttcatactgcaagggtcaa

SEQ ID NO: 260915 - DNA, 563 bp, Homo sapiens
atggcctaagtctggaaaaactgaccttgattacaggcttgtttgtagaaatattgaaaatgaggtaaaaggagaataaagactttgaacctggcaagtatttcactgttcagttagttggattatctatatcagttttacgctgtttctcacattcgagctagaaggtgtcattgtgatgctataagtggaagtacaaaggctagaagaggcttaagagcattttacccaataaagtgtgggtaaaaggggtgtgggtgaaagtggatatggtgtaagctaaggctctgaggtattgtcaagaaggctaaggctctgaggcattatcaggaggctgatacctcagcatagcatttgggtgggctgctaggtctctagggagagtcaaaggctggggaatgacatgacgcctccccttcaccttccccctgcttaaaaaaaaaaaaaaattgggaatttggatctggatctgctaggacccaccttcaatagaccagggaggtttagacccttcaaaaagataaatagctggctgactaacattgagattagtgtggaaggaa

SEQ ID NO: 260916 - DNA, 467 bp, Homo sapiens
tgcctctttgtttattaagaattgtttacagaactctcaagcagcaaaggcaaagtacagaagataaataagagcaagctggccggtgcgtgcgactggatggacaacatctttacccacatgtctgcatcagctctgcgttgttcaccgacaaatcccgtgtctggaagagtcctggcaggctgcacgggctggagagagagcgagctgacaccaacaccaggcagagtccaccatgaaggcaagtggcagtgtcccaaggagagcccgctggccaggagggcaccgcaagcttggacacagcaggggcactggagatgggtccacgaaccgcgtgcgcagcccaggaggctggcacaactggtgtctgcatgaagactaggaacagctggcttcttatctcacaccatacacaaacatcaatttaggatacattaaaggtataaatgcaaagggcaaaagtacaa

SEQ ID NO: 260917 - DNA, 480 bp, Homo sapiens
tctccctcagagatgggaaccaatcgccgggaagaaaccaaggcgcaggcgcggaccgaggtcagcgtccacgcggcgctcgcgtctcccctctgcgcaggcgtaaggccacagctcgctcctgattaggcggccgatcccaacgagcgcgtggtgtctcgcgttgccgacccttgacaggaggcggaagatgcccttgggaagaggcgggagacgctctctcggctgacctacagtgctgtggctgtggcccacgtggtcgccttcgggcgccttctcccttctcagcgtttcattccccaggtgctgctgcaagaacagtttatttgtctggcccgaatgcgacattttggaaattttgcccttgttttaatccatatagtaggtgtggctgttaccccctaggaaagcatctctagaaatttataacacatgcacagagagctaaggtgaccatcaataaattcaggtttacccttg

SEQ ID NO: 260918 - DNA, 471 bp, Homo sapiens
atgcttcattcgcctcacaaacaaccacagaaccacaagtgcggtgcaaactttctccaggaggacagcaagaagtctctggtttttaaatggttaatctccgcaggtcactaccagccaccgagaccaacagagtcagtgagtgctctctaaccacagtctatgcagtaatatttaaggctgcaagcagtatttacaacagagggtacaagttctatctgaaaaaaaaaggagggactatggcatcaaacagcctcttcagcacagtgacaccatgtcagcaaaacttcttttggggtgaggaactgaagtccagaggggtttcttgaactgcccaaggacacactactatttagtgatacaagctgggactaaaactgaggtcccccgacacctggtccagagttctttctactatacatcaaagaatatacaaataaaagtttatcataactaacccaaaaacctcca

SEQ ID NO: 260919 - DNA, 436 bp, Homo sapiens
atgcttcattcgcctcacaaacaaccacagaaccacaagtgcggtgcaaactttctccaggaggacagcaagaagtctctggtttttaaatggttaatctccgcaggtcactaccagccaccgagaccaacagagtcatttaaggctgcaagcagtatttacaacagagggtacaagttctatctgaaaaaaaaaggagggactatggcatcaaacagcctcttcagcacagtgacaccatgtcagcaaaacttcttttggggtgaggaactgaagtccagaggggtttcttgaactgcccaaggacacactactatttagtgatacaagctgggactaaaactgaggtcccccgacacctggtccagagttctttctactatacatcaaagaatatacaaataaaagtttatcataactaacccaaaaacctcca

SEQ ID NO: 260920 - DNA, 646 bp, Homo sapiens
gttagataaggatgaaattttcatttggaagaattcttacaatataaaagtaacatgtaaacaagattttttcaatgttattgctatttatccccaaaactcccaatttttaaaaacgtggtgacattataattactaagcactactgagctgtgaaatctggcatcattatcatcaggcctgtaactctgaaaaagtacatgacaaggcaagaaatatataaatgggtaaagtaaggaagaactcagagaactcagtgaagactctcaaagtgcatttaaattaattaaaattcttaagaagtttgttaaaatacctgtaatgtcaactgaaaagatttcactttcaaatttacaggctgcttgagttcaataacctaaaaatgaaaaacctctggaccattccagtacaggttattcaaaggagctgtgataaagagcatatagcaaatgtgctcagttatatgcactaggtgaggaactgaagtccagaggggtttcttgaactgcccaaggacacactactatttagtgatacaagctgggactaaaactgaggtcccccgacacctggtccagagttctttctactatacatcaaagaatatacaaataaaagtttatcataactaacccaaaaacctcca

SEQ ID NO: 260921 - DNA, 349 bp, Homo sapiens
gtagtaatgccagagtaaagccatgacatctagttaacttttaattttagatacacaatgaatgtcttttttcaaaaaagtgtgtatccctgtaatcccagcaatgtgggaggccgagacgggcggatcacgatgtcaggagatccagaccatcctggctaacgcggtgaaaccccgtctctactaaaaaatacaaaaattagctgggcgtggtggcggaagcctgtagtcccagctactcaggaggctgaggcaggagaatggcgtgaacccgggaggcggagcttgcagtgagtggagatcgcgccactgcactccagcctgggcgacagagcgagactgtgtctca

SEQ ID NO: 260922 - DNA, 423 bp, Homo sapiens
tgttagacttttttaacttaaagaaaatatgccctgacttttccctcaacattaactgatttttttccctatggttgaaaaatgcttctaatgggtagaatggcaccatttggaattttaaatatccagttttttattagcagtctgatcttagcacagtagaactggctggagagtcaggtgacgtaaaagctagtttcattatccactcttggctgctttgtgacctatggcgagtttctgaacttctttgggacattttgtttatattgttgtttttttcccctaatttaaacagcagtgagtttgtgagaaattggcagatttcacttcttgatttccatagacttccatacatcaggactcttccgtttgaaagtaactagttgatatttaaaaaaagaagaagaagaaaaggaagtg

SEQ ID NO: 260923 - DNA, 294 bp, Homo sapiens
aagcatggggcactgtgcaccaggtatgcttatcatgcctgtgaatgagggattgattaactgaatcctccagggacacttgggacagctctgcccacaagaagagcaagaacccaggcatcaatggggtggtgcagacatgggctcagggaggccctctgccatcccctcctgcctggaccaatgttttctgagaggcagaaagtgcagggtgactcttcactgtggtatttgtctatgtgtgtatcaagtgtgtaaaaatactgtgctctcttagtcttgatttatcactgc

SEQ ID NO: 260924 - DNA, 414 bp, Homo sapiens
tataaaaacactttgctgtgaatgtaatatatggttgtgtattttccataaaatatttcgctttcaagaaggggagagagtagaaaaaaaaatccttagtttttgacttaccttttaattttaggattttatttgaaatacatagtagaatggttttcctttgtgttttctttcattgctgtactctttcagagattacctaatttttaattgtttacatctcttttctttttaaaaacgtttaactctttaatataatggttttttttttggcctgcttgccttcctcctctcctttcctttcctctcctctcctctcctctcctctcctgtgctctcctcttgttctcccctcccctcccctctcccttcctttctttctacaacagagtgagactctatctccaaactgga

SEQ ID NO: 260925 - DNA, 296 bp, Homo sapiens
cccggctcacactcaccacagcagggcagacagcaggagtgccaaggacacctacttgcaggtggccaacaaaagaattacagcaaaaatgacagggaggaggaacaggagggctagaagtggcacctggctcatgcagggttaggacttgggacctcagggatttagcccaaacctcttattttatggccattgtcattacgccctctagagcctccaccttagctcttatgttgaagactttatcctgcgcagtcccactgcagcatgcgaaatcacatgctcttccatctggg

SEQ ID NO: 260926 - DNA, 389 bp, Homo sapiens
ctacacaacaggagttcaatcctaggacctgagctgatgtaaatgaagcaccgccaggcccagttggggaggaccttgtgttcctgctggagagtgagagtccctccctccccattccactcccaagagcagtgaagagtcaggaaggtgggcttgttttgttttgttttgttttgttttgcttgttgagcaagggaatgcggttcccctgtgtcggacttgtttcagaaagacaatgtcactgaggctggggcagggagattagctgagaggctcttgcagttatctgggaaggagctgtccataaaggcctgagttaagacagtagccctttgggttcgatttagtggtggctccccaaaagatatgttcactggaacctagacatt

SEQ ID NO: 260927 - DNA, 294 bp, Homo sapiens
ggtggggttagtgccagggctgtggaaatcatgaagaagttcctgtgtctgtttgtccctgatacatctgtctacatcctgctctgcctctcattgcaaaacactcaggggaccattacttaactctgtgtgggactttctccagcaatactttctctcagaccattcatatatatctccacggtgatgatgaagagaatgatgattatgattatgatgacaatgaaataaaagggtcccagaacactgatgagtgactagcatgtagtaagtgctcaataaataattgtcaag

SEQ ID NO: 260928 - DNA, 197 bp, Homo sapiens
cctggcccacagttccacagaggaggagtgtgtctggacagtccagccctgctcagatccctcccttgttcccagcgcctcttggaccaggggctccaggtacccgtgcgctagccccacacacctctgcacccctgtctgcctacagtccccaggatgccagccacatgcacatcccccagggccacgctgttccc

SEQ ID NO: 260929 - DNA, 495 bp, Homo sapiens
accatgcatggctaatttttctatttttagtagagacaagatttcactttgttggccaggttggtctcggactcctgatctcagatgatctgcctgcctcggtctcccaaagtgttgggattacaggcgtgagccactgcgcctggccacttttattttttaaaagagtttcaaacctgaattaaattattaaaaggagaaaatgtgctcagttgaataaaacttcaaaatgctgaaaagagtatagtgtaaaatttcccctctgtctcgtctcctagccacccaagttcctcttctgggagacaaccagtacttccagtttttctgaatgctcccagctgtagatagatagatacacatgagtgtctggcaaggcacagtggctcacacctataatcccagcacttttggaggctgaagtgggaagttctcttgagtctggaagttcaagaccagcctaggcaacatagcaagaccccgtctctacaaaaaaat

SEQ ID NO: 260930 - DNA, 438 bp, Homo sapiens
ggaattcttataattcaggaactccccaaaccattaacattcaaatacctctctcactctgctttccaagtaatcacaaaataatattacaagattactggcattatcatccactctcatgaatccattcacttaagtcaaaatcctggcacagataggacactagtgacttgcgtgctgcaacctggagagtgactctggttactgtgagcacagactttagaggaggaaaggacaatgggagcaacagcaaatgctactctgccttcttatcctagagctttttcatcaaattgggaggggcagaggagttaaggacactgaaagtttctttccaattgtcttgttccgatatttctcagccgtttattcacatcattctcaaacatctgattatctcatggtagacaattttagctattctattatcaagccata

SEQ ID NO: 260931 - DNA, 211 bp, Homo sapiens
gtttctcaatttacatttctaatagtcaacaaaaatgccataaggtataagtaagaactctttaacaaaaagcaagactacatttgctattcttaggctgacagtcactgtgagttgtttcaaatgcggaatgtgacaaacaacagaagtcccctcaacctctgtactcttaaggatttgctgaaagaaatctagtgctaccattaatcac

SEQ ID NO: 260932 - DNA, 109 bp, Homo sapiens
gttagaagctggaaagggggtgttagtctaagtactagggtagaacaaaggaggttacaagatgggcttaatagagcttggcagatacaggtagtagacaaagtgagag

SEQ ID NO: 260933 - DNA, 600 bp, Homo sapiens
ggagaatcgcttgaaccagggaggtggaggttgcagtgagccgagatcgcgccattgcactccagcctgggccacagaacaagactccgtctcaaaaaaaaaaaaaaaaattttaccactctttaaaatcaagtgggactggaaggatggtatggagattttattggtaagggcatttttcagaaaatataatttttgtggcctattgcttaattaaaatttcaacgtaaattctatataaataaataccaaattttgtttactgggtacctatcccagatattgctcttatccatgtaataccttacgtaaaattctgactcatttgtttatattactaaattcaccccaaatttcacctcattcaggatgaggtaaaaaacaaacaagggccaaatgctgtggctcatgcttgcaatctcagcacttctggaggctgaggcaggaggactgcttgaggccaggagttcaagaccacagcaagcaacatagtaagatcctgtctccacatcccagcactttgggaggcagaggcgggtggatcatgaggtcaggagttcaggaccagcctggccaagatggtgaaaccccgtctctact

SEQ ID NO: 260934 - DNA, 182 bp, Homo sapiens
  misc_feature (16)..(16): n is a, c, g, or t
  misc_feature (26)..(26): n is a, c, g, or t
acagaagggacggctncgagaagacnacagaaggggcccacatcctgcagaaccaggcacgaggaagaaggaagactttgaattttaaacagataaaaatggatgctgtttccatcgtttggtgtcctgcttttctacgtagaggaaacatttctcagcacaattaaaacgtgttcgtatgc

SEQ ID NO: 260935 - DNA, 468 bp, Homo sapiens
agagcacggaggccctttacataaacagaacaaatccttttcagtgcttttagaccttaacaaacatggggtgatgtacaaaactgcactccccccactataaggctagcccccaccctacaaacccctgaactcttttcagcatttcttaaatctgttccattgaacaatctgcgttcattgtaacaaatacaatctcattgaattagattctgaagagactttatagtagaggaaaaaaggagactgatcctgtattctctttagtttaaacaaggaacagagcacagcaaatgagaaatcttgggtgagctaagttcactggaatgggtggggagggatggggaagaggaaggggggaaattggagagacttgtaccagataaggaatccatttctaggtgtctcagaaacaaaaaacccagtgttaatgtctgtgctttaattacatgactgttaggtgtcact

SEQ ID NO: 260936 - DNA, 344 bp, Homo sapiens
ggttgccacttcaagggactacatcatgatgtcctgtttctaatgacctcccaatcatcctgcagaagattcttcaaatggggatcaacatgtccttatttaaggtttgtgatgaagaaataaacaatccccagttcctgccctagagaagctcattgcatagaaaaaggaacaaggcagatatacatgccacagtacagtaatgagacaacataaatcacaagcaaccaagtccaaaggttctttacacagccaatagctggtgctacaagcagatcaaaaccaggattgatggtaatggaagaggaacagactggaagagctggctcttctggcagtttttt

SEQ ID NO: 260937 - DNA, 659 bp, Homo sapiens
aaagaagatgcccattgtgtgtttcatttgcctaaaggctctctagctggtgatctgatttccaagaagggaaataacttgcactgtaaactgatttattaaaataggcgctcatgatccttatcttttagaagccaacaattttaaaaatatgctacagagagaaagggcaattgaaatgacaagaactaacagctcagtattttgaaaacatcagggctctgaagaagaaggggagattttgtagtgttgtacattgaaagtttatctgaaacattcccccatctctcttttcctctctctttgtccctctgtgccacccctaatgtattcacttttttctctactcactccctcgcttccaatatttaagtctttaaaaacattgaaataaaatgcaatggacaggacccgtatccgtcagttcttgttctcttcccctgaaactgggtagcacatcttgtcgttcctgtcagaccacccagctagaagtcccctctcctctctctgagacctgatagcattttgtgtccctctgatacagcacagatgaagtcaccctggattgtagtcatcatgtgtgtgatttttatcccttatttgcgtaataaacccttaatagaagagactgggtttcattcatcccccagtagccacag

SEQ ID NO: 260938 - DNA, 430 bp, Homo sapiens
tggattatatatcagacatctttgatttaagtcaagtagtgggtagagacccaagattcagtcccgttaagaggaggtatttgtttaaaaaaaaaatacattattatgtctggtatggtttagctgtgtccccacctaaatcttatcttgaattgtagttctcataatccccatgtgtcatgggagggacccagtgggaggaaagtgaatcatgggggtggttatccttatgctgttcttgtgatagtgagtgagttctcacaagatctgatggctttataaggggctttcccccctttgctcagcgcttctccttcctgccgccatgtgactaaggatgtatttgcttcccctcccaccatgattgtaagtttcctgaggcctccccagcccagcagaactgaatcaattaaacctcttttctttatat

SEQ ID NO: 260939 - DNA, 586 bp, Homo sapiens
cagggattcaatgaaagagatttatgttatatctgcaacagagaataaaggatagaattagtatttgtctttaaataataaagttaaaaggtggtaactaactgagatttttaaaaattacaggttgaatagctgatgaagcagaaagtgggaattgtagagctcagcttgggacttgccagtttggcagtgtttgtgatatattcaggtgcagacatctagtaagtagttggatacaacaggttgaggccagggaaaacattattgtaaataaaaccaatggaatgggtaagagggtagaaggagttctgcaacagaccagatgtttgtgttcccccccaacaagttcatacgttaacgtcataacctccaatatcaggaggtaagggctttgggagggtcatgaggatgaagccctcatgaatgggattagtgaccttataaaaaggggccccagagagctctcatgtcctctttctgccacatgagaacacaacgagaagacagcagagtgtaacacagaagagggccctcaccagaacctggctatgcaggcaccaggatctcagactttagcctcaagaac

SEQ ID NO: 260940 - DNA, 1061 bp, Homo sapiens
cggggaaggccatgcatcatctgctaccctggaggatctggagccagtaccgagaactagcagtggccctgcactcaagctccgcaataatcagtcaactcagtgaaaacatcaattcactgctgaacccctggccccagagcccccagcagggccctctgaggtggagcagctacaagatgagaccaaccacctaaggaaggagctggagagtgtgggaagacagctccaggctgaggtggaaaacaatcagatgttgagtctcctgaacaggagacaggaggagaggctgcaggaacaggagaggctgctggacaaggggtaggagctgctggaacaggagaggcttcaggagcaggatgagaggctgtggcagcaggagactctgtgggagctggagaggatgctggagctggagtgggaagccctctacaagcagcaggccgagccccacagcagctttgaggagctggaataatgagaacaagagtgcactgcagttggagcggcaagtaaaggagctgaagcttggagaacctggaagctaccagccagcagaaacagcagctaaagcccagttgagcctcatggctctccctggggaaggatatggaggaggacatctggacaatgaggaggaggcacctcggcccatgctgaacattccaggggacctggagagccgggaggccatggtggcatttttcaactccgctggagccagtgcccaggaggagcaaagcgtgtgctgccagcccctggctcacccagtggcctcatcccagaaaaagccagaggcagcggccccagccccagagactgggggtgaatctgtgtgtggggacacccactgggccctgcaggaggccatggagaagctgcagcaactttatggaaggagaagatggacctgaaggagctggtggagaaactagagcttcagttcatccacctctcaggacagacagacaccatgagaaagtacatcagccagggggcagtgccaaagacgcagcactgggagaggaggacatcgtcaggctggcccaggaccaggagga

SEQ ID NO: 260941 - DNA, 641 bp, Homo sapiens
gcattgtagctggtacctatctggtgagggtcccagactgcttccactcatggcagaaggggagctagcatgcgcaaagatcacatggctagagtgccaggctctgttcaacaaccaattttccagtcaactaagaatgggaattcactcccacaagaatgttttttttgggaccaaagaaaccacatccaaaccatagcagtgccccagccccccgagttcaaaggtcagctgtatagtgtacacaggaaaggagtgcataacccagattgggatggatactcaggaaaggcctgtcagacaaagtggtctttaaatacatttacctaaaggattggcaggaattagcctgagggagaggagagagaagacaccttaccagcctgaaggaagagctggagaaaaatcggtgaatttggcaaattttaaatagtattgtagtgtgtatgtttttgttgggtggggtagtgtagataggtaggcaagaacttggttttaaatagtttttataggccgggcgtggtggctcgcgccagtaatcccaatactttggaaggcagagatggtggatcacgaggtcaggagatcgagaccatcctggctaacatggtgaaaccccatctctactaaaaatacaaaaa

SEQ ID NO: 260942 - DNA, 395 bp, Homo sapiens
aactaaatagccccactcaggccaggcctatgtatcattataacagaattacttttttcacccttccctttaaaactaatgatcttcaagaagacttatgttttactcactaggttctgctcctatatgcaagatcctttcaggcttttaagtgctagaagccactccctgtttactaagtatgacgttagctatgtgcctaagaacagactgagccttagtccctacgtacttagtagagctccttacttagacattaaataacagatgttgaatgaaaaatcacaagtgaaaaagtatatgcctaatgcttggtaaactatttaagcctacaatctaatactctgatttcataatctgacagtgatcataaacttttaaaatgttactcaaat

SEQ ID NO: 260943 - DNA, 480 bp, Homo sapiens
aaagtaacatctacagaggagtaaacattccaggggtgcctgcatttgacagatctgttccctggggtgaatgtttaatctagagtgtgggaaggagctattcctccatagtatcagcattcctccttactttgctatgtcctccctaacactctcattcccatctttgctgttgtttcaatcaataacaaaagaggccaggcgcggtggctcacgcctctaatcccagcacgttgggaggccgaggcaggcggatcacctcaggtcaggagtttgagaccagcttgagcaacatggcaaaaccccgtctctattaaaaatataaaaaattagccaggcatggtggtgggggcctgtaatacaagctacttgggagactgaggtgggagaatggcttgaacccaggaggtggaggttgcagtgagctgagatcgcgccgttgcactccagcctgggcctaacagagtgagactctgttta

SEQ ID NO: 260944 - DNA, 416 bp, Homo sapiens
gtattttgttctttggcaggaattgtgactgtgagatgatggtatgtgagaaagcctggtttctttctttggatgttgcaataaattagaagcatactatccaaagagtgtgtcttctctcatgaatgtcttggctattagggctggctggatagtaaatgtaggagaagccaccacaagatgggcattctcgcacccatgacaggcaagactttcaacactattcccacaggaagagtgtcccctggaccctgatgcagcttcttacagtattctaaccctaccccggtaacgaccattatggaatgtgcacatttagcttcaacgtggctagaccaggttgagccaagtagatgggaacataaggaagaattataattgccattatttgtagacaataaaactgcctacctgta

SEQ ID NO: 260945 - DNA, 524 bp, Homo sapiens
caatgtaagttctgttgtccaggaatgcgttctcaacacagcggtttcctgaatgccccaagagagtggggcagtgagaggctgaaggccagacagcagggttacctttcctgttctgtgcagacaagattcattactccctagtgatgttttaagtgaatgtatagcattcattcatagacaatgtctagttaggtaatgttagcatgaagggtaaattctaaatgtgaaggaatatacacatgactttgactaatcaacatactatccctggaaaacatgttggaactgcaaaaacaaaacaaaacagaaaaatagagtgaagtgattcagaggttgtgaaaccctaaatttttaattaaaattgcacaatgcagttctatcgtgagcacaaactggattgaacgcctcctacatcaaaatcattctcaaatgtttgaagtctgaataactagtaacaagataaagatggacaactagactctttggattaaatgacaaagttaccaactcaccctactgtt

SEQ ID NO: 260946 - DNA, 1526 bp, Homo sapiens
  misc_feature (1)..(1): n is a, c, g, or t
  misc_feature (48)..(48): n is a, c, g, or t
  misc_feature (242)..(242): n is a, c, g, or t
  misc_feature (245)..(245): n is a, c, g, or t
  misc_feature (248)..(248): n is a, c, g, or t
  misc_feature (322)..(322): n is a, c, g, or t
  misc_feature (415)..(415): n is a, c, g, or t
  misc_feature (551)..(551): n is a, c, g, or t
  misc_feature (715)..(715): n is a, c, g, or t
  misc_feature (750)..(750): n is a, c, g, or t
  misc_feature (761)..(762): n is a, c, g, or t
nggaaagaatccagcatgaatattattgaactggagattcctgaccanaacattgatgtagacgcactgcaggttgcgtttggttcactgtatcgagatgatgtcttgataaaacccagtcgagttgttgccattttggcagcagcttgtatgctgcagctggatggtttaatacagcagtgtggtgagacaatgaaggaaacaattaatgtgaaaactgtatgcggttattacacatcagnagnganctatggattagattctgtaaagaaaaagtgccttgaatggcttctaaacaatttgatgactcaccagaatgttnaactttttaaagaactcagtataaatgtcatgaaacagctcattggttcctctaacttatttgtgatgcaagtggagatggatgtatacaccnctctaaaaaagtggatgttccttcaacttgtgccttcttggaatggatctttaaaacagcttttgacagaaacagatgtctggttttctaaacagagaaaagattttgaaggtatggcctttcttgaaactgaacnaggaaaaccatttgtgtcagtattcagacatttaaggttacaatatattatcagtgacctagcttctgcaagaattattgaacaagatggtatagtaccttcagaatggctgtcttctgtgtataaacagcagtggtttgctatgctgcgggcagaacaagacngtgaggtagggcctcaagaaatcaataaagaaganctagagggaannagcatgaggtgtggtagaaagcttgccaaagatggtgaatactactggcggtggacgggttttaacttcggctttgacctacttgtaatttacaccaatcgatacatcattttcaaacgcaatacactgaatcagccatgcagcgggtctgtcagtttacagcctcgaaggagcatagcatttagattacgcttggcttcttttgatagtagtggaaaactagtatgtagtagaacaactggctatcaaatacttatacttgaaaaggatcaggaacaagtggtgatgaacttggacagcaggtttctgaccttccctttatatatctgctgtaacttcttgtatatatcaccagaaaaaggaattgaaaataatcgccacccagaagatccagaaaactgaagatctcatcagttggaaacagtagcactttgaaaactttcaggccagctttaatttaatggccctactgatattcacatctaaggtgactaacaatgacaaaggccttatgaactgtacggacaatacagaagactattcttatcctcattgcatttctatgcatatacaaaaaaaaccattttaaagccaagaaaatatctgtcaaaccatttctgtcagtacgatgtcaactcatgcttttaattcagcatcagcagaaaatgactgtaggtaaatctcacatttatctgcacaaaatatagatttaatttttagcttaaactttgtttctacttagtagtgaatcgaattccccggcg

SEQ ID NO: 260947 - DNA, 644 bp, Homo sapiens
cgaacatggtgaaacccagtgtctactaaaaatacaaaaattagccaggcgttgtaatctgagctactcaggaggctgaggcaggacaattgcttgaaccccggaagcggaggttgcagtgagccgagatcttgccactgcactccagcctgggcgacagagtgagactctgtctaaaaaacaaacaaacccgttttgtctgttggagacaagagtgcagcggggccatctcggctcactgcaacgtccagctcctgggcccaagcgatcctcccacctcagcctctccagtaactgggataacaggtacgcaccaccaggcccgactaatcttttttggaattttttgtagagatggggtttcgctatgatgccctggctagtcttcaactcctggactcaagtgatctgcccacctcggccccctaaagtgctgggattacaggcctgagctgtgtaatttcatgccgcgtgacacagcccagtaaaaaggaagaaaccccgcgggtccagcgtctactcacacaggtggactgatggctgataaatcccagcaggagccaaaagagcagccacagcacccatctactcacacaggtggactgatggctgataaatcccagcaggagccaaaagaggagcca

SEQ ID NO: 260948 - DNA, 1236 bp, Homo sapiens
cacagggcagccccgacaacagtgcggccagggactcaggcggccagacgtccgccgggtgtccctctggctggctgggcacgagacggcggggcctggtgatggaggccccccagggcagcgaggccacactgcctggccctgcccctggcgagccctgggaagcaggcggcccccacgcggggccacccccggctttcttttcggcatgtccagtctgtggaggactcaaggtaaacccccctccttgagagccgcagatcccgccccgcggctgcaaaggggctgaatttgcccccagatggcagaggaagtggcgccagcctccttgcagactggtgctctgtgttctgtgggagggaccgggggtctcccggagaggggagctggagggcgcgccctgtggctgccaccggaggaaggggctgacttggggaggtgagttctggaaggcaggggctctgggtctggcaggtcggggtcaccagagccccaatgcccagctgcttcactccgtgtcccccacccctgaggatcaggtgagtgctgcacctctgttggctcgtgccttgcactggggtgccaagggctggaggccctgccgctggccttgtcctccttgggcctcacgcccccttcgggggtggccggttctccccatcacctctctggggcagtcacaccacctgttaagcatcaagctaccacagaggctccggcacctgggctccaccagcccagccccctgggctccgtgtgcgctgggcctcatccccatctatgggaggaaactgaagctcaggaggctgtgtggcttgcggggtctctgggttctgggccccactgttccccagtgaagcccttgtgggaaggttccgggagcaggtggtgtcctcagagcagcctcgcctgctgaccccactgggagaggcgccgtgcctcgggcccctggtgggagctccgctggctcctgtctgaacctcctcgcagggccaaaggctggcttggcctgtgtttcccctggcccaggcctcagcccctgcgtcggaggtggggctgtgttgggcccattgtcccccgccctgggtggcttcctcttgcacagcctggagcctgccctgaccacagcccagcagctccctgtgaacacctctttgtcccttcactgtcggctgtttctaaacccagacactgtttgtaatagactggaaataaaatgttcttttcttacaaaat

SEQ ID NO: 260949 - DNA, 500 bp, Homo sapiens
tggctgccgctgctttaatacttttagaggccctcaaaataggtagaggcctttcctgcagggtctgagaaggccaccgcagtcatttcttccattctgtcagacataattcctcagtttagccttcccacctcaatacagtctgataacagacgagcctttattagtcaaatcagccaagcagtttttcaggctcttagtattcagtgaaagctttatatcccttacggtcctccgtcttcaagaaaagtagaatggactaaaggtcttttaaaaacacacctcaccaagctcagccaccaacttaaaaaggactggacaatacttttaccactttcccttctcagaattcaggcctatcctcagaatgctacagggtacagcccatttaagctcctgtatagacgctcctttttattaggccccagtctcattccagacaccagaccaacttagactgtgcctcaaagaaaaaaaaaaattgtcatccctactatttt

SEQ ID NO: 260950 - DNA, 403 bp, Homo sapiens
ttcagtgaaccgagattgcgtcactgcactctagcctgggcacagagtgagactctgtccaaaaaaaaaaaaaaaaaaaagcaaaggaggagtagcctagccttaaagagccagggacttgaacactgtcattgctgtcatttctctctttctttctcagctcttttctacatgctgccttctttcttctggctttctccattgagggtgcaggcatgatgtcagaccactcctcacttccatccttgcagccctataaccagacaattaggagcaaagcgttcttgattggttagggaagcatgccaataggctcttctaggatcacgtgaccttccctaaactgatccctgaatgcccacccttaaacctgagtcatatgcttacctctagctaggggtct

SEQ ID NO: 260951 - DNA, 698 bp, Homo sapiens
gttgaagtggggggatcacttgagcccaggagttcgaggttacagtgagctataactgcactcgtcctttctttggttgacagagaaagactctgtctctaaaaaagaaaaaaccaagactggtagttctggccctcatggggtcaatcatccagctaggcagccaagactatcagtaacaaaagatgccgagggataaagtccagagcagcagaatcccagggctgcagcatctcagtgcttaccccaagcattaaggcccagagctgctcccgttggagcataggttcatagccccagctcccctgagccctgcacagctctgtcccctgagatggggatgctctccactcatcactggcacaagccacctgagtagcaggcaggtatggtggctggtggctgcagcaaattctgacctggcagttgtcctcaacccctttctcccttccacagacctacaggccagaaagtacatgtctttccaaaatgtgtcctagtaccccaacccacactcagtattgagctcctcctacatctgccaggccatggatctatactaagtaagtgtccacccaggcctgtccagttgctgcagccaattcaggcaccctcctctcagattctggactcttcaagacctgagctgtagccttcctgcaacacagtctgctggcatctgagggtgaaggggcttg

SEQ ID NO: 260952 - DNA, 429 bp, Homo sapiens
aacaggtaagtcaaatttaacagcaggtaacacatagaaagcagctttctgtttgaaatagctgagttcgtcaattaaagacgtacaaatatcccaactttaagaaaattttgaaggtttaaaaatgtgtggatgtacaaagacgttgaactttgaaatacatcaggttgatatgcataacctcaaaataccaactcctatccagccaaggtcaagggaatatcacacaaataggggagaattaggtaattgcacaatagactgaaatgaactgattgaaggagggtttactgaagcatgggggtaatgttggatattcaacataggcttatttcctgtgtgtatatgttgtgttgagctgtttctcttgtagaaattgaagtttaaggtagttcttgtgtagctttgagacagtgccctaaatgaaga

SEQ ID NO: 260953 - DNA, 545 bp, Homo sapiens
gcaaaaaaaaaaaaaaaaaaaaaaaaaactcgtgccgaattcggcacgagctcgtgccgaattcggcacgagcagaagaggccatcaagcaggtctttgcgttccaagggcctttgcgtcagatcactgtccttctgccatggccctgtggatgcgcctcctgcccctgctggcgctgctggccctctggggacctgacccagccgcagcctttgtgaaccaacacctgtgcggctcacacctggtggaagctctctacctagtgtgcggggaacgaggcttcttctacacacccaagacccgccgggaggcagaggacctgcaggtggggcaggtggagctgggcgggggccctggtgcaggcagcctgcagcccttggccctggaggggtccctgcagaagcgtggcattgtggaacaatgctgtaccagcatctgctccctctaccagctggagaactactgcaactagacgcagcccgcaggcagccccacacccgccgcctcctgcaccgagagagatggaataaagcccttgaaccagc

SEQ ID NO: 260954 - DNA, 483 bp, Homo sapiens
gggggcccagcagccctcagccctccaggacaggctgcatcagaagaggccatcaagcagatcactgtccttctgccatggccctgtggatgcgcctcctgcccctgctggcgctgctggccctctggggacctgacccagccgcagcctttgtgaaccaacacctgtgcggctcacacctggtggaagctctctacctagtgtgcggggaacgaggcttcttctacacacccaagacccgccgggaggcagaggacctgcaggtggggcaggtggagctgggcgggggccctggtgcaggcagcctgcagcccttggccctggaggggtccctgcagaagcgtggcattgtggaacaatgctgtaccagcatctgctccctctaccagctggagaactactgcaactagacgcagcccgcaggcagccccacacccgccgcctcctgcaccgagagagatggaataaagcccttgaaccagc

SEQ ID NO: 260955 - DNA, 834 bp, Homo sapiens
gggggcccagcagccctcagccctccaggacaggctgcatcagaagaggccatcaagcagatcactgtccttctgccatggccctgtggatgcgcctcctgcccctgctggcgctgctggccctctggggacctgacccagccgcagcctttgtgaaccaacacctgtgcggctcacacctggtggaagctctctacctagtgtgcggggaacgaggcttcttctacacacccaagacccgccgggaggcagaggacctgcaggtggggcaggtggagctgggcgggggccctggtgcaggcagcctgcagcccttggccctggaggggtccctgcagaagcgtggcattgtggaacaatgctgtaccagcatctgctccctctaccagctggagaactactgcaactagacgcagcccgcaggcagccccacacccgccgcctcctgcaccgagagagatggaataaagcccttgaaccagcaaaaaaaaaaaaaaaaaaaaaaaaaaacaacagaaacccacacaccaaaccaacacacaatacagaaaacaacaccacagagaggcgggggcggcgcgccatatgaaaaactccccccggaggggagcgcgccacatttttccgcgcaccccgcacttttcgtggagcaacccgggggggcccccctaaaaagggaggcgtcacataaacaccgaccacaccgccgaccgcgcccgaaaaaacagcgcgccgcgtgacgcggcaaacaacgcgcacagcgggaccaaccccgaggggaagaagagcccccccaacacgcgggggggggcgcacaaactggggcccacaact

SEQ ID NO: 260956 - DNA, 548 bp, Homo sapiens
ttgacgttggtcttgtcggcaggagacagctcgtgccgaattcggcacgagcggcacgaggggcacgagctgcatcagaagaggccatcaagcaggtctttgcgttccaagggcctttgcgtcagatcactgtccttctgccatggccctgtggatgcgcctcctgcccctgctggcgctgctggccctctggggacctgacccagccgcagcctttgtgaaccaacacctgtgcggctcacacctggtggaagctctctacctagtgtgcggggaacgaggcttcttctacacacccaagacccgccgggaggcagaggacctgcaggtggggcaggtggagctgggcgggggccctggtgcaggcagcctgcagcccttggccctggaggggtccctgcagaagcgtggcattgtggaacaatgctgtaccagcatctgctccctctaccagctggagaactactgcaactagacgcagcccgcaggcagccccacacccgccgcctcctgcaccgagagagatggaataaagcccttgaaccagc

SEQ ID NO: 260957 - DNA, 515 bp, Homo sapiens
gcaaaaaaaaaaaaaaaaaaaaaaaaaactcgtgccgaattcggcacgagctcgtgccgaattcggcacgagcagaagaggccatcaagcagatcactgtccttctgccatggccctgtggatgcgcctcctgcccctgctggcgctgctggccctctggggacctgacccagccgcagcctttgtgaaccaacacctgtgcggctcacacctggtggaagctctctacctagtgtgcggggaacgaggcttcttctacacacccaagacccgccgggaggcagaggacctgcaggtggggcaggtggagctgggcgggggccctggtgcaggcagcctgcagcccttggccctggaggggtccctgcagaagcgtggcattgtggaacaatgctgtaccagcatctgctccctctaccagctggagaactactgcaactagacgcagcccgcaggcagccccacacccgccgcctcctgcaccgagagagatggaataaagcccttgaaccagc

SEQ ID NO: 260958 - DNA, 601 bp, Homo sapiens
gttccagggtcaggacaccatcctggactacacactccgcgaggtggacacggtctagcgggagcccagggcagcccctgggcaggagacgtggctgctgaacagccgcaaaccatcttcacctgggggcattgagtggcgcagagccgggtttcatctggaattaactggatggaagggaaaatctcgtgccgaattcggcacgagatgcgcctcctgcccctgctggcgctgctggccctctggggacctgacccagccgcagcctttgtgaaccaacacctgtgcggctcacacctggtggaagctctctacctagtgtgcggggaacgaggcttcttctacacacccaagacccgccgggaggcagaggacctgcaggtggggcaggtggagctgggcgggggccctggtgcaggcagcctgcagcccttggccctggaggggtccctgcagaagcgtggcattgtggaacaatgctgtaccagcatctgctccctctaccagctggagaactactgcaactagacgcagcccgcaggcagccccacacccgccgcctcctgcaccgagagagatggaataaagcccttgaaccagc

SEQ ID NO: 260959 - DNA, 501 bp, Homo sapiens
  misc_feature (472)..(472): n is a, c, g, or t
  misc_feature (476)..(476): n is a, c, g, or t
  misc_feature (483)..(483): n is a, c, g, or t
  misc_feature (485)..(485): n is a, c, g, or t
  misc_feature (497)..(497): n is a, c, g, or t
ggcggccgctcgcgatctagaactagcatcaagcagatcactgtccttctgccatggccctgtggatgcgcctcctgcccctgctggcgctgctggccctctggggacctgacccagccgcagcctttgtgaaccaacacctgtgcggctcacacctggtggaagctctctacctagtgtgcggggaacgaggcttcttctacacacccaagacccgccgggaggcagaggacctgcaggtggggcaggtggagctgggcgggggccctggtgcaggcagcctgcagcccttggccctggaggggtccctgcagaagcgtggcattgtggaacaatgctgtaccagcatctgctccctctaccagctggagaactactgcaactagacgcagcccgcaggcagccccacacccgccgcctcctgcaccgagagagatggaataaagcccttgaaccagcaaaaaaaaaaaanaaanaaaaacnanaaaaaacaaaanacaa

SEQ ID NO: 260960 - DNA, 707 bp, Homo sapiens
  misc_feature (558)..(558): n is a, c, g, or t
gcaaaaaaaaaaaaaaaaaaaaaaaaaactcgtgccgaattcggcacgagctcgtgccgaattcggcacgagcagaagaggccatcaagcaggtctttgcgttccaagggcctttgcgtcagatcactgtccttctgccatggccctgtggatgcgcctcctgcccctgctggcgctgctggccctctggggacctgacccagccgcagcctttgtgaaccaacacctgtgcggctcacacctggtggaagctctctacctagtgtgcggggaacgaggcttcttctacacacccaagacccgccgggaggcagaggacctgcaggtggggcaggtggagctgggcgggggccctggtgcaggcagcctgcagcccttggccctggaggggtccctgcagaagcgtggcattgtggaacaatgctgtaccagcatctgctccctctaccagctggagaactactgcaactagacgcagcccgcaggcagccccacacccgccgcctcctgcaccgagagagatggaataaagcccttgaaccagcaaaaaaaaaaaanaaaaacacaagaagaaaaaaaaaaaaaaaaaaaaaaaaaaaggggggagcgcacaaaaagatccccccgggaggggcacccagtgaggaggaccacagtagggggaacaagggggggcccaaaagggggggccgataaggggcgggggc

SEQ ID NO: 260961 - DNA, 833 bp, Homo sapiens
  misc_feature (684)..(684): n is a, c, g, or t
gcacgagcttgttatctcaaagagactcggagccagtgatccttttatcctgctacagtctttagggagctaaaaaaaaaaaaaaagcaggggctgccaaaactcttgatttcatatttccttctctaaatatatatgtatcctgttttttggataaaattttaccaagaatccaactcgtgccgaattcggcacgagcagaagaggccatcaagcaggtctttgcgttccaagggcctttgcgtcagatcactgtccttctgccatggccctgtggatgcgcctcctgcccctgctggcgctgctggccctctggggacctgacccagccgcagcctttgtgaaccaacacctgtgcggctcacacctggtggaagctctctacctagtgtgcggggaacgaggcttcttctacacacccaagacccgccgggaggcagaggacctgcaggtggggcaggtggagctgggcgggggccctggtgcaggcagcctgcagcccttggccctggaggggtccctgcagaagcgtggcattgtggaacaatgctgtaccagcatctgctccctctaccagctggagaactactgcaactagacgcagcccgcaggcagccccacacccgccgcctcctgcaccgagagagatggaataaagcccttgaaccagcaaaaaaaaaaaanaaaaacacaagaagaaaaaaaaaaaaaaaaaaaaaaaaaaaggggggagcgcacaaaaagatccccccgggaggggcacccagtgaggaggaccacagtagggggaacaagggggggcccaaaagggggggccgataaggggcgggggc

SEQ ID NO: 260962 - DNA, 863 bp, Homo sapiens
  misc_feature (714)..(714): n is a, c, g, or t
ttgacgttggtcttgtcggcaggagacagctcgtgccgaattcggcacgagcggcacgaggggcacgagctgcatcagaagaggccatcaagcaggtctttgcgttccaagggcctttgcgtcaggtgggctcagggttccagggtggctggaccccaggccccagctctgcagcagggaggacgtggctgggctcgtgaagcatgtgggggtgagcccaggggccccaaggcagggcacctggccttcagcctgcctcagccctgcctgtcacccagatcactgtccttctgccatggccctgtggatgcgcctcctgcccctgctggcgctgctggccctctggggacctgacccagccgcagcctttgtgaaccaacacctgtgcggctcacacctggtggaagctctctacctagtgtgcggggaacgaggcttcttctacacacccaagacccgccgggaggcagaggacctgcaggtggggcaggtggagctgggcgggggccctggtgcaggcagcctgcagcccttggccctggaggggtccctgcagaagcgtggcattgtggaacaatgctgtaccagcatctgctccctctaccagctggagaactactgcaactagacgcagcccgcaggcagccccacacccgccgcctcctgcaccgagagagatggaataaagcccttgaaccagcaaaaaaaaaaaanaaaaacacaagaagaaaaaaaaaaaaaaaaaaaaaaaaaaaggggggagcgcacaaaaagatccccccgggaggggcacccagtgaggaggaccacagtagggggaacaagggggggcccaaaagggggggccgataaggggcgggggc

SEQ ID NO: 260963 - DNA, 653 bp, Homo sapiens
ttgacgttggtcttgtcggcaggagacagctcgtgccgaattcggcacgagcggcacgaggggcacgagctgcatcagaagaggccatcaagcagatcactgtccttctgccatggccctgtggatgcgcctcctgcccctgctggcgctgctggccctctggggacctgacccagccgcagcctttgtgaaccaacacctgtgcggctcacacctggtggaagctctctacctagtgtgcggggaacgaggcttcttctacacacccaagacccgccgggaggcagaggacctgcaggtggggcaggtggagctgggcgggggccctggtgcaggcagcctgcagcccttggccctggaggggtccctgcagaagcgtggcattgtggaacaatgctgtaccagcatctgctccctctaccagctggagaactactgcaactagacgcagcccgcaggcagccccacacccgccgcctcctgcaccgagagagatggaataaagcccttgaaccagcaaaaaaaaaaaaaaaaaaaaaaaaaaaggggggagcgcacaaaaagatccccccgggaggggcacccagtgaggaggaccacagtagggggaacaagggggggcccaaaagggggggccgataaggggcgggggc

SEQ ID NO: 260964 - DNA, 710 bp, Homo sapiens
  misc_feature (561)..(561): n is a, c, g, or t
ttgacgttggtcttgtcggcaggagacagctcgtgccgaattcggcacgagcggcacgaggggcacgagctgcatcagaagaggccatcaagcaggtctttgcgttccaagggcctttgcgtcagatcactgtccttctgccatggccctgtggatgcgcctcctgcccctgctggcgctgctggccctctggggacctgacccagccgcagcctttgtgaaccaacacctgtgcggctcacacctggtggaagctctctacctagtgtgcggggaacgaggcttcttctacacacccaagacccgccgggaggcagaggacctgcaggtggggcaggtggagctgggcgggggccctggtgcaggcagcctgcagcccttggccctggaggggtccctgcagaagcgtggcattgtggaacaatgctgtaccagcatctgctccctctaccagctggagaactactgcaactagacgcagcccgcaggcagccccacacccgccgcctcctgcaccgagagagatggaataaagcccttgaaccagcaaaaaaaaaaaanaaaaacacaagaagaaaaaaaaaaaaaaaaaaaaaaaaaaaggggggagcgcacaaaaagatccccccgggaggggcacccagtgaggaggaccacagtagggggaacaagggggggcccaaaagggggggccgataaggggcgggggc

SEQ ID NO: 260965 - DNA, 677 bp, Homo sapiens
  misc_feature (528)..(528): n is a, c, g, or t
gcaaaaaaaaaaaaaaaaaaaaaaaaaactcgtgccgaattcggcacgagctcgtgccgaattcggcacgagcagaagaggccatcaagcagatcactgtccttctgccatggccctgtggatgcgcctcctgcccctgctggcgctgctggccctctggggacctgacccagccgcagcctttgtgaaccaacacctgtgcggctcacacctggtggaagctctctacctagtgtgcggggaacgaggcttcttctacacacccaagacccgccgggaggcagaggacctgcaggtggggcaggtggagctgggcgggggccctggtgcaggcagcctgcagcccttggccctggaggggtccctgcagaagcgtggcattgtggaacaatgctgtaccagcatctgctccctctaccagctggagaactactgcaactagacgcagcccgcaggcagccccacacccgccgcctcctgcaccgagagagatggaataaagcccttgaaccagcaaaaaaaaaaaanaaaaacacaagaagaaaaaaaaaaaaaaaaaaaaaaaaaaaggggggagcgcacaaaaagatccccccgggaggggcacccagtgaggaggaccacagtagggggaacaagggggggcccaaaagggggggccgataaggggcgggggc

SEQ ID NO: 260966 - DNA, 701 bp, Homo sapiens
ttgacgttggtcttgtcggcaggagacagctcgtgccgaattcggcacgagcggcacgaggggcacgagctgcatcagaagaggccatcaagcaggtctttgcgttccaagggcctttgcgtcaggtgggctcagggttccagggtggctggaccccaggccccagctctgcagcagggaggacgtggctgggctcgtgaagcatgtgggggtgagcccaggggccccaaggcagggcacctggccttcagcctgcctcagccctgcctgtcacccagatcactgtccttctgccatggccctgtggatgcgcctcctgcccctgctggcgctgctggccctctggggacctgacccagccgcagcctttgtgaaccaacacctgtgcggctcacacctggtggaagctctctacctagtgtgcggggaacgaggcttcttctacacacccaagacccgccgggaggcagaggacctgcaggtggggcaggtggagctgggcgggggccctggtgcaggcagcctgcagcccttggccctggaggggtccctgcagaagcgtggcattgtggaacaatgctgtaccagcatctgctccctctaccagctggagaactactgcaactagacgcagcccgcaggcagccccacacccgccgcctcctgcaccgagagagatggaataaagcccttgaaccagc

SEQ ID NO: 260967 - DNA, 680 bp, Homo sapiens
gcaaaaaaaaaaaaaaaaaaaaaaaaaactcgtgccgaattcggcacgagctcgtgccgaattcggcacgagcagaagaggccatcaagcaggtctttgcgttccaagggcctttgcgtcagatcactgtccttctgccatggccctgtggatgcgcctcctgcccctgctggcgctgctggccctctggggacctgacccagccgcagcctttgtgaaccaacacctgtgcggctcacacctggtggaagctctctacctagtgtgcggggaacgaggcttcttctacacacccaagacccgccgggaggcagaggacctgcaggtggggcaggtggagctgggcgggggccctggtgcaggcagcctgcagcccttggccctggaggggtccctgcagaagcgtggcattgtggaacaatgctgtaccagcatctgctccctctaccagctggagaactactgcaactagacgcagcccgcaggcagccccacacccgccgcctcctgcaccgagagagatggaataaagcccttgaaccagcaaaaaaaaaaaaaaaaaaaaaaaaaaaggggggagcgcacaaaaagatccccccgggaggggcacccagtgaggaggaccacagtagggggaacaagggggggcccaaaagggggggccgataaggggcgggggc

SEQ ID NO: 260968 - DNA, 617 bp, Homo sapiens
  misc_feature (588)..(588): n is a, c, g, or t
  misc_feature (592)..(592): n is a, c, g, or t
  misc_feature (599)..(599): n is a, c, g, or t
  misc_feature (601)..(601): n is a, c, g, or t
  misc_feature (613)..(613): n is a, c, g, or t
ttgacgttggtcttgtcggcaggagacagctcgtgccgaattcggcacgagcggcacgaggggcacgagctgcatcagaagaggccatcaagcaggtctttgcgttccaagggcctttgcgtcagatcactgtccttctgccatggccctgtggatgcgcctcctgcccctgctggcgctgctggccctctggggacctgacccagccgcagcctttgtgaaccaacacctgtgcggctcacacctggtggaagctctctacctagtgtgcggggaacgaggcttcttctacacacccaagacccgccgggaggcagaggacctgcaggtggggcaggtggagctgggcgggggccctggtgcaggcagcctgcagcccttggccctggaggggtccctgcagaagcgtggcattgtggaacaatgctgtaccagcatctgctccctctaccagctggagaactactgcaactagacgcagcccgcaggcagccccacacccgccgcctcctgcaccgagagagatggaataaagcccttgaaccagcaaaaaaaaaaaaaaaaaaaaaaaaaaaaaaaaaaaaaaanaaanaaaaacnanaaaaaacaaaanacaa

SEQ ID NO: 260969 - DNA, 997 bp, Homo sapiens
gcaaaaaaaaaaaaaaaaaaaaaaaaaactcgtgccgaattcggcacgagctcgtgccgaattcggcacgagcagaagaggccatcaagcagatcactgtccttctgccatggccctgtggatgcgcctcctgcccctgctggcgctgctggccctctggggacctgacccagccgcagcctttgtgaaccaacacctgtgcggctcacacctggtggaagctctctacctagtgtgcggggaacgaggcttcttctacacacccaagacccgccgggaggcagaggacctgcaggtggggcaggtggagctgggcgggggccctggtgcaggcagcctgcagcccttggccctggaggggtccctgcagaagcgtggcattgtggaacaatgctgtaccagcatctgctccctctaccagctggagaactactgcaactagacgcagcccgcaggcagccccacacccgccgcctcctgcaccgagagagatggaataaagcccttgaaccagcaaaaataaacatacacaatactaacactacaccaaaccaacataaacacaaaacacacaaaaataaaaaacaacaatacacaacaatacaaacaacacaaaacacaaacaaacacaagcctgcggcccgctatctcttatctatagctatcaaccaccaagtggagcggtcacagaatcaatacccgtcgacgaccgcgagcgaggcagtactaatactgatgacaagcggcaggaggggggagcgccgcccagactggcgagcgtgggcattgacacaccacggacagagggtgggcagggacaagagaaggtctgcccaactccgaggctgagccgcagcatgagccgaaaccaactagcagccgcgacagcgggcgacccttctaggatgagagagaggagacgaggacccagcacatagcgcaggccgaaggggcggggggcaatccaacgatggggagagcaaaggagagaagactg

SEQ ID NO: 260970 - DNA, 546 bp, Homo sapiens
gcacgagcttgttatctcaaagagactcggagccagtgatccttttatcctgctacagtctttagggagctaaaaaaaaaaaaaaagcaggggctgccaaaactcttgatttcatatttccttctctaaatatatatgtatcctgttttttggataaaattttaccaagaatccaactcgtgccgaattcggcacgagcagaagaggccatcaagcaggtctttgcgttccaagggcctttgcgtcagatcactgtccttctgccatggccctgtggatgcgcctcctgcccctgctggcgctgctggccctctggggacctgacccagccgcagcctttgtgaaccaacacctgtgcggctcacacctggtggaagctctctacctagtgtgcggggaacgaggcttcttctacacacccaagacccgccgggaggcagaggacctgcaggctggagaactactgcaactagacgcagcccgcaggcagccccacacccgccgcctcctgcaccgagagagatggaataaagcccttgaaccagc

SEQ ID NO: 260971 - DNA, 320 bp, Homo sapiens
ctggcgggcaggcgggcactgtgtctccctgactgtgtcctcctgtgtccctctgcctcgccgctgttccggaacctgctctgcgcggcacgtcctggcagtggggcaggtggagctgggcgggggccctggtgcaggcagcctgcagcccttggccctggaggggtccctgcagaagcgtggcattgtggaacaatgctgtaccagcatctgctccctctaccagctggagaactactgcaactagacgcagcccgcaggcagccccacacccgccgcctcctgcaccgagagagatggaataaagcccttgaaccagc

SEQ ID NO: 260972 - DNA, 526 bp, Homo sapiens
actcttactttggtaagataagtgtgtgtacacctatctatctcattttctgagccatatgcttcttgggggcaggaatcatgttagttatctctgtacccttggcacagtaagtacttaaatatgttagtttcctatcccccatagtactggtacaagaacctaaacccagtggtattcaataaatgctggataaggatgataacattaataacagccattcagcacaactccactaagttgtcagaccagtttaggatattggcatgaaaaatgctttttctcctggcccagacatttactcttaagatttgcctcctcctcaatagactccaggaaatagggttagttttaagttctagaaactctaatcattcctgttttctccaaactaagggcctgaaggaagactgcagatacctcatgaatattgatgagcctctgcggtcacatgaatattaacaacaccctgtggctttcgggaacagcagcccagctagaaggtctaatattaaccttggctagg

SEQ ID NO: 260973 - DNA, 526 bp, Homo sapiens
gttgcattcatccaccttaaatgaagcagagagttttgtcatggtatattaatactcttaagcaacgtaaaacatcaccccaaagagaaaaatcgtcttctgaatcatgtgtttggctgtcagggtgggcctgcagtcactgaatacaggccaggattccatctcttgcattggctgtagaatcagagacttgggtccatgataagccatttgttaaagctcattgagatcctgaaaaccaagcccatctctgctctgccttacagagttcatggcacatgagaagagaaggaaggatctgctcctgtgacctgggccaagatttctagaacccagcttaaaatttataagataagtagaacttgagtcatggtataaagttcctacagggcagttttctaatgagattttttcacttctaacaaagatgttctttagcctctccttgagctccaaatcttatttaagagagagagagagctagagcaagctagagaatgaataaaatacaaagcaaaacagacaa

SEQ ID NO: 260974 - DNA, 133 bp, Homo sapiens
gggaaatcccacgtaaggaaagcacgggtagtagagaaacttgggaacaaataacacctagaaactgaggcagcaagatgcaccttagtctaggaagccttcttgaaagaggggagtctctggtaagaattag

SEQ ID NO: 260975 - DNA, 647 bp, Homo sapiens
ctggtgaccccactttctgagccccctggttcaatctctctcatggggtggtgaggggtgctgccctctacaaggagggaagtggggacttgggggttgaatgactccttctgtagactttgacttcatcttcctgtttgcagtccttacctcccctctgtcccttgctgacttgtccctttaatttttttatttatttttatttatttatttatttttgagacagaatcccactctgtcacccaggctggagcgcagtggcccgatcttggctcacttcaacctccacctcccagattcaagcgattctcctgcctcagcctcctgagtagctgggattacaggcgcctgccaccatgcctggctaatttttgtatttttagtagcttcggggtttcaccacgttggccaggctggtctcaaactcctgacctcaggtgatccgcccgcctcagcctcccaaagtgctgggattacaggcatgtgcccccatacctggccttgtccctttaattctgagtcttgtcacagcaagttcccttgcttctgtctccccttctgcagattctcaaaaaaaaactaaacatcacaaaaaaaacatttttgggcgcttggccccgcgaaaagttctgaaaaccactttttgg

SEQ ID NO: 260976 - DNA, 308 bp, Homo sapiens
ctggtgaccccactttctgagccccctggttcaatctctctcatggggtggtgaggggtgctgccctctacaaggagggaagtggggacttgggggttgaatgactccttctgtagactttgacttcatcttcctgtttgcagtccttacctcccctctgtcccttgctgacttgtccctttaatttttttatttatttttatttatttatttatttttgagacagaatcccactctgtcacccagccaagatcgcaccattgcactccagcctgggcaacaagagcgaaactctgtctcaaaaaaaa

SEQ ID NO: 260977 - DNA, 305 bp, Homo sapiens
ttcccaaggaggtgaggttgcctgtggccccctcccagggcacagtcccacccctccagtagtgcactctgtcctccctggtaggtacaggcttttccccaccaccatggtgcagccatgcctgcccccaacaccactggtgcagctccatcctccacgcagtggtgcagccccatcccagcgcccattcgagctgctgtcccattgcagggggcattgtgacagctgaggacctgaacaactactgtgctgagctgatcgagcacccgctgaacatcagcctgggagacgcggtgctgtacatg

SEQ ID NO: 260978 - DNA, 494 bp, Homo sapiens
cctgcaaaggacatgatctttttcttttttatggctgcagggtctggtatcttttgcttaacataattatctgtgattcatccgtattgctgcatgcaaatagtttgttttttaatgccaagaattttccaaggtatgactttacagtatttgttcataacattatttatgaacatttggattgtcctcagttttgggctattagacgtaaagctgaccttaatttcatggcataggtaatgattcagaattgtattgggttgcagtgtttatcacaatactgtaaattagaaatttaaattcctgttaggaaggagaaaagccagcagtaattgtaattacagataagcagtatctgtaatttttttgaagacatgccatagaaagaataattcacatagaaataatgttttgcaaggtttcatgtatagtgtacgggccaggtagatgtagacaattccttggacttttgttggctttctgggaaaaaaaaa

SEQ ID NO: 260979 - DNA, 508 bp, Homo sapiens
gtggagaagctcagaactcctcctaggaagaaaatggatccaccctttccctggagaggagataaaggagcctgttggtggatcaaatgaggctttagctggggtcgcccaggccctattcaacagaggacacagctgtgtgagtgagaacaaagacctgctacttctcaggcaattttagacacactgtgttaatacatgacacaactgggggcactcttgggaaaggagtttgaacaatatcctcaaagtggaaactgtgtttcgtttaggtctaaaaccactgacaaattttgtatttcatgttagacatttgatgtttttggatgttttatgacagtcacgcatttctttgtaatcagaaaatattagggtataatcattcatatgtgtttgtgtattgaaaagtacagcaaaatgaagatatatgtagatcctccccctacaagtcaaaaagactgtagctcttttctctcccaccctgagtcaataaaggactgatatctac

SEQ ID NO: 260980 - DNA, 379 bp, Homo sapiens
atcaaaaaaatacttgtaggatattcttttttttttgagacggagtctcgctccagcctggtcaacaagagcataactccgtctcaaaaaaaaacaaaacaaaacaaaaaaaaaacaaatttagcaaggaagcatactagagtaatatataacgtaaagaatcctcttgttagtgtaactactcccaacctaatctagtccgagagtcccaagttatttatgtggtaatttcataagatagggaaaatgtgtatttacattttaaagttgtattcaaatagcaaatatttattgatcacctactttgcaagtcagagcatcatctctgtcaaatgctattctgtatctggatatttccaagcttcccttagcccaatca

SEQ ID NO: 260981 - DNA, 323 bp, Homo sapiens
ctagtaactagcccagttgttatcagggggagatacaaggtagaagaattctacctggaatttcaatcctaactaaagagtgtgaaaatttgagggaattgttctagtgatctttagagaatgcagtatttttgatataccagaagaaagtacactctgtgtattcaaaatgtgtctttatttgtaattgaagaatactctgctgtattataacttctcagagagtgtgcagaatctttagctaggtaggaggatatagttataaaagaaaaacaggaagtattagaatctgatacggtggaagggaacctaaacctgaagta

SEQ ID NO: 260982 - DNA, 141 bp, Homo sapiens
ggagtttaaattggtattgcattggagggatgattctagcagtaccaatcattatttaaatgtttgagttttctgaccaagcttctgagattcttaacagaaaaagccatgtacaaagatgtttatgacagcattatttac

SEQ ID NO: 260983 - DNA, 390 bp, Homo sapiens
aaaccagtagtaagttcaaaacagccaccctgcagatttccttgctcacctcttttgtcattctgtaacttttcctgtgccctgaaatagaacgcacacccgtactactttacttcatcgagattcttactctgttcctctgtggctactctcccatcttaaaaatgatctgagtagtcctttacgcgtcgttcctgccccctatcctgcacatctcattttccggtgtgacagcaagttcagcatctccaggactttgctctgctctcactccttaaacccttaaaagaaaaagctaagcctaagctatttgcctttaagtcataaagacaccagaagtatttaaagtacagatctagaagaagaagaacgcctagatcaaactgaccc

SEQ ID NO: 260984 - DNA, 556 bp, Homo sapiens
tgccgaggcaaacctcctcacaccagccaagtgcacagatggtgggaggaagaggcagatctgcaggctggaaagttgcagctgcagccatggcagccaccacctccctgccccacccaagcggccccactgcatctgctttcactttatgtcagaacctcctgctcccaggccagctctgcacagacagtgagatgacttccaatgcaacacatccggggacttcccattattgaaaaacagatcctcccatgtcctggcctttgggatcctggctggctggcttcatgtatgggcacagggtgggaccaagtaagacctgaccagtaaatcttggatacttaatggccctcaaaccttccagtaagaagaatgactcctttctgaactgctgtccggcccatgcctggtcactggacgcttggaacccatttattctggttttgtgaagaatttcctagtggatcatggccaacagttgtcaacaacaacaacaacaacaacaacaaaggcatgagagacctgcatgcaaatcctgactcttcccattcctggc

SEQ ID NO: 260985 - DNA, 479 bp, Homo sapiens
gtcagttacagattgatctccttgttctgctccttcccctcttctcactactgcatttaactagtcttaaagaaaaaatttcttctcccccagtaagtgaaagataggaaaatatttgaaaaaaagtgaaataactttcaaatcctatgtatttggagagcacggaaaaatgtcctgcaattccagttgaatgaaatgttgcatataggccgatctacccagacagaaagtcgattaatggttgcctagggctgggcgcagggaaagaggtaatgggaagtgactgctaatgggtatgggatttctttttgggatgatgaaatgttctaaaattagactggggtgatgggtgcacaactctgagtatattaaaaactattgaattgtacacttcaaatgggtatggtatttgaattttgtctcgataaggcagctaaacatttttttatgctgatactacctcagtagaaaatgggcta

SEQ ID NO: 260986 - DNA, 535 bp, Homo sapiens
aattagctcagagaaatgccaagtgtgataaaaaatgaaatagattgacattccttccttccccagtgattcattggccagggtgaggaggtagaagaagaaataccaggaaccacatatccaaacaattttgccctcttctgttttgtagaaagtatttgaggtgacgctcacaattcaaggagatatctcagggtgtaagatttataccaatttaaactacaagtccagagaaaaggaagtttgggaaattccctttaactgattttgggagaaaaaagacaggattgagaatcagggaaacatttctgattttatgtgtactgggacattcttgctgatgtaagataacatattttgcagtagatctttaatttatgcctctcactggagccccctcttcattcccatgtagctgaaccccactccttcctcttgtaagttgttcttttgcattattttacaaaagtaagccatgcttatttgaaaagatttatgcaatataatataggaaataaaactgaagataaaactg

SEQ ID NO: 260987 - DNA, 491 bp, Homo sapiens
gttgtggaatggggaatggctacattctttaagtggcacccagttcactgtaattttaaatgattaaatgatcataataacaagttaagtgtatgtgtttaagagtataaaaaagttaagttgtggataatctgcattcagtgttattaaaggtagaagacagggttgtgaaattttaaaaagcaggataaaagtattcaagagaaatgaagtgtaataaggagtaatctaaaatgattacagataaatcagtgcttaaagattgaaaatcatctcaatgagatgactcaagaatcagaaaattactttggatgttggtagagttggcaaaatgacatatctatatctgcttggtcaggtttcactatctaatgtctattagtaaattaattatttttacaactagaaattcaactaagtatttaaaagctaaggatataggaagaattacagactgatagagaagatgggagaaaagaaagaacagaata

SEQ ID NO: 260988 - DNA, 420 bp, Homo sapiens
aacaaagtgtgctagttattttgttgcctttcagatcaaatccacagactccttctaccctgccctttattccaagaggctgccctctgcagactatgatacccaggctccttgccttctggctcctggttaggcttgggtaatcagaagcatgagaaatgaatcagaagttgggaggagagaggggtggagaaatgttgtcactctacaccctcccttctgggctgggctgtggcagtggctgtgctcgtctatatctggtcacagctctgcctggtggcccatacccatggctacacctctcactccgttcccacaacagctccttcatcattcaccttcagccctagggggttggaactagtgtccccctgttcccagccctacatgcttctctatcctttgtctgtttcccttcgt

SEQ ID NO: 260989 - DNA, 552 bp, Homo sapiens
gactctggcagtggtgagtagcaattcttgctaggacctgcatttttcttcctcttaatttgctgttttcccacccttttctattcttgctacattttcatgcttctcactcctgctccaaaatgccacttcccacctaccagtactgttcttaaacatctcctgtgtctcaggaagtcactatttaagaacagacttatttaccctttgagccttagtcccttcatctgtaatatgggaataatgacaataaaaactctatatggggccaggtgcagtggctcaagcatgtaatcccagcactttgggaggccaagacaggtggatcacttgaggtcaggagttcaggaccagcctggccaatgtggtgaaaacctgtctctactaaaaatacaaaaattagctgggcgtggtggtgcacacctgtaatctcagctactcgagacgctgaggcaggagaatcgcttgaacccaggaggcagaggttgtagtgagctgagatcgtgccactgcaccccagcttgggcaacagagcaaaactctgtctttaaa

SEQ ID NO: 260990 - DNA, 656 bp, Homo sapiens
catctatgttggtacatgtttaaatagtttgtccttttcagtactaagtagtattccattgttaaacattttatttatacattcacctgctgatggacatttgtgttgtttccagtttgggttactttaaataaagtgaaagaacacttgtgtacaactctttttgtggacacatgctttcatttctcttggataaacacctaagagtagaattgctgaatcttatggtaaatctatgtttaactttataagaaactgccaaaactgttttccaaagtggttgtacaattttatattcccataagcggtgtatgcaggaaaatctcagtggtttcatatcctcatcaacagttagtatttggggtccttttaattttagccactctaatgttctaacggatgtgtagtgatatcacattgtggttgtaattttcatttccctaatgatgaatgatattgagcatctagtcatggatatattggctatctgtgtatcttctttggtaaagtttgttcaaatgtgtccattttattgactttataattggttctatcagtgagttgaaagacttctttatatattctagatatcagtccttataatataaaatagtatacacacacacacacacacacacatatatattttatctgtc

SEQ ID NO: 260991 - DNA, 642 bp, Homo sapiens
ttggtacttgaacaagcttcttcttagaacccttggcatttgaactagacattgaagggatttgagatgaaatacgtcaggaaaaaaggctgaatatttgaggcagaggaagtatttttggcaattttgtgaaatattcgttagaatatttgtgttgagtaggaaagttaaattaagaggcctctaattggcattctcagcacccaggtgaatagtgctgttgacagtggtatggagatagtattgaaatgtgatttaccctgactactatgttggtatcagtggactccaggaggtaaagttagagaaaaagggtacagcctagtaaacagcctttattgagaatttgctatttaagcctcacaacaaccttcttaggtaatttatagatataggaactaagtaagccacagagatattgagtaactcagcaagaggcagagccaggatcccaggcagtgtgtgtccacagccctccctccacaatgggtgctgccatgaatctagaatctttcatcaaggaaaatttttcagtggtgccatcaaacttgccatttcaaaacttgccatttctgtagtgaacattataatcccacagacacacgtggtacacacacacctttactatagatcatcaagaag

SEQ ID NO: 260992 - DNA, 431 bp, Homo sapiens
agaaaaactttcaagtgctcatgattcctttaaataaattaaaatcagcatctgttcacatgcaagagctttagtcatcttccactttaaaaacaggtttattacataaaagcagactaacccagatgatcctaaaaatttccagcatagttctccaacactacgaatttcaagtagtaacaataccagcttagacttaaataaaccagatttctctctaaagcatctccatccaccataaaaaagttattttgagcaacaaagattttttaaatccagtaaattctagacatgccatgttacgcagctaccactttgagctcctgctttgatgccataccacctgccattagtcaatttgatgataaccaaatttacaaagaaatctgaaacaatgaagcaatctagtgtgagagggtacaccactgtgc

SEQ ID NO: 260993 - DNA, 365 bp, Homo sapiens
caccccgtccgggagggaggtggggggggtcagccccccgcccggccagccgccccgtccgggagcttactctgagggaggtctgaatgccatattgtgagcggccctgctgaaagacccatgtggcaaggatctgagatcattggccaacaggctgcaaagagtcctaccaacagccaggctggtgttcttggaagtggatcttctcctactctcctacttgagatgactgcagccccagctaacacttcgattgcagccttgttaagatatcacgggccagacacacccagctaagttatgcctgagttactagcccacagaaatgataagataataaatatttgctgttttaagctgctaag

SEQ ID NO: 260994 - DNA, 325 bp, Homo sapiens
cctctcgctctctttcattctctagcttactctgagggaggtctgaatgccatattgtgagcggccctgctgaaagacccatgtggcaaggatctgagatcattggccaacaggctgcaaagagtcctaccaacagccaggctggtgttcttggaagtggatcttctcctactctcctacttgagatgactgcagccccagctaacacttcgattgcagccttgttaagatatcacgggccagacacacccagctaagttatgcctgagttactagcccacagaaatgataagataataaatatttgctgttttaagctgctaag

SEQ ID NO: 260995 - DNA, 1136 bp, Homo sapiens
tgcgctgccgcaacgaatagggtttctggctgcgtaggagggacgggggcgcggagctctgggaaactgcgccaggcgcccgaaaggtgaacacgggagtcgcgcgtctcccccgcagcagcggtaaagcggaagttatgctgcagccggagcccgggcttcctcccggagccgcgtcccggggcccggctgccccgagctgagcggagcatcctttccgggtgaggggaggagaggacttggcgcgttcccctcgctgccccgggagccgcagccgcggtgttcatgccgcggagcagccaggctcctccgacgaaaacctgcatttatttgctggcgggacgtttgccttgaaaatggacaaagacgccgccctccggggtattcctgtttgcctgaccctgagagcgcctttttgcttcaagacgtgttggatgctcctgttctccgaattctgatacgcttctgggcataatactgaaacacaaaactgcttttgctctctctgtggttggccgaaaataggattctttttcgtgcaggtgtcgttgtttagtcggctttactaacatattgaaatggctctacccaaagacgccatcccctcgctgtccgagtgccagtgcgggatctgcatggaaatcctcgtggagcccgtcaccctcccgtgtaaccacacgctgtgtaaaccgtgcttccagtcgaccgtcgaaaaggcgagtttatgctgtcccttctgtcgccgccgggtatcgtcgtggactcggtaccatacccgaagaaattctctcgtcaacgtggaactgtggacgataattcaaaaacactatcccagggagtgcaagcttagagcgtctggccaagaatcagaggaagtgggagaaatttggacacagagacagacacgcacagaaggaagatgatgtaaagacacagagtaccacgtgaggctggaggactggagtgatgtatttacaacccaaggaacgtctaaggttatcagcatactgtcagaagcaaggaagaggcaaggaaggatcccctacaagtttgaaaagtgtcatggccctgctgacacatttattttggacttttagccagaactgtgagaaaataaattgctgtattttcaagtc

SEQ ID NO: 260996 - DNA, 462 bp, Homo sapiens
ttaggagtttgattggggttgcattgaacttaatagaacaatttggggagaattgacatccaaacagcaacagagtccttgtatccatgaaaatagtatatttctctgtttgtgtaggtcaccttcaatttttttcagtaatgaagttaaaataaggtcattagaatgggccctaatccattatgactggtttccttataaaaaggagaaatttggacacagagacagacacgcacagaaggaagatgatgtaaagacacagagtaccacgtgaggctggaggactggagtgatgtatttacaacccaaggaacgtctaaggttatcagcatactgtcagaagcaaggaagaggcaaggaaggatcccctacaagtttgaaaagtgtcatggccctgctgacacatttattttggacttttagccagaactgtgagaaaataaattgctgtattttcaagtc

SEQ ID NO: 260997 - DNA, 431 bp, Homo sapiens
gtggctcacgcctgtaatcccagcactttgggagccttatgttgataggaatctgattcccattcctttttgggaatgagttgggcagcatacaggcacagaaagacagatgtttgagacctttgcttctgagattttaaaaaatgattaccgctgggcgcggtggctcacgcctgtaatcccagcactttgggaggccgaggcaggcggatcacaaggtcaagagatcaagaccagcctggccaacaaggtaaaaccttgtctctactaaaaatataaaattagctgggcgtggtggtgcatgcctgtaatcccagctactcatgaggctgaggtgggagaatcgcttgaacccaggaggtggaggttgcggtgagccggatcgtgccaatgcactccagtctgggcaacaagagcgaaactccatctca

SEQ ID NO: 260998 - DNA, 2009 bp, Homo sapiens
  misc_feature (2003)..(2003): n is a, c, g, or t
  misc_feature (2005)..(2009): n is a, c, g, or t
ggccgtgggtgtacgcggcgcagcgcggcagtcctgatggcccggcatgggttaccgctgctgcccctgctgtcgctcctggtcggcgcgtggctcaagctaggaaatggacaggctactagcatggtccaactgcagggtgggagattcctgatgggaacaaattctccagacagcagagatggtgaagggcctgtgcgggaggcgacagtgaaaccctttgccatcgacatatttcctgtcaccaacaaagatttcagggattttgtcagggagaaaaagtatcggacagaagctgagatgtttggatggagctttgtctttgaggactttgtctctgatgagctgagaaacaaagccacccagccaatgaagtctgtactctggtggcttccagtggaaaaggcattttggaggcagcctgcaggtcctggctctggcatccgagagagactggagcacccagtgttacacgtgagctggaatgacgcccgtgcctactgtgcttggcggggaaaacgactgcccacggaggaagagtgggagtttgccgcccgagggggcttgaagggtcaagtttacccatgggggaactggttccagccaaaccgcaccaacctgtggcagggaaagttccccaagggagacaaagctgaggatggcttccatggagtctccccagtgaatgctttccccgcccagaacaactacgggctctatgacctcctggggaacgtgtgggagtggacagcatcaccgtaccaggctgctgagcaggacatgcgcgtcctccggggggcatcctggatcgacacagctgatggctctgccaatcaccgggcccgggtcaccaccaggatgggcaacactccagattcagcctcagacaacctcggtttccgctgtgctgcagacgcaggccggccgccaggggagctgtaagcagccgggtggtgacaaggagaaaagccttctagggtcactgtcattccctggccatgttgcaaacagcgcaattccaagctcgagagcttcagcctcaggaaagaacttccccttccctgtctcccatccctctgtggcaggcgcctctcaccagggcaggagaggactcagcctcctgtgttttggagaaggggcccaatgtgtgttgacgatggctgggggccaggtgtttctgttagaggccaagtattattgacacaggattgcaaacacacaaacaattggaacagagcactctgaaaggccattttttaagcattttaaaatctattctctccccctttctccctggatgattcaggaagctgacattgtttcctcaaggcagaattttcctggttctgttttctcagccagttgctgtggaaggagaatgctttctttgtggcctcatctgtggtttcgtgtccctctgaaggaaactagtttccactgtgtaacaggcagacatgtaactatttaaagcacagttcagtcctaaaagggtctgggagaaccagatgatgtactaggtgaagcattgcattgtgggaatcacaaagcaaatagtactccagaaagacaaatatcagaagcttcctattctttttttttttttttttttttttgagacagggtctttctctgttgcccaggctagagtgcactggtgatcacggctcactctagccttgaattcctgggcccaagcaattctcccacctcagcctcctgagtagctgggactacaagtgtgcaccaccatgcctggctaattttttgaatttttgtagtgatgggatctcgctctgttgcccagggtggtctcgaactcctggcctcaagcgatcctcccacctcgacctcccaaagtgctgggattacaggtgtgagccacctcgcctgggcccccttctccatatgcctccaaaaacatgtccctggagagtagcctgctcccacactgtcactggatgtcatggggccaataaaatctcctgcaattgtgtatctcaaanannnnn

SEQ ID NO: 260999 - DNA, 1864 bp, Homo sapiens
  misc_feature (1858)..(1858): n is a, c, g, or t
  misc_feature (1860)..(1864): n is a, c, g, or t
ggccgtgggtgtacgcggcgcagcgcggcagtcctgatggcccggcatgggttaccgctgctgcccctgctgtcgctcctggtcggcgcgtggctcaagctaggaaatggacaggctactagcatggtccaactgcagggtgggagattcctgatgggaacaaattctccagacagcagagatggtgaagggcctgtgcgggaggcgacagtgaaaccctttgccatcgacatatttcctgtcaccaacaaagatttcagggattttgtcagggagaaaaagtatcggacagaagctgagatgtttggatggagctttgtctttgaggactttgtctctgatgagctgagaaacaaagccacccagccaatgaagtctgtactctggtggcttccagtggaaaaggcattttggaggcagcctgcaggtcctggctctggcatccgagagagactggagcacccagtgttacacgtgagctggaatgacgcccgtgcctactgtgcttggcggggaaaacgactgcccacggaggaagagtgggagtttgccgcccgagggggcttgaagggtcaagtttacccatgggggaactggttccagccaaaccgcaccaacctgtggcagggaaagttccccaagggagacaaagctgaggatggcttccatggagtctccccagtgaatgctttccccgcccagaacaactacggatgggcaacactccagattcagcctcagacaacctcggtttccgctgtgctgcagacgcaggccggccgccaggggagctgtaagcagccgggtggtgacaaggagaaaagccttctagggtcactgtcattccctggccatgttgcaaacagcgcaattccaagctcgagagcttcagcctcaggaaagaacttccccttccctgtctcccatccctctgtggcaggcgcctctcaccagggcaggagaggactcagcctcctgtgttttggagaaggggcccaatgtgtgttgacgatggctgggggccaggtgtttctgttagaggccaagtattattgacacaggattgcaaacacacaaacaattggaacagagcactctgaaaggccattttttaagcattttaaaatctattctctccccctttctccctggatgattcaggaagctgacattgtttcctcaaggcagaattttcctggttctgttttctcagccagttgctgtggaaggagaatgctttctttgtggcctcatctgtggtttcgtgtccctctgaaggaaactagtttccactgtgtaacaggcagacatgtaactatttaaagcacagttcagtcctaaaagggtctgggagaaccagatgatgtactaggtgaagcattgcattgtgggaatcacaaagcaaatagtactccagaaagacaaatatcagaagcttcctattctttttttttttttttttttttttgagacagggtctttctctgttgcccaggctagagtgcactggtgatcacggctcactctagccttgaattcctgggcccaagcaattctcccacctcagcctcctgagtagctgggactacaagtgtgcaccaccatgcctggctaattttttgaatttttgtagtgatgggatctcgctctgttgcccagggtggtctcgaactcctggcctcaagcgatcctcccacctcgacctcccaaagtgctgggattacaggtgtgagccacctcgcctgggcccccttctccatatgcctccaaaaacatgtccctggagagtagcctgctcccacactgtcactggatgtcatggggccaataaaatctcctgcaattgtgtatctcaaanannnnn

SEQ ID NO: 261000 - DNA, 1852 bp, Homo sapiens
  misc_feature (1846)..(1846): n is a, c, g, or t
  misc_feature (1848)..(1852): n is a, c, g, or t
ggccgtgggtgtacgcggcgcagcgcggcagtcctgatggcccggcatgggttaccgctgctgcccctgctgtcgctcctggtcggcgcgtggctcaagctagggattttgtcagggagaaaaagtatcggacagaagctgagatgtttggatggagctttgtctttgaggactttgtctctgatgagctgagaaacaaagccacccagccaatgaagtctgtactctggtggcttccagtggaaaaggcattttggaggcagcctgcaggtcctggctctggcatccgagagagactggagcacccagtgttacacgtgagctggaatgacgcccgtgcctactgtgcttggcggggaaaacgactgcccacggaggaagagtgggagtttgccgcccgagggggcttgaagggtcaagtttacccatgggggaactggttccagccaaaccgcaccaacctgtggcagggaaagttccccaagggagacaaagctgaggatggcttccatggagtctccccagtgaatgctttccccgcccagaacaactacgggctctatgacctcctggggaacgtgtgggagtggacagcatcaccgtaccaggctgctgagcaggacatgcgcgtcctccggggggcatcctggatcgacacagctgatggctctgccaatcaccgggcccgggtcaccaccaggatgggcaacactccagattcagcctcagacaacctcggtttccgctgtgctgcagacgcaggccggccgccaggggagctgtaagcagccgggtggtgacaaggagaaaagccttctagggtcactgtcattccctggccatgttgcaaacagcgcaattccaagctcgagagcttcagcctcaggaaagaacttccccttccctgtctcccatccctctgtggcaggcgcctctcaccagggcaggagaggactcagcctcctgtgttttggagaaggggcccaatgtgtgttgacgatggctgggggccaggtgtttctgttagaggccaagtattattgacacaggattgcaaacacacaaacaattggaacagagcactctgaaaggccattttttaagcattttaaaatctattctctccccctttctccctggatgattcaggaagctgacattgtttcctcaaggcagaattttcctggttctgttttctcagccagttgctgtggaaggagaatgctttctttgtggcctcatctgtggtttcgtgtccctctgaaggaaactagtttccactgtgtaacaggcagacatgtaactatttaaagcacagttcagtcctaaaagggtctgggagaaccagatgatgtactaggtgaagcattgcattgtgggaatcacaaagcaaatagtactccagaaagacaaatatcagaagcttcctattctttttttttttttttttttttttgagacagggtctttctctgttgcccaggctagagtgcactggtgatcacggctcactctagccttgaattcctgggcccaagcaattctcccacctcagcctcctgagtagctgggactacaagtgtgcaccaccatgcctggctaattttttgaatttttgtagtgatgggatctcgctctgttgcccagggtggtctcgaactcctggcctcaagcgatcctcccacctcgacctcccaaagtgctgggattacaggtgtgagccacctcgcctgggcccccttctccatatgcctccaaaaacatgtccctggagagtagcctgctcccacactgtcactggatgtcatggggccaataaaatctcctgcaattgtgtatctcaaanannnnn

SEQ ID NO: 261001 - DNA, 1813 bp, Homo sapiens
  misc_feature (1807)..(1807): n is a, c, g, or t
  misc_feature (1809)..(1813): n is a, c, g, or t
ggccgtgggtgtacgcggcgcagcgcggcagtcctgatggcccggcatgggttaccgctgctgcccctgctgtcgctcctggtcggcgcgtggctcaagctaggaaatggacaggctactagcatggtccaactgcagggtgggagattcctgatgggaacaaattctccagacagcagagatggtgaagggcctgtgcgggaggcgacagtgaaaccctttgccatcgacatatttcctgtcaccaacaaagatttcagggattttgtcagggagaaaaagtatcggacagaagctgagatgtttggatggagctttgtctttgaggactttgtctctgatgagctgagaaacaaagccacccagccaatgaaggtcaagtttacccatgggggaactggttccagccaaaccgcaccaacctgtggcagggaaagttccccaagggagacaaagctgaggatggcttccatggagtctccccagtgaatgctttccccgcccagaacaactacgggctctatgacctcctggggaacgtgtgggagtggacagcatcaccgtaccaggctgctgagcaggacatgcgcgtcctccggggggcatcctggatcgacacagctgatggctctgccaatcaccgggcccgggtcaccaccaggatgggcaacactccagattcagcctcagacaacctcggtttccgctgtgctgcagacgcaggccggccgccaggggagctgtaagcagccgggtggtgacaaggagaaaagccttctagggtcactgtcattccctggccatgttgcaaacagcgcaattccaagctcgagagcttcagcctcaggaaagaacttccccttccctgtctcccatccctctgtggcaggcgcctctcaccagggcaggagaggactcagcctcctgtgttttggagaaggggcccaatgtgtgttgacgatggctgggggccaggtgtttctgttagaggccaagtattattgacacaggattgcaaacacacaaacaattggaacagagcactctgaaaggccattttttaagcattttaaaatctattctctccccctttctccctggatgattcaggaagctgacattgtttcctcaaggcagaattttcctggttctgttttctcagccagttgctgtggaaggagaatgctttctttgtggcctcatctgtggtttcgtgtccctctgaaggaaactagtttccactgtgtaacaggcagacatgtaactatttaaagcacagttcagtcctaaaagggtctgggagaaccagatgatgtactaggtgaagcattgcattgtgggaatcacaaagcaaatagtactccagaaagacaaatatcagaagcttcctattctttttttttttttttttttttttgagacagggtctttctctgttgcccaggctagagtgcactggtgatcacggctcactctagccttgaattcctgggcccaagcaattctcccacctcagcctcctgagtagctgggactacaagtgtgcaccaccatgcctggctaattttttgaatttttgtagtgatgggatctcgctctgttgcccagggtggtctcgaactcctggcctcaagcgatcctcccacctcgacctcccaaagtgctgggattacaggtgtgagccacctcgcctgggcccccttctccatatgcctccaaaaacatgtccctggagagtagcctgctcccacactgtcactggatgtcatggggccaataaaatctcctgcaattgtgtatctcaaanannnnn

SEQ ID NO: 261002 - DNA, 558 bp, Homo sapiens
  misc_feature (552)..(552): n is a, c, g, or t
  misc_feature (554)..(558): n is a, c, g, or t
ggccgtgggtgtacgcggcgcagcgcggcagtcctgatggcccggcatgggttaccgctgctgcccctgctgtcgctcctggtcggcgcgtggctcaagctaggaaatggacaggctactagcatggtccaactgcagggtgggagattcctgatgggaacaaattctccagacagcagagatggtgaagggcctgtgcgggaggcgacagtgaaaccctttgccatcgacatatttcctgtcaccaacaaagatttcagggattttgtcagggagaaaaagtatcggacagaagctgagatgtttggatggagctttgtctttgaggactttgtctctgatgagctgagaaacaaagccacccagccaatgaagtctgtactctggtggcttccagtggaaaaggcattttggaggcagcctgcaggtcctggctctggcatccgagagagactggagcacccagtgttacacgtgagctgtagcctgctcccacactgtcactggatgtcatggggccaataaaatctcctgcaattgtgtatctcaaanannnnn

SEQ ID NO: 261003 - DNA, 1108 bp, Homo sapiens
ggccgtgggtgtacgcggcgcagcgcggcagtcctgatggcccggcatgggttaccgctgctgcccctgctgtcgctcctggtcggcgcgtggctcaagctaggaaatggacaggctactagcatggtccaactgcagggtgggagattcctgatgggaacaaattctccagacagcagagatggtgaagggcctgtgcgggaggcgacagtgaaaccctttgccatcgacatatttcctgtcaccaacaaagatttcagggattttgtcagggagaaaaagtatcggacagaagctgagatgtttggatggagctttgtctttgaggactttgtctctgatgagctgagaaacaaagccacccagccaatgaaggtgagagaacctggtcttgcagctgaggggataggagtgggacctggacagggaatcctgtgggacatgggttacctgggacacagtggagaatcagacctgagaggtggaggcagaggggaagcaagagaaactcaccatggagcgtcagatcagtacacactcccaggaagttaaccctgaacccaagttagctcttgcctaaatgtccaagtcaggataggatccaaggaacttgaatcaagagatcaccttggtgggccgagcgtggtgtctcatgcctataatctcagcactttgagaggctgaggtgagtggatcacctgaggtcaggagttcaagaccaacatggcgaaaccccgtctatactaaaaatacaaaaattagacaggcatggtggcacgctcctgtaatctgagctgctcgggaggctgaggcatgagagtcgcttgaacctggaaggcagaggttgcagtgagccgagatggcgccactgcactccagcctgggtgacagagtgagactgtgtctcaaaagaaaaaaaaaaagagagatcaccttggcaagccaacctctaataagggtggtaagatgggctctataaagattccagtctcagctgggcgcagcagctcacgcctgtaaccccagcactttgggaggccgaggtgggacaattgcttgagcccaagaattcaagaccagcctgggcaacatagatcccatatctaca

SEQ ID NO: 261004 - DNA, 263 bp, Homo sapiens
  misc_feature (230)..(231): n is a, c, g, or t
agcactggcctctactgtgcttgcgggggaaaacgactgagagtgggagtttgccgcccgagggcttgaagggtcaagtttacccatgggggaactggttccagccaaaccgcaccaacctgtggcagggaaagttccccaagggagacaaagctgaggatggcttccatggagtctccccagtgaatgctttccccgcccagaacaactacgacgggcttctatgcacnnctcctggggcaacagtgtaggcgagtggcaca

SEQ ID NO: 261005 - DNA, 349 bp, Homo sapiens
tagcctgagtgacagagcaagattttgtttctttaagaaaaaaaaaaaggagaaaaaaaaatcagccacaacctcacttagaccacctgagtctcagcctgacgtctctgttctgcgtcctgtggctcagtcggggaggtgcctttgctgggccggagcatcttgcagtcggtctccttctttttcgcagtctgtactctggtggcttccagtggaaaaggcattttggaggcaggtaagggctgattccgctacctcattttctacccctgcttgactcaggtggtgtgatcgggataaaaatgacaaaaataggggtacttgtgccgttgcgaacatatggtatgta

SEQ ID NO: 261006 - DNA, 284 bp, Homo sapiens
ccccccggaggacgcgcatgtcctgctcagcagcctggtacggtgatgctgtccactcccacacgttccccaggaggtcatagagcccgtagttggtgcggtttggctggaaccaggaaaattctgccttgaggaaacaatgtcagcttcctgaatcatccagggagaaagggggagagaatagattttaaaatgcttaaaaaatggcctttcagagtgctctgttccaattgtttgtgtgtttgcaatcctgtgtcaataatacttggcctctaacagaaaca

SEQ ID NO: 261007 - DNA, 235 bp, Homo sapiens
tagcctgagtgacagagcaagattttgtttctttaagaaaaaaaaaaaggagaaaaaaaaatcagccacaacctcacttagaccacctgagtctcagcctgacgtctctgttctgcgtcctgtggctcagtcggggagatcctttgagcctaggagttcaaagctgcggcgagctatgatcgcaccactgctgtctggcctgagtgacagaacaagaccctgtctcaaaagaaaa

SEQ ID NO: 261008 - DNA, 1227 bp, Homo sapiens
  misc_feature (1221)..(1221): n is a, c, g, or t
  misc_feature (1223)..(1227): n is a, c, g, or t
ggccgtgggtgtacgcggcgcagcgcggcagtcctgatggcccggcatgggttaccgctgctgcccctgctgtcgctcctggtcggcgcgtggctcaagctaggaaatggacaggctactagcatggtccaactgcagggtgggagattcctgatgggaacaaattctccagacagcagagatggtgaagggcctgtgcgggaggcgacagtgaaaccctttgccatcgacatatttcctgtcaccaacaaagatttcagggattttgtcagggagaaaaagtatcggacagaagctgagatgtttggatggagctttgtctttgaggactttgtctctgatgagctgagaaacaaagccacccagccaatgaagtctgtactctggtggcttccagtggaaaaggcattttggaggcagcctgcaggtcctggctctggcatccgagagagactggagcacccagtgttacacgtgagctggaatgacgcccgtgcctactgtgcttggcggggaaaacgactgcccacggaggaagagtgggagtttgccgcccgagggggcttgaagggtcaagtttacccatgggggaactggttccagccaaaccgcaccaacctgtggcagggaaagttccccaagggagacaaagctgaggatggcttccatggagtctccccagtgaatgctttccccgcccagaacaactacgggctctatgacctcctggggaacgtgtgggagtggacagcatcaccgtaccaggctgctgagcaggacatgcgcgtcctccggggggcatcctggatcgacacagctgatggctctgccaatcaccgggcccgggtcaccaccaggatgggcaacactccagattcagcctcagacaacctcggtttccgctgtgctgcagacgcaggccggccgccaggggagctgtaagcagccgggtggtgacaaggagaaaagccttctagggtcactgtcattccctggccatgttgcaaacagcgcaattccaagctcgagagcttcagcctcaggaaagaacttccccttccctgtctcccatccctctgtggcaggcgcctctcaccagggcaggagaggactcagcctccatatgcctccaaaaacatgtccctggagagtagcctgctcccacactgtcactggatgtcatggggccaataaaatctcctgcaattgtgtatctcaaanannnnn

SEQ ID NO: 261009 - DNA, 788 bp, Homo sapiens
  misc_feature (782)..(782): n is a, c, g, or t
  misc_feature (784)..(788): n is a, c, g, or t
ggccgtgggtgtacgcggcgcagcgcggcagtcctgatggcccggcatgggttaccgctgctgcccctgctgtcgctcctggtcggcgcgtggctcaagctaggaaatggacaggctactagcatggtccaactgcagggtgggagattcctgatgggaacaaattctccagacagcagagatggtgaagggcctgtgcgggaggcgacagtgaaaccctttgccatcgacatatttcctgtcaccaacaaagatttcagggattttgtcagggagaaaaagtatcggacagaagctgagatgtttggatggagctttgtctttgaggactttgtctctgatgagctgagaaacaaagccacccagccaatgaagtctgtactctggtggcttccagtggaaaaggcattttggaggcagcctgcaggtcctggctctggcatccgagagagactggagcacccagtgttacacgtgagctggaatgacgcccgtgcctactgtgcttggcggggaaaacgactgcccacggaggaagagtgggagtttgccgcccgagggggcttgaagggtcaagtttacccatgggggaactggttccagccaaaccgcaccaacctgtggcagggaaagttccccaagggagacaaagctgaggatggcttccatggagtctccccagtgaatgctttccccgcccagaacaactacgtagcctgctcccacactgtcactggatgtcatggggccaataaaatctcctgcaattgtgtatctcaaanannnnn

SEQ ID NO: 261010 - DNA, 1964 bp, Homo sapiens
  misc_feature (1958)..(1958): n is a, c, g, or t
  misc_feature (1960)..(1964): n is a, c, g, or t
ggccgtgggtgtacgcggcgcagcgcggcagtcctgatggcccggcatgggttaccgctgctgcccctgctgtcgctcctggtcggcgcgtggctcaagctaggaaatggacaggctactagcatggtccaactgcagggtgggagattcctgatgggaacaaattctccagacagcagagatggtgaagggcctgtgcgggaggcgacagtgaaaccctttgccatcgacatatttcctgtcaccaacaaagatttcagggattttgtcagggagaaaaagtatcggacagaagctgagatgtttggatggagctttgtctttgaggactttgtctctgatgagctgagaaacaaagccacccagccaatgaagcctgcaggtcctggctctggcatccgagagagactggagcacccagtgttacacgtgagctggaatgacgcccgtgcctactgtgcttggcggggaaaacgactgcccacggaggaagagtgggagtttgccgcccgagggggcttgaagggtcaagtttacccatgggggaactggttccagccaaaccgcaccaacctgtggcagggaaagttccccaagggagacaaagctgaggatggcttccatggagtctccccagtgaatgctttccccgcccagaacaactacgggctctatgacctcctggggaacgtgtgggagtggacagcatcaccgtaccaggctgctgagcaggacatgcgcgtcctccggggggcatcctggatcgacacagctgatggctctgccaatcaccgggcccgggtcaccaccaggatgggcaacactccagattcagcctcagacaacctcggtttccgctgtgctgcagacgcaggccggccgccaggggagctgtaagcagccgggtggtgacaaggagaaaagccttctagggtcactgtcattccctggccatgttgcaaacagcgcaattccaagctcgagagcttcagcctcaggaaagaacttccccttccctgtctcccatccctctgtggcaggcgcctctcaccagggcaggagaggactcagcctcctgtgttttggagaaggggcccaatgtgtgttgacgatggctgggggccaggtgtttctgttagaggccaagtattattgacacaggattgcaaacacacaaacaattggaacagagcactctgaaaggccattttttaagcattttaaaatctattctctccccctttctccctggatgattcaggaagctgacattgtttcctcaaggcagaattttcctggttctgttttctcagccagttgctgtggaaggagaatgctttctttgtggcctcatctgtggtttcgtgtccctctgaaggaaactagtttccactgtgtaacaggcagacatgtaactatttaaagcacagttcagtcctaaaagggtctgggagaaccagatgatgtactaggtgaagcattgcattgtgggaatcacaaagcaaatagtactccagaaagacaaatatcagaagcttcctattctttttttttttttttttttttttgagacagggtctttctctgttgcccaggctagagtgcactggtgatcacggctcactctagccttgaattcctgggcccaagcaattctcccacctcagcctcctgagtagctgggactacaagtgtgcaccaccatgcctggctaattttttgaatttttgtagtgatgggatctcgctctgttgcccagggtggtctcgaactcctggcctcaagcgatcctcccacctcgacctcccaaagtgctgggattacaggtgtgagccacctcgcctgggcccccttctccatatgcctccaaaaacatgtccctggagagtagcctgctcccacactgtcactggatgtcatggggccaataaaatctcctgcaattgtgtatctcaaanannnnn

SEQ ID NO: 261011 - DNA, 1784 bp, Homo sapiens
  misc_feature (1778)..(1778): n is a, c, g, or t
  misc_feature (1780)..(1784): n is a, c, g, or t
agatcccccatacagagtactaacaaagatctcagggattttgtcagggagaaaaagtatcggacagaagctgagatgtttggatggagctttgtctttgaggactttgtctctgatgagctgagaaacaaagccacccagccaatgaagtctgtactctggtggcttccagtggaaaaggcattttggaggcagcctgcaggtcctggctctggcatccgagagagactggagcacccagtgttacacgtgagctggaatgacgcccgtgcctactgtgcttggcggggaaaacgactgcccacggaggaagagtgggagtttgccgcccgagggggcttgaagggtcaagtttacccatgggggaactggttccagccaaaccgcaccaacctgtggcagggaaagttccccaagggagacaaagctgaggatggcttccatggagtctccccagtgaatgctttccccgcccagaacaactacgggctctatgacctcctggggaacgtgtgggagtggacagcatcaccgtaccaggctgctgagcaggacatgcgcgtcctccggggggcatcctggatcgacacagctgatggctctgccaatcaccgggcccgggtcaccaccaggatgggcaacactccagattcagcctcagacaacctcggtttccgctgtgctgcagacgcaggccggccgccaggggagctgtaagcagccgggtggtgacaaggagaaaagccttctagggtcactgtcattccctggccatgttgcaaacagcgcaattccaagctcgagagcttcagcctcaggaaagaacttccccttccctgtctcccatccctctgtggcaggcgcctctcaccagggcaggagaggactcagcctcctgtgttttggagaaggggcccaatgtgtgttgacgatggctgggggccaggtgtttctgttagaggccaagtattattgacacaggattgcaaacacacaaacaattggaacagagcactctgaaaggccattttttaagcattttaaaatctattctctccccctttctccctggatgattcaggaagctgacattgtttcctcaaggcagaattttcctggttctgttttctcagccagttgctgtggaaggagaatgctttctttgtggcctcatctgtggtttcgtgtccctctgaaggaaactagtttccactgtgtaacaggcagacatgtaactatttaaagcacagttcagtcctaaaagggtctgggagaaccagatgatgtactaggtgaagcattgcattgtgggaatcacaaagcaaatagtactccagaaagacaaatatcagaagcttcctattctttttttttttttttttttttttgagacagggtctttctctgttgcccaggctagagtgcactggtgatcacggctcactctagccttgaattcctgggcccaagcaattctcccacctcagcctcctgagtagctgggactacaagtgtgcaccaccatgcctggctaattttttgaatttttgtagtgatgggatctcgctctgttgcccagggtggtctcgaactcctggcctcaagcgatcctcccacctcgacctcccaaagtgctgggattacaggtgtgagccacctcgcctgggcccccttctccatatgcctccaaaaacatgtccctggagagtagcctgctcccacactgtcactggatgtcatggggccaataaaatctcctgcaattgtgtatctcaaanannnnn

SEQ ID NO: 261012 - DNA, 1731 bp, Homo sapiens
  misc_feature (1725)..(1725): n is a, c, g, or t
  misc_feature (1727)..(1731): n is a, c, g, or t
ggtcccggtcagacgggtgcatagcgattagctcagttgaggatcttgctactgcaggatggagcgtgacgagaacaaagccagccagccaatgaagtctgtactctggtggcttccagtggaaaaggcattttggaggcagcctgcaggtcctggctctggcatccgagagagactggagcacccagtgttacacgtgagctggaatgacgcccgtgcctactgtgcttggcggggaaaacgactgcccacggaggaagagtgggagtttgccgcccgagggggcttgaagggtcaagtttacccatgggggaactggttccagccaaaccgcaccaacctgtggcagggaaagttccccaagggagacaaagctgaggatggcttccatggagtctccccagtgaatgctttccccgcccagaacaactacgggctctatgacctcctggggaacgtgtgggagtggacagcatcaccgtaccaggctgctgagcaggacatgcgcgtcctccggggggcatcctggatcgacacagctgatggctctgccaatcaccgggcccgggtcaccaccaggatgggcaacactccagattcagcctcagacaacctcggtttccgctgtgctgcagacgcaggccggccgccaggggagctgtaagcagccgggtggtgacaaggagaaaagccttctagggtcactgtcattccctggccatgttgcaaacagcgcaattccaagctcgagagcttcagcctcaggaaagaacttccccttccctgtctcccatccctctgtggcaggcgcctctcaccagggcaggagaggactcagcctcctgtgttttggagaaggggcccaatgtgtgttgacgatggctgggggccaggtgtttctgttagaggccaagtattattgacacaggattgcaaacacacaaacaattggaacagagcactctgaaaggccattttttaagcattttaaaatctattctctccccctttctccctggatgattcaggaagctgacattgtttcctcaaggcagaattttcctggttctgttttctcagccagttgctgtggaaggagaatgctttctttgtggcctcatctgtggtttcgtgtccctctgaaggaaactagtttccactgtgtaacaggcagacatgtaactatttaaagcacagttcagtcctaaaagggtctgggagaaccagatgatgtactaggtgaagcattgcattgtgggaatcacaaagcaaatagtactccagaaagacaaatatcagaagcttcctattctttttttttttttttttttttttgagacagggtctttctctgttgcccaggctagagtgcactggtgatcacggctcactctagccttgaattcctgggcccaagcaattctcccacctcagcctcctgagtagctgggactacaagtgtgcaccaccatgcctggctaattttttgaatttttgtagtgatgggatctcgctctgttgcccagggtggtctcgaactcctggcctcaagcgatcctcccacctcgacctcccaaagtgctgggattacaggtgtgagccacctcgcctgggcccccttctccatatgcctccaaaaacatgtccctggagagtagcctgctcccacactgtcactggatgtcatggggccaataaaatctcctgcaattgtgtatctcaaanannnnn

SEQ ID NO: 261013 - DNA, 1858 bp, Homo sapiens
  misc_feature (1852)..(1852): n is a, c, g, or t
  misc_feature (1854)..(1858): n is a, c, g, or t
ggccgtgggtgtacgcggcgcagcgcggcagtcctgatggcccggcatgggttaccgctgctgcccctgctgtcgctcctggtcggcgcgtggctcaagctaggaaatggacaggctactagcatggtccaactgcagggtgggagattcctgatgggaacaaattctccagacagcagagatggtgaagggcctgtgcgggaggcgacagtgaaaccctttgccatcgacatatttcctgtcaccaacaaagatttcagggattttgtcagggagaaaaagtatcggacagaagctgagatgtttggatggagctttgtctttgaggactttgtctctgatgagctgagaaacaaagccacccagccaatgaagtctgtactctggtggcttccagtggaaaaggcattttggaggcaggtcaagtttacccatgggggaactggttccagccaaaccgcaccaacctgtggcagggaaagttccccaagggagacaaagctgaggatggcttccatggagtctccccagtgaatgctttccccgcccagaacaactacgggctctatgacctcctggggaacgtgtgggagtggacagcatcaccgtaccaggctgctgagcaggacatgcgcgtcctccggggggcatcctggatcgacacagctgatggctctgccaatcaccgggcccgggtcaccaccaggatgggcaacactccagattcagcctcagacaacctcggtttccgctgtgctgcagacgcaggccggccgccaggggagctgtaagcagccgggtggtgacaaggagaaaagccttctagggtcactgtcattccctggccatgttgcaaacagcgcaattccaagctcgagagcttcagcctcaggaaagaacttccccttccctgtctcccatccctctgtggcaggcgcctctcaccagggcaggagaggactcagcctcctgtgttttggagaaggggcccaatgtgtgttgacgatggctgggggccaggtgtttctgttagaggccaagtattattgacacaggattgcaaacacacaaacaattggaacagagcactctgaaaggccattttttaagcattttaaaatctattctctccccctttctccctggatgattcaggaagctgacattgtttcctcaaggcagaattttcctggttctgttttctcagccagttgctgtggaaggagaatgctttctttgtggcctcatctgtggtttcgtgtccctctgaaggaaactagtttccactgtgtaacaggcagacatgtaactatttaaagcacagttcagtcctaaaagggtctgggagaaccagatgatgtactaggtgaagcattgcattgtgggaatcacaaagcaaatagtactccagaaagacaaatatcagaagcttcctattctttttttttttttttttttttttgagacagggtctttctctgttgcccaggctagagtgcactggtgatcacggctcactctagccttgaattcctgggcccaagcaattctcccacctcagcctcctgagtagctgggactacaagtgtgcaccaccatgcctggctaattttttgaatttttgtagtgatgggatctcgctctgttgcccagggtggtctcgaactcctggcctcaagcgatcctcccacctcgacctcccaaagtgctgggattacaggtgtgagccacctcgcctgggcccccttctccatatgcctccaaaaacatgtccctggagagtagcctgctcccacactgtcactggatgtcatggggccaataaaatctcctgcaattgtgtatctcaaanannnnn

SEQ ID NO: 261014 - DNA, 1631 bp, Homo sapiens
  misc_feature (1625)..(1625): n is a, c, g, or t
  misc_feature (1627)..(1631): n is a, c, g, or t
ggtggtgacccgggcccggtgattggcagagccatcagctgtgtcgatccaggatgccccccggaggacgcgcatgtcctgctcagcagcctggtacggtgatggaatgacgcccgtgcctactgtgcttggcggggaaaacgactgcccacggaggaagagtgggagtttgccgcccgagggggcttgaagggtcaagtttacccatgggggaactggttccagccaaaccgcaccaacctgtggcagggaaagttccccaagggagacaaagctgaggatggcttccatggagtctccccagtgaatgctttccccgcccagaacaactacgggctctatgacctcctggggaacgtgtgggagtggacagcatcaccgtaccaggctgctgagcaggacatgcgcgtcctccggggggcatcctggatcgacacagctgatggctctgccaatcaccgggcccgggtcaccaccaggatgggcaacactccagattcagcctcagacaacctcggtttccgctgtgctgcagacgcaggccggccgccaggggagctgtaagcagccgggtggtgacaaggagaaaagccttctagggtcactgtcattccctggccatgttgcaaacagcgcaattccaagctcgagagcttcagcctcaggaaagaacttccccttccctgtctcccatccctctgtggcaggcgcctctcaccagggcaggagaggactcagcctcctgtgttttggagaaggggcccaatgtgtgttgacgatggctgggggccaggtgtttctgttagaggccaagtattattgacacaggattgcaaacacacaaacaattggaacagagcactctgaaaggccattttttaagcattttaaaatctattctctccccctttctccctggatgattcaggaagctgacattgtttcctcaaggcagaattttcctggttctgttttctcagccagttgctgtggaaggagaatgctttctttgtggcctcatctgtggtttcgtgtccctctgaaggaaactagtttccactgtgtaacaggcagacatgtaactatttaaagcacagttcagtcctaaaagggtctgggagaaccagatgatgtactaggtgaagcattgcattgtgggaatcacaaagcaaatagtactccagaaagacaaatatcagaagcttcctattctttttttttttttttttttttttgagacagggtctttctctgttgcccaggctagagtgcactggtgatcacggctcactctagccttgaattcctgggcccaagcaattctcccacctcagcctcctgagtagctgggactacaagtgtgcaccaccatgcctggctaattttttgaatttttgtagtgatgggatctcgctctgttgcccagggtggtctcgaactcctggcctcaagcgatcctcccacctcgacctcccaaagtgctgggattacaggtgtgagccacctcgcctgggcccccttctccatatgcctccaaaaacatgtccctggagagtagcctgctcccacactgtcactggatgtcatggggccaataaaatctcctgcaattgtgtatctcaaanannnnn

SEQ ID NO: 261015 - DNA, 1698 bp, Homo sapiens
  misc_feature (1692)..(1692): n is a, c, g, or t
  misc_feature (1694)..(1698): n is a, c, g, or t
ggccgtgggtgtacgcggcgcagcgcggcagtcctgatggcccggcatgggttaccgctgctgcccctgctgtcgctcctggtcggcgcgtggctcaagctaggaaatggacaggctactagcatggtccaactgcagggtgggagattcctgatgggaacaaattctccagacagcagagatggtgaagggcctgtgcgggaggcgacagtgaaaccctttgccatcgacatatttcctgtcaccaacaaagatttcaggtcaagtttacccatgggggaactggttccagccaaaccgcaccaacctgtggcagggaaagttccccaagggagacaaagctgaggatggcttccatggagtctccccagtgaatgctttccccgcccagaacaactacgggctctatgacctcctggggaacgtgtgggagtggacagcatcaccgtaccaggctgctgagcaggacatgcgcgtcctccggggggcatcctggatcgacacagctgatggctctgccaatcaccgggcccgggtcaccaccaggatgggcaacactccagattcagcctcagacaacctcggtttccgctgtgctgcagacgcaggccggccgccaggggagctgtaagcagccgggtggtgacaaggagaaaagccttctagggtcactgtcattccctggccatgttgcaaacagcgcaattccaagctcgagagcttcagcctcaggaaagaacttccccttccctgtctcccatccctctgtggcaggcgcctctcaccagggcaggagaggactcagcctcctgtgttttggagaaggggcccaatgtgtgttgacgatggctgggggccaggtgtttctgttagaggccaagtattattgacacaggattgcaaacacacaaacaattggaacagagcactctgaaaggccattttttaagcattttaaaatctattctctccccctttctccctggatgattcaggaagctgacattgtttcctcaaggcagaattttcctggttctgttttctcagccagttgctgtggaaggagaatgctttctttgtggcctcatctgtggtttcgtgtccctctgaaggaaactagtttccactgtgtaacaggcagacatgtaactatttaaagcacagttcagtcctaaaagggtctgggagaaccagatgatgtactaggtgaagcattgcattgtgggaatcacaaagcaaatagtactccagaaagacaaatatcagaagcttcctattctttttttttttttttttttttttgagacagggtctttctctgttgcccaggctagagtgcactggtgatcacggctcactctagccttgaattcctgggcccaagcaattctcccacctcagcctcctgagtagctgggactacaagtgtgcaccaccatgcctggctaattttttgaatttttgtagtgatgggatctcgctctgttgcccagggtggtctcgaactcctggcctcaagcgatcctcccacctcgacctcccaaagtgctgggattacaggtgtgagccacctcgcctgggcccccttctccatatgcctccaaaaacatgtccctggagagtagcctgctcccacactgtcactggatgtcatggggccaataaaatctcctgcaattgtgtatctcaaanannnnn

SEQ ID NO: 261016 - DNA, 2028 bp, Homo sapiens
  misc_feature (2022)..(2022): n is a, c, g, or t
  misc_feature (2024)..(2028): n is a, c, g, or t
tctcgatctcctgacctcctgatccgtctgccttggcctcccaaagtgctgggattacaggcgtgagccaccatgccctgcataatttttgtatttttagtagagacaggatttcactgtgttggccaggctggtctcgaactcctgacctcgtgatccatctgcctcggtctcccaaagtgctgggattacaagtgtgagccaccgcgaccagccagtgatcgaagtttttaatatgacctgtgaggttgcctctggctcattcatttatgcaatctaagtccaatttcaagtttctcgatttctgtacttttctcaacatgaactgataacagatgctttataaactggctcaggtcccagaaccatgcttaggattacattgccctggagcacatgaggaggccagggccctctaatgcagttcagcgagtggagaggatgggcatggcaaataaaagcaggtcattcactcttttttctcatcaccctctaacttccttttgattccctcactctttctgtgttcttttttccttccctaattcttcacctccccctcctctgctgcctccttgctctcctcgcaggtcaagtttacccatgggggaactggttccagccaaaccgcaccaacctgtggcagggaaagttccccaagggagacaaagctgaggatggcttccatggagtctccccagtgaatgctttccccgcccagaacaactacgggctctatgacctcctggggaacgtgtgggagtggacagcatcaccgtaccaggctgctgagcaggacatgcgcgtcctccggggggcatcctggatcgacacagctgatggctctgccaatcaccgggcccgggtcaccaccaggatgggcaacactccagattcagcctcagacaacctcggtttccgctgtgctgcagacgcaggccggccgccaggggagctgtaagcagccgggtggtgacaaggagaaaagccttctagggtcactgtcattccctggccatgttgcaaacagcgcaattccaagctcgagagcttcagcctcaggaaagaacttccccttccctgtctcccatccctctgtggcaggcgcctctcaccagggcaggagaggactcagcctcctgtgttttggagaaggggcccaatgtgtgttgacgatggctgggggccaggtgtttctgttagaggccaagtattattgacacaggattgcaaacacacaaacaattggaacagagcactctgaaaggccattttttaagcattttaaaatctattctctccccctttctccctggatgattcaggaagctgacattgtttcctcaaggcagaattttcctggttctgttttctcagccagttgctgtggaaggagaatgctttctttgtggcctcatctgtggtttcgtgtccctctgaaggaaactagtttccactgtgtaacaggcagacatgtaactatttaaagcacagttcagtcctaaaagggtctgggagaaccagatgatgtactaggtgaagcattgcattgtgggaatcacaaagcaaatagtactccagaaagacaaatatcagaagcttcctattctttttttttttttttttttttttgagacagggtctttctctgttgcccaggctagagtgcactggtgatcacggctcactctagccttgaattcctgggcccaagcaattctcccacctcagcctcctgagtagctgggactacaagtgtgcaccaccatgcctggctaattttttgaatttttgtagtgatgggatctcgctctgttgcccagggtggtctcgaactcctggcctcaagcgatcctcccacctcgacctcccaaagtgctgggattacaggtgtgagccacctcgcctgggcccccttctccatatgcctccaaaaacatgtccctggagagtagcctgctcccacactgtcactggatgtcatggggccaataaaatctcctgcaattgtgtatctcaaanannnnn

SEQ ID NO: 261017 - DNA, 460 bp, Homo sapiens
aggcccagcctcctctctacccctcgtacatccaggaacactgagtttcaaagaaggataggggaatatcagggaaagcgctcagcaggcctgtttcacctgcccgaatcctgtttcctgttacccatccatttctcccttcagcctcctgtagtctcttttttctgactccgaccactggtcactcacccggctctcttccagctctcttgctccatctagtggtaaaagctgaacgcgggcgccctaaacctagcctgcctccgacttaatgcgctcccggaagcctgtctcacttaatcctggctgtcagcctgcaggtcctggctctggcatccgagagagactggagcacccagtgttacacgtgagctggaatgacgcccgtgcctactgtgcttggcggggaaaacgactgcccacggaggaagagtgggagtttgccgcccgagggggcttg

SEQ ID NO: 261018 - DNA, 426 bp, Homo sapiens
ggccagtcctccgcctcgctccgtcagtttccccctgctgaactattgggtgcggggcgggtggtggcgcagcctgcgcatgtgcataggggtcgactgccgctgcggtgcatgagggcgcatgcgcagcggggccgtgggtgtacgcggcgcagcgcggcagtcctgatggcccggcatgggttaccgctgctgcccctgctgtcgctcctggtcggcgcgtggctcaagctaggtcagtgaaccggccgtccatcctgggggcgctgggaaggggatggggcgctccgccctgacgggagagagccttaggcccttctgccggcttccgggatgcggctgcagcggcaggctggggaggtagctctcggtgcgcgtggcgcctcaccgccttatacttttcaacttcttgttgtggaatctttc

SEQ ID NO: 261019 - DNA, 387 bp, Homo sapiens
tcaccagctgaaccagctgaactatgtctttatagggattttgtcagggagaaaaagtatcggacagaagctgagatgtttggatggagctttgtctttgaggactttgtctctgatgagctgagaaacaaagccacccagccaatgaaggtgagagaacctggtcttgcagctgaggggataggagtgggacctggacagggaatcctgtgggacatgggttacctgggacacagtggagaatcagacctgagaggtggaggcagaggggaagcaagagaaactcaccatggagcgtcagatcagtacacactcccaggaagttaaccctgaacccaagttagctcttgcctaaatgtccaagtcaggataggatccaaggaactt

SEQ ID NO: 261020 - DNA, 499 bp, Homo sapiens
tctccagcctgggtgacagattgagaccctgactctaaaacaaaaacaaacaaacaaaaatttaaaattcctgaaaactttagctgatttctctgtgctctgatctatggtgaattcacactcctactgcagctactgctgcaggtttgagaagagccataggtcctttttcacttatgaagggcttgacactttctggaatttatttcctttaggtttctttgcatcattagctttctgaaagagagcgattttgtaacttatgtagcttgttctgcttgttagagtgggagcaatggtctcttgcaactttctacatctcaattgaaatacataaattctgggtaaagcttttaaaaatattcacttaagatgcatggaggaaaaatcagagctaaactgaaggagattgagatacaaaaaccattcaaaagatcaacaaacccagtagttgggtttttgaaaaaattagtaggatagataggctgctgggtacact

SEQ ID NO: 261021 - DNA, 300 bp, Homo sapiens
aaaaaataaaaaaataaaaagcagctctgggaaaaggcagtctccctggatttaaacctccagctctgtggatttgcagtgggaggaagcttgttgcctcagatcagcccccgacttacttgcatcagctttttatcctgataggccttgtgttttgccctgcttgtttcttctctggaggcaattgtatcatatccttgtttttttccaatccttagaccttgaaaaaatgttttccttagtgtaatggtcagaaccttcaaattaatgttgaataaagtgataatagcaagaaaaaaa

SEQ ID NO: 261022 - DNA, 327 bp, Homo sapiens
accctgtctcagaaaaaaaaaaaaaagtactttgtaatctgtaaggtttatttcaacacacacaaaaaaagtgtatatgctccacgatgcctgtgaatatacacacacaccacatcatataccaagcctggctgtgtcttctcacaaatgcactgctaggcaccacccccagttctagaatcacaccagccagttcaccctccagatggttcaccctcaacttcataaaagttccctacctaatctactgacaggctcatccccgacctaattttaaagatttcctaggagctgcagtgggaatcctggacctcagcctggacaaag

SEQ ID NO: 261023 - DNA, 587 bp, Homo sapiens
ggttttactcatgttgctaagtataactccggtgcatttgttttcactgctgtaaagttgtctgtgtactgcgatgtatttatccatgttgctggatagttgggtcatttccaggtttttgctaggagaaggagcagcgccactctgaacattcttgtgtgtatctccttgtacacatgaaaaagagtttctctagaatacgtacttaggaatgactttgctggatcatagggtgatgttaaagtgttttccaggttatcagtttgcactgctgtgagcagtatctgagagttctcgttgcttgtgccaatcttggatattggtcatacttaaattttacttaatttgatgaatttgaaattgtagttttaatttgtattttcttggttactaatgaagttgagcatcttttcacgtggattggccattcaaatttttgtgcgtgttaaagtgttcaggctgggcacagtggcttatgcctataatcccagcactttgggaggccaaggcgggaggattgctggagcccaggagtttgagatcagcctggcagcgtagcacaaccctgtctctaccaaaaaaaaaaa

SEQ ID NO: 261024 - DNA, 591 bp, Homo sapiens
ccttgcatgcaagtttgctgagctgaaggaaaagattgatcgccgttctggtaaaaagctggaagatggccctaaattcttgaagtctggtgatgctgccattgttgatatggttcctggcaagcccatgtgtgttgagagcttctcagactatccacctttgggtcgctttgctgttcgtgatatgagacagacagttgcggtgggtgtcatcaaagcagtggacaagaaggctgctggagctggcaaggtcaccaagtctgcccagaaagctcagaaggctaaatgaatattatccctaatacctgccaccccactcttaatcagtggtggaagaacggtctcagaactgtttgtttcaattggccatttaagtttagtagtaaaagactggttaatgataacaatgcatcgtaaaaccttcagaaggaaaggagaatgttttgtggaccactttggttttcttttttgcgtgtggcagttttaagttattagtttttaaaatcagtactttttaatggaaacaacttgaccaaaaatttgtcacagaattttgagacccattaaaaaagttaaatgagaaaaaaaaaa

SEQ ID NO: 261025 - DNA, 519 bp, Homo sapiens
ggacatacattcccaggaacaatggaatgctttagaaggaggagcatagattttgatgggcagttaactgcatctgctatgtgctctttctgcccaaggattctcatacaagctgtatcacctgcttgaaatgctggtctcccactccttatctggctagctcctatttatcattcaggtcttatcttaaaacttattttttctaggtaggtttagaccccatagaaacttgcaaatctctttggtagctttgcatgtgtgtggaagtgatggtgtcacttctgggtcaaagtgtggctcccccatctctctgctgctggctggatgacgctctccaaagttctaagggatggcagagccataagagagggggagcctgggatcctgaatcccccccaagaaagaaagatacccatggaccaggtgcatttataggataattaattttatgtgttaacttgactgggttaaaggatacccagatagctagtaaaaacattatttctgggcatgtggtga

SEQ ID NO: 261026 - DNA, 752 bp, Homo sapiens
gaaggacggcggtgaagggaaatcctcccagtgggaagaagataagagtaatgtgcctggttgttcattttgcctggttagaagtatagatctatactttttcatgagcagtggctaatgacttggctggatggtcagtacttgagaggaacataattaggaagttggtgacaaagaggtctaggaaacaggtatgtggatggacttcagcccagaatgtgaagataattatttcccacatgagtgcttatcaaagggcgacctccacagaggattttaatgaggtggatagaataacccatttagtggatgtcagtcagcctctttacttagccaaatggactcatgaataaagggctagggatggaggttacacatggggtcaacgtggactttcactcgccagggacaatctggctacagctcctgatatggcaacactcctgggggctcagccagctatctggttgtaggttggatatggatttgctgttcctgcccacaatgcatctgccaaaacaactatccttgggtttaattatttcacacactgttgcctctgacttaggaactcactccacagcaaatgaagtgtggcagtaggtccttgctcatggaattagctggtcttaccatgttcccaattatgctgaagcagttggctttacacataggtgtaatcaatctcttttctcttaatttcgccaactcaatatataaaaggcctgttgaaaatggtgtacatcaaaata

SEQ ID NO: 261027 - DNA, 461 bp, Homo sapiens
ctttaatgggcacagaattggctaaagctactttgccatccttccttgcttttcactctgttaaaatatcattgctttgaaaatgctgaaaggaaagtcttactaggtgtttgttaacttttgtttttagtgcttatgtataataatcatctcaaaaatgtattgagtgcctcattttgtccaaaacactgtaatactgaaagtaggtcttgcaatctttataactactttgttaaccataatttttttgttttacatctttctttgaatatttcctcttgtcccaggaggtttggttatttaggaacaatctgttatttgtttatttaatgatttgtggagttcccatcagagtgccatctgggtgctgtttaaatctaatgtgcaaaattctatgagacaaattgtttttgagattggataactaagtctattattcagtattaacatgtcatttggct

SEQ ID NO: 261028 - DNA, 456 bp, Homo sapiens
accaggtaaaatgatttcatgaaccactgatgggtaaattgaaagctagtgattataggacagtggttgccagtcttgtatttcatgggtcagtaaaatttaaaagaaattttggggattgatgtaagatcatctgtttttcatgttgcaaagtaaggatgttttaaaacaaggtagctgggcgcagtggctcatacccgtaaccccagcactttgggaggccaaggcaggtggatcatctgaggtcaggaattgagaccaacctggccatcatggtgaaaccccatctctactaaaattacaaaattagctgggcgtggtggcgattgcctataatcgtagctactcgggaggctgaggcaggagaatcacttgaacctgggaggcggaggttgcagtgagctgagatcgtgccactgcactccagcctggatgaaagagcaaaactctgtttca

SEQ ID NO: 261029 - DNA, 440 bp, Homo sapiens
ccatgagacctgggcactgtgtgccccagaacatgtgacctcaagggggtcagagacttgggtttttcctttcaggatctatgcacagatcttttttagtgccataactggcctctgggttccccactcctgtctcagtcccaactttaagctacccttagattcacaaggaacctgactcaggagagaccacctcctgaccctgcccagaggcagcttaaaaacaacctagttcttcagtctctggaccatgctcctggcctcctcccacagagcatttggaaagcaacccaaggcaatgttcagtcttccctgaacatactcgaatacccctcaaacctctttttttcttaaacaggcaactcacatatgcatctataacctgtatagatacgttgacacttggaagcaaaatagaggaaagctttcattatcatttg

SEQ ID NO: 261030 - DNA, 604 bp, Homo sapiens
taggtttgtcattgtaatccctgggctgcttaggaggataccatttggtttgatgaaaaagctggaatgataatagctcaaactcttttgagcatttagtacatgcttggcactgttctatatgtcttaagttattcactcttgtatttaaccatcaacactcttatgaggtaaatatcccgcaattacttttgcgccaacctagtaccactacagacaaggaaacagatgcagagaggctaagttacaagggcacacagccataaactttggatctgtggagtgactgggcttcagagtcctcttcctgactgctgttcctatgtcttttgcaaagagaagtctttgacaggtatatgctttattaaaatcatgtttagaaagaaatgagagaatagaattagaaaaaggaatgactgtaggcttcgatgaaaatgacttttgtgactaggtgaaaattgtttggctgggtatcctggaaaattgtcttctgggaatatctatattccagggttcacttttgtcatagaattgtttcttggcccatttaagagagatactttgtttattaataaatcaaacgttttaattttaaaaaaaaaaa

SEQ ID NO: 261031 - DNA, 554 bp, Homo sapiens
gggatgtataagacaattgaaatatggtagcatcaaggttgttttgacctaagggcaggatttatggctagtgagggaagtctttcctgccaggagatgttcattgaagtgcagactgctcggagccacaccgcaggctggcagaggaagtgtctcggtgttgccttggcccgttcaccccctgccaggccagtagaggagctgaagagtcttcgccatggtttgagaaaaagcttatagaggcctgaggctggaggcagggggatcagtgaggaggctgcagcatcagtccagctctctccaagttcgctccagggcttgcgagaaacaaagtgctctccctcagccccagctcctcgcacacccagtggaaagaaaacacttgctgtaattggaaagccccgagaaggttgagagcacttttgttttcttcatctctgcgtccttatttcttggaacactacctggcaaaccatgggtgcaccatgcagcaagttaaggtcgccgaagtagaattgcgtattaagccagtgtctccatccaggtaagaaaga

SEQ ID NO: 261032 - DNA, 277 bp, Homo sapiens
tatgcttccttatgaactgacggtgactcccaaattcatatgttgaagacccaactcccaacggacttggaggtgggcctttgagaagtaattgggtttagattaagtcataagggtggagcccccttgatggtattaagtccttctaagaaaaggaagagagtctgagctctcctctgtctccaccatgtgagggcacagagatgtatgcttcttggattttgtttttaactcagtatgaaaaacatatattttaataagaaaattaccccattca

SEQ ID NO: 261033 - DNA, 375 bp, Homo sapiens
aaacacctctatagcatgcagattaaataaactcagccacagcctgttgtgagattcttagggccatgcctgataatggcagcaaaggtagaggcatggatttttctgagagtaaagactcagtggttcctgggagaggaatttgtgtttgtggttggtggtggtttgcacttcatctcataggcacatagtgtacaaaagcaaataactgctgatttctcagtctgagcctttctggttgaatctgaatcatcttgagtatgagcatcaaatgttatagaacagcttttgtatcgggaacatcaacaagggtcctggtagcaggacatagacataaatatctaatagcattggccaatgcctccatgggtagta

SEQ ID NO: 261034 - DNA, 290 bp, Homo sapiens
gtgatagtgagtgagttctcatgagatctggtggtttaaaaagtgtttggcagatgtgttcccaccccgcccgcctccatcaccttgtgaagaaggtgctcttttccccttccaccatgattttaaggtttctgaggcctctccagccatgcagaactgtgagtcaattaaactacttttgtttataaattacccagtctcaggtggtacctttgtagcagtgtgagagctaatagaggtatcagagagattttcattattcttgtgagattttcccaattgaattgaca

SEQ ID NO: 261035 - DNA, 2139 bp, Homo sapiens
gaaaaaggcattttaagatagccagctaaatgccagaaagttgtaaaatggctttttaacttagcttatttcttaattagattactggttttagggtggagccctttaaggaactcagcctaagaaagcagtcagtcttcagggcctaaaggatgcttttcttatccaaacactcaaagaggagcaccctgtagtaataactgttcactgtaagcaactgccatcagccattctaaaagtgtatttctcacctagccatgacacataccaaggttaatttttttcataaagtaatttctggtaccccccaaagccaagaagatcaggaaatgcaatacaaaagggaacagaattttagatctgagataactccgtccatttacagctttggggattccctaaggaaaaatagcagttactaccaaaaaggaacatgtggcacctttttctgttaatttctctttttttttttttaaggcatcaagttgttagaatttactatgtatgtgtctgtctgtctgtctatctctatctatgtatctatgtatctatctatctatctatctatctatctatagagactagcctaaatataggttttaattaagtcaacttttgactatagagctcttaaaaaatcctctcaaacctcttattaccagaatttgccagggacaaagagttgatattttaaatcacacaactgtcaaaccagaaaggacttgttccctggccaggaattgaacctaggccaccacagtgaaagggcagaaccgtaacttctggacacagaatggagtgtctccgttgttcttcccagaaggaatgtaaagcaggcacttttgaccttgaataggattttaactttgttttaggtcagatctgctcgaaagaatagctataacattactttgtgtccctttaatttaacctttccaacaattgtttagaataaaagatgggggtctcgctttgttgcccaggctaatctggaactcctgggctcaagcgatcctcccgtctaggcctcataaagtgctagggttacaggcatgagccaccccacctggcccaatttgatacctttaatctgagaaagtttttagggtaactttaaatcttgtcggcaaatagaaggtggaaaattattaaacattgaaaggatacttcctattaatattctctatttttttatcctcaatatttatttctactccagtattttttgtttgttttagtaatctatttagagtaacaataaagcaggtgagtgaaggagcacaaggaacttcatccccaattaatctgccttttatcagttgatttttcagtgaaacttcagagggcaaagtggaagggtccccttggctccttcatgataacctaatctgatttgtgccatctgcggcttctgaaaaaaaaaatctttagtgggacagagaaataattaacatcttccatgaggtttctttttcctgtgaagaccaagtatgattctgttttgggaacattctgtaattcttcatagatttttaaattagaaggggagtgtcttagtttctcttatttatcctcctcctttcagaggagacagcaagacccagaaaagtgaagaacctgcctgaacatggtccagtggcagactcagaagtggaactcaagccttttgcttgtcccccccacgtttttgatgcagagtttttatagctcctcaagggaggaaggaacagaagggaccctgcagtccaaggtcagtggtttagaaagttggtagttgagaaggatccatgtcacactccctgtttcctgagctaccccaggaaacacagagaagagtttactcagtgatcagagagtcaatggaggttttctgagtcaggtaaccaggattctgaagtttgtgttttttctaaatctgggttgttgatggagaagtagactggattttattaatacttgcaagacacagggtacatttttttcagtggttttctttcccttgtttgatttttataaaggtacatcatagtttgaccttctaaaggtacaagctgaggagtacattattcatcaggggaaatttttctagggcatctgttttcgaaacataggcctaggattgtgtgggtcctgataagc

SEQ ID NO: 261036 - DNA, 517 bp, Homo sapiens
caaggaggccataaaaacctatggtcatggctttgagtccaagtcagtgtggatgcagccagtctgtcatttttgggtgtttcctctgtagccgggtctgccatatggtgatgtcccagctctcgtgctatgaagttaaagcctctttctcaacaggctgcagatgatcacccaggaagagaatgcagaatgcccaaagcaaaccatctcagctggtcactgcttctgtgccaagaagggaggcctggcgaggggccagtcaggaagcagcatggcatcacatgctcatgacccacatgaaggtccctttagacttgtgtcaacaagatccattttctgaaacaactatttttgttctgattataaaagtaacattggctcattggtaaaacttggattgtgtgagaagtctacagaaataaatacaaatcctctagaattccatccccaaaagtaaccactcagacaaatgttctaatgtcatgtaaaaccatattaaaccatcttttctagctgc

SEQ ID NO: 261037 - DNA, 355 bp, Homo sapiens
aatcacgtggctgtacccattttacagacaaggaaattaagacacatcaaggttgagtcacttgcccaggctgtgtggctccaaagtctgcgttcataaccattaaccaggcttctccacctcagcattaaggacacttgggaccagacaagtgtctgttgtggggactgtcctgtgcattgtaggacatgcaacagcattccctggcctctacctactaaatgccaatagcaaccccagtcatgaccagcaaaaatgctcccaggcattgccacatgtcttttgggagactaaatcagccctatgagaactgtaggtctacactaaattgtttttccaagccaaataaatacca

SEQ ID NO: 261038 - DNA, 432 bp, Homo sapiens
gcccagtgattctccaagtgtggttcctgcatacacagcatcagtatcaactaggaacttgttaaaaatgcaacttttcaggccccatcccagaccttctgaatcaaaagctctctaaatggcaatctgtgtcagaaagccctccaggaagcccttatgcatgctgaaatttgacaaccactagtgcaagccaggggtctgcaaaccgcaagccgagagacaaatccagcccacaacctcttactgcctgaattagtccgctttcacgctgctgataaagacatacccgaaactgggtaatttataaagaaaaagaggtttaatggactcacagttccacgtggctggggaggcctcacaatcatggtgaaaggtgaaaggttcctcttacatggtagcaggcaagagcgaaaacatgcgcaggggaactgc

SEQ ID NO: 261039 - DNA, 2903 bp, Homo sapiens
gattgtgagatgtgtcagaacttcttcattgacagctgtgctgcccatgggccccctacatttgtaaaggacagtgcagtggacaaggggcaccccaaccgttcagccctcagtctgcccccagggctgagaattgggccatcaggcatccctcaggctgggcttggagtatggaatgaggcatctgatctgccgctgggtctgcactttggcccttatgagggccgaattacagaagacgaagaggcagccaacaatggatactcctggctggtaagaagagcctgccatttcaccaaggggagaaactgctatgagtatgtggatggaaaagataaatcctgggccaactggatgaggtatgtgaactgtgcccgggatgatgaagagcagaacctggtggccttccagtaccacaggcagatcttctatagaacctgccgagtcattaggccaggctgtgaactgctggtctggtatggggatgaatacggccaggaactgggcatcaagtggggcagcaagtggaagaaagaggaaccaaagccagagatccatccatgtccctcatgctgtctggccttttcaagtcagaaatttctcagtcaacatgtagaacgcaatcactcctctcagaacttcccaggaccatctgcaagaaaactcctccaaccagagaatccctgcccaggggatcagaatcaggagcagcaatatccagatccacacagccgtaatgacaaaaccaaaggtcaagagatcaaagaaaggtccaaactcttgaataaaaggacatggcagagggagatttcaagggccttttctagcccacccaaaggacaaatggggagctgtagagtgggaaaaagaataatggaagaagagtccagaacaggccagaaagtgaatccagggaacacaggcaaattatttgtgggggtaggaatctcaagaattgcaaaagtcaagtatggagagtgtggacaaggtttcagtgttaaatcagatgttattacacaccaaaggacacatacaggggagaagctctacgtctgcagggagtgtgggcggggctttagctggaagtcacacctcctcattcaccagaggatacacacaggggagaagccctatgtctgcagggagtgtgggcggggctttagctggcagtcagtcctcctcactcaccagaggacacacacaggggagaagccctatgtctgcagggagtgtgggcggggctttagccggcagtcagtcctcctcactcaccagaggagacacacaggggagaagccctatgtctgcagggagtgtgggcggggctttagccggcagtcagtcctcctcactcaccagaggagacacacaggggagaagccctatgtctgcagggagtgtgggcggggctttagctggcagtcagtcctcctcactcaccagaggacacacacaggggagaagccctatgtctgcagggagtgtgggcggggctttagctggcagtcagtcctcctcactcaccagaggacacacacaggggagaagccctatgtctgcagggagtgtgggcggggctttagcaataagtcacacctcctcagacaccagaggacacacacaggggagaagccctatgtctgcagggagtgtgggcggggctttcgcgataagtcacacctcctcagacaccagaggacacacacaggggagaagccctatgtctgcagggagtgtgggcggggctttagagataagtcaaacctcctcagtcaccagaggacacacacaggggagaagccctatgtctgcagggagtgtgggcggggctttagcaataagtcacacctcctcagacaccagaggacacacacaggggagaagccctatgtctgcagggagtgtgggcggggctttcgcaataagtcacacctcctcagacaccagaggacacacacaggggagaagccctacgtctgcagggagtgtgggcggggctttagcgataggtcaagcctctgctatcaccagaggacacacacaggggagaagccctacgtctgcagggaggatgagtaagtcattagtaataaaacctcatctcaatagccacaaaaagacaaatgtggtcaccacacacttgcacaccccagctgtgaggtggcttcagcggaagtctgctgaccccttatattccccgagagtataaagagatcggaaataactgattaaacaaatccgccactttcatgactagagatgaggaagaacaagggatagttctgtaagtgttcgggggacatcagcatgtgtggttctttcccgcactgatcccctccattttttgtttgtttttttgcctcctgttctaataaattttgtctccatacaaatctgaaccccaagtgtgtacctcattcttcccttatcactgaaggcaagaagagtccagaagggccacagagaactcatgtgttcagctcaagactccacaggaattcaacccccagaaagacataaacttggagtccgtctggtttaattattggagaatcgattcccaagtccaggaagagaaatgtaagattctagaaagtcgcagcaggaaagggagttccctggtctcctgggaagtgtggcttcttctcctaatggacacctctcctctgctgccatactctcccttggctccccagtctcctctcctgatctcctccaatctctgtagcccaagatgtgaaagccagacaagaacacgcgtgtgtgtatatatgtgttcgggtgtgggggtatgtgccctccgtgtaggtaactgtgtgagtgtggggggtttcaagggtgtgttaggaacaacgctcaaaatcctaaggaaactgaacactcgaacgaaggattcttagcaa

SEQ ID NO: 261040 - DNA, 658 bp, Homo sapiens
tgcgtgtgtatagatgtgtagagatgggagtctccctatgttgttcaggctggtcttgaactcctggcctcaagtgatcctcctgccttggccttccaaagttgttgggattacaggtgtgagccactgcaactggcctaacgtctacttttgaaatgagaatgggaaatacacaattgccaataagtgtaaataatactaaaagtgactttagttctgcatgatagccaattgagtagatgaagtatagaaaatatagggggatgataagaagagggtaaaattgggaggaggtaagggagagaaggaaatttagcccttccaaattctttctctagaatttagagaggatggctcacacctgtaattctagcactttgggaggccaaggcggacgcatcacttgcgaccaggagtttgagaccagcctgggcaacatggcaaaatcctgtctctacataaaatacaaaaattagccgggtgtggtgatgtgcacctatagttcaagctactcagaaggctatggtgggaggattacctgagcttcagaggttgaggctgtggtgagccatgttggtgtcactgcactcaagcctgggtgacagagtgaaacactctcactgcactcaagcctgggtgacagagtgaaacactctca

SEQ ID NO: 261041 - DNA, 207 bp, Homo sapiens
aattgggaggaggtaagggagagaaggaaatttagcccttccaaagttgttgggattacaggtgtgagccactgcaactggcctaacgtctacttttgaaatgagaatgggaaatacacaattgccaataagtgtaaataatactaaaagtgactttagttctgcactccagcctgggcagctagagtgaaacaatgtctcaacaac

SEQ ID NO: 261042 - DNA, 539 bp, Homo sapiens
gcagccgcctactactactaaattcccccccgctcgacgagaatgggaaatacacaattgccaataagtgtaaataatactaaaagtgactttagttctgcatgatagccaattgagtagatgaagtatagaaaatatagggggatgataagaagagggtaaaattgggaggaggtaagggagagaaggaaatttagcccttccaaattctttctctagaatttagagaggatggctcacacctgtaattctagcactttgggaggccaaggcggacgcatcacttgcgaccaggagtttgagaccagcctgggcaacatggcaaaatcctgtctctacataaaatacaaaaattagccgggtgtggtgatgtgcacctatagttcaagctactcagaaggctatggtgggaggattacctgagcttcagaggttgaggctgtggtgagccatgttggtgtcactgcactcaagcctgggtgacagagtgaaacactctcactgcactcaagcctgggtgacagagtgaaacactctca

SEQ ID NO: 261043 - DNA, 310 bp, Homo sapiens
tccaatcatgaaatcctttctactacaaaataattttgtaataagaagttgtttgaatgaaggattctacgatgtatttgatacatattgaaaacactttcagttcaaagacattatgtcctggggtagaaaaccggtgtcagaaagactgtatttaaaccataggtacagtctttccattgttgaatattattattattattactaatttttaaaatggtaataaaaatggcaggtctttccagctgccatggactttacttctctttattgttttatactttccctgattcataaatgcatgtcatct

SEQ ID NO: 261044 - DNA, 1151 bp, Homo sapiens
aagcaggaactgcgacacgctcccctggcccaacctatgacatgaactagagtgccccaaaaaatcctctatttctagacccgtcagtctgggtaaacctggcctctggtgaaggtcctaaatctgtttccccatgccccgctgaccacagtaagtccctggaacagggaaagccttgggctcagggatggtatatcaaatggcagttgcatttctcatattttaggaatgagatggataagaaagaccttctaatgtaatcccttcattattcattggcactactcaaaccccaaagtctctaggttgtttttctactccctggatatatctatatgataattttttgcctggagtagactccatttttctctattaggaagatgaaaactttctgccagaaagttgcccttttaattactttctgggaaacactctaagttatgtgctccacccagctccaggatgaagtttttctgcttaatagcaatgacaggctggtctcatactcctccaagccctctctgctttctagtgatcaaggggtttcaagaccttatggtcttatttatagtctgtaaaaatatgtctaaatatatgtataaataatcttctctcttctgaattcctttcttaatcacaagagccactactgggaacgatattttcaatttggttaatcaggagatttcgtgccagggatcgtgaccataattaggtacatttgggtaaaacttttattagtttgacattatcagtaccagatttgaaatttaacacaagcaaatctgcaggccaattataagcatttataccacagtcctttgcatatttgtttgcataaactctaatccctacatttttaggcatctattactctaaaatgctccctatttaatagggcctctgttgcttattgttttcctatcattctttttatctcaattccagtgttctttcttcttcatccttagaaagagagtaagaaatgagatacagagcaaagacaaaatttagaatacagagaaagcaagaaaaaagaatctaaagacagccaccaaaacagaatgaaaggtgtccctggtaacctagtgtggaaagcatgacagcatctcttcacctctgcacccacaaaaaattgagaccaaagg

SEQ ID NO: 261045 - DNA, 666 bp, Homo sapiens
ttttaggtttaaattactaacttactatttgttgtttattctatgtcttctttgttctccttttcttctttttctgctttcccttagagtagctgagtgtgtttatattacatattgtctcctttgttggcttattaactgtaaatccttgtcatttgattccttgagattttatagcatacatcattgtgagggattgcatatttatgtcctctccaaatttacatgttgaagtcctaatccctaagggatggcattaggaagtgtgacctttggaaggtaattacatcttgaaagtggaaccctcatgatgagattatgtgtcttatgagacaacacagaagagagtttgttttctctttctctgctctttgccatgtgaagacagaatgagatgaccatgcataaaccaggaaatggactctcactggacactagacctgccaacaccttgattgtgttttagagtccagttctagagactcctcagcctctggaacgtgagaaatgaatgtttgttaaggcagtcagtcagtctatggtgtattttttctagtagcctgaactgactgaaagaaaatcatgaacttatcattctaacttcaaggacattatatcacttactgtataataaaataatcttacagtagtatatctctatttcct

SEQ ID NO: 261046 - DNA, 667 bp, Homo sapiens
ttttaggtttaaattactaacttactatttgttgtttattctatgtcttctttgttctccttttcttctttttctgctttcccttagagtagctgagtgtgtttatattacatattgtctcctttgttggcttattaactgtaaatccttgtcatttgattccttgagattttatagcatacatcattgtgagggattgcatatttatgtcctctccaaatttacatgttgaagtcctaatccctaagggatggcattaggaagtgtgacctttggaaggtaattacatcttgaaagtggaaccctcatgatgagattatgtgtcttatgagacaacacagaagagagtttgttttctctttctctgctctttgccatgtgaagacagaatgagatgaccatgcataaaccaggaaatggactctcactggacactagacctgccaacaccttgattgtgttttagagtccagttctagagactcctcagcctctggaacgtgagaaatgaatgtttgttaaggcagtcagtcagtctatggtgtattttttctagtagcctgaactgactgaaagaaaatcatgaacttatcattctaacttcaaggacattatatcaacaccactataatacaataatataccaactacaaaacaaaaaaaacac

SEQ ID NO: 261047 - DNA, 351 bp, Homo sapiens
ctctttgcatgctagacctctttgcatgcctctgtgcatgctagactttagaacaggctagtagtatttagtattaataatacttgaatcattgtgtaatttgcagaattaagaaagttacacacatatatatgaatgaatcagtctgcttagtattaggtggggcttggaaatcagtttatattggagtttttcctaaaatttcagagaaacttcaatcaatccttttggacaggaggtggagattactgtaaaaggtgaaatgagctcctgagttgtatagttgtccacagcagaaatgaaaattagagggcacatgtcctcaggacctcctgatgctgtgtcatgttt

SEQ ID NO: 261048 - DNA, 501 bp, Homo sapiens
gaaactacataggtacatttatgtatatatacatatgtggatatatgtatctataggtttattccatcaccaaatatatgtgtcagagaaataaggttggacgagtacatatgaaacaggctatcagtgattatccctggagaagaatagaggtagaagtagcagcaaagttctaacttgaatcttattgaatggcttaggtcatatgcctgtccctgagccaatcactgtggccagagggttaggatgctcttattaggtgggcccctcttaagccagaggtggagtcaattctacttaaactgcatggactaacaactagggaagggtggttgcatgaagaaaaaccaggatgctgtttccagaaagggtacgagatgccaggcaataaatacagcacatatccatgataatactctcttggatgtcttcatttgtttacaatgtttgcataacactttactgtatataatagctctaaattaccatagcttaaaaatt

SEQ ID NO: 261049 - DNA, 251 bp, Homo sapiens
ccgggccagctggactgcagtgagtgcaggggaaggcaaggacagggctacaagcttcccccacccttggccagggggctccccagcactgggcagagctgtggcctgcggcagggtcctggccagtctgtgaaattgactccagcacctcggggaagtttgtcctcagctccacgtggggcaagaacaggagctgggctggggggaaaccgggagaccttggggtgggtagggagagaatccagcggccg

SEQ ID NO: 261050 - DNA, 464 bp, Homo sapiens
gtttgagtcaacatttgaaaatcaattaatgtagtccactatatcaacagactaaagaggaaaaatcaggcggtcacattgatagatgcagaaaatgcttttgacaaaattcaacacggattcaggatgaaaaatcctcagcaaactaagaataggggtaacttccttgagaaagaacatgtataaaaaaacttgttgttaacatcattacttaatagtgagaaattagaggctttctcactaaatcagaaacaaggtaaggatgttccctctcccaatttcttttcaacactgcagtggaagtcacagcatgcaacaatacaagaaaaggtatacaatacaagaaaaggtatactgattgggaatgaagaaataacgctgtctttgttcacagatgacatgatcatctatgtagaaaatctgaaagaattgacaaaaagactcctggaactcataagtgatta

SEQ ID NO: 261051 - DNA, 462 bp, Homo sapiens
aaaagaagaaaaaaagtgttatgttgctagcttgccagatgaggaggaaaacaaatggtattccaactcaacgaatgaggaaacaaaacctcagagaggttaatgactacatatagatctagacctgtgtgaccttcccaacacccaggagagacagacacagtcacatccccacttacagatgaagacttcaagacgcagagcggtggagggacttgcccgagtcctggagctgggagaactcccgagaccctgggatggtggcatggcccctgcacctccgctgcctcccccatggtgaaagtacagcacaggcggggctgcgagagagcagcggagagattatgcagtagctatctttggaggcgtcactgcccacggtgtttttaggatgaataattgcttgaattcctcaaggctttataaatagatggagaggtaattatacacagcaggacaaaa

SEQ ID NO: 261052 - DNA, 363 bp, Homo sapiens
ggccgtacaatcaaagttaaatatgacttaagaatactagtttttaaaatgaaaaagtaatacatacacacagaaatttcaaaagggtatagaatgaaaaatgagtcttgttcctgaaacacaattgcttatttctgatttcttgtgtgtagcataaaaaaagaaatattctagaaaggctataacaaatgctggtgaggatagggagaaaagggaactctcatacactgttggtgggaatgtaaattagtacaaccactatggagaacactttggaggttcctcaaaaaactaaaaattgagccaccataagatccagcaatcggactgctgggtatctacccaaaagaaaggacatcagta

SEQ ID NO: 261053 - DNA, 332 bp, Homo sapiens
gagcaaccatgtggattccttaactggaggaaccaggaatcaacatacataatatagatttccaccttttcttcttcctatcaagaaatctaaatggagtctttaaaaggttcctgttttgggaggggaacaacacacactggggcctgtcggggtggtgctggggaaaagagagcattaggaaaattagctaatgcatgctggtcttaatacctacttgatgggttgataggtgcagcaaaccaccatggcacacgtttacctatgtaagaagcctgcatatcctgcacatgaaccccagaacttataaaaataaaaataatttaataaaa

SEQ ID NO: 261054 - DNA, 483 bp, Homo sapiens
aactatttgtagtaagcagaataatgcttcccctgtacccaaaggtagccatgtcttaatcctctgaacctctgactatcttatcttacatggcaaaggggaattaaggttgctcatcaactgaccttaaaatagtgagattatactggattatctggtgggcccagtgttatcacaagggtccttaaaagtggatgatagaggcagaaaaacagagttagagggaaacgtgactatgggagaaaggcacagagagagacagtgttgctggatttgaaaatggaagaatacaagccaaggaatgtcagtggcctctggaaaagagactggaaaggacaaggaaatggattctctcatatacctttcagaaaggaacctatccctgctgaaacctcgattttaatccagtaagacctattttggacttctgacctatagaattataagataataaacttgtatgattttaagccaccaaatttg

SEQ ID NO: 261055 - DNA, 387 bp, Homo sapiens
agctcgtgccaggggtctcagatgatggacagacactgatatggaggttcaaatttcgggaaacacagcaacagcccagccatggtgcgtcttggagaaaaccctagacaaggaggttcttttgcaagccgagtagaagagtggcatcttggcttgttgttgtctggggcaaaaaaaaaaaaaaggctcaggccctggagagacaattggggcctcagtgggtgccccaagagaggagagaaacttgcatggagacccaagagtgctgagcttttggccgggcacagaggctcatgcctgtaattccagcaccttgggaggctgaggcaggaggatcacttgagcctaggattaagtttaagattagcctgggaaacccatctctac

SEQ ID NO: 261056 - DNA, 689 bp, Homo sapiens
ccagaagttaagtattccgtgttgaacatgtgagagtaggaaaaacagtttgtttttttcctatctcatcaaagagccaaagtggcttctcatgggcctacaaaagatagaataaagtatagcaaggatcctcaaattctaacgcaacaatccccttcgtgtgccctaccggaagttcactccctcaaaccatgatttagtcttcacttgaccttataaagggcagtctgttggaagttccaaacccagtactcttcttttctttctctaatttctaaaaaaccttctaggtaaggttttgttttttttttttttttttttttggcaccaccaggcaaaaaaaaagggcaaaaatcaaattcatcctgactggtaaaggaacttaaggaaaaaaaaaaaatggggcttggaaacagagttatgaagcagccatgcgtggcccacacaggccacatttaaacaagttgtatacttttgattggatatccaagtacaattgatattgtggacttgagtcaacaggcataggcaaaaaatgcgactctacttgtgtaatcctgggcaacaacctttctcattctcagttttgttatctgtacaatgggtatggtagtgtgtgactggcccactctgaaggttcttatggccagactatgaaacaaagtgtatgaatgacacatgaggcacct

SEQ ID NO: 261057 - DNA, 399 bp, Homo sapiens
ctcatatctattcagccctttggccactatgttcacagtcagcaaatctgccagttttcataaataggaatggagaatctggaaccatccttgcacatctttgctccaagatatatttccctccagtggacaccattatctttgaaaatccccctgagcacaggaacctggccaaagaagacatggagaactcactctgaaaggaatcatggctaagccctcagcaccaaggagctgaattccctcagaagtcacctacaggccacgccacggaaagcaccaatgtgtgctctggaaccagctagacctgggttcagttcctaaacccaacatttaccagcgctgggcgaccctgggtgaggtccttattgttcaaagccacagtttactcatctgcaa

SEQ ID NO: 261058 - DNA, 433 bp, Homo sapiens
gttaacttcattatattcaagtttatatatgagtgaaacttctgggaaaaaataactcatgagaaaactcatgatgtcaataacaatcaagttccaaattttcagataattatattaatacagggctagaacagctttctcagcattcaaaacaagccatgaataatttaaagaaaaaaaggaaaaggaacttgtgagctctaagctgggttgaatcatttatatgcagatatgtgcacacacactcacattataactacaaaacacagaagtgtggtatgtccaacaaccaccattctatgtattataaattaggccaaaacagaatgaataagaatgcacattggccaggcatggtggcttacgcctgtaatcccagcactttgggaggccaaggtgggcggatcacgaggtcaggagatcgagactatcc

SEQ ID NO: 261059 - DNA, 347 bp, Homo sapiens
ataaagagtataagactcagttcctaaaatgaagaaacttacaatctagttgagaagaaacaatgctttacatgtttctcctttataattttttgaagtgatttcaaatacttcataatatttgactttgacaacaccattcatccatttactcaaaagtatgtatgaggctgggcacagtgactcaaaagtatttatgaggctgagcacaggctggggctgtgagcacaggctggagctctaatcccagcacttttggaggccgaggcaggagaatcgcttgaggccaggagtttaagaccagcctgggaaacatggtgagacacctcccatctctataaaaaata

SEQ ID NO: 261060 - DNA, 525 bp, Homo sapiens
cagtgtagctgcacaccccacaccccacttcctgctgcagtagaagaaccccaactcctctcccatcgggtctgaaacacagaaagctatgggtgtgcctgagatccatcaatgcatgcactcaagcagaacagaggactacatatgagtctataacagggaataatgtccctgtacaaagtagtaagcccagcacatgctgtgagggctctttatctctctcataaggaagtgttctggacccaaggcccattcttatatgattgggtggaggctgaaaaactacatgcacaagactgcctttcccaacatcaataataaaaatttgagcagaaatcaatgacattgaaaatgggaaaccagcagagaaaatccatgaaaccagaaattgactttttgaaagatcaattcctttaggttgcccacagatagacgttacctgcagccaatatacatgcttgtgctagcagagggatgcaagaccaggtactcctggctacagcatagtctaccaattagcttgct

SEQ ID NO: 261061 - DNA, 416 bp, Homo sapiens
ggtcaaggggacggctacgcgagaatgggggagtggggcgcccgaggctgctcctgggccctgggaagcccccgattaatgaatggtcgggtcagcgacgcgagggtcggggtttctctgaggaccgcgcgctgcacctgcggagccgggtgaatggatgtcgcgaaggcaagggctgcccttacccctcggggccgacctcggagccctcgcccgtggttgcaacgctttcccgggaaaccggagaagccaggccgggggctcggcctttctgaggcggcccttccggcggaggacaccggcggaatttgagtgcacagagtgcgcgagaggagctccctgtagacacacagtccaagccacgtaggtaattctaatagcagccacatttttaaagagtaaagagaaatcggtga

SEQ ID NO: 261062 - DNA, 470 bp, Homo sapiens
tgcatagctggatgctggatcttcagggaaaatgtatttcccggaaatgattccggttctctaaaaagggctttattaggatcaactgcaaatccgatgggggccagatgtagggatcagagccatgagtgatttaccttaggactgtgtggaaggcatggcctgaggatgtcttttccttggaggtgtgagctgtttccaaggctcgctggacacagaggcaggcacgcttgagctattgcttgtgttattttgcgccaagcatcagatcaggcatgggtccttcgctcctctgctgcctcgtatgcacactgaagagatgctgggcctggaccaaggtagcagcatcgtcctcacggcattcatagtgtctttccccacctaaatcagcttccctgttcagcaccgtccagcggaaactcagtacacgccacatacagaatcatgcattttctaaaagcaagatttta

SEQ ID NO: 261063 - DNA, 657 bp, Homo sapiens
tagagtgggaggcaggtaatgcttagataatcacgcaaaaaattatagaccatggttatgtgctacaatggaaaatacagagtgctgtgaaactaacaggggaacatggcccaatacgtggggaaaggacggtatcagtcaagggaggcttcccccatggactaaccttaacgcgaagatggggatgctagggaagggaagaagaagatggagctttccaggcagaggggatagcaagtgcaaacaccctaagatggaaggtttaaggaagtcataaaagccaagtgtggcaggaacacagaaaaaagaaggaaagtggtaccgaatgagactagagaggaagcagggtcaaatcatgcagtgccttgtaggaaatattaaggattggggtccttattctaaaataaatggggaaagccaataggattttttttaaaagagacatggtctcactatgttgcccaggctggcctgtaactactgggctcatacgatcctccctcctcagcttcctaagtacctgggactacaggcacatgccactacactggcctaattagaagagtttaaataagtaagtggcatgaagaatttttttaagagcattatgcctagctgcctacaatgtaggaactggatgtgggaagaccggttagg

SEQ ID NO: 261064 - DNA, 504 bp, Homo sapiens
gaggttgcagtgagccgagatcacaccaccgcactctagcctgggcaatgggagtgaaactccatctctaagtaaataaataaataaaagccggcagtcccaaattacttctaggaattactgattgtgaaactgtatagcattatctagtcaagggaaagaagtaggcataaataaggaataattaagaggagtaagagtcttcttatgatggggagtcttattccaatggtcttgggaaaagttgtccccagcatgaagtcaacaacttctcatcctgatttgcagtttgattgtctctggtgtgacatcaggcattctggtgaattctctatgtggcacatgtatcaggtatgagatatctcccttgaaatttacatcgagttgtccagcttttgcttatagggcttgagaaacagccgtttttgttatttgagagtcttagccagatattagagaaaactagaagaattcagaatccagtctagtctactagtgaaaaaa

SEQ ID NO: 261065 - DNA, 665 bp, Homo sapiens
gcttattataaacatagacatggaaagaaagcactgaacaacggacaggttccgagatatctctgtgaatagtttcctccaggctgtgcgctctgccttctgtccctccgctatcctctcatcatttgcatgtctgtctacaactgtgcccttgtcctttctccatgagctgacttcctctgtttactcacgggtcctgctgtttcatggttttgagatggttcattgtgacttatctcatttgaattctacatcatgaactttgggtttcaattcccgttaactggcttatctctcagccatagtgtgctgaccaatccatgggcttccacctctgcctcatctgttttggttgggagctggaggccatgtgggaccaaacgttggcccaagtatccaggactatgcagggtattgtccctcagtagggactacgagcatggcaagcacattgaagtggattcatcccagcattagttttgttatgatgaagattggagcttttctctctccttttcaaataaaggcagagaaggaaggtgggtctgtaaggataaagacctttgtcattgttgtggtccaaattttcttaagaagagtcagcgtttttggaggtacctttttgttataatgatattgcttcctattctaattgcctgctgtcg

SEQ ID NO: 261066 - DNA, 520 bp, Homo sapiens
tcaaaataaagagaaaatcatcactgtagccagacaaaaaacatatgcagaggaataaatataacaatgacagtaaaattctcagaaaacatgcaatccagaagataatggagtgacaactttaaatattgaaagaaaaaaaaacctctagtcctagtttactgaaattgaaaaattatacccagggaatacatctttaaaaataaattagatgataatttagatgaaatggactaattccttgaaagatacaagctgccaaaactcacacaagcagaaagacactccagataagcctatatctattaaagaaattgaatcaataattgataaccttccaaaacagcaccaagcttgactaagctcactggtgatttctatcaaccatttaaggaagaaattataccagtactctacagtctcttctagaagatagaaacagacgattacttcctgactcattctgtgaggctaacatcaccctaataacaaaaccagacaaagacattacaataaaaaa

SEQ ID NO: 261067 - DNA, 691 bp, Homo sapiens
aaatcataaagcatgccaaaaatggtaaacctttagcttcagctatcccctcattagactttaccttcttactgtgtattattacaaagattgtgtctagaagatactttataatgatagaaggtattttataatagggtttcttatcacatatacttaatattcaacttctgtacatttaattttcatgtttcctcaagaatatattatacaaagtcatagcatttgacaaaattccttcataactctgaagaaaatattctatgtattgtttgtgtgagttaaatacagtggctctgataaaaatgtcttttgatcagtctttaaaaaaattaaactgaggacaggaaggtaaattaaaggggagatttggagacttgtggtaactggtttattgcaacttaatgtgcagcatcctcattagtcaagtatcatgtgcctacctaggcatgaaatagctatttttttcctgatttaaatctggaaagtttcagttgtagtacagtttgaatagttgttgttgtaaatagccactggactttttaaaaaagtattttttttcaaaaacagtgaaggtcatcttgtatccatagagaccacatgtactttcctcattatttccagcattatttatataatgggtagagttatttacaacattaaacaaaaagtatttcagagagcaaccgtt

SEQ ID NO: 261068 - DNA, 400 bp, Homo sapiens
gctctgcctcctgggttcacgccattctcccgcctcagcctcccgagtagctgggactacaggcgccggccaccacacccggctaattttggtgcatgtatttctatttttatttttcgtttgccatttcttccagtttccttggttaaagttttcagctaagtacttacctttatagtcagagataacgcctactctacacctgcaagtatcattctcccaccctaccttttctcctggctgattccagcaatgtgggactggctggggggtaaggggctagcacatggtacaagaccagctcccaagagcaagtgttgagtgcaaccactatggaaaacagtatagaggttcttcaaaaaacaaaaaattaattaaaaattaaagaattataaaaaaa

SEQ ID NO: 261069 - DNA, 573 bp, Homo sapiens
aggtttaattgacgcacagttctgcaggactgggagacctcagaaaacttacaatcgtggtgggaggggaagcaaacacttccttcttcacatggatctcatgagaacttcagatctcatgagaacttactcactatcacaagatttgcatggggggaactgcccccatgagtcaattacttcccatcagttccctcccaagacttatgaggattatgggaactaaaattcaagatgagatttgggtgggtttggctcaagatgagccagaccatatcatgaagttatcagtatgaattcagtttttaatagagaaggaaaaaaaaaaaaaatatatatatatatatattttatgtgtttcctagctctgtctgcctaaaagaaagaatatcacagttaataatgagcacctttacctcccagatactgttttcgaaatagcattctgcactctaaatagatcccaaaggatctagggatccctggaaaaatagctgatttcaggcctatggcagtaaaagcacaagctaattcttgattcttttttgggatgcaaaataaggatatactata

SEQ ID NO: 261070 - DNA, 632 bp, Homo sapiens
cttcctcggaactgttgcccacatgcagccccggacacagcccctagcccaaaccctacccttcttcctcggaggggcccctcgagacactgggctgcgggtgcctgtcattaagatgggcacagggtgggagggcttccagcggaccctgaaggaagtcgcctacatcctcctctgctgctggtgtatcaaggaactgctggattaatggtagcagggaactgcctcctctccccaccagcaccatggctggcatcgctcagcccccagcccaattgccatcaagactcctgaagccagctgtgcttgaccaaggatgggccataaacaatgagtaaacagtaaagtgtggatcctgctttgagctgtgtcatctagcagacctgcctcatctctgagcctccttcattcccaacccctgcctctggtggacctctggtgggcaggagcttggactgctctggctaggaccccagtaagattgtggcaagacctggcactcctccaagcttggcacagtgagcccaccagctcagatggttgatcttaccataccctcatagtaccaagaatggactgccccctaagaaacctgtttgagaatcactgaattaaaaatataatccataggc

SEQ ID NO: 261071 - DNA, 409 bp, Homo sapiens
ggttaacacaagctgcctatagacggcaaactaaaagagcaccctgtaacacctgcccactgggacgtcagttgtaaacatgcacccctagacactgccatggcatcgaagccccacagccttgcctgtctgtatgctcccctagagatttgagcagcagggtgctgaagaagcgagcgacaccccatcacatgccctgtgagggggacaagggaaccttttctgtttcactaggatgacgagtgtctcctcaacaaaacaaacaccaataacaaaatgaataagactatagttaaacatatctagactctggacccagaaatcaagacaagaaagataattttgtgcatattgtacaacatctctgaggctcagtttcccaaacatggattctacaagtggagtattg

SEQ ID NO: 261072 - DNA, 254 bp, Homo sapiens
aagaatataagttaccaattctgcaacctagagaccaaatttggccatcagaatagctatcattaagtcaagaagagccaaaattattcaccttaggacaaattaaaagaaataaactacttctgaacagatattaacggcatggtgtcctgatatagtctcaattccttatgctaatacagtaaatgcacaggagctgctgatttaaccttatagtaccttagtttccacaaatgaggaaaaagtttaggaat

SEQ ID NO: 261073 - DNA, 972 bp, Homo sapiens
cagacaagtgacagggaatggattccaaacaccagtgtgtaaagctaaatgatggccacttcatgcctgtattgggatttggcacctatgcacctatgcatctcaggaatatgatgaatgtgaatggaatgtgtgcaaaattaacttgtaattgttatgctctcatttccacatcttctgtcttttcttgataaagcttttaggtggacctctgaagtacttgatttctgtatttgcttaacaaatatttgatgaacactatgtatcaggcacgtgggtcagggcatgaggtataatgatatagaatatactttaccgattttatagccaagagggagagagaaacattaaataaattatcacacatcaatattttataagtgttattaaggaaaacagtgtaagatgaaagtatttattacaggtgtgagccaccacccccagccctagaatttattttactgactgtttgttggaattgaactttctcagtttttgtttttgtctgaaaatgtattgattttgccttcttttatggaatgggggtggggaagagtgaaatttacaaagagtgaaatgcacagattataaatgtataatttgatgattttcaacatgtaaagccaatgacccaattatgatacagaatattcccatcattccagaatgctcccttgggccctcttccagtcaattctgcccgtctactctctataggcagccttttgtcaccatggattacttttgtctgttctagaacttcatgtaaatggaatgtacattatgtactcttttgtgtcttgattctttttttgagagtcatccatggggttgtttgtatcaatagctcattctttttcttggtgaatagtatttcgttgtatgaatatatccattctccttcgatggacacattgattgtttccaactttgggctattatgaataaacctacggtgaacattcatctata

SEQ ID NO: 261074 - DNA, 772 bp, Homo sapiens
ttcataaccccacagctcctaagaattctctaacctgccttctgcccttaggctccggtagattgcaaacgacctgctttctttctgatcccgggctgcgttcggacccctgtcgtatagaaaatcccaagctcccgtagattgcaaaggacatgctttctttgtgatcccgggctgcattcggacccctgtcggatagtaaatcccaagtaaggtaccttctgctggaagatctgagctttcttcttggacacctaaaacccacagtcctccagcagtgaaggatccagtgagattttccaggttaacggtcataatcgcctactggtccaacgttcagaagtaacacaggcacctggacaatacacagtagatgtggaaggacacggttgtacatttatccaggccacccttaagtacaatgttctcctacctaagaaggcatctggattttctctttccttggaaatagtaaagaactactcttcgactgcttttgacctcacagtgaccctcaaatacactggaattcgcaataaatccagtatggtggttatagatgtaaaaatgctatcaggatttactccaaccatgtcatccattgaagagcttgaaaacaagggccaagtgatgaagactgaagtcaagaatgaccatgttcttttctacttggaaaatgtaagtttagccatatttttttttctttaaagtttttcttttttccttccaaggataattggatgcttcaatttcttatagatatgtatgatag

SEQ ID NO: 261075 - DNA, 470 bp, Homo sapiens
cgctgtcattttttctaatatctattctctatccttccctaacaatttcttcaaagcttgaaaacaagggccaagtgatgaagactgaagtcaagaatgaccatgttcttttctacttggaaaatggttttggtcgagcagacagtttccctttttctgttgagcagagcaaccttgtgttcaacattcagccagccccagccatggtctacgattactatgaaaaagaagaatatgccctagctttttacaacatcgacagtagttcagtttccgagtgagacaaagcaattactagaagagttggagaagcatttcttgtaacaaactgattcttctgtatcaaacctggaaaaaaatcatgaaccatctgacatcgtgaacagtctgcagtgggctatggtttcttgtcaagtcttatttccttatcatcccattaaatgttgtcattttgcaaaaaaaacaatgac

SEQ ID NO: 261076 - DNA, 424 bp, Homo sapiens
tccacctcctgggttcaagggattcttatggctcagcctcctgagtagctgggattagaggcgtgcaccaccacatctggcaccctcattatgagataagtcactttttaaaattgatatctaaacaagtgttttcttaaaattttcagatacactggaattcgcaataaatccagtatggtggttatagatgtaaaaatgctatcaggatttactccaaccatgtcatccattgaagaggtaaataatagaagcctaatctttcagcacaaagacagctacatagagtataaagataaaataaatacttgttcagccatagtttagcaaaacaaaactatagaattcttcttcaacattcacctttgtatttttgcgctaacactggagagctggtttacttaatttgtaccaattagcagtc

SEQ ID NO: 261077 - DNA, 788 bp, Homo sapiens
gcagagccaccacaggaaaccaggaggctaggtggggtggaagggagtgagctctccggctctcaggagcgaaagcttccaagttgggctctccccttggccccttccacccaggaaagacagctgggtccgccaggaccaagaatccccaaaggggctgctcccagaggttgtgttgcagggactggagagaggacttcccagtacagggggtggccctctgatcaggtgggggtgggtggcagcagagcatttggtaggaggtcaggagctcacaggagatgggattctgccgatgcctgctgaatgaatgagggagggagacggcaggaccagggactggggaattggtactaaggtgctgggtacctgccgggcactctgtccatacatgatctcagttcagctctccaccttggaaacacaagaaaggagccgtggctgcagagaaaaacagaggctggaaacaggggtacatgggcagggtggtggtggtgagagaattgcctgaatcagctgccaaatggtgcccaggttggaaaagcaaatgtgcacacatgggttcttcccactctaaccctgaggaattagaggcctgcttctgacacagactgggcagtggctagtgactctaggtatagagtatccaggccctgctcacccaggctagagcttagggagccagaaggaaggaggtgcatgttggggtgcaggacaggagggaaaaatactcgaattgcaaggtgagggcacagtctatttatattgggttgaattaactcctcccc

SEQ ID NO: 261078 - DNA, 1118 bp, Homo sapiens
ggccaactgatctccaaccatctgaggaacccaaccgtaggtgtgggaaccgctgagcggaacaccctcccccagcgggaaatccgggacacgcaggagcctcagtgaatccgaccattgtctcatctcaccaggctccggtagattgcaaacgacctgctttctttctgatcccgggctgcgttcggacccctgtcgtatagaaaatcccaagtaaggtacctgccgtcggcagatctgagctttcttcttggacacctaatacccacagtcctccagacccctgtcggatagtaaatcccaagtaaggtaccttctgctggaagatctgagctttcttcttggacacctaaaacccacagtcctccagcagtgaaggatccagtgagattttccaggttaacggtcataatcgcctactggtccaacgttcagaagtaacacaggcacctggacaatacacagtagatgtggaaggacacggttgtacatttatccaggccacccttaagtacaatgttctcctacctaagaaggcatctggattttctctttccttggaaatagtaaagaactactcttcgactgcttttgacctcacagtgaccctcaaatacactggaattcgcaataaatccagtatggtggttatagatgtaaaaatgctatcaggatttactccaaccatgtcatccattgaagagcttgaaaacaagggccaagtgatgaagactgaagtcaagaatgaccatgttcttttctacttggaaaatggttttggtcgagcagacagtttccctttttctgttgagcagagcaaccttgtgttcaacattcagccagccccagccatggtctacgattactatgaaaaagaagaatatgccctagctttttacaacatcgacagtagttcagtttccgagtgagacaaagcaattactagaagagttggagaagcatttcttgtaacaaactgattcttctgtatcaaacctggaaaaaaatcatgaaccatctgacatcgtgaacagtctgcagtgggctatggtttcttgtcaagtcttatttccttatcatcccattaaatgttgtcattttgcaaaaaaaacaatgac

SEQ ID NO: 261079 - DNA, 1035 bp, Homo sapiens
ttcataaccccacagctcctaagaattctctaacctgccttctgcccttaggctccggtagattgcaaacgacctgctttctttctgatcccgggctgcgttcggacccctgtcgtatagaaaatcccaagtaaggtacctgccgtcggcagatctgagctttcttcttggacacctaatacccacagtcctccagacccctgtcggatagtaaatcccaagtaaggtaccttctgctggaagatctgagctttcttcttggacacctaaaacccacagtcctccagcagtgaaggatccagtgagattttccaggttaacggtcataatcgcctactggtccaacgttcagaagtaacacaggcacctggacaatacacagtagatgtggaaggacacggttgtacatttatccaggccacccttaagtacaatgttctcctacctaagaaggcatctggattttctctttccttggaaatagtaaagaactactcttcgactgcttttgacctcacagtgaccctcaaatacactggaattcgcaataaatccagtatggtggttatagatgtaaaaatgctatcaggatttactccaaccatgtcatccattgaagagcttgaaaacaagggccaagtgatgaagactgaagtcaagaatgaccatgttcttttctacttggaaaatggttttggtcgagcagacagtttccctttttctgttgagcagagcaaccttgtgttcaacattcagccagccccagccatggtctacgattactatgaaaaagaagaatatgccctagctttttacaacatcgacagtagttcagtttccgagtgagacaaagcaattactagaagagttggagaagcatttcttgtaacaaactgattcttctgtatcaaacctggaaaaaaatcatgaaccatctgacatcgtgaacagtctgcagtgggctatggtttcttgtcaagtcttatttccttatcatcccattaaatgttgtcattttgcaaaaaaaacaatgac

SEQ ID NO: 261080 - DNA, 969 bp, Homo sapiens
tcagtccccgcctcgcggggggtgcctcccccctctgcgatgggggttccaagagccagggggggaagaggggctggctcccgtagattgcaaaggacatgctttctttgtgatcccgggctgcattcggacccctgtcggatagtaaatcccaagtaaggtaccttctgctggaagatctgagctttcttcttggacacctaaaacccacagtcctccagcagtgaaggatccagtgagattttccaggttaacggtcataatcgcctactggtccaacgttcagaagtaacacaggcacctggacaatacacagtagatgtggaaggacacggttgtacatttatccaggccacccttaagtacaatgttctcctacctaagaaggcatctggattttctctttccttggaaatagtaaagaactactcttcgactgcttttgacctcacagtgaccctcaaatacactggaattcgcaataaatccagtatggtggttatagatgtaaaaatgctatcaggatttactccaaccatgtcatccattgaagagcttgaaaacaagggccaagtgatgaagactgaagtcaagaatgaccatgttcttttctacttggaaaatggttttggtcgagcagacagtttccctttttctgttgagcagagcaaccttgtgttcaacattcagccagccccagccatggtctacgattactatgaaaaagaagaatatgccctagctttttacaacatcgacagtagttcagtttccgagtgagacaaagcaattactagaagagttggagaagcatttcttgtaacaaactgattcttctgtatcaaacctggaaaaaaatcatgaaccatctgacatcgtgaacagtctgcagtgggctatggtttcttgtcaagtcttatttccttatcatcccattaaatgttgtcattttgcaaaaaaaacaatgac

SEQ ID NO: 261081 - DNA, 1496 bp, Homo sapiens
gcagagccaccacaggaaaccaggaggctaggtggggtggaagggagtgagctctccggctctcaggagcgaaagcttccaagttgggctctccccttggccccttccacccaggaaagacagctgggtccgccaggaccaagaatccccaaaggggctgctcccagaggttgtgttgcagggactggagagaggacttcccagtacagggggtggccctctgatcaggtgggggtgggtggcagcagagcatttggtaggaggtcaggagctcacaggagatgggattctgccgatgcctgctgaatgaatgagggagggagacggcaggaccagggactggggaattggtactaaggtgctgggtacctgccgggcactctgtccatacatgatctcagttcagctctccaccttggaaacacaagaaaggagccgtggctgcagagaaaaacagaggctggaaacagaggtgtgggaaccgctgagcggaacaccctcccccagcgggaaatccgggacacgcaggagcctcagtgaatccgaccattgtctcatctcaccagacccctgtcgtatagaaaatcccaagtaaggtacctgccgtcggcagatctgagctttcttcttggacacctaatacccacagtcctccagacccctgtcggatagtaaatcccaagtaaggtaccttctgctggaagatctgagctttcttcttggacacctaaaacccacagtcctccagcagtgaaggatccagtgagattttccaggttaacggtcataatcgcctactggtccaacgttcagaagtaacacaggcacctggacaatacacagtagatgtggaaggacacggttgtacatttatccaggccacccttaagtacaatgttctcctacctaagaaggcatctggattttctctttccttggaaatagtaaagaactactcttcgactgcttttgacctcacagtgaccctcaaatacactggaattcgcaataaatccagtatggtggttatagatgtaaaaatgctatcaggatttactccaaccatgtcatccattgaagagcttgaaaacaagggccaagtgatgaagactgaagtcaagaatgaccatgttcttttctacttggaaaatggttttggtcgagcagacagtttccctttttctgttgagcagagcaaccttgtgttcaacattcagccagccccagccatggtctacgattactatgaaaaagaagaatatgccctagctttttacaacatcgacagtagttcagtttccgagtgagacaaagcaattactagaagagttggagaagcatttcttgtaacaaactgattcttctgtatcaaacctggaaaaaaatcatgaaccatctgacatcgtgaacagtctgcagtgggctatggtttcttgtcaagtcttatttccttatcatcccattaaatgttgtcattttgcaaaaaaaacaatgac

SEQ ID NO: 261082 - DNA, 943 bp, Homo sapiens
ttcataaccccacagctcctaagaattctctaacctgccttctgcccttaggctccggtagattgcaaacgacctgctttctttctgatcccgggctgcgttcggacccctgtcgtatagaaaatcccaagtaaggtacctgccgtcggcagatctgagctttcttcttggacacctaatacccacagtcctccacagtgaaggatccagtgagattttccaggttaacggtcataatcgcctactggtccaacgttcagaagtaacacaggcacctggacaatacacagtagatgtggaaggacacggttgtacatttatccaggccacccttaagtacaatgttctcctacctaagaaggcatctggattttctctttccttggaaatagtaaagaactactcttcgactgcttttgacctcacagtgaccctcaaatacactggaattcgcaataaatccagtatggtggttatagatgtaaaaatgctatcaggatttactccaaccatgtcatccattgaagagcttgaaaacaagggccaagtgatgaagactgaagtcaagaatgaccatgttcttttctacttggaaaatggttttggtcgagcagacagtttccctttttctgttgagcagagcaaccttgtgttcaacattcagccagccccagccatggtctacgattactatgaaaaagaagaatatgccctagctttttacaacatcgacagtagttcagtttccgagtgagacaaagcaattactagaagagttggagaagcatttcttgtaacaaactgattcttctgtatcaaacctggaaaaaaatcatgaaccatctgacatcgtgaacagtctgcagtgggctatggtttcttgtcaagtcttatttccttatcatcccattaaatgttgtcattttgcaaaaaaaacaatgac

SEQ ID NO: 261083 - DNA, 1128 bp, Homo sapiens
ttcataaccccacagctcctaagaattctctaacctgccttctgcccttaggctccggtagattgcaaacgacctgctttctttctgatcccgggctgcgttcggacccctgtcgtatagaaaatcccaagtaaggtacctgccgtcggcagatctgagctttcttcttggacacctaatacccacagtcctccagacccctgtcggatagtaaatcccaagtaaggtaccttctgctggaagatctgagctttcttctggacacctaaaacccacagtcctccagacgacccctgtcggatagtaaatcccaagtaaggtaccttctgctggaagatctgagctttcttcttggacacctaaaacccacagtcctccagcagtgaaggatccagtgagattttccaggttaacggtcataatcgcctactggtccaacgttcagaagtaacacaggcacctggacaatacacagtagatgtggaaggacacggttgtacatttatccaggccacccttaagtacaatgttctcctacctaagaaggcatctggattttctctttccttggaaatagtaaagaactactcttcgactgcttttgacctcacagtgaccctcaaatacactggaattcgcaataaatccagtatggtggttatagatgtaaaaatgctatcaggatttactccaaccatgtcatccattgaagagcttgaaaacaagggccaagtgatgaagactgaagtcaagaatgaccatgttcttttctacttggaaaatggttttggtcgagcagacagtttccctttttctgttgagcagagcaaccttgtgttcaacattcagccagccccagccatggtctacgattactatgaaaaagaagaatatgccctagctttttacaacatcgacagtagttcagtttccgagtgagacaaagcaattactagaagagttggagaagcatttcttgtaacaaactgattcttctgtatcaaacctggaaaaaaatcatgaaccatctgacatcgtgaacagtctgcagtgggctatggtttcttgtcaagtcttatttccttatcatcccattaaatgttgtcattttgcaaaaaaaacaatgac

SEQ ID NO: 261084 - DNA, 884 bp, Homo sapiens
tttctttttaaaaatgttttaatttttgtgggtacatagtaggtgtaaatatttaccgggtgcatgatacaggcatgcaacgtgtaagaatcacatcagggcaagtggggtatgcatcacctcaagcatttatccattgtgttaccaatgatcgaagtatactcttggttattttaaaatgtaaaatcacattactactgactctagtcagactgtataattcttaatacaggatgggttttcttataatttgctatcctttctaggccacccttaagtacaatgttctcctacctaagaaggcatctggattttctctttccttggaaatagtaaagaactactcttcgactgcttttgacctcacagtgaccctcaaatacactggaattcgcaataaatccagtatggtggttatagatgtaaaaatgctatcaggatttactccaaccatgtcatccattgaagagcttgaaaacaagggccaagtgatgaagactgaagtcaagaatgaccatgttcttttctacttggaaaatggttttggtcgagcagacagtttccctttttctgttgagcagagcaaccttgtgttcaacattcagccagccccagccatggtctacgattactatgaaaaagaagaatatgccctagctttttacaacatcgacagtagttcagtttccgagtgagacaaagcaattactagaagagttggagaagcatttcttgtaacaaactgattcttctgtatcaaacctggaaaaaaatcatgaaccatctgacatcgtgaacagtctgcagtgggctatggtttcttgtcaagtcttatttccttatcatcccattaaatgttgtcattttgcaaaaaaaacaatgac

SEQ ID NO: 261085 - DNA, 1518 bp, Homo sapiens
ggccaactgatctccaaccatctgaggaacccaaccgtaggtgtgggaaccgctgagcggaacaccctcccccagcgggaaatccgggacacgcaggagcctcagtgaatccgaccattgtctcatctcaccaggctccggtagattgcaaacgacctgctttctttctgatcccgggctgcgttcggacccctgtcgtatagaaaatcccaagtaaggtacctgccgtcggcagatctgagctttcttcttggacacctaatacccacagtcctccagacccctgtcggatagtaaatcccaagtaaggtaccttctgctggaagatctgagctttcttcttggacacctaaaacccacagtcctccagcagtgaaggatccagtgagattttccaggttaacggtcataatcgcctactggtccaacgttcagaagtaacacaggcacctggacaatacacagtagatgtggaaggacacggttgtacatttatccaggccacccttaagtacaatgttctcctacctaagaaggcatctggattttctctttccttggaaatagtaaagaactactcttcgactgcttttgacctcacagtgaccctcaaatacactggaattcgcaataaatccagtatggtggttatagatgtaaaaatgctatcaggatttactccaaccatgtcatccattgaagagcttgaaaacaagggccaagtgatgaagactgaagtcaagaatgaccatgttcttttctacttggaaaatggttttggtcgagcagacagtttccctttttctgttgagcagagcaaccttgtgttcaacattcagccagccccagccatggtctacgattactatgaaaaagaagaatatgccctagctttttacaacatcgacagtagttcagtttccgagtgagacaaagcaattactagaagaggtgaagaaattttattacgtcataaaccattgaaaacacatctagtaagaaaatgaaaacctgaataagataggacagtagttgaagaaagaaaagtgtctggtacttcattagacttgtgtagctgtgtactgcatgagtaatctgataatcattaagattatattaatttctttaaaaatagctttaaagaattcacagctatatatgtaccttttataaatctctcatttttgttttgtaagttgacaggtcagtaaaaatttaggcatatatatttgtacatatgtgtgtgtatgtacatgtctatgtgcctatatatgcatgtttttatatctaaatatctatttatatatacatacaaacgtgtttattgtttaaatgatgttttaaatcccagttggagaagcatttcttgtaacaaactgattcttctgtatcaaacctggaaaaaaatcatgaaccatctgacatcgtgaacagtctgcagtgggctatggtttcttgtcaagtcttatttccttatcatcccattaaatgttgtcattttgcaaaaaaaacaatgac

SEQ ID NO: 261086 - DNA, 1508 bp, Homo sapiens
gcagagccaccacaggaaaccaggaggctaggtggggtggaagggagtgagctctccggctctcaggagcgaaagcttccaagttgggctctccccttggccccttccacccaggaaagacagctgggtccgccaggaccaagaatccccaaaggggctgctcccagaggttgtgttgcagggactggagagaggacttcccagtacagggggtggccctctgatcaggtgggggtgggtggcagcagagcatttggtaggaggtcaggagctcacaggagatgggattctgccgatgcctgctgaatgaatgagggagggagacggcaggaccagggactggggaattggtactaaggtgctgggtacctgccgggcactctgtccatacatgatctcagttcagctctccaccttggaaacacaagaaaggagccgtggctgcagagaaaaacagaggctggaaacagaggtgtgggaaccgctgagcggaacaccctcccccagcgggaaatccgggacacgcaggagcctcagtgaatccgaccattgtctcatctcaccaggctccggtagattgcaaacgacctgctttctttctgatcccgggctgcgttcggacccctgtcgtatagaaaatcccaagtaaggtacctgccgtcggcagatctgagctttcttcttggacacctaatacccacagtcctccagacccctgtcggatagtaaatcccaagtaaggtaccttctgctggaagatctgagctttcttcttggacacctaaaacccacagtcctccagcagtgaaggatccagtgagattttccaggttaacggtcataatcgcctactggtccaacgttcagaagtaacacaggcacctggacaatacacagtagatgtggaaggacacggttgtacatttatccaggccacccttaagtacaatgttctcctacctaagaaggcatctggattttctctttccttggaaatagtaaagaactactcttcgactgcttttgacctcacagtgaccctcaaatacactggaattcgcaataaatccagtatggtggttatagatgtaaaaatgctatcaggatttactccaaccatgtcatccattgaagagcttgaaaacaagggccaagtgatgaagactgaagtcaagaatgaccatgttcttttctacttggaaaatagcaaccttgtgttcaacattcagccagccccagccatggtctacgattactatgaaaaagaagaatatgccctagctttttacaacatcgacagtagttcagtttccgagtgagacaaagcaattactagaagagttggagaagcatttcttgtaacaaactgattcttctgtatcaaacctggaaaaaaatcatgaaccatctgacatcgtgaacagtctgcagtgggctatggtttcttgtcaagtcttatttccttatcatcccattaaatgttgtcattttgcaaaaaaaacaatgac

SEQ ID NO: 261087 - DNA, 993 bp, Homo sapiens
ttcataaccccacagctcctaagaattctctaacctgccttctgcccttaggctccggtagattgcaaacgacctgctttctttctgatcccgggctgcgttcggacccctgtcgtatagaaaatcccaagtaaggtacctgccgtcggcagatctgagctttcttcttggacacctaatacccacagtcctccagacccctgtcggatagtaaatcccaagtaaggtaccttctgctggaagatctgagctttcttcttggacacctaaaacccacagtcctccagcagtgaaggatccagtgagattttccaggttaacggtcataatcgcctactggtccaacgttcagaagtaacacaggcacctggacaatacacagtagatgtggaaggacacggttgtacatttatccaggccacccttaagtacaatgttctcctacctaagaaggcatctggattttctctttccttggaaatagtaaagaactactcttcgactgcttttgacctcacagtgaccctcaaatacactggaattcgcaataaatccagtatggtggttatagatgtaaaaatgctatcaggatttactccaaccatgtcatccattgaagagcttgaaaacaagggccaagtgatgaagactgaagtcaagaatgaccatgttcttttctacttggaaaatagcaaccttgtgttcaacattcagccagccccagccatggtctacgattactatgaaaaagaagaatatgccctagctttttacaacatcgacagtagttcagtttccgagtgagacaaagcaattactagaagagttggagaagcatttcttgtaacaaactgattcttctgtatcaaacctggaaaaaaatcatgaaccatctgacatcgtgaacagtctgcagtgggctatggtttcttgtcaagtcttatttccttatcatcccattaaatgttgtcattttgcaaaaaaaacaatgac

SEQ ID NO: 261088 - DNA, 1305 bp, Homo sapiens
gcagagccaccacaggaaaccaggaggctaggtggggtggaagggagtgagctctccggctctcaggagcgaaagcttccaagttgggctctccccttggccccttccacccaggaaagacagctgggtccgccaggaccaagaatccccaaaggggctgctcccagaggttgtgttgcagggactggagagaggacttcccagtacagggggtggccctctgatcaggtgggggtgggtggcagcagagcatttggtaggaggtcaggagctcacaggagatgggattctgccgatgcctgctgaatgaatgagggagggagacggcaggaccagggactggggaattggtactaaggtgctgggtacctgccgggcactctgtccatacatgatctcagttcagctctccaccttggaaacacaagaaaggagccgtggctgcagagaaaaacagaggctggaaacagaggtgtgggaaccgctgagcggaacaccctcccccagcgggaaatccgggacacgcaggagcctcagtgaatccgaccattgtctcatctcaccaggctccggtagattgcaaacgacctgctttctttctgatcccgggctgcgttcggacccctgtcgtatagaaaatcccaagtaaggtacctgccgtcggcagatctgagctttcttcttggacacctaatacccacagtcctccagacccctgtcggatagtaaatcccaagtaaggtaccttctgctggaagatctgagctttcttcttggacacctaaaacccacagtcctccagcagtgaaggatccagtgagattttccaggttaacggtcataatcgcctactggtccaacgttcagaagtaacacaggcacctggacaatacacagtagatgtggaaggacacggttgtacatttatccaggccacccttaagtacaatgttctcctacctaagaaggcatctggattttctctttccttggaaatagtaaagaactactcttcgactgcttttgacctcacagtgaccctcaaatacactggaattcgcaataaatccagtatggtggttatagatgtaaaaatgctatcaggatttactccaaccatgtcatccattgaagagttgctacctgtgtttatgaaaacatcacggcaccaaggaatgttccataaaacagaacgtgacgtagaaaagagtggacattgagttctgcatgggctatggtttcttgtcaagtcttatttccttatcatcccattaaatgttgtcattttgcaaaaaaaacaatgac

SEQ ID NO: 261089 - DNA, 467 bp, Homo sapiens
gaatagggtacactttttttcttaactacttgtatatctctttctctctttctttctctctttctctccttgactccctctttatctctctgtcccttcctctccctctttgtctctttttctctctctctctgctggtctttccttgcctctgccagctgcttatgctgctgttctctcaaccactgtggcatggggtggatctaaaaccagcataaccaagtgtccatgtatgagaactgttctgggtgccctggcttataggttaccttgtgccatacctttgaaacaagggacctgtccaggcttccttctgatggccaacccacctctaatgctggccaatccatttcacacaaagttctaagttttcctggtgtcatagtaacaccgtaaggggacctttcctgaaatttttcaacatagttcctagttgggtgggcttactttgtgcctgacccatgtgt

SEQ ID NO: 261090 - DNA, 450 bp, Homo sapiens
atgtctaagtcagccatagaacctagcattgccctcatatttaagttgaggcagtcatctactagcaggtattaaagaaacattacttaagacacttgttaaggatggtaggaaggcttttctcaagaggagttactgcagtgagggttttgcagtgtggaggatagagatcaagctccactgtaaatacaagaaggacaaatgtgatgtttagctgagtgaaatgggagttagtggatggaaaattcctcagaggaaacatcaaagctagggggactcttgctagaccaactgtttttttttttgaaaaaccactttattgaggcatgattgacatgaaaaaagctgtacatatataatgtatgtaactcaatgagtttggggatgaatatacagccatggggctgtcaccatcatcaaggtcataaacatatccatcacctcccaaag

SEQ ID NO: 261091 - DNA, 859 bp, Homo sapiens
tgtttgtgagacagagtctcgctctgttgcccaggctggggtgcagtggtgcaagctcggctctctgcaagctctgtctcctgggttcacgccattctcctgcctcagcctcccaagtagctgggattactactctactgaacccatgaggcagaaatttgagaccatcctgcccaacgtggtgaaaacatggtgaaaccctgtctctactaaaaatacaaaaattagctgggcgtggtggcaggtgcctgtaatcccagctactcaggagactgaggcaggagaattgcttgaacccaggaggtggaggttgcagtgagccaagatcaagattgcgccattgcactccagcctgggcgacaagaacaaaactctgtctcaaaaaaaaaaaaaaaaaaagtctgtactgataaaacccattgtgtacaaaactttgtatgtaaggaagattttaattttctctttatacaagctgagtcatatttaaataatttgatgttggcttagataatttcagatagattttatattctggatttgtgtttttgttaacaaatatacaaagactttggtgatcactttgcaaatatttgttaatccttgagtttgagaacctgtcttttaaaaataatattttgtatactaattaagtgtaatggaaatcacaattttaagtctaggaaataaagtattatatatactttcaaacaagctagcaaggcttttattattacttttttatttgaaatatcttatatatttggttagttctgtttaacttgtttttaactgttgcccttatgagttattttatataaatttttacaataaaataatttgattttcaaaaaaaataaaa

SEQ ID NO: 261092 - DNA, 388 bp, Homo sapiens
  misc_feature (36)..(36): n is a, c, g, or t
  misc_feature (39)..(39): n is a, c, g, or t
  misc_feature (42)..(43): n is a, c, g, or t
cccgggacccctctttgccctctttcggaattgggntcnggnncccccccccggtgaatttgcaaaactctgtctcaaaaaaaaaaaaaaaaaaagtctgtactgataaaacccattgtgtacaaaactttgtatgtaaggaagattttaattttctctttatacaagctgagtcatatttaaataatttgatgttggcttagataatttcagatagattttatattctggatttgtgtttttgttaacaaatatacaaagactttggtgatcactttgcaaatatttgttaatccttgagtttgagaacctgtcttttaaaaataatattttgtatactaattaagtgtaatggaaatcaccgtgaatctacctgggcgagtcctct

SEQ ID NO: 261093 - DNA, 474 bp, Homo sapiens
cctttgccctagctttgcttgggtccgctgggttcgttctgcccactcagcctggcaggctgcactcagcccacgctaccggcctggatcccatgcctccaagggagactgcaagtcagagttggccatgcccagttaaataccagcatacaaggaaacctcacctcgttgggagaatatttcacacccctccaaactatcagcacagtggaaacttggcatgtcccacattaaatctggctgcagctgtctcagggatccaagactgaatgactggtgattttacattgatgttctgctgaaccttcctggtacctgagtggttaaaatctgagaatttctagaagaaaagaaagtacgtctaaagcaatgctagaaaggagctaataaattcttcaggattaacatcaaagtctgatgcaaactaatttaatccccttgatattcagggataaattaaagctaatgaattac

SEQ ID NO: 261094 - DNA, 681 bp, Homo sapiens
agacccaggctctttctggcttattgtaattcatttccttagcatgttgggttttatcttcattctgttcccttcacagttgtggaattcctgttgcagcttcattttttaaggacacaaggcaggaaaggggaagggcaactccacacgtgtctgtcttcttatcttgaattgcaaagctgtcccagtaccttaccacctacttgcttctctagcagattctcttccatattatttaagccactgggtcactccaggttacaaaggtagcggtatattgaaactttgaaatttcagcctccatagtaaagaagggcaagggagaaacggtgtttgtttagtcagtctaaattgtcaaaggagatagccagatatctctttttgagagataaacagacactcttcatttaaacatggtataacttggctttaaggcatatttctttaaaaatatattgtcaaggactgcgaagagcctgaagctactttgccatactttcagggctagcagaagacaggagaatatttggtcggggaaaatgaaccatttattagtcacagagggacagcattaggcaaggggtcatcacttgtgccaggtcaccaaccctcagtttctataggacagtatgggcaggagacacctgcatgtgcagtggcttgcattacagatgaatccca

SEQ ID NO: 261095 - DNA, 443 bp, Homo sapiens
gttacatttaatactcaaagatttaaagtgaaaaggatttcttgtaaaaagcagatttttcatggtgcctgcattgtcagaggcagctggagaggttggttcagatatgccctagtgagtatgtgccagcttctctagcagcctgtggctcccgagcataaatagaaacacagctgcatatgcaggctgaacaagaggaagtgtctgggcacctccctggctggagcagaaggctcccagggtgcttagctcacctgtggcatggggatggaggggccaggtagtcagggagctggtgggaggaccacacacgcacattcccccacccaaacacacacttgcctctaagggttgggggtttggcagactgggctcacagtattgactccctgtatgacctagacaagtcacttccctttctgggcctctgtcccctcatctgc

SEQ ID NO: 261096 - DNA, 333 bp, Homo sapiens
tcaaaaggcagagagccagagctctagaaacctgcaaaaattggctaagcctgcagtcttcatttctttaagttgagcatcttcaaagtctagaattctaactgtagggcacagcagctgccactgcagatctgatcctctcagcttttggcagctctcaacttgagattctagcaaaagaatttttcaagttgctattattgcctgtcatggatttataaatattgtgcactatctgctgtggcatggctctcatgggacgccagagcatgccaaatgcataacagaatgaaaaacagtttctattcttcaaataaatgctaatttttttta

SEQ ID NO: 261097 - DNA, 397 bp, Homo sapiens
tgggaggaacagagtggttgtacccatttaaaccccaccaacaatgtatagaagtagtagtgctgattttgaaagtatgtaatggaatctgagtatggttttaattgtcagttccctgatgaataatgatattgaattctttttaatttgcttgttgtctgtttaaatatctacatttatgaaaggcctacttgaatcttttgttcatttcttaaaacattgagttgtctttctcttactgatttgtagtcaagttttatatattttgggtgcaagtcatatgtcaatagttgttttacatttttcttctcctaatctgtagatcattgctcactctcttaatgatatgtttcaatgaacagaagtttttaattttaatgaagtctatttgatcaaa

SEQ ID NO: 261098 - DNA, 481 bp, Homo sapiens
cattggtcagctgcttaattgatcacaggttcatgttgttactgacaggcttcagttatgcctaatcatgagaaacatttgtgcagcctccatctcctttttgtttttaaattaattgagcaagacaattgcagattatgcagcccttagtggcgcctagacaggaacttgaagggactatcagggacaaaaagggacctgaagagaactgaagagacccgaagagacctgaaaaactagttcaggccatgatgggaagagggggtcggacatgtctcattataccctcctccctttggaattcaggcaccacttgtagctgactgtcactgctactacttgagactgtcactacagcagtttctactgttactgtctgagaccgtcattatgagactgaacgaaggcacaaacgtagaaatgataacaaaaaacaaaagtaatttttaaggaaaggctagcatggggaagaagaagagag

SEQ ID NO: 261099 - DNA, 480 bp, Homo sapiens
accctagctcggtacccatcctccctctctcacgaaggaaaaggaattcagtgaaatagagacaatgttgggaacaaaggaaaattttcaaaaagctgccactaataacttcagaaatacaagaaaatttgttgcatctttagaataacaacaggaagcttgggaaaaagaaacatcagagcaataaagagctcttggggaaaatatttttatttcatatcccagaaaataaatttaaaagtgcatacaattttggaaaataactttgttgaaaaacaagaggaataatgatgaataagaaggaaggaaagaaaattagaatctcaatctaggaagcttcacctctaaacattaggagtttcagaaagagaagatagagaaaaaggaaaggataagataatcaaatgaataatgtaggaatatctcttacagctgaaatacgtgagcttctacactgacgggttccctaattactcagca

SEQ ID NO: 261100 - DNA, 705 bp, Homo sapiens
agagatttttagacacagacatgtggagctctccatcaggaaggatggcttgccctttcattaccccgagtaaaacccagcaattaagtatctgcccatgcttacagtgcttcagatgaaacacttgatgcttcactctgaaaaaacaagcggacaatccaggataactggatattttgaggaaggctttccacatgaaagagctgaaaacacgcacaatatcaaccagccaatgaaagaaacaaatcaacaaaacaacaaggaaaaggaattcagtgaaatagagacaatgttgggaacaaaggaaaattttcaaaaagctgccactaataacttcagaaatacaagaaaatttgttgcatctttagaataacaacaggaagcttgggaaaaagaaacatcagagcaataaagagctcttggggaaaatatttttatttcatatcccagaaaataaatttaaaagtgcatacaattttggaaaataactttgttgaaaaacaagaggaataatgatgaataagaaggaaggaaagaaaattagaatctcaatctaggaagcttcacctctaaacattaggagtttcagaaagagaagatagagaaaaaggaaaggataagataatcaaatgaataatgtaggaatatctcttacagctgaaatacgtgagcttctacactgacgggttccctaattactcagca

SEQ ID NO: 261101 - DNA, 154 bp, Homo sapiens
tgaaccaaaatgactgtcttcagttaaacttattgcgaccctctgggcatgattaacaaatcaggtggaaagggaaggtggaggagtatacgggattcttttttcatgttgtgtggaatagggcactttagttgaaattgaggttcaagttagc

SEQ ID NO: 261102 - DNA, 742 bp, Homo sapiens
ccccgggctgcaggcttgcattggaattcatgaaaactaggaaagaaattactcgagcgttgatgacaatacttatatctcttaggactatgaagttggagttagattatgtaaatagccgtacttgaaaaggcttggctcattataagttctagatgagtgcttgctgttatttttattatctgaagcaacaccaagcatttgcatgttgtttatgtaaagttgcatcctctgctctgcgatgcagtggcctaaaatgcttcctctttggaggaaggattcattcagtcagtcaacgagcactaatttctgcctctgtcttgaacttctcttccagatgctcctggagggctgaaccagcacagaagttacaaggaagtgatttctaagacaccattgacatcatcctgcttcaggaataagtgagaacatgaaatgcctaggtttgaaaccgcctttcttgagtgaggactgcaaggagaaccttggatgcttttcagatgctgcctgtgtttcatggtctctgagatttgcttcctaaacaagatgaggcacctgagccataagggtgtgggatcagcttcacggaggccagcctcagccactggtgggccgatttgggacagtgacccccaatgtcagatgtccacatgatactcacagcccacccggactctgggactttctctgtgaataagctagtgagaccggaggccaagcagatggcaagctgtggccctct

SEQ ID NO: 261103 - DNA, 441 bp, Homo sapiens
agattttaaccatatcaaatattgctcaaaagacaggaaatagaactagtgatgtcttcggagggtaactgtggggctgtaccacagttggcctcccagttgaaactcactttctgtgcatcttgaagttccagaacctatcaaggaatcacagaacccttgattcctttgggctctgctcactgacactgtctagacctaagtggacagcccatcttgtggagatgatttattggagtgattatcagtttggggcgtggcagtgcagagaaagggggatgcgaggggcttgcgagggggaggggatagtttgactttacaggcttgctttggcgcctcctctccatccagtgctgtttaggtcttactgtgcttttctgctttactttttactagtttttcagaccattaatgatagcttatgatggctgcttttcttag

SEQ ID NO: 261104 - DNA, 566 bp, Homo sapiens
ctgctgtagcatctttgctcccactgtgacagtaaactccttgagactggtggccatcttgggaagtgattagattcagaagaggttgagaggttggggcccccatgatgggattagtgtccttttaagaaaaagaagagactggagctcccactctcttcaccacgtgaggatatggcaagaaggcagctgtctgccaggcaggaagagggccctcaccaggaactgaatctgctggttccctaacctcagatttccagggtccagaattgtgagaaagaaatgtctgttgttaaccaatccatctgtggtgttttgttatggcagcacaagctgactaaacaagtgccaaaaccaaaccagtaactcccactttctagtctcggacccagtattaaggaattctggtcacatagtttattcatccatttaacaaatatttagtaagtgcttctgtgccaggcatttttctaggcctggtgatcatttaatcaaaagagactaacacctgctccctgatgcttacaatctgaaagacaataaagaaaaatatagtaacagtagtg

SEQ ID NO: 261105 - DNA, 706 bp, Homo sapiens
gttgagtactttttctgtactaggctctggaaatatagttgtgaacacaacaggaatattctgtacctttatggagcttactgaagtgtagaataagcagataaaagtataaataaaataattacacagaagatacagttacatttatcataagagctatgaggaagtgatacagtattctacgagagcatataactgatccgcagggttgtggaaggcaactgaaggaaatgactttcagactttaatttgaagagtaaatagataaagatgacatggcaaaaggctgtgaggagggaggtagggtcataaagagagcattttaagcagatggaataaagatgtgatgaaaaataagatgaaaattatttggtatttttgaggaattaaaaatatctggcacatttggaatagtgagaggctgtggaatggaagatatggatataaaactctttagaaatgagaatatgcatcaggcattgcaagtcattttaaagattttttaaatttatcctaagagcaatgggtaactactaaatagtttgagaaagtgggagtgtaaggtattatatataagaattgtaactgcattattaaagattctatgaccaagaatacagggaactaggggctgggaggaagtgatgtagtgttctaaacaagagacactagtggcttggataagagtgatcagagggagaggtaa

SEQ ID NO: 261106 - DNA, 235 bp, Homo sapiens
  misc_feature (1)..(2): n is a, c, g, or t
  misc_feature (180)..(180): n is a, c, g, or t
nnttcattattaattataccaatcctttcatatatgtagaaaaaatgtttgagttggtcatctgtcttttattgaagatgcatttcaaatatcaaatatatttgaaagataaaatagcatctgtgaaattgaatattattttatgtgcgcttggctatgccctaaaatgtcagtttattntccctaaagacgtatttattgatgtttaccaagaatagaagttggctgggcacaa

SEQ ID NO: 261107 - DNA, 594 bp, Homo sapiens
cctcaagcttccctcacatatcttctgctctgagcactttgtctagagcagaccccactgcttccatagctctgcttctctggctttataacactcatcactttcagaaagtacctttttaattgaattttatttttaaacttatttattctctatctcctttaatggattgtcagcttcagagggcagggacttggttttgttctctgccatatccccagatcctggaagagtgcctggcacatacctggggcttgacaaacatttgttgaataaatggacggaagcctgggcctttccagggccccactgcttttccagagggtagcctgtgaggtatcacacctagctccttccctcccacaaccagtgctggcccgggcccagcatctgccagccccagggctcccttgaagtgacctgctcactgaccgccaggccccgccatggataacacatacatgcttgtgcaccgtgagaagcaccctgaaggggcaaggagggagaagaggagggtccgagggctatgggatgatggtcagtggtccctgctgtgcacagagctgtaccaacagccaggtgattctcctccca

SEQ ID NO: 261108 - DNA, 262 bp, Homo sapiens
gccatttattctttagaaagcccctttgtttgatgaaaccctggtgtcacaggctgtgtgacttagggtaatccccttgtccacatctgtgaagtgagattacctcttcacctcacaggcagatcaaacaggaaaacaaaaacaaaaccaaacccaaaatacacgtaaattgcagagtgcttgaggtttcttttaagctgtctatgtaattaaaagctgttacttagacttggatatgaaataaaatctgacttcaaattta

SEQ ID NO: 261109 - DNA, 484 bp, Homo sapiens
tctccatccctccatctccaacctgggtccctggtgcccactgcccccaccccagagatgagtcgccagtgccatgccctgcaggaggatatgcaaacccgcagcaagcagctggaggaagaagtcaaaggccttcgggggcagctagaggcatgccaaagggaggctgcagctgcccgggaagaggctgaacaagctctcggagagcgggaccaggccctggctcagcttcgggcccacatggcagacatggaggcgaagtatgaggaaatcttacacgacagtctggacaggctcttggccaagctgagagccatcaagcagcagtgggatggggcagcactgagacttcacgccaggcacaaggagcagcaacgccagtttggactcaccccccctggatctttgaggccaccagcccctagtctctagtgttctctgaggccccagcaataaagtgtcttgatgtagaactcaatagagc

SEQ ID NO: 261110 - DNA, 374 bp, Homo sapiens
gtcaccatcctgctctctttcatcctgcctgcccccagaggcatgccaaagggaggctgcagctgcccgggaagaggctgaacaagctctcggagagcgggaccaggccctggctcagcttcgggcccacatggcagacatggaggcgaagtatgaggaaatcttacacgacagtctggacaggctcttggccaagctgagagccatcaagcagcagtgggatggggcagcactgagacttcacgccaggcacaaggagcagcaacgccagtttggactcaccccccctggatctttgaggccaccagcccctagtctctagtgttctctgaggccccagcaataaagtgtcttgatgtagaactcaatagagc

SEQ ID NO: 261111 - DNA, 475 bp, Homo sapiens
gctttcctatcagaccagtgtctcaggctggccagtggtgcccctgagcattccttcggttcaagagtgaaactcaaggccacagcagctctgaatctgccctctgggacagcacaggccctgagggctggggccatcgtagctctcctgacccacctgagatgctaaagctctgtgtgcttcatcacagccctgcatggtaaaattgggtccacaaggcaaagaagctgagagaatgggttctttttgtttgttttgagacaaggtcttgctctgtttcccaggctgcagtgcagtggtgcaaacacagcttattgcagcctcaatctcccaggctcaagtgatcctcccacctcggcctcccaagtagctgggactgcaggtgtgcaccaccacagccagctactttttaaattttttatttttgtacagacagggtctcactatgttgcccaggctggtcttgaactcctgg

SEQ ID NO: 261112 - DNA, 477 bp, Homo sapiens
gtgtcgtccccagtgtgggaagaacctgtttttgtttgcctgtgtgttcagtatagatcatcagtatgtggggtcagccggcttggtttctgcaggctccatggaatcttctagataccttttcaccatgagtctgaacgtttttctggaaagtgcccctttgaagtgcatttttctcataaatctgaagtgttcacagatgcagtttccaaaagcagtgtacatcctgccgttttgcccaaaatgcttcctcagatacagctcctgagagatagagctcgatcttcagagaacaatgaagtctcgaaaggtggccagagaaacctctaaacataaaacagaagcatgctgctcgttggggtacagcaagccactccccccatcagacagtagtcattagatcagacttaattaaaatcacagagaccacgcagtgagatatttggaaataaaaaaaaaattggaaagtctgagaca

SEQ ID NO: 261113 - DNA, 428 bp, Homo sapiens
aagttggctctagcgcagttttttttcttgtcttaaagcatttaacgcccctgtacacaactcactccttttaaagaaaaaaattgaaatgtaaggctgtgtaagatttgtttttaaactgtacagtgtcgttttttgtatggttaatacactaccaaatgtgtctttagatggccctgtcctggtggtattttcaatagtcactaaccttgcctggtagagtatgggggttgtaaattggcatggaaatttaaagcaggttcttgttggtgcgcagcacaaattagttatatatggggatggtagttttttcatcttcagttgtctctgatgcagcttatacgaaataattgttctgttaactgaataccactctgtaattgcaaaaaaaaaaagttgcagctgttttgttgacattctgaatgctt

SEQ ID NO: 261114 - DNA, 653 bp, Homo sapiens
tacaaacttagtggcttaaaagaacaagtctataaatcagaaatccattacaaatcttacaaggctaaaaccaagatgtctggagaactgtgttccttactggaagctctagggaagaatctgttctcatgctttaaaaggacatacatgttccttggttcatgggcctattcctccgtcttcaaagtctgaaacagaagttaagtacttatcatgtctcattactcacctctccttttttctccctcttctacttctaagctcacttgtaattactttgtgcccacttggataattcaggggtagctacccattttaaagtcagctggttagtaaccttaatttcatctgcaacctcgatttccttcttcaatgtaccctaacgtatctaccagttttgaaaattaggatatgtgcatctttgagggggtcattattcttcctatcacaagtatgttttaatctttttctaaagttttttttttttcaaaaatagatgaaacactaaagtgtttgctacctatttcagtatttattactctaaatgtcaagacagttataaatgcctaactcagtaacgtcccttttcactaaaaaataattcatcttatttgactctccttgaatatgctgatgtgaatgtcagcaattct

SEQ ID NO: 261115 - DNA, 390 bp, Homo sapiens
ataaaaaattttaaagattttaaaatttcttgtatatccagagacaaatggaaaaagaacacaattagaaatagacatttacctgttttatatcccctagaaagtgatacataggaaaaaaggtgaagaaaataagagtcacttttaaaactaaatgtcctcaaaaagccagaatgtattatatatcaggatgtaattttcttgaaatattttcaataactttctattcttaatggaacagaatgtgtaaataaatgtgtattgaaaatggacttttggctgggcacagtggctcatgcctctaatcccttgagaggccgaggcaggcagatcacttgagcccaagagttcaagaccagcctgggtaacatgacaaaacctcatctctcc

SEQ ID NO: 261116 - DNA, 260 bp, Homo sapiens
actacttattcacaaaagttcaagggcaagtgttttcatctggacttcaatattacgaactacacaatgggaaacttgctctaaagaaaaattgctggattaagggatgtgaatattttagcagtgcttgacacttagccaaattgccttccagaagtgatgaaacaacttaccctcccacaggcagctcatgaaacctcctgtctcaccaaactaggtattggaattctaaaaagaaaataaagctgtttgccaatttg

SEQ ID NO: 261117 - DNA, 431 bp, Homo sapiens
tgacattttggttactttttgttctataattaatcaaactaatcatattttaaatttgggagaaagaatgaaaggacatgtctgtttcctgatttgtctgattgttcagacaggcctgatattgaaagcttttgatactgagatcctattaatctcagatgatgatgaagttactgtattcttaaagaaacaaagaatttaaatagaaattaaatgttatttgtaattacaaatattagtcttttgtaatttatgaaacttcaaacatgaaaaaattagatcatgaattagtttctgtaagttatagaaaaaaatacaatgaagttaattaaaatcatcaaattgtatcattgtgtatatatctttctattcctgtaacgtttatttttattcctttttataataaagccaatttttttcttgtgaaaaat

SEQ ID NO: 261118 - DNA, 556 bp, Homo sapiens
tccagtatggaaatccatctgttccagcaccatttgttgaaaagactttctttctattctcaatattatatttgggagtgaaaaaaaaaacaaaagaaaactttgcataatacaaggttcacataaaacccaattcttggctggtgggaggatcacaagaagattatcagagacacaggatgggggttaacagagtgtgtgtctaaaaggctgagaaatgctgcctcaaagccctctggccccgggcccggctgcaggtatgcatgttgtggtcccagcttaagataagcttgcggcagggcgccaggctggccctgtgacctagggctctgaagacgccagcaaaggcccagcatggaggctcattcctgtaatcccagtgctttgggaggccaaggcaggaggaactcttgaggccaggagtttaagactagtcttggcaccatagtgagaccccatccctacaaaaaaattaaaaaacattagccagatgtggtggtgctcacctgtagtcccagctacgtgggagcctgaggtgggaggatcgcttgagtga

SEQ ID NO: 261119 - DNA, 471 bp, Homo sapiens
tagaatcatagactcatgattctatttacttcatataaagtaaactgaactgatatttgagaaaggttcaatagataaaggatagtctctttaacagaaggtgctcaaaaattggatatccacatgcaaaaaaatgaacttccatccataccttggatcatatataaaaactaaaccaaaatgaatcccagacctaaatataaaacctgaaattattatccttctagaagaaaacataggcgttaatctttcttatttacacaaagatttcctaaatatgacaccaaaagcataattcataaaattaattgataaattggatttcatcaaagttagaaatatatcctcatcaaaaggcattgttaggataataaaaagacatgctgatcccaggagaaaataattgcaaaacacatgtataataaggatttttattcagaatgtgtaaataattctcaaaactcaataata

SEQ ID NO: 261120 - DNA, 490 bp, Homo sapiens
aagagcctctgctgaaactcaagagcttctattaaaataaggtatattaaaatttttgaacttagcagaatgaaagacgttagaagtccaaatggtaatactgtaattgtagacggtcactttttaaaaaagtattgtagagcctgttctgtgttttaaattgaaccttagattttcatgattcttattctaaaaaaattattcttaaaatcaatcttgactgaaattatattctgccaaatttgagggaactacttatagtaatttccccaagttattcttaacatagaaaattgtcacatcagcatttgtgtggatgaacacatataaaatgcagaatttgctatgaagtagaacaaatatttatgaaacatatagctgaatgtttttggagagagttatttcttctcatggacatggcacattatttaaaaaaatcagaaaatactgtataatctagttgagtgaacatgaggactgtttttagatg

SEQ ID NO: 261121 - DNA, 409 bp, Homo sapiens
acgtctggagttagcagcaaattggaaatgtcttgggaagcttgcatagtctttcagatagtcttaaagttgacagttgcctggagttgtaaacgttttgaccacatttcaggatatccactacttttctgggtagaaaactaagttttgtcattgtacccagagttcacagagatcacaaaagttaagatatgtaaaacagtatatcagtgtatagaacttcagtttggacagtgtcagaatatatgtctgtccattgattggactactgggtgtattataaggctacttcttgtatctgagaatctgaattattaattaggagatttttgagcatagaggacagagtaaaattaaggataaagttaaaggtttcttttctatataacactatttcatttttcttttt

SEQ ID NO: 261122 - DNA, 387 bp, Homo sapiens
cacagccaagacttcccctgcattgcttggggatttgccaatcccgttgctagggatttcttggcctacctgggttggaactatgcttccaatgattcccttcactgcatagttttgtgttagcatggaccacgagaggcatttacaggagacttgaaaggcagaagtgaagcagagaccattttcctttcactctcagagagcctctgcaagacagcaggtgctgttgctgtctctctgtctgcccacctcacccatgtgaggcagcagccaggtgggctgcctctccagctccttctggctttcgcccttcggctgggacaggagcaccctaagctgtgtgatggaggaaacaagcttctcctgcaatgaaagcttaaaggtggt

SEQ ID NO: 261123 - DNA, 414 bp, Homo sapiens
cctcacttctcctgtagctcccaggaactgtcatcatgaaccatctgcaccctcaccatcccttaggggctgggcagtgctggggctattattctccttgaccttgagaaaacagaggacgccgggtggcctggccagggtccctcggatgtaagaggaggattaacaggaagaagttgagcatgtcctatgtcccaggcatatgtggtctaagtcttcacatacacgacctcacctgctcactaccacaggctgcagaggaggagctgagctcccatgttaaggtgaggctcggaggcattaggtgaagtgtccagttccccagctcttatgtgaccagctgggcgttcagcggagatatttctacctctctagcttcccatcctcaagaatgtggctgggccagacctggac

SEQ ID NO: 261124 - DNA, 461 bp, Homo sapiens
tttcaaagtgtgatgagtgctatgcagaacatgaaacaaggtgctgtgataaaagggactggaagggaggtgacagtcacttcagagggctgaggggacagaaagcctttctgaggaaatggcatttgtgttaagacctaatactgggactgtgtgagtcatatgaaagtgtggagtgggggtaggggagtgttacaggtagaggaaaccgtgagtgcaaaggccttgaggcaggaatgagcttggcttgtgaccagggagtgacgtctaggaagagaggtcagcaggggccaagctaggcagctccttgaagcccccagttagtagctggcttttattctgagaggatgaggagccatgacagagggtccaatgatagaatccaggggctggcaaactatagcccacaggtcatgttggcccacctactgtttgtgtaaataaagttttattggaacaca

SEQ ID NO: 261125 - DNA, 522 bp, Homo sapiens
aatgggctcggggagtgggcctattcagcgccggatctcttgggggcatggtcctggggctcctgtgccgtgtatgacagcgggggctacgtcaaggagctgggcctgagcctggaggagagccgcgaccggctgcgcttcctgcagctgcacactggctggcaacaggagccgcgctgtgttcctggagccccccgctacagcccggccgtggggctgcacgccgccgtcacgctgcgcctcgagttcccggcggccggccgcgccctggccgccctcagcgtccgcccctttgcgctgcgccgcctcagcgcgggcctctcgctgcctctgctcacctcggtgtgcctgctgctgttcgccgtgcacttcgccgtggccgaggcccgtacttggcacagggaagggcgctggcgcgtgctgcggctcggagcctgggcgcggtggctgctggtggcgctgacggcggccacggcactggtacgcctcgcccagctgggtgccgctgaccgccagtggacc

SEQ ID NO: 261126 - DNA, 260 bp, Homo sapiens
tttttttagagaactagtgatacagtattgtcatagcaagtagtgacaattatccaaatatccctagaaatcttatttggcttcagataggctaagaaatttacttgtcctcctgatgacttgaactcacaggaggcggatgggctacaggcggaacagacacgctagataaaattcttaccgacgtggtacaaaatgataggaatttgggggtgattgatctttcatttattcattcagaaaaaaatgagtacattcct

SEQ ID NO: 261127 - DNA, 372 bp, Homo sapiens
ggattaagggtggtgcaagatgtgctttgttaaacagatgcttgaaggcagcatgctcgttaagagtcatcaccactctctaatctcaagtacccagggacacaaacactgtggaaggccgcagggtcctctgcctaggaaaaccagagacctttgttcacttgtttatctgctgaccttccctccactattgtcctgtgaccctgccaaatccccctctgcgagaaacacccaagaatgatcaatttaaaaaaaaaaaaaaaaaagagcaaaagacttaaacagatacttcacaaaataagatctcaaaatacccccaaaatgtgaagaaaaccctagaattgctaaaataaaaaagtactaacaatacca

SEQ ID NO: 261128 - DNA, 427 bp, Homo sapiens
tccttccctggcctctggaattttctctcaagtatgcaacgatcagggttcagctgaatatttgagtggcagctctcccaggactctctgagctttggctgcctcggtttccctggactcttgcttagtctcctcatggagttgtctggagactctcaagccagtgagtgggggcagttataggctcacctcagttgttcccaactctgtgtcatttgtccttagttgtctgatgtccagtggcttgaaacttgttgatacgttttgccagttttttggttgtttcagcaggaaggtgaatctggttcctgttactatatcttgcctggaaacagaagtccctcatatatatgcgtttagtcaaataggtgcacttttaggcccaccaaataataccagactagtagcttttgtaggtctctctcca

SEQ ID NO: 261129 - DNA, 721 bp, Homo sapiens
gaaggatctatgagacgtttgaaccgacacattttagagaatttcctttaaatgatgagggtattgaaggaaatgagggtaaattctattagaatgtagccaatatctggaattggccaggaagtaaagatatcccaattttgtttggatggtagagatggcttatagaaagtggtcattgctaggttactaaatttgttatattccagaaaaatcaaaggagaaagaaagacatcaaataccacacaaatataaaatgacagctgcccatgagcttttgaaacactaaagacaaatttagttgagtttctggatttcagttttgaagtttctgttggcccaacatgttctcaaaaggatgtagcctttactggatctgattaggcattatatgcataagatgtaacatcttggatttctactggaattattaccacctgaagaatttcaaagtcctagctataagaacaatctgaattatggattaaattttttctttggcatatattcagggtcttctgtatagagatgaatttgtggtcataattgtgacaatattataaaataatattgatttctgcaaggtcaagtgcagcagacatcaaggcttactagctgtcttgctctaaaactttctataagaaagcaatctcatgtagagacaacaccagggattttagaaagagctatgatttggattctagaaagcatgctttcaatg

SEQ ID NO: 261130 - DNA, 415 bp, Homo sapiens
agctaactctactcttgactcctggaatatgaggtccaattcaaatccaggctccacattgcaggttttgtggataaatgcaatagaataattctggaagcaagtaattctggtgattcagtgtattccaggactcccatgacaactctttcttaccctagaaaatgctttgcattaactctttgtacctttggtgtaaatccagtgtcacaactgtcctggccaggtccaggacattttttaaacaaatcctggtttaaatctaaatgaaaatacagaatatactgtaaagcttaataatcaacactaattcaagtgtatctggggagtgaatccttatctggactccaggcatctcccatctgaaaacttcttagtgcagagagtaataattctgtatataaaagaaattgta

SEQ ID NO: 261131 - DNA, 372 bp, Homo sapiens
agaatggaaatatctatcctatgctgattccaccattgaattctctttgatttcacatgttcagagctggagagcagtttgcctccgaataaatcataccttgagtctcactcatagctaatttagagatatttcgatgagacattagactttttagttgatgctggaatgagttaaaactttctgggctttggggatgtagtaaatgtattttacctgtgagaagaacatgagttttggaggatgattatttcataaatgtgaagctcttataatgggattagtgctgctataaaagaggccctcaccccttttgccatgtgaagacacaacctaaagacagccatctatgagccaggaaacactgtcacc

SEQ ID NO: 261132 - DNA, 643 bp, Homo sapiens
ctagagtcagggtgttggagtggagggtgtacattccatggaaggaacaaataaacagagacacagaagtcagaatgtgtagcaatttattgggaaagagcaaacatctgtttctaccccatctcatttcagaaatgtaatctgagcaatgagctgtcaggtgtgcttggaatataagcactgctagggtcatggaaagcccatcaaaatttttaaaaggagtagagtgattgtggagagttgggtataagagggaaaatttgaatttaattctgctggtgatgcgggatcatgattttgggtctccagcaccatatcagagaaaccccttatttatatttggaataagtagagaaacaggcagagcatggtggctcacacctgtaattccatcattttgggaggctgaggtgggcagattgcttgcacccaggaggtcaagatcagcctggacaacctcatgaaaccccatctctactaaaaatacaaaaattagccaggcgtattggtgcatgcccatagtcctggctgcttggaaggctgaagcaggaggatgaatggggcccaggaggtgaaggtggcagtgagcagagatcatgcctttgcatgccagccttggtggcatagccaaaccttgtttcaa

SEQ ID NO: 261133 - DNA, 409 bp, Homo sapiens
ggtcccaggttcttgtcctacgttcgagaagaatgagttatgcagccaaccagagggtgaccaaggcagagaagagttttatcaaatggcagaagagctctccacagagagggttcccaaaccgctgccttgttttgagctgccctatggagagtctcagtggcgaggaattgaggacagacttctgtacggacctgaggtcatcattccaacaacacatgaagagctgaatcctgacaacaacttcattggtaagcttggaagtggattttcccccaaacaggccttgaggtgaccacagccctggctgactgcagccttgtgaaataccctgagacagaagacccagctcagccacacctgaactcctgacccacagaacctgctataataaatgttgttttggcta

SEQ ID NO: 261134 - DNA, 417 bp, Homo sapiens
aagaaagtatattttcagaaatgtagatttgttatttaaaaataaaaagcagaaattttgacaaaagatattcttgaagacgaactggccatactgttcaaaactgtgtggtcgtggttttgaatatgaatgcaatttcttatgtataaaaatagttatttcatgaagaattgtacttcagtggaaaatataattgagagattacaatttttaaaaaatcatttactgctattgaaggtactggtaagtttctttaatagttttacaaattccatcccacttagtactatggcaatataaaattctatctagcacataaattctaatttaataaatcaacaaagtattgttatgttttactgtggttactaacaaccttaaggtctgtggccatcaaggcaaaacagtctccaatca

SEQ ID NO: 261135 - DNA, 296 bp, Homo sapiens
ggagcaatgtggctttgagcagggataattagaagacgcagctgttggagcaccaaggatttttatttttcaacaacaaaggaaatgattttagcaaaggaccaagttctaggtgcactgtcgttatcaccgagatgaaatgcataatgtgtgtgggcaggactggaagggaggcagatacatgaaaacatcgtctttttaagggttgagattatagaataggtaattttttaatggcttttggctaaatttacatttatcctctcactaggcagtctcattcctaagtgtatagt

SEQ ID NO: 261136 - DNA, 478 bp, Homo sapiens
tagggcagatccccggagtatccctttccctagtacatgccctgtaacaataaatctttctggatttttttaagatcttcctgtactgacaaaaggaaaacgtaattatggaatggccacagtatgccacgtggcaagactccaggtttgcacaggagagtggcccctggaagggggtcagtctcactgtcatccatcagtgtccccgtttgtaatggtcctgctctctgtcctggcatctcaggataatgatgactcaggaaaatacctccgttacattgtgggtggcagcatccggcagtgattttttaatgtttgggaatttgagcttcccctgcctgtgaagtagatacactgagatggccacccctttccaaccctgtcaagaaaacaggaagcctctcatgaatttgaccaaggagctacattcgttctctaaaaattcaaactgtattctacattttttaatccattttta

SEQ ID NO: 261137 - DNA, 706 bp, Homo sapiens
cgtatctgttgtcagtcacttcctgttctcctctccctgaaccaccccgaccccccaccccaccacagcaaccaccattctacccggtctctaggaaattaagcggtctaggtgtatcatagaagtagaatcatacagtatttgtctgtgttcgtgtctttttttttttttttttttgagacacggtctctgtcgcccaagctggagtgcagcggcgccatcgtggctcgctgcagccccaatctcccaggctcaagtgatccttatacctcagcttcctgtgcagctgggaccacaggtggggccaccactctcggctaatttttttttaattattatttttagtagagacggggtcgcactatgttgcccagactggtctcgaactactgagctcaagtgatcctcctgctttggccttccaaagtgctgggattacagatgtgagccaccgcacccagcatatgttcacgtcttaatcctccacagggccttgtgactagtgactgagcaaaaagagcaaatgaagaggcaaagaatgctaccaccatgcctgagacttcctgagacaggcacagtcccctgcctcacccagctccaaaactcctagaattcattcattcccttatgatgggcagacagcattgtagatgtggagaccccacagtgaacagaacagactgcagtccctgcctttatggagctc

SEQ ID NO: 261138 - DNA, 423 bp, Homo sapiens
gttctggaatcggttacacttagtactgagtcaccaaaggagaccataggtaaaaatgttccccaatgggaagtcaagcatatgtgcttttccatctcattgcaaagtcatctctggatgtcctcatgctttgtgacatttcatagccacttgctcctcacagcttgtctgtgctcatccagtgggtcttgaatgtcattgtatacagcacattgtgttcacatctgctgtattgctatgcaagtttcataatttccttattctcactcgaaacgaaaattttaaccttttctgattgctctttcaatatgaatatgtacaacctacttttcattttcatatcacttttaggattcatcccgtgcttttgctctccaagtactcattctatgtgtgtttctaactggaattcttatacgaaaa

SEQ ID NO: 261139 - DNA, 636 bp, Homo sapiens
agtaagaagtcaacaggaaatgcctaaagatggagaactcaggtagaatatttgaaaaaataaaaattgatagagtacctggtgtatttgaatatagactagagagctttcattttccacagagcatggggataaattagtgatctgcaaatttttcttttgttaagaaaacaaaactgaggtaattatgaaccccaggaaaaataaaaattcaaaaactacactgtatatctgaactgtgaacaatactagccatataaagttagtcataattatgtaattactgaatattgattttataagaaataattctataacattgggaggatgggagagaagagagattgtgtaatggcggcaagccaatcaaggtctgttgtagaaaagtccagaaaaagcagtatacacatgtcttttcagaacaaaacaaaacaaaacaaaacaaaaactacaataagaaactgctaagggttaaaagtgattgtctctggaaaaatgaaatcggggtgggtagagaaaaggcaaaggtttgctggttttcactaccaatccagcagcattatttgatttctttttaactatgtatatgtttttctttgattaaaaactaatataaataaacatcatttttaaaag

SEQ ID NO: 261140 - DNA, 697 bp, Homo sapiens
agaacaaacttgagatcaaattgctattggaaagattttagaaatgtaatctagaaactatgttttttcacttatatcacagttgtgtattcagaacaggcgatatctttcctttagatattctttctttcctagggtcacatatgataaaaatctaggagagtaataaagttaagtaaaacaaagaactacagttgtgttgaatgcttcttcttctaggcctgatttgaaatgtttgacaaagatgtagaggtagcctctcattgcagtattatttgaccttagttgaacatactttcttttctttgtgagttctctttaatgaattcacctttctaattagaaatgccactgtctcactgtcccttgctttattaaacttttacatcttcaaacgccttcctctgagactaatcattaattaactaatggatctttgtttcataaagactttaaagagatcatagaggaccagacggatgcatgtactttggaaaaatatttgtttaaagtctttaatatgtactaacagcttttggttcataataaatgctctttcattaatagctagcagaaagaagaaatgaaatagtactagaaaaaaccctatagaaagatgatcttgagttgagaataaattcttctgaaaaccaggaaagtataaggcagtttaatttaaaaatctggttttcaccaa

SEQ ID NO: 261141 - DNA, 435 bp, Homo sapiens
cacggttcatccgtgtcatagcaagtatttcattcttgtaatggctgaatagtatgtcagcataagaatacaccacatttatcttattcatgagctgatggacatagactttttggctatcattataaatcatgccgctgtgaacattcatgtacaagttcttatgtatgtatgttttgaattcttttgggtgtgtacctaagagtggaattgctggaacatataccactttgtgtttaaacttttgaggaacttctagactgctttccaaagcagtcgcagtattttacatttccatcagcagtgtatgagagctctaatttatccacttcatgccaacaattgttattatctccttttttcatcatagttcttctagcaggtgtgatttgatcctggttttgatttgcatttccctgatggctaatgatgctt

SEQ ID NO: 261142 - DNA, 297 bp, Homo sapiens
gcctgtggatgaggctgccccagcctgcaagtgtggccgaggacggtgaacggcaggacaggcgagcgtggggtgtgtggcacagccaggatgggtgagtgtgagcagcctcaaccgcccgtcctcagaaccgtgcatcccacaggttgtggggactcggaccctacacaggcagtgaggacaccagagccggcccctcttcattgctagtgttgctggtatggttgttaccaattcctatcttttcttggaaatttgaaagaaacaagtttattaaaaatgataaacagaatatct

SEQ ID NO: 261143 - DNA, 423 bp, Homo sapiens
gagccaagattgccccactgcactccagcctgggtgacagagtgagaccctgcctcaaaaaaaagatagaagtttgaattgaaaagctgccttctaaatagcttgaaaggaattaattgcttgaagcagagaggaaacatggtcatgagaaagctttatgatgggtgattcttgtgttccagctatgcctatgatgatcattttctaagacctttctttcctatccatctaatcttagatattactgccttctcccaagataccatcatttcaaatttgttatttcaagatgcatgttctgtccctaagaaagcagcaaatcttggccaggcacagtggctcacacctgtaatcccagtactttgggaggccgaggtaggcagattacttgaggtcaggagttcgagaccagcctggccaaca

SEQ ID NO: 261144 - DNA, 451 bp, Homo sapiens
taaaatgaattgggtggttagcgtaaatcgaatttaccgtaaatgctgtagtattgtaatgtagtattgaaaatttgagcaccggttttagagtttgaaaggcgtatcctgaggcttaatccaagaaaccctgttacattcagttaagtataacttgcttaagtgtgcaagtttttcttgtgcccccaatgaaattttataatcttaggaatgtaatgctccttatttgcatttgattcttcccttttgcttcccactccttttccccaccctcctttggcaggtacagattcttttctgatttctccaagctttgtttctacagccaggctttctttttttctctcctctttaagtgattgggaatctcctggaatattcctctctgttctgggaaagtttgtggtagctcttctttgtacattgaatttatagaaaatgtggtaacagt

SEQ ID NO: 261145 - DNA, 580 bp, Homo sapiens
agctctgtgtctgaaaccagaaatagtgaatggaaggctgtctgtggataaggatcagtatgttgagtctgaaaatgttaccattgaatgtgattctggctatggtgtggttggtctcaaaagtatcacttgctcagagaagagaacctggtacccagaagtgcccaggtgtgagtgggaggcacctgaaggttgtgagcaagtgctcacaggcagaaaactcatgcagtgtctcccaagcccagaggatgtgaaagtggccctggaggtgtataagctgtctctggagataaaacaacttgaaaaagagagagacaaattgatgaacacccatcagaaattttctgaaaaagaggaaatgaaggacttatttttcccttcaaatcaacatacagaatcttcactcatccaccctactcttccttgagcaccatcactctcataagggtctgggctaggagaactttcttattactgccagagaaaaatgtgtaattattggtaatctagccttttgtagctcaaatgtccagtttcctggacttgaagtgctggttaattaaataattatttaccaaaa

SEQ ID NO: 261146 - DNA, 556 bp, Homo sapiens
cagccaggccccagagcctctcctggcgggcatcctgaatgccagaagcttaggcacaacttcagggaagaaaacattttggaaatgacgagaaaactgtgagggagttgcaactgtaaacagcaaatgtgctaaagaccagagacttatgcagagctaaaagagggcaggtggagctgttctcagttttttacatgtgaagaaaacattgggctgactccattctggttccgcagagctaaaatgtgccttgatgactgttgttgttttatttaacacaagcacccggggctgcgtgaggatcagggcttgatgagccaaaggattctgagaaaaaaggtgaacagctgtggttcttgtcaaacacaaactcttaatcgttgcttaatcattcccccatattagacatttgtgttattttaattgttttgctatcgcaaatagcattgtaatgaaaacctttgggcacctaacttattcttttgcattatttcctttacataatttcctgagagtgggattactgattaaagcgtatgaacattttagtctcttg

SEQ ID NO: 261147 - DNA, 428 bp, Homo sapiens
agcgtacacacacacacacacaccacagtagcttaatttaatttcctaaattaaatcctccagagcagaccccagatcttgagctttacttcaactcatcctcctgcccagtacatcgatctgcatattgtcaatgcagatgatagacaatgtgaagcaagaggaagaaccacatacgtttaatgcttctcacctggactcacagggaattcatagtactgcagatgtggcactagccctagcactgagcttccttgtaggctagacacagcattttctaaaaactaaacatgaacttgaaattcagttgaacttccaagaactgtggtttgaagtagtaggtaaatcactgcaggacagctcttcaggccaacagagtcatctgatggagaggcagctctatctgaggtgctagcaaggacttgagg

SEQ ID NO: 261148 - DNA, 842 bp, Homo sapiens
tactttcgatttcagtaaatctctgcttttgttgcttcactctttacttgctttttttgtgcattttgtccaattctttgttcaaaacgccaagaacctggacaccctccaccagtaacacctagactgaaagcttatctaaatatatgtttgcttagaagtatcagggaccaaatctcaaaacaaaacaggcactctctggaattccccaccaggagattgtctcaagacaacaattaattcacaatccaattctatccatgatggtgcagaccagaccatcagatggcatcactcaatataagtcatccaagcgagtcacgtagaccccgcacctccttgcccttcacaccaactttccctttttaagcccttgctttcttccctgaaagttaaatcagttcccttaaggcaggagcctgttctgtttccccactgctaagctctggaataaaagtcactttctttttaccaccctcgtccttgttattcaattttgcaagcaatgagcagcttagcctgcgtttggttacagtaagaggaggaaggaggagagaaaccagtgggaagagagaagtcttagagacaccagtttggggagatgataagtttcccaaaaagaccagtgaagttccaaattatcctcagcaaaaccatgtcaacaagaaggagttggacagtgtaggtggagcatatagtcagtaggaattcaagaatggtgtttcagttgactcagaagttcctgtgggaaaaacaggatcaaatagaacagagaggcctcacaaagtaacaaggaaaaaatttccagcctgggcaacatagtgagactctgtctctacaaa

SEQ ID NO: 261149 - DNA, 185 bp, Homo sapiens
gctttatctaagagacagagcaggaatgctagcttttagattcccaaattttaattattcaggtcctgtttattcttattattagcagttagagtttagtagatttatattccaagtatgtttaatacgacatgggtttttccagtttgtaattcaatgcttgaattgcaatctttagaattata

SEQ ID NO: 261150 - DNA, 382 bp, Homo sapiens
ccacgtgacactggtatgggggtgccttttgagcatgttccttccagtcaccaaagtcagtctagtaggagcttccatctgttctctggaactttctgtaggtggctctccaggggtacttgggaggacttccctcctggacaaggaagccctggcaagggacctgggtgggggctttgagaggctgttgggatgcagggatggggcagccatgcctgtggccacccagacaacctaaccagagtccaccttaagaggcagagggatgaagccacatgtggacaaaaagatgggcaggaacagaggggagaagcggcacacctgcagccatgatgcccctgcaggaagggaaggagcggtgcagagagctggagaggcctct

SEQ ID NO: 261151 - DNA, 360 bp, Homo sapiens
aaaagcataaaaactcaattatgtaatatattaagaggtgtgactttgattatttatagaattatagtactttctaggtttgaaatataactgccaaaaaatatctacataaatgtttataaagtagaaaaatcaacatggttaagtgacaaactcttcccaatgcaaccaacagagttaatgcaataccagtcaaaatcccatcagggtgccaggtgtggtggctcacacctgtaatcccagcactttgggagaccaaggtgggcagatcacttgaggccaggagttcaagaccagccaagtgatctgctctgttgtccaggctggagtgcagtggcgtgatctcagctcactgcaacc

SEQ ID NO: 261152 - DNA, 182 bp, Homo sapiens
aaataaataaaatagaaaaaaaagtttaagatggaggtggaaagggttggaggagcttggggatggagaaaaaatgaactgtataaaattaaaattcttgtttttgtttttagaaagtaaagagggccgggcacagtggctcatgcctgtaatcccagcactttgggaagctgaggtgggcg

SEQ ID NO: 261153 - DNA, 502 bp, Homo sapiens
catcccaccccggatggggactctggggtgtgcatcagcagtttcaagaaacacagaatgaccacctgacccagcaattccactcctaggtatgtaccctaaggaactgaaaacgaaaactggtacaaaaacgtttatgtcgacattattcacaaccataagttagaaacagcccaagtgtccctgaactagtgaatggataaactaattgtggtctaaccacatggtggaacgttattcacccacaaacagaaggtagtacggacacatgctaccatacggatgaacctaaagcacacgatgctgaaagaagccagacaaaaggttgcctagagcatgattctgtgggtggaaaatgcccggaacaggcagacccaagacccagaggggatgagtatttgcctggggctgggagggagatggagagtgagtgctaatgggtttgatggtaaattttatggtctgtgtattttaccacaataaaaaagacatacccaagtga

SEQ ID NO: 261154 - DNA, 520 bp, Homo sapiens
gaagctaaatgtaaccgtatcttccaacctgagagctcatttagtaacgtttttgtaatacattggtcattttcccagtcgttaagtaccacgtctcggcggcgtgtgcttagaacagaggtctctggaggaatcactggggcgtgctcatgtgtgggtgttgtgctttcatggctgggttttaacttccggccttggttcctttggcagtgacatggagggagagggtagatgaagttgggtgtgtgaacttggaattctaaggacagtcctgcacaggcaggacagtaacacagacctggttgccatgccccacagaattcagtgggaaaacatgctcagcatttgtgggacaccagtgtcaccctctccaccactgcagtaagatcaggagcccatctcccacctgagtctcaattccaggaaagagcatcagggattcccccaagctgcaggcaagtgatgctgcccacatttgttggctgagtggggccaggtatggagggagatgagtgggcac

SEQ ID NO: 261155 - DNA, 283 bp, Homo sapiens
ccaagcttcaggagggtcttcctacatctatgtggatgttcacagctatgaattttcctctgagtgctgcttttcctgcatccctgagctgtctcgtgggtttttttgtttcatttatctccacatagtcatttctgcttttccttgtgatttcttctctcaagcttcaggagggtcttcctacatccaagcttcaggagggtcttcctacatcctctctccagccttgctggtaaaattctactcacctttcaaagactgctgaattttcccatgaattcga

SEQ ID NO: 261156 - DNA, 376 bp, Homo sapiens
aaaaccccctctttacaaaaaattaaaaaattagccaggcatggtagcatgcgcctgtaatcccagctactctggaggtgatgtgggaggatgacttgcacctgggaggcagaagttggaatgaccctgcatttttagcttgggcgacggagccagaccctgtctcattaaaaaaaaaaaaaaaaaaaaaaagagagtcatttattttaagctttctagatactgagccaggatgctgagatagtgcaggaagggatacactgtgtgttctataggtaactttgcagagccaaagcagtatgggataactacatatgaaaaaaatgattgtgatatgtccatttttagtaaataaacttctggcttttcactgaga

SEQ ID NO: 261157 - DNA, 3117 bp, Homo sapiens
agcgggctcgccggctgcggcgcctgggacggttgcggtgggtctgggcgctgggaagtcgtccaagatgattaaaaaattcgacaagaaggacgaggagtctggtagtggctccaatcctttccagcatctggagaagagtgctgttttacaggaggctcgtatattcaatgaaactccaatcaatccaagaagatgtttgcatattcttacaaagattctttacttactgaaccagggtgaacactttggaacaacggaagctacagaagccttctttgcaatgacgcgattgtttcaatctaatgatcaaacattgaggagaatgtgctaccttaccatcaaagaaatggctaccatctctgaggatgtgataattgtcacaagcagtctgactaaagacatgactggaaaagaagatgtataccgaggcccggccatcagagctctctgcaggatcaccgatggaacaatgttgcaagccattgaaagatacatgaagcaggccattgtggataaagtttccagtgtatccagttcagcactggtatcttccctgcacatgatgaagataagctatgatgtggttaagcgctggatcaatgaagcccaagaagctgcatcaagtgataatattatggtccagtaccatgcattgggagtcctgtatcaccttagaaagaatgatcgacttgctgtttccaagatgttgaataagtttactaaatctggtctcaagtcacagtttgcttactgcatgctgatccgaattgccagtcgcttactaaaagaaactgaggatggccatgaaagtccactgtttgatttcattgagagctgcttgcgaaataaacatgaaatggttatttatgaagctgcttcagctatcatccatcttcctaactgcactgcaagagagttggcacctgctgtttcagttcttcaacttttctgtagttctcctaagccagccttgagatatgcagctgtgaggaccttgaacaaggtggcaatgaagcacccctctgctgttactgcctgcaatctggacttagaaaacttaatcacagactcaaacagaagcattgctaccttagccattactacactcctcaaaacaggaagtgagagcagtgtggaccggctcatgaagcagatatcttcttttgtgtctgaaatctcagatgagttcaaggtggtggttgtacaggcaattagtgctctctgtcagaaataccctcgaaagcacagtgtcatgatgactttcctctccaacatgctccgagatgatggaggctttgagtacaagcgggccattgtggactgtataatcagcattgtggaagagaaccctgagagtaaagaagcaggcctagcccacctttgtgaattcattgaggactgtgaacacactgttctggctactaagattctacacttgttgggcaaagagggccctagaacgcctgtcccctccaaatatatccgttttatttttaatagggttgtcctggagaatgaggctgtcagagctgctgctgtgagtgctttggctaaatttggggctcagaatgagagtcttctcccaagcatccttgtactcttacagaggtgtatgatggatactgatgacgaggtacgagacagagctaccttctatctgaatgtgctgcagcagaggcagatggcactaaatgccacatatatctttaatggtttgacggtctctgtaccagggatggaaaaagccttacaccagtacacgttggagccttcagaaaaaccgtttgacatgaaatcaattcctcttgctatggctcctgtctttgaacagaaagcagaaatcacacttgtggctactaagccagagaagttggctccttccaggcaagacattttccaagaacaattggctgccattcctgagtttctgaatataggacccttgttcaagtcttctgagcctgttcaacttacagaagcagagacagaatattttgttcgatgtatcaagcacatgtttaccaatcacatcgtgttccagtttgactgcaccaacactctcaatgaccagctgctggaaaaagtgacagtgcagatggagccatcagattcctatgaagtgctgtcttgtatcccagcccccagccttccttataaccaaccaggaatatgttacactcttgttcgtttgcctgatgatgaccctacagcagttgcaggctcctttagctgcaccatgaagtttacagtccgggactgtgaccctaacactggagttccagatgaggatgggtatgatgatgagtatgtgctggaagatctcgaagtgactgtgtctgaccatattcagaaagtactgaagcctaactttgctgctgcttgggaagaggtgggagatacctttgagaaagaggaaacctttgccctcagttctaccaaaacccttgaagaggctgtcaacaatatcatcacatttctgggcatgcagccatgtgagaggtccgataaagtacctgagaacaagaattcccattcgctctatctggcaggtatattcagaggtggctatgatttattggtgaggtccaggctggccttagccgatggagtgaccatgcaggtgactgtcagaagtaaagagagaacacctgtagatgttatcttagcttctgttggataaatgcttactggacaagaggaaactgatgcacactacatggtcagtgggcttttaggctagtggcatcagtttcccagaatcagacttttgaagatgaatgactttggagaagcaaattaaacatttggccctgagccagcagatcaagcaaatgtctatctttgcgcatgggttgttttttttttttttctttttattctacttggtcagctttgggacgatagtgcagctttgggtgatcttgaaaatcaaatactatcctatactccagctgcttaacttcattttattctttaatgtgtacctgaaagctcctggcaatgctggaaaatttttatcccagaggggtgggggggaggggggaggggaagccagagtccacttttgtcacaattcatttttattaatagaaaataaacacttattccagtttc

SEQ ID NO: 261158 - DNA, 2828 bp, Homo sapiens
agcgggctcgccggctgcggcgcctgggacggttgcggtgggtctgggcgctgggaagtcgtccaagatgattaaaaaattcgacaagaaggacgaggagtctggtagtggctccaatcctttccagcatctggagaagagtgctgttttacaggaggctcgtatattcaatgaaactccaatcaatccaagaagatgtttgcatattcttacaaagattctttacttactgaaccagggtgaacactttggaacaacggaagctacagaagccttctttgcaatgacgcgattgtttcaatctaatgatcaaacattgaggagaatgtgctaccttaccatcaaagaaatggctaccatctctgaggatgtgataattgtcacaagcagtctgactaaagacatgactggaaaagaagatgtataccgaggcccggccatcagagctctctgcaggatcaccgatggaacaatgttgcaagccattgaaagatacatgaagcaggccattgtggataaagtttccagtgtatccagttcagcactggtatcttccctgcacatgatgaagataagctatgatgtggttaagcgctggatcaatgaagcccaagaagctgcatcaagtgataatattatggtccagtaccatgcattgggagtcctgtatcaccttagaaagaatgatcgacttgctgtttccaagatgttgaataagtttactaaatctggtctcaagtcacagtttgcttactgcatgctgatccgaattgccagtcgcttactaaaagaaactgaggatggccatgaaagtccactgtttgatttcattgagagctgcttgcgaaataaacatgaaatggttatttatgaagctgcttcagctatcatccatcttcctaactgcactgcaagagagttggcacctgctgtttcagttcttcaacttttctgtagttctcctaagccagccttgagatatgcagctgtgaggaccttgaacaaggtggcaatgaagcacccctctgctgttactgcctgcaatctggacttagaaaacttaatcacagactcaaacagaagcattgctaccttagccattactacactcctcaaaacaggaagtgagagcagtgtggaccggctcatgaagcagatatcttcttttgtgtctgaaatctcagatgagttcaaggtggtggttgtacaggcaattagtgctctctgtcagaaataccctcgaaagcacagtgtcatgatgactttcctctccaacatgctccgagatgatggaggctttgagtacaagcgggccattgtggactgtataatcagcattgtggaagagaaccctgagagtaaagaagcaggcctagcccacctttgtgaattcattgaggactgtgaacacactgttctggctactaagattctacacttgttgggcaaagagggccctagaacgcctgtcccctccaaatatatccgttttatttttaatagggttgtcctggagaatgaggctgtcagagctgctgctgtgagtgctttggctaaatttggggctcagaatgagagtcttctcccaagcatccttgtactcttacagaggtgtatgatggatactgatgacgaggtacgagacagagctaccttctatctgaatgtgctgcagcagaggcagatggcactaaatgccacatatatctttaatggtttgacggtctctgtaccagggatggaaaaagccttacaccagtacacgttggagccttcagaaaaaccgtttgacatgaaatcaattcctcttgctatggctcctgtctttgaacagaaagcagaaatcacacttgtggctactaagccagagaagttggctccttccaggcaagacattttccaagaacaattggctgccattcctgagtttctgaatataggacccttgttcaagtcttctgagcctgttcaacttacagaagcagagacagaatattttgttcgatgtatcaagcacatgtttaccaatcacatcgtgttccagtttgactgcaccaacactctcaatgaccagctgctggaaaaagtgacagtgcagatggagccatcagattcctatgaagtgctgtcttgtatcccagcccccagccttccttataaccaaccaggaatatgttacactcttgttcgtttgcctgatgatgaccctacagcagttgcaggctcctttagctgcaccatgaagtttacagtccgggactgtgaccctaacactggagttccagatgaggatgggtatgatgatgagtatgtgctggaagatctcgaagtgactgtgtctgaccatattcagaaagtactgaagcctaactttgctgctgcttgggaagaggtgggagatacctttgagaaagaggaaacctttgccctcagttctaccaaaacccttgaagaggctgtcaacaatatcatcacatttctgggcatgcagccatgtgagaggtccgataaagtacctgagaacaagaattcccattcgctctatctggcaggtatattcagaggtggctatgatttattggtgaggtccaggctggccttagccgatggagtgaccatgcaggtgactgtcagaagtaaagagagaacacctgtagatgttatcttagcttctgttggataaatgcttactggacaagaggaaactgatgcacactacatggtcagtgggcttttaggctagtggcatcagtttcccagaatcagacttttgaagatgaatgactttggagaagcaaattaaacatttggccctgagccagcagatc

SEQ ID NO: 261159 - DNA, 994 bp, Homo sapiens
agcgggctcgccggctgcggcgcctgggacggttgcggtgggtctgggcgctgggaagtcgtccaagatgattaaaaaattcgacaagaaggacgaggagtctggtagtggctccaatcctttccagcatctggagaagagtgctgttttacaggaggctcgtatattcaatgaaactccaatcaatccaagaagatgtttgcatattcttacaaagattctttacttactgaaccagggtgaacactttggaacaacggaagctacagaagccttctttgcaatgacgcgattgtttcaatctaatgatcaaacattgaggagaatgtgctaccttaccatcaaagaaatggctaccatctctgagggattggttgttattggtcacaggcaggatttttggaatgtcccctcgtatgtgtgataaccctaaagtggaaacatcccaaatgctcatcaaagaagaaggaacaaattgtggtatattcatgcaatagactattactcagcaataaaaggaaaaaattgctgattcaggcaacaacatggataaacttctaaaacatttatgtttggaaaggaaaaacagacacaaaagaatatatgctggatgattctcttcgttataaactccaagaacagcccaaatcatctgtggtgatagaagtcagaagtctactgggttagaggacattgttggaaatgggcatgaggggactttctggggtgatggaatgtcagaattttatttggatgggggttactagatgatcacattggcaaaatgagttaggcatatatttaggtgtcccttatcgttaattacggtcggtgaaaaaaaaaagggggggactaaaatcctcgggggcaagttcgataccagtttttaaagggccaaaggaggataagaaaaggggggtaaaggggagaaagtgctgggatgggagagcttggggagtgaccccaaaagagaaaaatttggtaaatggagtaa

SEQ ID NO: 261160 - DNA, 1090 bp, Homo sapiens
ggcccagggcggccccgtgtccatctgctacatctgtggggctgagctgggccccgggaaggagttccagctcaacgtgaaccccgccagccgcttgggcgagaaggagcccttcttccccttcctcaccgtgtacccgcctgcccctcgtgccaggcctgtggactccaccggcctggtggctacctgtgtgctctgctaccatgacctgctggcccagtggctgcagcatgaggcccgcagctcccaccacgctgtcagcgcctggtcccggcagtaccaggtggagacgttcgtgtgcttcttttgtcagcaggagaagaaacggtgtctggggctgaagtccgtgcgggtggcccggctgcccctgttcctatacaccctgcgagcaagccacagcctgttggtggatgacggacagcagctgatcatcggtgcttgcgtggagtgtgggaccctggtgtgtgcgggccaagggctcacccgccaaggacccatgagctggagctccccggtggcagcagcgacgaagatgaatcggcgctgtttccactatgatgcagctcctccatctctggcagcatctttgtcttggcacctcttttatctgaattattcacatctggacactgaggtctctgaggttcggagagggaaagtgacttgcccaaggccacacaggtgtcagctccaggggcagagtgctcccttctcagcccagctgcacacaggttttctctactccaacagtcgctttggggccatgggtctgagagatgctccttcccagtgactttctggtttcatgattgccaggtggccagagctgtgtccccgcctgcccttggcagaggacctcccagcagccccagaagtcacctccatgcagagcgcagcatctggcctgcagcctgcagagagctgggctgagcacgcttggaatacccactggaaacttctcactaagctctagctctggagctcctggcgccatctccctgtttggtgagatggttctgagcatattggccagatcttcccaggactcacatgtcataagaatttctctggatagcaggagaaacgtacc

SEQ ID NO: 261161 - DNA, 430 bp, Homo sapiens
aaaaaaatacaagattctttttgaatcagaaagagagatgacttccaacggagctgacaaacactgcaacagcaagcaatgcatggatgtgtaatgagaattcaatttccacttgggcaggcagccaccaggaggctccgagcccaggggtcagctgtagctgctagaggggcatctgacactgaagccacgacgccatcccagcacctacaggctttgctgcagatgcccacccactctcagagacagctgtttttctttacatgcacaactgcccaaatatgctctctgaaggctgtggaagacagctgatgggcaatatgctcaaaaatggttgtttctatacatttgctggggtgtggagaggtctctgaagccatcttctaattatttcccaggactgcagtgctgaggtcatacatttttatta

SEQ ID NO: 261162 - DNA, 348 bp, Homo sapiens
ctctttactgagggaaccagacccactgattggacgtattcatatttgtgctaatgatgcctttcatgtctgtgtcttgatagtttaaaaagtactttttgtatctattagtatttcagtctcagaacaaccctgtgtgctgcgcagagcagaccttattgtgctttttttaacacattttattccatattaaaaaattatttgaagcgatttgagatctacagaaaaatgacaagaatagtacaaagatctcctgcagccaccctgggtttcctcgtggccattgttggctgcgttgggccatcatcttctctctgttctagacttttcccaccaggccgcctcccc

SEQ ID NO: 261163 - DNA, 572 bp, Homo sapiens
ggttgttttcaggttttgattgttatacaaatggtctcctgaccatttgtgtacacgtcacttgcaaacagacacacgtttttgagatatgcacctgagagtaagattcctcaattttaagctttacaagataattccaatttgtttgctaagttgtttgtacaagttacatttttatgaagagtctatagcagtttcctttaatctatacgtgtcaaggtgtgtacctgacatcttaaaacttataatttttatggctgacttttgaacatgctaaaatatttctttgtagatttgatttacatttctctaattagtagtagttccagcattatttcaggtatatattgacacctttttttcctattttatgtaactccttttcctgtttttgttattttttccaaaaattatgtatgttgtccctttctttttgattttcaggtattatataatttatagggatgactttttaagtgataaatattgcaaatattttcacccgctttgtgaattgtcatttttgtctccttttatggtgtttataataaaaataattatttaatgtaata

SEQ ID NO: 261164 - DNA, 669 bp, Homo sapiens
gccactgcattacagcctaggtgacacagggagaccctgtctcaatcaatcaatcaatcaatcaatcaatcaatcagagagatccggatagtgaatgactagggaactaacattgggggaactgagggagtaatcaaatgaaaaatgtaacaaatttatgagaaggttaacagggaaaggccactgagtttcacactaagagaactgctggagaccagaacatgcaattttagcagaacagctgagagaaaactgaggatcaggaataaagtgcgtgaagacagaacagagacagagggtattcaatgagaaaaactcagagaaccaagccaggcaacgtaccattagacccaactatttacagtatcaactgttggagtactttctgtcaccagtaagatttaacccaatgaaaagaataaaatagcccatttcttttcattgatatgatgcaccatgacttactgtgtgcactgacttaatatgtacagtgatttaatgagggagtgtctctattcctgagagaatctttcataaaactgtggtttagatgaaagcttacaaggatgcaaaatgccatggtagtcaaatgtcctactaaacgtatggatatctgttcaaagccgctgctattaggcccaaagatagaaaacgtaggctgctcccctg

SEQ ID NO: 261165 - DNA, 539 bp, Homo sapiens
actgcatttgtgggaagcaaccctgccataaacaactcagttaacgcttacatagtaaataattgcattgccttgggctggaatagggacgccagaaggtataggaccatgtggaattcagaaaagggagccctgaagaatgagattttattgttcttaccaggagagtccaggtgctagagttctctccttgtaagtgactaaccttctcccttttggtacacaatcctcagatgaacggagatgattcattaggccattctagcttaatggatgcatcactgtgcaaccacgcaaatgcctcattctgattcactcatttaatattattgaggagtgcgggtactaggccattagaagaacaaacaacaacaacataggctggacttgcacttgcagagttcacaggctagagaggcacacaagttaaatatagagacagctgaaagagctgacgtctgggacagaaggagccccctgctccaggagccagggagcagatgccatggggggctggcagggatagggacgtcaggcca

SEQ ID NO: 261166 - DNA, 444 bp, Homo sapiens
ttctgtgttggtgtcattttagtcccacacttcctgaactcaaaaccctctttcctaagacttgccatgaaacactcctatgaacaacggtgaccacgagtccctttcggggagagtgtcgttttgtactttgtattgtgtcccaggccctggatcctgaggggtggccttgggtctaggagagcgctcaacagggttcgcctatagaagattcttccggtgaatggacgaacttgtggccttgtccagtggtttcttttcctttttccctgtagtttccttccactgtcaacttttccccctccttcatagcagcaggtgttggcaaggacgtgcccagattagttaggcccagcctcttcttcttcctccgtccccacccaccttacctttaggactggggtggggtgatgtgtctggccacaacttccgcgaccacttttt

SEQ ID NO: 261167 - DNA, 752 bp, Homo sapiens
ttccccatctcagtctctgaacgatttgttctctgttaagtccatgcaactcaactgatttgttaccaattcccctccactaccccaaaacaagccagtgttagtgcattactaaatagtggaaatgtcaaaaattatgtagggcctgtcaacatctcagtatattagttccaaaccttaaagagagcgaatttatgtaacatgcagtccaggtgtcctgacagatgttttccacttttcaaccatcagtgacaaactgagacttgttgccttacattgttagctcccaatgcctaactagtatttattaggtcaagcaatttggcatctaccaaattgggctacatggaaaagcttacacatacagaaatctggtttcacactagtgaataaactgagtaagggcacccccttgagtgtgacagctggcatctgagagttcccaatgctccctgcctgcttggtaattgtaccagggaaaagaaccctcccaccacattctgtgaccataaaggatgcaagatagcacgactacttcgtagagcgtgttcattttacagcttttcttgctcaaatcactcaccgagggaagatgacaaccaggattaactttaaagctgttagtatgccactctggatattaaaaaaattctccaatcctagttttctgtgattggaaccttgagctttacccagaatcagttaagttgctcccaattgctgacccatagatgctggtttgtttctctgaa

SEQ ID NO: 261168 - DNA, 315 bp, Homo sapiens
cgaattctctgtttaacataaagccaatctacttttagagtttgggagtaagtgaggaaatactaggctcctaaaaatacttggataccccttttaattttaaaacttttattctggaagccaaaaaatacctgccagataacaacatttatgaaaagtaaatgtgttatataacaaaacagaacattcgatgtactctacaaaacagagtccttatgacgtgctggatgccattctaaatacataacaaatattaacttcttgatagctcatgacaatcttaggaggtaagaattgtcatcctcattctacaga

SEQ ID NO: 261169 - DNA, 390 bp, Homo sapiens
cccttttaagttgaagggacattatcatttctatctatggcatttctctgcaaattgaactcaaatatcctttgggctgactacacagagaacagaagaaagaagtggaagaaacttggactgaagattgcctccctgaaaaggttttcttcaggcagaattaggtgagaacaaatgacatcagaaagtagcatgtcagtatactgctgccagctccatatggttcagcttgttttcacaggtatttaattaattccacaaacatatattgagtatcagatgtgggatcctgttcaacacatttggggtacagtagtcaattagtctactctcatggcacatacatgctggaaggagagaaaaacaataaataaatgaacaaaagatgca

SEQ ID NO: 261170 - DNA, 188 bp, Homo sapiens
gaaggaggagaaactgagacggtccggaaagagccgaaagcggtgtccgggtgggtggcaggaggtggaaacagccgaaagaaaagcagccagggtaatgcgattaagagaatgagctgaacgggcggggctgaaggggagaataaacgactttcaggaattcgccggagagcaagagggaaaaaccg

SEQ ID NO: 261171 - DNA, 488 bp, Homo sapiens
aggacttggggacgagccagctggtggaggttgcagcgagccgatatcgtgccattgcacccagctaatttttgtgtacttttagtagagacggggtttcaccatgttggccaggctggtctcgaactcctgacctcaggtgatccacccacctcagcctcccaaagtactgggattacaggcataagccaccatgcctggccttttattctgattatataagtagtaagtggtcttattacagtagcaatattctataattaatattatataacatggttattgcaaaaacgtttaaattgagataacaaggaaattacaagaataaaaattacttctaataactttcgtatctggtaaaagtgggcattttaaatttgtgggaaaaatgaattattcaataaatttcattgggataaatgggtaggcatctggaggagaataaggtagatcctaaactcacacctacacaaaaattaattccaatg

SEQ ID NO: 261172 - DNA, 609 bp, Homo sapiens
aagagccaatgttgcaattcacacccaagggccatcagccttggaagttctctcttgcttggggaaggtcaggatttgtactactcagatctttaactgattggttcaggcatggccacataatggagggccatctgcttgattcaaagtccactgacttaaatgttagtctcactcaaaaacaccctcatagaaacatccagaataatgttgcccaaatatctgggcacctggccaatcgagttgtcacagaggaataaccaccccaaggggcaaaggtgaatgtgaagcaggagaagttgtgggacgtgtctgtgtgtggaagttttatccggtccttcactgagtgtgggccaggcctggcagtgctgagcacaaagaaggatgatcaacttcccaaaataggttgtgtctcaggaaagcataacattgctttaggttttaagatagcttgaagatcgaggtaaaaatcaaactttgtccctactttattctctctagatcaggggcccccaaccgccaggtcacggactggtaccggtccatggtctgttaggaactgcatagcaggaagtgagcggccggaagcaagcatgaccgcctgagctt

SEQ ID NO: 261173 - DNA, 475 bp, Homo sapiens
atcatttcaggagagttgtaatactatttagaagtttgctttgttttaggctacctctgtttagaaaaggatgagatgtaacaatagtgtacgtttggagctaggggatgattctactttacagatggaagcactgtaatgggtaaattctaaatgcggttgctactcctaagaattccatcgcagagtatttctggttctatacaaatattttgtgcagagtttgaattggagatgttacagacatgctatattgggtaggcctaggacatcctggtaaaggtgcagtgattgtcagtcagtgtttgaattgaagccttgatcatatcactgtagttcagtggagagagaaattgtgtggggtgtaggtaaaaaacaagacagtggagtctccacctgttgttccagtcatctttcctcttccctcttcccttattaaggaccctgcccaatggtaacagttgttgccaagaaa

SEQ ID NO: 261174 - DNA, 419 bp, Homo sapiens
taacttgcttggaccaagggctcacaactggggacatggcccaaattgcactagcatttactctgtgccaaggcaaccagcttccagagtgagacaagatgggggtctggggctatgaacatgtgaataaagtcctgagctataaaaataatgaataaataaaaaccaggaaaatatttcaagttcttatgtggcaacatctctagatctaaaatgtagcaggaggaaaataattgaagacatttgtcatgtgctacaggtgaactgtgaccacatctgacatcacctgcagcttccttataacatgcccactgggcagagaggatgagaggcaggagagcaccagtgtatttaggaccaacttttgaaatttaaccattaagttcagtccctcctactctccataaaacaggcccatg

SEQ ID NO: 261175 - DNA, 344 bp, Homo sapiens
tctagagatctttgcgcggattcctgtgttagtttgctgagaatgatggtttccagcttcatccatgtccctgcaaaggacatgaactgatccttttttatggctgcatagtattccatggtgtatatgtgccacattttccttatctagtctatcattgatgggcatttgggttagttccaagtctttgccatttctttaagaatgttgaatattggctgctctttcttctctgtgtctcttcctgtctcccctaccaatgttctccatcccttccaaatgaactttccctccaatccttccctccatagctgcttttggagaaacccaaactaagaattcca

SEQ ID NO: 261176 - DNA, 577 bp, Homo sapiens
tcccccggaacgacactgcaacagtcaagatatggaatcaacctaagggtccatgaatggatgaatggataaagaatatgtggtataggccaggcatgggggctcacacctgtaatcccaacacttcgggaggccaaggtgtgaggatcacttgaggccaggagtttgagaccagcctgggtgtcagccccagaatatttgcctttgggcaatctcaaaccactggtgcggctctgccccaggtatgagcatggcaagtgttgaaagccagggggttcgtgtccacttcccactccagcagccctcagccagttactgataggagatagtcccccacctgtctgttgggctaacttggaagtgcatggcctatgcgggctccagagttccccagcagatgaatccccagttccccacagtggtctgggcttgataaaataccctttattggctgctctttcttctctgtgtctcttcctgtctcccctaccaatgttctccatcccttccaaatgaactttccctccaatccttccctccatagctgcttttggagaaacccaaactaagaattcca

SEQ ID NO: 261177 - DNA, 241 bp, Homo sapiens
gcacccccacccccacccccactggaattgtgatgctgcacatttttattttcacaaggagccgattttgtgttaaaatgttgacaacagccacacctttccctgaagtctttcagtttatctgataacccttaaacaaaaaaatcattcttaatccatgtagctcgcataaagagactggtacccggctttcaaagaaaaaaaaagtcgttttcagttgggtccccagcatttctgtcta

SEQ ID NO: 261178 - DNA, 676 bp, Homo sapiens
ctttttgtagatctaggatttcatcccagaacaagttaagaaaaagttatatatgtatcacttccctacagcctgaaaaaattcttttatactttttgtagtacaggtctgctggagacagattatctcagtttttgtctgaaagtgtgtttcttttgcttctacttatgaagggtagtttcactgtatatagaatcccaggataacagtacagctgatcctggaacaacattgatttgaactgcccagatccccttacacacaggtttttttcaaagaaatatattggagatttttgtagatttgcaataatttgaaaaaacttgcagacaaactggttagaaatctcgaaaaaagaaaaagttatatatatcttgaatatatttaaataatagtctgttttctcacttaataccataaaacatttacaaatctattataaaaaaagttaaaattaatcaaaatttattgactttagttcatacaaacatgaactaaagatggtgccgtttgcagtcaagagaaatgtgaacaaatgtaaagatgcagtattaaactataactttataaaattaactgtaccgcacactatattactctattaatgttgtagtcacctctggttgctattccggtgagctcaggtgtgttgagtatctacttaaaatgtcacctg

SEQ ID NO: 261179 - DNA, 581 bp, Homo sapiens
attctgtttggttatgataagcctggaggagatagatttaagagaatgattttaattttagttcagttaaattaagttcaagaaccaggaaaacatttgtgccttttgtaatttcacttgtattaaattccgttagtgtacaaggctcaaacagaaagacctgacaaactgttgaaaactatttaagaacatttcttaacatccgtcttcttttcctaataagcatacatttttcttttttaaatttattttacttttagcttctgcatccaaccatccataacatacttactgcttttcttaaaaaagttttttccagtgaaattttttttctaacttagaagttttagtactaatttcttttaggaacacttgaaatttttcttaattgtttttggatgaattgtatgtgccacaataaacgttcatttattaacttaacattagcactaacgtcatgcaaagccctctgcagggtgctttggaaacagaagttaagatcacagggaaaaaagtttccactgcccttggttctttagcctataatgtttaacaaggtctttgtgatgagtattccttta

SEQ ID NO: 261180 - DNA, 273 bp, Homo sapiens
aggaaaaaagtgtcttgaaaaagcagccgtggacgtggagttaccaaatcatccgaagtggctcctggaccgggtggaggagccaggctgcagaaatgcagttcatcgcaggagttttcctgaacagagaaaagtctccacagaatagcaaaaatagcaaaaactcgaagtcaagggtcttgaggtctaaattttctgtgtgaccccagggaaatcgtttcatctttctaggtcttcacatcctcacctgaaaaataaagtgcttggctaaga

SEQ ID NO: 261181 - DNA, 929 bp, Homo sapiens
cgccatttgatttcacagaaaacggaaacgcagtgatgaagcccagcgcctggccctcgccctccctccacgtctgtctcgggggcgccctcccctcgcaggagccagggcacgcgggccttcaaccgccgaggcccccgccgcccttctggacttttatcgaggcatgtacactaatacgaaagagaatttgccatttacctgtaagattgagggcgacaacgtaagaggaatggttttaagtgacgcgtccggctccttactcccactgaagggtgaaggtgccacaggtggacctggtttggattctgatgtgaagaaaccgacttcaaaacatttgggccaatcaggaaaatgcgaaaactctgactacaaatttaatgatatctagaattattgttaatagtttaaggtgatagaggctatgttcctaagtgaagaatgaagtagtggcagttccatcagatgcttagagccagagacagtcctaagcaaacagctggaaaagaaatccggtgagaaattccaagcaataggaattttctctgaagatcacttggaagtgccccatgagaaaaaccactagcttcaaacccctgccaagcccagagaatgccttacactgaaatagatcatcataaaattaatagcccctcaaacactgcctggctcagagttggcgcttgttaaaattttgaggaagcaagcaagcaagcacatgggaggataccaaaacatggcagtaaaaggagctaaacacacaaaagaaaagacagagttctgctcttgttgcccaagctggagtgcagtggcgtgatctcagctcaccgcaacctccgccttccagattcaagcgattctcctgcctcagcctcctgagtagctggaattacaggactccatcaccatgcccggctaactttgtattt

SEQ ID NO: 261182 - DNA, 610 bp, Homo sapiens
tcacccaggctagagtgcagtggtgcaatctcggctcactacagcctccacctccagggttcaagcaattctcatgcctcagcctcccaagtagctgggattacaggtgatagaggctatgttcctaagtgaagaatgaagtagtggcagttccatcagatgcttagagccagagacagtcctaagcaaacagctggaaaagaaatccggtgagaaattccaagcaataggaattttctctgaagatcacttggaagtgccccatgagaaaaaccactagcttcaaacccctgccaagcccagagaatgccttacactgaaatagatcatcataaaattaatagcccctcaaacactgcctggctcagagttggcgcttgttaaaattttgaggaagcaagcaagcaagcacatgggaggataccaaaacatggcagtaaaaggagctaaacacacaaaagaaaagacagagttctgcactccagcctgggcaacagtgcaagactctgtctcaaaaaaacaaaaaaaacacaaattgtaaattgagtggtaatattttctataaaggtaacattaaaactgtgttgagcactattactattaaaaaaaa

SEQ ID NO: 261183 - DNA, 523 bp, Homo sapiens
cgccatttgatttcacagaaaacggaaacgcagtgatgaagcccagcgcctggccctcgccctccctccacgtctgtctcgggggcgccctcccctcgcaggagccagggcacgcgggccttcaaccgccgaggcccccgccgcccttctggacttttatcgaggcatgtacactaatacgaaagagaatttgccatttacctgtaagattgagggcgacaacgtaagaggaatggttttaagtgacgcgtccggctccttactcccactgaagggtgaaggtgccacaggtggacctggtttggattctgatgtgaagaaaccgacttcaaaacatttgggccaatcaggaaaatgcgaaaactctgactacaaatttaatgatatctagaattattgttaatagtttaaggtatggtacattatcacaaccaagatttgacatagctacagtcaagatacaggatattatcttgtatcaggtgtatcaggacaccactacaaggattactctgttttcagc

SEQ ID NO: 261184 - DNA, 460 bp, Homo sapiens
gcgctggtggtcacagactgcgctctcacccacactgaggtcgatctggaaggaatttactgagggggctctccagcagctggctaaccgggaaggaagtagaactagaagacatgctttactcttcctgaagaagatacttaagcccctcaagaagagatttaatttgagcgctgtgttgatttgtgcattccttgtaaagcacacactaaattagcttcacatcccagccgtaccttcatctgcagcacacatctctcccccagctcctctcagcactcacttagccctgttcagttcccctgtaggcacaggtacacatatatcagcctcttgtaatcatgaagacgagggacgaacttacaaagacacccggcacactgtgacaatccttaactgggagaaaaaaaaaagagagagagaaagcaaagaaaggtagaataagagcaagaaaaaaaaa

SEQ ID NO: 261185 - DNA, 399 bp, Homo sapiens
gcttttataatttctcttacagtttttcaaaataaaaacacacaccttggactcccaaagtgctgggattacaggagtgagccactgtgcctcatctagagttagtatttctatccctaccttccaaatgctctagaataccatcacgtcgcttttagtttctggttaattcttttctcttgttctgagatggagtctcactctgtcacccaggctgaagggcagggtgttgagttcagctcactgaaaacactgcctccgggattcaagtgattcttcttcctctgcctccagagtagctaggattataggactgcaccaccacacctggctaacattttaattaattaattattattattattattattattattattattatttgagacagagtct

SEQ ID NO: 261186 - DNA, 416 bp, Homo sapiens
caagtccaagaattctttgcctagatctagttcccaaaaattgtctgctataattttttccaaaatttttatagttttgtattttacattaagtcttttatccattttgagttaatgtttgcataagctgtgagacttacccaaggtattagactctttttttttttttttttttttgaccatgaatgtcaaatggctccagcaccatttgttgaaagactatccttcctccatggaactgctgttgtatttttgtcaaaaatcaactagccatatttctgtgggtctttttgtgggttatctgttctggtccattgatacatatctatccctctgccaataccacattgtcttgattactatagtaatatagtaagccttaacgttgcgtagagtggtcccttccttccacttta

SEQ ID NO: 261187 - DNA, 390 bp, Homo sapiens
ctttatatttatttcactatttttctgccccccttagatgatccagggagcagaaattatttttgtgtttcccctcaataccagcatctgattggctgaccagcaacgtgtctccaagaaatgaaagctgggttgggtgaagacaattttaatgtctcaaggggttaccttttcaaaataagactgcaccagaagactcctctcagccccagggcatccacttgctcccttgagaggacacattccatacctcgggtcatcctacgggagaaaataaaccagaagctgacattcactaggcactttagctgacagaaccatggcggatatctcggtttatccacagatagtactgaaacccaggaccaggaaaaaactaaagggtggctg

SEQ ID NO: 261188 - DNA, 463 bp, Homo sapiens
atgttccgcaaagaaagaaaaaagcatgctaccgattaaactataatccccaggaatttagagacaaatctcacaattactaaaatgtgcagaagtgtatcttagaatcagtgaaatatatttttgttttgttactttgtgtgtgtgtgttttcctaaagcttttggtagcctttcttgacaagagaacagtgttccttcaccatatttgtttggtgcccatgagattcccaagctggtttcctgctacagtttggactaattgatttaccctaaacctaagttgatcccccaaccctgaggttttccctgcgttgatccactgttcccctaacttcatgtttcttcctttttcccccttgttttggtggaatccatcaataatttcccaagaatggattggtaggaagtaacttttggagtccttaaattgctgaaaatttctttcctctaatatgactaaa

SEQ ID NO: 261189 - DNA, 715 bp, Homo sapiens
ccccgggctgcaggaattcggctttaggttttgctaaacatttaatgtcacttgaccatacaaatgtcattatgtggatgtcactagtttcatgtgctctcttccctgaaaatacccttagacatgataataaattgaaccattacagttttgtgacctcgtgatgcagttacttacgtgattcttaagaactctccgtatagtggtaaaagcaagcaagaaggaaaaaattaaccatgtaattaatgtaatacacatacagtgtaatacaaacagtattacagcatacaattagtacccctgaacccaggtgttatcctctcggacctctagtaagtgactgtgctttgcgcagtgaatctcctgtgaatagcaagcagaaagtcactgccttatgggagtagtagggccagctgtcagcctcgggaggtagaatataatcaaggaaggaaaatcttaaaagttctccgaagctatgcttatattcaataggatgtaacttacacatggcaaacaatttaaaaaatcttttaatttaatgtctgaaataatgtcacagggacatgctatccaaagagtgtaatatttgttataaaattagtgaaaatattagcacagagtttgttaatgtttttagttaattctgagttagtcttgaattaatgagttacagggcattgggcacttgtaatggcagtttgttttcccttagatt

SEQ ID NO: 261190 - DNA, 392 bp, Homo sapiens
agaagtgctcctttgcccaacaagcacatattcttcctcattagtcccatctaactccagggggaaacaagcacttagaataaaatggtagcccagtcttggagaaccactcatagttctgggattttcagagtagaacatagcatttattcatagcactggcattcatgacattaacaaagctccatatttaataagaaccagtagggttttggacacaggaattttacatacaatgtttttcctaaaatctttcaagccatctttactgaccattaattttttaatctatagaaacacttccttgagcttcttacttttcctgaataagcatgatacttattgtcatattacatcttttgtcttcctcattaaaaattttctttcatgta

SEQ ID NO: 261191 - DNA, 448 bp, Homo sapiens
acctggcctcttccagtgattcttacttcaacatgctacacatcacttccagactggcccaccctttttcccatgagtctttctaatgtatagcctttcatccggtacacaggatgaagcccaatccccttgagctagtgtctaaagtcctcctaggacaatcccttactaactccttgtggagaagagtttaatgcaccagttctgagactgctacccttagaaaggcttgcttgcaaggttggcccttggctggcaccaggaaacctggatttgggaagggctcctgccgttccctatctgagaagtggtgctcaatatgcttaaactgtgcaatcagtgtggttcctgctgaacacctgctttccctcctggagtctggaatttctgtactgctagaaagtgggtccctaggtgacaagctctcaataaaaatcttgaacattga

SEQ ID NO: 261192 - DNA, 915 bp, Homo sapiens
ttcttgtgattagcaatcaaggacagtttctcagctaatcagtacaggaagaagagcctatggtaacagacaataaaggaacagcttgcagacggcctatcgtgagactttgccttgtgatcatattacaagactgaataagatagacatgacctccttcctcctggacctgacaattgttccttcaaatcacttccacacatgcattgcctggggactggggactggggtctggatcccatggccagaccaaaccccaaaggaagctattggagaatacacaccttcgaaatgcggagaaatataagaaaaggaagacaagagttcaagaagccaggcatccaacaataataactaaagaggcaaggtaattctcaggatgatgtaacagaaagtccagactggtgaatgacaatgaagaactacaagaggtttgtactctgaaaagaagaaggaaaaaagtggaactcacagtttgtctaaagtttttgacatgtttcaaggaagtatatggttctgtgcaaagttagcaaaaggtacattaaaaaaatgagaaaacaacaaaatcaggcaattaccaactaaaagtataaagaatttggtacaaaaaaggaaattaataatacactacatgctaacttgttaacaatttttacatagtaccaatacaataaatacaatgttaatttcaaactgcaattaattatgctggaaggatgtgggagtgttaagagagttaaattaaaatcttcataacaggaagtcaacagataatacctactgaatatttctactttttggagggatgttgggttggggaactactgtttcatttccttaaagtactatttggctttttaaattgcctgtacacatgcatatgcatacatagtctaagttaaatttttaaaacca

SEQ ID NO: 261193 - DNA, 592 bp, Homo sapiens
gtgagaactctatcacaagacagcccttgggggatggtactaaaccattagaaaccatcccaatgatccagttacctcccaccaggccccacgtccaacactggggatcacagttcaatatgaggtttgagtggggacacagagccaaaccatatcagtcccttatgatgatagatgcaaaaatcattgacaaaaatattagcaaattaaacccagcaatatataaaagaataaacttcatgacaaagtggggtttatttcaggagtgcaatattaatttaacttttgaaaatcaagtaatgtaattcaccacactaatagacaaaaagacaaactatatgatcatctcaatagatgaagaaaaagcattagaaaaaaaactcattcatgataaaaactcttagccaacttggaacagagtggaacttttcaagctcaataaatggaatctttgaggaaccaacaactaacatcatgcttattagtgaaaactgtatgctttctccttacgattggaaagaaagcaaagatgtctgttccctccccttctactcagcattatactggaggttcttggcaatgcagtaaagaa

SEQ ID NO: 261194 - DNA, 332 bp, Homo sapiens
tacgctcccagtggctggggtccttaactaacgtccatctctcccccagagtcctctcccagtcaccaggtcctggcactctcccctgccccagatgtctagcccagttggcccagagggcacacagaaggtgggctggaaaagtgggaaaggcagtctggattgacttagttttccccacctttgaccaacacacccaattgggctgcagccgatctatggtcgggggaggtaggtgggaacctagatttttggaaatgtgggattggggtttcacacgaaaccatttgttgaaatccaagaaagtgataattatccctagcgattttaga

SEQ ID NO: 261195 - DNA, 421 bp, Homo sapiens
ttaatcccactaacacttggatccctttccccgtttttctaaaccaaagctatttgttctttcttttttattttgtcattgtgctccaagagaattccatttcatgcaaaccataaccttccaattacattcaaaattcatctctattaaaatgcactaagtttatattaacttaagcaacataataaaaatagtcaattcctttaaatttttaccccaatattactatttataatgtctgaaatattataaaacttttcattgtctaaaacattttatttttatatttttatttataaaaaataaattgggtacagtgactcacatctgtaatcccaacactttgggaggccaaggagagaggattgcttgaggctaggagttggaggccagactgagaaacatagcaaggcccactcta

SEQ ID NO: 261196 - DNA, 814 bp, Homo sapiens
acctgtgcatgtgccctacagctcagggtacaactaaggacttcggatagtccacacgcaaacccggagaatcacctctgcttagctcccttgtctccagtactctgccttgcacattctaaccactttggcacccacaaattccactcgctccctgcctcagctcactaaatccctcacatactacttggcctcagcttcctgtgtcttggtccagaaagtgccctcaggcagaaagccaagtaaacatgggactcgtggatgtttccctcctctcaaggattatattcttgtgttgcctgttttcgagggtctaaaaacagttttctcctacatttagctaaattcacttttataattgtttatggtgggagggcgaaatccagtacgagttactctatcatggctggaaacagaagtctgggcttaggttatactgaagcaaatcctggcaggcattgatgccatccagccagcctacaaattgatagcagtttttcgagggtaaatttctactgaattttcatcgaggttggagttgaagccaagcaagcctaattgcccagctctggcaggagcccaccctcggggctgtctggccctcatggcaccggggatgtcaggaaatcttgaccctcagtgtcccatttaaagaggacaaaaatgtgtatttgtaatgattgtgagtcatcaaagaaagagtaaatcacactccttgcactctgttaattacaacagagatttacataataggctttagacagattttctgagaaacgattgataacagtttcaatatataaaaggaaaacta

SEQ ID NO: 261197 - DNA, 229 bp, Homo sapiens
agcccttcctgggtgtgggactctgggcaagtgccctgcctctccctggtctccccctcagctcagagagtgcagttcccaccctgggaggatgtctgcaccttgcagcctcttcagcccttagccctcttggcaagagctcaagctttctcttgttaaggacgggacgcacagacatacgtgagtagatttcaggttacgtgccctaaactaataccgtgtgcactta

SEQ ID NO: 261198 - DNA, 491 bp, Homo sapiens
gtgaagtctcacctctaccaaggccaggaatggcagggtcttcccagcttcatatcccttctttcagaatcttacagagtgctgtgaataaataaacatttaataaatgtttgaatcagaatatctgctgaggcttagacctaattccatatattgcttgtgagtgggcatcatttttaccacctcccaatccatggctaacccccttgactgctctgacagccatcttgacttgagccaatgtgctggtatctaactatctccggagggaggttttacactcctgttttttactgcttcctaattggattgcttgttttgctggctaggtcacacatggctgttttctgtaggcacttcttcttctacactcccagttttaatctagttgctgccattgggttgactcgccctgcctctctctgtgtggtggttttcctcataatgtatattccattagcacagtgaagattgagttcagtccaccagag

SEQ ID NO: 261199 - DNA, 893 bp, Homo sapiens
tgagacagtctcactgtgtcacccgggctagagtacagtggtgtgatctcggctcactgcaacctctgcctcctgggttcaagcgattctcctgcttcagcctccaaagtagctgggattacagatgtgcgccaccatgcctggctaatttttttgtattttagtagagacagggtttcatcatgttggccaggctggtctcaaactcctgacttcaagtgatccacccacctcggcctcccaaagtgctgggtttacaggctttagccaccctcagcaattcatcccaccagaacaaaaggctaacatagcaaactggtaaatttatctgcacagaaaaactgaactacaagggatgaggtacttaacttcccacctgaagacccaggaattttttttttttacttttcttcattgagatagggtctctatcgctcagacaggagtgcagtggcacaatattggctcattaagtctccatctgggatcaaatgattttcccacctcagtctcccgagtagctagcacaggtgcgtaccacatcagtctggcttatttttccacccttcctagaaacggtataaaatacttagcgagcatctaattaaaacagaccgtaacctaagaagacgtaaggtcataaccacaactccaaaaccaaacgcgcgccactacaacaactctgaaaataaacacacgcaacaacacacaagccgtcttttaaactagttcaatcacaggacagaaaagcgcaaaagcagtcccccactaccacaagttatgcagccgagttttctcattcggggaaatcgcgggagcaaacacatagtaaaaaccctcccccaagaaaaacactttatcaggacaacagcgtctctcccccgccacaaagc

SEQ ID NO: 261200 - DNA, 478 bp, Homo sapiens
tcctgccggcagaggctccacattggagctattagaatgtgggctctgtacgtcggccaagtccatgtctcagagactgtatccagagcatagcgtggccacagggctactgagttcagcaagagagtcattctcttgttcaatccattattgcctgggccaaggttctaagtcttcgtaggcagcatttgattttatgacacgtcttaaaaaattaaggcaaactggaattaatttagttttgagaaaacaacagaagctgctacaaggcagagataattctaggctgccagaaagtggtgatctcagtggtgtacattttcttaattcctgattttcctctttgtgaggtcttcctcccactcccatactttgcacattctcacctatgcacaccctgagcaacacaatgttgacaacttgacttagcattgctcttttcttaagctttgttttcatttcttcttcaatacaacag

SEQ ID NO: 261201 - DNA, 397 bp, Homo sapiens
ccagtgtccatcttcctgtccccggaaggcttgaaggcattctcaccacgtcttggttctgagggtatgacgcccagccagcagccatgatattctccccgaagggcctcccaggacctgctcacactggccgggagatgctgggaacccaaggcagcctggtcattagaaaatgacggctcaggactcgggcagctacaccgtcgtgctggaaaccagcaggggacacaggagtgtgacggagcagatccatgtcaagagtgagtggggccccgcagtgggaggggctgacttctcagaaagcagacccactggacctcagaagagcccaccaggacactttgcatgctggttatccattgctccccaataaaccaccccaaaacttaaaacatca

SEQ ID NO: 261202 - DNA, 455 bp, Homo sapiens
aagtgtagagtgaaaggagcactgtttattattcctaatgagacctcttcaaccacagctgagtttatgttaatgcggtcactgttcgaaagcccataaggatggttggcttgttgtgggaggggccgacaatgtgattagaaggttggacctttttagcctacccctgacctctggggagaggagaaggactgggtggaggttgagttaatcaacaacggccaatgttttagtccatcatgcctgtgcaatgaagccttcataaaaacccctaactaaagggtttgggagagcttccaggttgctgaacatatggaggagctgggagggcgaacccagagagaccatggaagctccacgcccctttccctatgcgtgtcttccatctggctgttcctgagttgcatccttttataacaaactgataatctagtaaataaactattttcctgaga

SEQ ID NO: 261203 - DNA, 425 bp, Homo sapiens
ctctcctcctcctcttcagcactgcgtatgacacaagcagagtgccttcggagcagcttctccctctatacatgaaggcatgttggggtcaagggaaaagttcaatacgtcatgacacacccaaactgagctgctcgcacctcaacagaactgcatttaatggtaaccatgtcaatgccagccatgggatgcgtgacaagattataaacctgatgctgaggaaggatgtcttccgggtgtttttggagaactagggataaatccctaaatggctcagctgtttattgggatgggcacttgcctgtaacttgaagtaacttagaaaatctgtgcccaaagtgataccaatctaccatggctccaggtttaaacccacactttatcctttcctacaaagttccaaatggtctgagcacttagtagtt

SEQ ID NO: 261204 - DNA, 619 bp, Homo sapiens
agcggggacaatcacttgggaatcactgcttttatagtaagtggtaggctatcctgctctttgtcctggagatttctcgctgcaaacacaaccctgagaaatggcccagctaatcagtagtgggcggggacgctcagaacccgcagcagagtgcctctccccttccttctgcaatgtctccagcaccctctaccgacaaaattagcactgtgcagactggcgaaggagaaaaaggctcatgtccacgttgactgagcaggtaatgaagactggatttgtagatgagaagcactaattaaaaactggtgtgggccgggcgcggtggctcatgcctgtaatcctagcactttgggaggccatggcgggtggatcacctgaagtcaggagttcgagaccagcctggccaaggtggtgaaaccctgtctctactaaaaatacaaaaattagccggacgtgttggtgcgctcctgtaatcccagctacttgggaggctgaggcaggagaatcacttgaacctggggggcagaggttgcagtaagccgaaatcacaccattgcactccagcctgggcaacaagagcaaaactccatctcaaaaaacaaacaaactggcgtatatg

SEQ ID NO: 261205 - DNA, 3692 bp, Homo sapiens
ctgatttctcttcggctggacggaggctgcctcctcacgcggctcccaactattcccgtagctcagtgcccccctcccgccgctctactcagccaggcagacagactgacagactcgctagtcggcagcttcactcccgagggtgccgcgagcccaggcggcgaacacccggtacccctggcgcagcgaggtgggatgctgtacggacagcagcgctaagtgcccccccacccccggcgcagggtgcactcgctcctggccgcgggcccagcggcggcggcggcggcggcggcggaggggatgagcccgggacgcgcgaggcgcctgcctcaagctaccgcccggagagggacgccgagtagggctcatcgcagtaccgcgcggacccctgccccctgtggcacgcggctgcggagccttgaagccgtgtctgtgatcaggatgcactgggcgcctcgcagctggtgaggatgccctgctgcgcggccctgcgcccccagccccagtcccaggtgggcaagactgactgggcccggcttcggcccctcgtgccggtggatgaaacgtgccggagtgcttgggtgccatcagctatcaaatctgaattctaagcgccatggacgaaggcactggactgcagcccggggcgggagagcagctggaggcgccggccactgcagaagctgtccaagagaggtgcgagccggagaccctcaggtctaagagtttaccggtcctcagcagcgcctcctgccggccaagcctcagtcccactagtggagacgccaacccggcctttggctgtgtggattcttcgggccaccaggagttgaagcaaggcccgaacccgttggcccccagtccctctgccccgtccacttcggcggggctcggggactgtaaccacagggtggacctcagcaaaaccttctcggtgtcctccgccttggccatgctccaggagagaaggtgcctctacgtggtcctcacggattcccgttgcttcctggtgtgcatgtgctttctgaccttcatccaggcgttaatggtctctgggtacctgagcagcgtaattaccaccattgaaaggcgctacagtctgaagagttccgagtcggggctgctggtcagctgctttgacatcgggaacctggtggtggtggtgttcgtcagctacttcggcggccggggtcggcggcccctgtggctggccgtgggtggactcctcatcgccttcggggcagccctcttcgccttacctcacttcatctcgcccccctaccagatccaagagttgaacgcctcggcccccaacgacggcctgtgtcagggtggcaactccaccgccactttggagcctccggcctgtccgaaggactcgggaggaaataatcactgggtctacgtggctttattcatttgcgcgcagattctcattggaatgggctccacacctatttataccctgggaccaacctacttagatgacaatgtcaagaaagaaaactcctccttgtacctagccatcatgtatgtcatgggagcacttggccctgcagtgggatatttattaggtggacttcttattggtttttatgttgatcccagaaatcctgttcaccttgaccagaatgaccctcgtttcattggaaactggtggagtggattcctcctttgtgccattgcaatgtttcttgtgatattcccaatgtttactttcccaaaaaagcttccacctcgacacaagaaaaagaaaaagaaaaaattttctgttgatgctgttagtgatgacgatgttctgaaggagaaatcaaacaacagtgaacaagcggacaaaaaagtttcttcgatgggatttggaaaggatgtcagagacctaccaagagcagctgtcaggatcttaagcaacatgacattcctttttgtgagtttgtcatacacagctgagagtgccattgtaactgctttcattaccttcattcccaagttcatcgagtcacagtttggtatcccagcctccaatgccagcatctacactggggttattatcgtccccagtgctggtgttggtattgtcctcggaggctacattataaaaaaattgaaacttggtgccagagaatctgcaaaactagcaatgatctgcagtggtgtgtctttactatgtttttcaaccctatttattgttggatgtgaaagcattaatctagggggcataaacatcccttatacaacaggaccttctctcaccatgccccataggaatctgacaggaagctgcaacgttaattgtggttgtaaaatacacgagtatgagccagtctgtggatcagatggaattacatactttaacccttgtctggctggctgtgttaatagtggtaatcttagcactgggatacggaattatacagaatgcacctgtgtccaaagtcgccaagtgatcactccacccaccgtgggacagcgaagtcagctccgtgtggttattgtcaagacttatctcaatgagaacggctatgctgtgtctgggaaatgtaaacggacctgcaatactcttatcccattcttagtttttcttttcatagtcaccttcatcacagcatgtgcccaaccatcagctatcatagtaacactcaggtccgtagaagatgaggagagaccttttgcactgggaatgcagtttgttttgttgcgaacacttgcatacattcctactccaatctactttggagcagtcattgacaccacctgcatgctctggcaacaggaatgtggtgtgcagggttcttgctgggagtacaacgtgacgtcgtttcgttttgtgtattttggtttggctgccggcctcaaattcgttgggtttatttttatttttctggcctggtactccataaaatacaaggaggatggactgcagaggcggaggcagagagaatttcccctgagcaccgtgagtgagagagtgggacaccccgacaatgcccggactagatcttgcccagctttcagcacccagggagaattccacgaagagactggcctgcaaaaagggatccagtgcgcagcacagacctacccggggcccttcccagaagcaataagttcctctgcggacccggggctggaagagagccccgctgccttggagccgccctcctgaagcttgaaaatggaagaatttagttttgttggttgaattgaaaatggcgacttgagaaacaactgtgccttcttttctttctttcttttttttaacctctacagacacaatcctcaaaccaacaaaactcagtatacacagccgctattcattgagggctggatacctcaacaagactgagagcctttccccgcttctctccaagaaggagacgttcagctagatttgttcccatttccgttgtgttaattcaaagctcatgctcccctacggtacaggctgaggtacacggttagcaaaaccatgggaaggggaatggcggtgcatatcattaactaacactccaaacaaaggtgagcttgcccaggacttggcatttccaaatcaaagtttttagatatgaacacctactgtgagttctgctacaaagcacaaatgaatttgtctcaactatgcaatttgattggaaaaatgtatgtgcagcatgttacatttactttcacggaataaagcagatatgtttctgaaa

SEQ ID NO: 261206 - DNA, 440 bp, Homo sapiens
ggtggactcctcatcgccttcggggcagccctcttcgccttacctcacttcatctcgcccccctaccagatccaagagttgaacgcctcggcccccaacgacggcctgtgtcagggtggcaactccaccgccactttggagcctccggcctgtccgaaggactcgggaggaaataatcactgggtctacgtggctttattcatttgcgcgcagattctcattggaatgggctccacacctatttataccctgggaccaacctacttagatgacaatgtcaagaaagaaaactcctccttgtacctaggtaagactttcctgttctctcagatatgtttcactcacactgaaacttactttccttacaaaaatcaaaaggaaacatgttctttcacattttcatgtatattatagattaaagttcactttattttacgttt

SEQ ID NO: 261207 - DNA, 3728 bp, Homo sapiens
agacaatgagggagagtctccgccgaccgcctgctgcttattgttccgggactggagactgcagccggctgctgcctagtcctccggggctccgctcctgactagctcctccgtccctctagggacggttcggggtcacctaaccctggtccccggggcgctgggacgctagccccaagccgcagccgctcttcgctgaccgccctctttctgctttgcaggtcggcagcttcactcccgagggtgccgcgagcccaggcggcgaacacccggtacccctggcgcagcgaggtgggatgctgtacggacagcagcgctaagtgcccccccacccccggcgcagggtgcactcgctcctggccgcgggcccagcggcggcggcggcggcggcggcggaggggatgagcccgggacgcgcgaggcgcctgcctcaagctaccgcccggagagggacgccgagtagggctcatcgcagtaccgcgcggacccctgccccctgtggcacgcggctgcggagccttgaagccgtgtctgtgatcaggatgcactgggcgcctcgcagctggtgaggatgccctgctgcgcggccctgcgcccccagccccagtcccaggtgggcaagactgactgggcccggcttcggcccctcgtgccggtggatgaaacgtgccggagtgcttgggtgccatcagctatcaaatctgaattctaagcgccatggacgaaggcactggactgcagcccggggcgggagagcagctggaggcgccggccactgcagaagctgtccaagagaggtgcgagccggagaccctcaggtctaagagtttaccggtcctcagcagcgcctcctgccggccaagcctcagtcccactagtggagacgccaacccggcctttggctgtgtggattcttcgggccaccaggagttgaagcaaggcccgaacccgttggcccccagtccctctgccccgtccacttcggcggggctcggggactgtaaccacagggtggacctcagcaaaaccttctcggtgtcctccgccttggccatgctccaggagagaaggtgcctctacgtggtcctcacggattcccgttgcttcctggtgtgcatgtgctttctgaccttcatccaggcgttaatggtctctgggtacctgagcagcgtaattaccaccattgaaaggcgctacagtctgaagagttccgagtcggggctgctggtcagctgctttgacatcgggaacctggtggtggtggtgttcgtcagctacttcggcggccggggtcggcggcccctgtggctggccgtgggtggactcctcatcgccttcggggcagccctcttcgccttacctcacttcatctcgcccccctaccagatccaagagttgaacgcctcggcccccaacgacggcctgtgtcagggtggcaactccaccgccactttggagcctccggcctgtccgaaggactcgggaggaaataatcactgggtctacgtggctttattcatttgcgcgcagattctcattggaatgggctccacacctatttataccctgggaccaacctacttagatgacaatgtcaagaaagaaaactcctccttgtacctagccatcatgtatgtcatgggagcacttggccctgcagtgggatatttattaggtggacttcttattggtttttatgttgatcccagaaatcctgttcaccttgaccagaatgaccctcgtttcattggaaactggtggagtggattcctcctttgtgccattgcaatgtttcttgtgatattcccaatgtttactttcccaaaaaagcttccacctcgacacaagaaaaagaaaaagaaaaaattttctgttgatgctgttagtgatgacgatgttctgaaggagaaatcaaacaacagtgaacaagcggacaaaaaagtttcttcgatgggatttggaaaggatgtcagagacctaccaagagcagctgtcaggatcttaagcaacatgacattcctttttgtgagtttgtcatacacagctgagagtgccattgtaactgctttcattaccttcattcccaagttcatcgagtcacagtttggtatcccagcctccaatgccagcatctacactggggttattatcgtccccagtgctggtgttggtattgtcctcggaggctacattataaaaaaattgaaacttggtgccagagaatctgcaaaactagcaatgatctgcagtggtgtgtctttactatgtttttcaaccctatttattgttggatgtgaaagcattaatctagggggcataaacatcccttatacaacaggaccttctctcaccatgccccataggaatctgacaggaagctgcaacgttaattgtggttgtaaaatacacgagtatgagccagtctgtggatcagatggaattacatactttaacccttgtctggctggctgtgttaatagtggtaatcttagcactgggatacggaattatacagaatgcacctgtgtccaaagtcgccaagtgatcactccacccaccgtgggacagcgaagtcagctccgtgtggttattgtcaagacttatctcaatgagaacggctatgctgtgtctgggaaatgtaaacggacctgcaatactcttatcccattcttagtttttcttttcatagtcaccttcatcacagcatgtgcccaaccatcagctatcatagtaacactcagcatacattcctactccaatctactttggagcagtcattgacaccacctgcatgctctggcaacaggaatgtggtgtgcagggttcttgctgggagtacaacgtgacgtcgtttcgttttgtgtattttggtttggctgccggcctcaaattcgttgggtttatttttatttttctggcctggtactccataaaatacaaggaggatggactgcagaggcggaggcagagagaatttcccctgagcaccgtgagtgagagagtgggacaccccgacaatgcccggactagatcttgcccagctttcagcacccagggagaattccacgaagagactggcctgcaaaaagggatccagtgcgcagcacagacctacccggggcccttcccagaagcaataagttcctctgcggacccggggctggaagagagccccgctgccttggagccgccctcctgaagcttgaaaatggaagaatttagttttgttggttgaattgaaaatggcgacttgagaaacaactgtgccttcttttctttctttcttttttttaacctctacagacacaatcctcaaaccaacaaaactcagtatacacagccgctattcattgagggctggatacctcaacaagactgagagcctttccccgcttctctccaagaaggagacgttcagctagatttgttcccatttccgttgtgttaattcaaagctcatgctcccctacggtacaggctgaggtacacggttagcaaaaccatgggaaggggaatggcggtgcatatcattaactaacactccaaacaaaggtgagcttgcccaggacttggcatttccaaatcaaagtttttagatatgaacacctactgtgagttctgctacaaagcacaaatgaatttgtctcaactatgcaatttgattggaaaaatgtatgtgcagcatgttacatttactttcacggaataaagcagatatgtttctgaaa

SEQ ID NO: 261208 - DNA, 364 bp, Homo sapiens
cctgtccaatgtcacccagagaggaaggggagtggagccccagtctcttggagcccaaaacccacatccttacactgagatcagcagttcttacccaggagtgattctgcccccagcaaacacttggtgacatctggagacatctgtggttgtctcaactgaggggagctcctggcatgaagtgggtggaggccagggacgctgctcagcaccgtgaagtgcctgggatggccccaccccagagaacattccagccccagcgtccacagtgccgagggggagaccccgcactacgccacactgcctcctcgcttgaaataaccagaacagtcttggggacgtgctggggaagccaggggagagg

SEQ ID NO: 261209 - DNA, 362 bp, Homo sapiens
caaaggctttttaaacatgagctcattcagtttccaaaattcctattaagtacctgcctaagaactacaattcggagttgctgcctagtgaagttgagggggtcggtggagccccgctgggaggccaagggctcaatctgttgagcccttctatgatgctacatatttcatcgtatgacaaggagtggccagaggcaattcttgaattctgtgggaggttgcagtatatgactaggaaacaaatgtaatgactgagttctgctttctatgtatgcaactcaccctaaaaacgttttgtaaggtagctggttgaagatatttggaatgtctaacaagttggctgactaatgtcatgaaaactg

SEQ ID NO: 261210 - DNA, 246 bp, Homo sapiens
gtccagaaagtaacacacgcatgcttatgtggttagaaaagaatgcacgtgtaaataagcagggtgtatgtgtgtatatgactgaggagttcaagatttaatcaaaatcagaattagtgtgactttccagtgtatttacaatatgaagaaaagcattgtgaggcaaagaaactgacctttaagcatcctaagtaaaaactgcaaagagtttgtgaaacacaaaacgttgtggtttccagttttaca

SEQ ID NO: 261211 - DNA, 378 bp, Homo sapiens
atattagggaaaattgcaaagtaggatacatgataatatttgactcaatataagaaaaactgcttcatagtttgtacacatgaaaaaagatggcaaatgaggtgttgattctaccagtttgcttatcagaaatatgattttaattcagggtaaagaatagtaactaatataaacacaaggaaataatggctgattaggtcaactaaggtattctagtggaataagaagtgtgaccaccagggaaataaatatttactttccacttctagcttaatgggtacatattgggtacttagcaggtaccaagtcagtagggaatttttttttttattacaaatttggtaaggctcacaagacaagacaattacaattatacaa

SEQ ID NO: 261212 - DNA, 1053 bp, Homo sapiens
tcaatgagcatataccctgtttactttgaagtgtttatagagaaggattttgttactaggttttaatccctgtatggtgtttgttcaccattaggccttttccctcagagatctatgagtatgttgctcttccttatgttaaatgtatatatacttacataggttgtgttgtctcttgagttttgcagttaaagtgtgattttgctacccatttggttcagtattgacattgtttttttttctgccactatgtacatttaaagtgaggatggaagagcacccttcattgaggtctgggcaggaagaggattggagaaagtggccagtccttagtagaggtgcacctgctcaggttgtgggagtagttgaactagagattaaatttggtgtgccaagtcaaatggactggtgttctgccttttggcagataactgttgtcttcagctaaaagaaagggcttgaaagccttagcagatggctttaggagttgcctatccgttgttggatgtcagttcttgattctcttatcagccagccactactgtttatccgtgtccactacatcaaacagaagagaatgaagtacacagcctggaacagggtgagggacagcacaaacctgtgctaggccctagactgcagtgttgaaatcacttaactctaatttatacatatactttctttatgttatatattctcaatagactgggaagtatgtttctcaaactttaaatcctctgacaaacataaacgaagattgtttttgatacgtgaaatttcaaaataaatactgcactgaaacaaaagacaaaatactgctttgcttttcaaagtatagttcactattgagcaacatggatttgaactgcatgggttcactcatacacagattttttgttttgttttgttcaaccaatgcacatttgaaaatacaatatttgagggatgcaaacccctcaaatatatggagggccaaaacttcacgtgtgggttccgcagggctaactgcagatttgggtatacctggggttcttggaacccatccctcgtgta

SEQ ID NO: 261213 - DNA, 1053 bp, Homo sapiens
aatctagacttgaaaaaattactaagaccctgatgttaaaacccaggagtcactctatcctccagggaaacaacatgacctacacagtgtgaaagcctcatgcaactgtcaagcacatgtgtacccacccccgtcatcataggcagccagaaggcagctttgccccactagagaggatcctgtgcagccgttggcccactccccacccaacaaccaacccagagttgaccctgccctcctagagtgattcctgtgcagctgcccagtccacatgcccctgtccccagccgtacagctgtcccagagacacctttgccccatcagagagagccctgtgcatctagctgcctggtccacatgcacccatgcttagcctgacagccagctcattggtagccctggcctcccagacagcctgccacacagcctgctggcacccaacttgcactcagcctgacaacaaacccagcacccctgcaccatcaaaactgcactaccactgtcacaaactcccacagcctaggccactgagacaattgcaggtattgcagatgaaaattacagataatgaatctacaaagaccacaatactgagtccagccagaaccagagccaatgcaccattctcaacagacactctaaggaactatctaccaaaaaaaaaaaaaaaagccacttatttcaaaagctactttgtaaaattggaaaaggtgactatttcagtagaggttcagatgtcagtgtagaaacccaagatacatgaaaaagcaaggaaacatgacatctccaaaggaactaaataagactcccgtaacagaccctcaaaaaaggatatttataaaatgactgaaaagaattcaacatagtgatcttgaagaaactcagttcaatacacaagaatacaattcaatgaaattaataaaataacccatgatcttaattagaaattcaacaaagagatagatgtcacaaagaaccaaacagaaatcttggagctgaaaaatgaaatgaataaaattgaaaaatcaattgagaacttcaacaacagactga

SEQ ID NO: 261214 - DNA, 502 bp, Homo sapiens
gtgtggggaacacattcaaatttgtattttcaacctatcattttgctgctgagtggagaatacactgcagagggaaagaggtagaagcaaggagacaagttgggaggtgtttgtaggaactgaggcataatggtggattggaccagggcatggtggtcattttggtagaaagatacagatatactctatagagatatttaggtaatattgttgtcaggagttggtggtgaattgaatatgagagtttggaagaaatggctgacagtgatggtgactcccaagtttctggcccattctgttggttatacagtattttttagatataatgttaatatttttcccaatttgtcttttgttcattgttggtttctgataaatactctgtcatattaaggaagtctctatttttagtgtataaagcattttgataaaaaatgattctgcattttctttccttttgtttattaaattacattaatgtaaataaatatataaatagatt

SEQ ID NO: 261215 - DNA, 1675 bp, Homo sapiens
  misc_feature (352)..(352): n is a, c, g, or t
  misc_feature (368)..(368): n is a, c, g, or t
  misc_feature (757)..(757): n is a, c, g, or t
tcttgagacagggtcctgctctgtttcccaggttggagtgcaatggcatgatcttggcttactgcaaccactgcctcccaggttcaagtgattctcctgcctcagcctcctaagtagctgggactacatgtgtacaccaccatgcccagctgatttttgtatttttagtagagacggggttttgccatgttggccaggctggtctcgaactcctgacatcaggtgatccaccagcctcggcctcccaaagtgttgggattacagtcgagagccaccgcacccggctccaactgctccttttaaaccataatttgtatatattcttctttagaaagcaaaacaaaagaccctncccctttaagatttangtcatcagccacaccactggccccctcttcagactgtcacctatggacttctaatcggccttcatctaacagtctttcctccatctcgggctcggccaccctgccgtggcttagcatcatgcggaaaacccaccgaacacttcttcagtccagcttcctgactgcctccatctccagtggccctttctccacttttgatggggttccaccttggatcttgtcattgccagaactgctccaacccccaaatcaccagttcaaacacctgataataaagccccctctcctccttccaggagatttgttcaaccactaccactgcaacttgttttagccctgtctggaacccagtccactgactgctcatctttctgcaactcacaaccccntcctttgttcgctttcctctggcttcagttcagatcccatgggcttatcctttcaactgcactgctatcagcatgctggcgtccccgctgctgcctgcaccctgcagccccttactgtcttttcatctcacctgttggtcaagaccccaaagctggcttaagcctaaccatcccattccccctgcccacactcaaggagctggggggactagtcataatcaccagccacataacatttctgggagtcatatttctatctctacttagctcactttccttctgtctagagccaccagtttgaaacttccccattttcctccaactgccaatacccaccaccacccattctcagcagatgatctctacctctgatttccttttgcaattaatgacataaatgtcattagctacatgattagttgttaagtcatttatgtcattaattgcaaaaggaaatcagagaaagaaaagatcatcaccaatgctgtggctgggaggttaaggggaaagcagtgacagtagggaaaaaataacagcacaggagaggtactgccatatgcagagaaaatacacctagaccttaaatcttggaggttgtttacagtaatgagaaaggcactactaaaacagacccactgtttctaccagaaaagtctttaatataaagtactaatattatctgctgcaagtatatgaagttattgtgaaagaacactgctacaagcacaaatatgtggactttaagcatttcataacttttatattatgataatgctcttcagaaaaaaaacaatcagaaacacacacacacacacacacacacagaaaaatcgccaccaaaaagtataggtaaaaaatcagtaagaaaattaaaatgaaattctttaaaaaatttaaacaataatttaaataatgtat

SEQ ID NO: 261216 - DNA, 333 bp, Homo sapiens
gactatgccattgcactccagcttgggcaacaagagtgaagctccgtctttaaaaaaaaaaaagaaagaaagtcgtgggtgagcctgaaaccgaagcctttctggatgtactgggctccccaagtctgttctggcccctccgtggtgcatgagggtgagtgagcctctgaagcaggcagctctctggtgtccatttctcctcagcacatttagactgaatgtgtcagaacccagaacacatgatgtttatttttttccatttgtgtttcactgctcccccgccccctcccccaaaaggagaaagccaaggacttagaggtattccctgagaac

SEQ ID NO: 261217 - DNA, 684 bp, Homo sapiens
atgaaaatcttggaagcacaaagtagacatcaaatggatatttgctaggtgaataaatcactgaatgaatgggcaaatttatgaacaaatgaatgaatgaatggctgtcaggcaatgggagcacagttgaggtaggtgggagcagggctcagtcaggcatctggctgcctctggatctcacctggacctggagaccttgtagagtctgcggctgcctcagtgttcccaacccctgccggaccttgccgtccctttgtgccatcctctctccatccccactggcctcctgctggctcctgctggctcccgtgggctgttaggaagagtctgggcctgttctccatacttacgccaccttataggacagagcagctgctcccctgccagacagtagcaagggcctttactgagatgtaattcacacaccaagcaattcatccctttaaaatgtacaactccatggtttttagtgtacgcacagctacgtgcaactatcaccacagcaaatttgagaaggttttcttcgtttcaaaaagaacccctataccctttaactatcgcctctatggagcctttctcccccaaccccctgcctctgacaaccactaacctactttccatctctctagcttcccctggcatggatactcatgtgagcagggcatatggcatgcacccttttgt

SEQ ID NO: 261218 - DNA, 315 bp, Homo sapiens
tactaaattcgcggcgcgcgtctacagaagtccccctcccccaacatcattcatcaatgactcatgccaagataatgtccacatagcatgtatcaccttctgaaatgatcttatttactattttttcatgtattttattgcctgtcttcctctaccaaaaagtgagccccagagatttgggtctgtttattcattctgcatccctttttgggccaaggacagagtttgtcattagcactatctcttatctcttaatacttattaatgcacaaaaaactaagaaagcataaattaaaaataaaatacacatctaca

SEQ ID NO: 261219 - DNA, 255 bp, Homo sapiens
accattcagcaccagccactaatgccacagaaacatcaatccttccacctgtctgagtttggcaagttcacgtcattgttggcaggaggcctcagttcttcgctacatgaacttctctctagggctgcctaagtcttgtcatgacatggcagctggcgtctctgagagcaagtgacccaagagcaagacagtgtcaatgtcttttataatctagcctcaaatgtcacaccccctaatttccataatatcctattt

SEQ ID NO: 261220 - DNA, 671 bp, Homo sapiens
  misc_feature (669)..(669): n is a, c, g, or t
ggaatcctttgcgggtccggcctccgatccctgtgtggctgtttggcgggtgggcgctgtgttcctctctcgtaaagccgtgcgttctgtgggccgccattcagaaactggatggacagcttcggcggtgggaagggaagggacatgctgcaggccaccctccggctagaaggagggagtacttgaggaacaaggtctgcgaaaattggctgtgctctgttctaaaacttgggaatggcctcagtacctggggaatgtgtttaaaatgcagacttaaatgtccgtttctccattctaatttcagtaggtatgaatctgcgtttttactcctcacaagccttccaagtgattctgaggcaggtgctgtgctgtacttggattatcacagggttagattatcaggctatttatgatttagctgtatctaaaccacctttccctctctttcctcctttgaactgtttgaaacggatttgttcccttctgtctcttatttttcagtgctgtaagctgttaacacacatgagactgtcttcactaccaaaccaagtctcctaaagctcacttgaatgtctgcttattcgtgtctcttactaggttcaatttcttggaggccgtgattatatctatttaacgcttttccttgtacctaataaaatgtctggtgcnta

SEQ ID NO: 261221 - DNA, 477 bp, Homo sapiens
  misc_feature (475)..(475): n is a, c, g, or t
ggaatcctttgcgggtccggcctccgatccctgtgtggctgtttggcgggtgggcgctgtgttcctctctcgtaaagccgtgcgttctgtgggccgccattcagaaactggatggacagcttcggcggtgggaagggaagggacatgctgcaggccaccctccggctagaaggagggagtacttgaggaacaaggtctgcgaaaattggctgtgctctgttctaaaacttgggaatggcctcagtacctggggaatgtgtttaaaatgcagacttaaatgtccgtttctccattctaatttcagtagtgctgtaagctgttaacacacatgagactgtcttcactaccaaaccaagtctcctaaagctcacttgaatgtctgcttattcgtgtctcttactaggttcaatttcttggaggccgtgattatatctatttaacgcttttccttgtacctaataaaatgtctggtgcnta

SEQ ID NO: 261222 - DNA, 782 bp, Homo sapiens
aggcattggtcaacttaggaaatgggccggacaatatcactggcacactgctaagtcctatatgtccttcccaacaatttcaaaatcaagggaagtccagatctcactatggtcacatctgcagctgtaagggcaattgcctaccggaaatactgctgcataatttaatgcttaatttaataatttaatacataatttaatatgttggtgcgtgtatgtgttcattactggtgatcgtggatgacctgtcattagcaattcaccatcagtgggtaaagggctctgtggagatttttcaatgttttttttttcttgagaaggcacagggtcgcacacagaaattcattcaacaagaactattaaaaccctgtggactaaccacttttttgggagtttatttgcagacgtaaaaggcagttcctgaactcaaagaaacctacagtgcgggggagtaagttatgaaaagaaggaaacagactatcacgtgatatgtgctctgatgaaagtgagcccagattttcatggccggagaaggaaaagaaggaaaatcctggtgggaagtgatttctcatgaggaatcagtcatgaagaggaagggacaagaagagcattccaggtagtgatggggacagcacatccaaaggcagaaaggtggagaaagctgagtttgcactggaatgagggggtgctttaccatgcccgaaatttagggggttcagagaagtggcatccaaatgctgtcctctggtccctcttggccccatagctgtaagaccaatgct

SEQ ID NO: 261223 - DNA, 434 bp, Homo sapiens
acatctgtaaattcaatcagaagcatacagacaaaatcaaatcttaaaaaaactgatgtctaagtcgtactccagcacgtatattggatgacattatgtgaaagtcacaggactttcccgtgtttccactttgttaatgcaatattgcaaagccaacatgcccatttttacccctagtgtatagagcaccgtttgtttgagaacaaacagaataccagagctctacagcagcttcagaacagcagggattaataaatggatggatgccaatcaaagaaacctcagcctgtagctgagctatctgagaaatgtcccaattttgtaattgctttgcagttctgtgatagagtaaattgtgttttcacttctggatttataagtaccattctatcttgttaactaaaactaaattaccaatgcatgccaagaaaaca

SEQ ID NO: 261224 - DNA, 499 bp, Homo sapiens
ctcctggattgtgttcataagaggaatgtgatcctcatccttctaaactttgtctggagtcacagaaagcaaggaagttagagaaacatcctgtcacacagctttggtacctgtgtggggagctaagagatctgatgtccagttccttccagtcctttaatgaatttcctctgtgtccatgagctatctaacatccatgggaaacagttgatcttatgccaaccaaggggcatggaccagatgctctcaagagtctctcagtcagctctttgctgagggaccttatgcatggaggaaagtgcacacatcgctaagtggatagcttgatggaatagttgttacaaaatggacacacttctgcaatcagcacctgattagtagaaaattaccagcaccccagagccctcctcccctcatgctccaggagcaaccggtatgctgccttgtgatgcctttgtttagtttgtttttatgaatagaatcatacagtgaatattaa

SEQ ID NO: 261225 - DNA, 491 bp, Homo sapiens
tgggggagtcaaaagttgaacatggatgttttactgtacagggggtcaatacccctaacccctgcattgtttaagggccatttatataatggtacattggacaaaactatagtggtagagaacagattaatggttgccagggatggagacaagagtggatataactataaagggatagggatacccagtgaagttccttggtggggatgaaacagctatcttgatttatagtcgtatttgcagtaatctgtaaatgggaccaaattgcatagaaagaactatatacacacatacacacacacaggagtggatgtaaaaactggataaggtctgtaggtctagttaacagtattgtaccaacgtcattttcctggcttttaaattataccacagttacataagatgtcatcattgggggaagctgagtgaaaagttcatgggattcttggtactatttttacaacttcctgtgagtctataattatttcaaa

SEQ ID NO: 261226 - DNA, 646 bp, Homo sapiens
ttagacttactaattctttaacatgcgaggggctgtcgtgtgcctggcagatgttcagcagcatccctggtctctaccccttgatatggtttggctctgtgtccccactcaaatctcaccttgaattgtaataatccccacatatcaaggacaggaccaggtggaggtaattgaattgtgggcatggttccccccatgctgttctcaggatagtgactgagttctcacagatctgatggttttataagcatctggcatgtaccctgctggcactcattctctctcctgccaccctgtgaagaggtgcctttctccatgattgtaagtttcctgtggcctccccagccatgtagaactgtgagtcaattaaacttttttcctttataaattacccagtctcaggtatttcttcacagcaacgtgagaacagactaatacacccctagttagtactttctcagatatgataaccaaaaaatgtcttcagacattattaaatgttccttggggaaggaaattgtccctggatgagtaccactggtatataggaaaagaactacataacagatgaagaggtagggaattttaggaatgacatggcacgtataaaaaagaaagaaagaaattctggaattaaaaatacggt

SEQ ID NO: 261227 - DNA, 558 bp, Homo sapiens
tgggtggccgcttgctccggtcggtagcttggcttggcctgtcccgagactagggggcacttgtccggggaccccgggtggggggtctctgtgagccaccaggcttctgtctccaggactgcgaggtctaggtgtcctgtgcaccttcgctgcatgccctgtcctctcccctagaccccggcctcacctgtcacattgctgtctcctgggggccactgtcccctgcactccttcctctcatggggcagcttcttggcgtctccttgttgccttctcagccacggcctccttggcctctgtgtctgtctcctgccctcgtcactgatttgcacgcacacacacgcggtcacctgactttgctcagccatcaggaccctcctttgggatccccttctccagccctgacccatctctcaggcttcaacagagccacatctgccgaccctctgtccccacccagccctcacccttcccactgttgctgtctccaccctccccaaggttgggtgggtatttccttctacagggtcactggggcccttctcacaaaaattagca

SEQ ID NO: 261228 - DNA, 681 bp, Homo sapiens
ctcatattaaagaaaaatatgagtacagggtagtattgacatgatatagcgccacaattctgaatgtggtatctaaatgactaatgtctgggaaatgcttgaaacacctacactggagatgtatagccaaccaaccgaatatcttcatttttgtatcaatatttggtacctgccaactttttaaaaattttattttaatcccctcctgctttgttacatttttggcaaagagggaatggtctatggatgagggttgaatgctcggttctttttttttttttttttttttttctgagacagagtctcgctctgtcgcccagactggagtgcagtgaccggatctccgctcactgcaagctccgcctcccgggttcacgccattctcctgcctcagcctcccgagtagctgggactacaggcgcccgccaccacgcccggctaattttttgtatttttagtagagacggggtttcaccgtgttagccaggatggtctcgatttcctggcctcgtgatctgcctgccttggcctcccaaagtgctgggattacaggcgtgggccaccacgcccggcctgcctgattctttaggaaataggtcttcaggacccccacacttaatcctgggatgtgaaagtgataagtctcagtcaacttaggtgcaatgccttatccaggtatga

SEQ ID NO: 261229 - DNA, 277 bp, Homo sapiens
tgagaaatgatgcagaaccaagccctcagatcccagatcacccacggctcctgggacatctctggggaagggacttattaatgtagaccctgatgcaacatcccaagtcgtctttatccatgatttgcacagccaggacactctggggctgggattgggaggagaggaatggccaagttgccctgcccccttggctctgtggactccagaaggatggtcagtaccagcagcatttcacacacaccagcctcattattaaaattggagcaatttgtga

SEQ ID NO: 261230 - DNA, 323 bp, Homo sapiens
aaaaaattcccactctatccctcccattgtagttactatggataaagtaaaaatgagtgctgtgatttttattaggtataataatttaattccctcaattagagttgcattaccaacttagttataattcttatccagcctatatttgttaaaagaaataagtccctatgttagaccctaatgtaaatatagttatagtcttctttaaattagtaagcaagaacttttctagcttgtgcatgtgtctgtgtgtgtatgtatgtatatgcacctatatatcagaagattttacaccaacctctaacctcaacaacatgtctttg

SEQ ID NO: 261231 - DNA, 538 bp, Homo sapiens
caggataatctgtagtggcatataactccatcagaccagacagaggaggtgaggactagggaattgggtctttccctgggggcctcaaatcataacaggtaggagaccccatctttgctacacacaaaggcaaccttgcatctgattaaagcagaatatcatggaaggagggtttcttgaccctgcatcatgactgtgttcatagcagcactccagggttgaccagttatggtttctgcgcggcaggaatctgccattctttgcctataaaactgacagtggcctggcctttcccactctgaattggattgcttaggactttttgtttgtttgttcattgtattctctttgttaggttggttggtggctgattttgcccttaaatctattttgtcatgcttgcctgtattgaacctcatagaatgttttgaagaatttcgttttccaatttgctgagttattttaattcttattccactgagcctttaaatgtacaagtagttttatctcttgataaaaattaaagtgaccctgggcc

SEQ ID NO: 261232 - DNA, 212 bp, Homo sapiens
cgtgtgtccctagttggggaactttccaaattcccactccccagtgatagctccggaggcaagtcgtcttcttcctttgctcggggtgctcttgcctggtgcaggcagcggaaccccaacccttcctgcgccgcggcggaaacaggggctcggaccagcctcccgaaggagcgctgtcggggctggcgcttggggaactggttacacaagca

SEQ ID NO: 261233 - DNA, 345 bp, Homo sapiens
taaaacaaggacactgcctcttacgtgagaaacgagagccaggtacataggaagtggttaatatatggcagttgtattaaaaactacctatgagacttccaggcattggaggcacaggtaataagacctcctacctcgttccaccttggtgtttcccctcctacttgagcgggattgatttgcttcctggtttataatctgtctcctccacaggttccaagctccgtgaagggcctatcagtctttctcattgttgtgaatcttcactggtgcagtcttgtgcacctaagacactgttggtacatagtagatgttcaataaatgtgtggaattaatgaatacaca

SEQ ID NO: 261234 - DNA, 415 bp, Homo sapiens
cgtggtggcacatgcctatggtcccagctacttgggtggctaagatgggagcattgcttgagccagggaggcggaggttgcagtgagccgagattataccactgtactccagcctgggtgacagcatgagactctgtctcaaagaggaaaaaaataaaatcaatgtttcggcctttttgggaagaagtaaatcattatctgtcatgtggcttactgtagtgacttctctgctcttgcccctgcccctaaaaccttttctccatttctccacccaaagcccagagtgggttcgggtggatcctgtcactcatttgctcagaaccttgccgtttcacgcagattcaagggcaaagtctccatagtggcccactcaccttagacactgtatttgtgagctcttggccacacatctctt

SEQ ID NO: 261235 - DNA, 159 bp, Homo sapiens
tactcaacatagtatctttgcattcacccaagttgttgcatgtaccaaaagcccattccttttcattactgaaaactcttccattgtatggattatagatgcaacacagatgtccttctttcatctactggaggacatttggtttgttttcaggttggg

SEQ ID NO: 261236 - DNA, 442 bp, Homo sapiens
  misc_feature (428)..(428): n is a, c, g, or t
tgaaagattgggattgccaaaagatgtgacagagatgtgaagtgagcccatggtgttggaaaaatggtgctggtcaggcttgctgagcacttcgtggccacaaatctttaatttgttaaaaaggtgatgttgccaagcaaaataaagtgaagctcaaagtgagatgtgcctctattttgatgggctctaacaatttgtcttttcattggtgcatttagaccattgacattcaaagtgattatacagttggattaattttgccatatcattttccattaactcctattgttctttgttcttgctttgtcctccactctttttctgccttttatggagttgatgattttatacgatttttgtttcctctcgttgctttttttttttttttttttttttattgagacagcctgggtgacagagcaagactntctaaaaaaaaaaa

SEQ ID NO: 261237 - DNA, 3518 bp, Homo sapiens
aaaggaagaagaggaacacgttgctgtgtgctcgtggcacgtggcctgttgggtcctttcgcagtcctttgaagcagttgcttttactgtcccctgttttacagaagaggaaacagccaaggtgacttaagggcagagcgccagcaggtatggagcctgaatttaaatgcaggtctgcatactgcaagcacctgggttctctccacccctcctctggactcccatttgttctctgtcagtgactgagaaagggtgggtgggactaggaactcagcttccggtccatgaccacatccatggaatatgggaggaagagatcaaatcacaaatcttgggagtgagggagagacacatccttggggctactcaagtcccccatatcctttgcataccttctttatcccttttctacccagtggatttggagggagtgggcttgggataccatcagacaacgagaaacacgatttgcaggactgtgtggaggtatccaggcctgagggccctgctccagagctcccctcctcactctgtggctggaacaaaatctcttccttgtgtggccttggcttccctagcagggatcccaaaacatgggatctggccatgctgctcagtccttgggttgatttctttgagctccagcttctctgagcatcccctctgctgtccccacatcctgatagcccctctgggagctggggcctggcctttctgcccattctcaacaaacactcttgtctggagacaggcaggacaatggagagctaccttgtcctgctgctgcccctgccaccacagctgcttatgtgtgaccgatggggttgagaggggcaagagttctgtggagagagtggagggaaagagtttttttttttttttttttttttttgctatgcacagttcctcccagcaaccttccctctctgaccaatggggcctctaggctctgcccttcacgttggggtcttcccccacctccggccctttggttttgatatggctagtgaccagcactgaccaccatcccaagctgggaagagcaattggtgaagagtgtgtgtactatttactttcttcacccttgcccctttattctcaaggtcttttgattgtgaagcaaggcccgaggccttgactggtgagattagcccgggaggtggtggctccctcctgctctctgtggtgaaagccaagcacactttcctaaaaccagcgtcggaagctgtgctgtagcctgtaattactgacatgaaggtccccacacagagtctggatggaggctgccctggaagcagccccgggctgggaaagggctgagtgtcaacaggcctgtgtttgaatccaagtcacctgtgttctctgacaggtcactcagttcctccggccacagctgcccctctgtgagatgacataacactgcttacctcttggtgtggctatgaggattgattgggctgatgtgtagaaaatatgtaatgcagggcttgtcctggaggtgatgttaggtaatggtgaggtggatcttccctgtgtggtccctcccttcgtgtgcccctgcccagcctcttggcacctcctgtttactccccgagcccccagattctcacctttgcccagagccacattcgggcttgtcttcctcttccatgtccccgcatgcagaatcctctctttcttctgccagggttcttcctctccaagccctcctctgaaccagctatccctctggaatgcagctgaccaaacaaattcccactaatgtaactggtagtatcttagaggtgaactctcctgtgggcattttatttgtatcttagaagaatttttgttttaaatcttatttttcccaactggcatatagtagggtgctcaataaaggtgggttgcctgaataagtgaaagaacctaaggaacaatgtctaatggtggaatttcagtcatgtcttcatgctttcagcctctctgcaaacatttattttgtgtgctagatactggagatatgttgctggataaaacagccacagtccttgccctttggaacttccagtatagtggggacaatcagttaataagcaaacaaacacatttctatttataaatggtgataaaattccttggctaaaagaatattgcagagtctatgatactgtataacaggggcttctaattaaatttaggggatcctgatgccacttagcagtgggatttcagaggacctttcagaggagctaagcatttatcagctgccgcttattcattgccttgattttcttcaaaagacaactataatcattcaaaaattccaagttgggtccaaaatgtcaaaggactctgcatgctgctgaaagcaaatgaatgtggagggtttcaaacaagacaaaaggcattcctccctgcccaatcccagtgcagtcaaggccaacctaggcagcagccaccttctcaggaaacaaggccttggagaaatcagtgcctgtgtgaagatggtgtcggctgaaaagaagagcaatggcgtcaagtactaaatgattatcaagggtcaacttctgtatctgtatcagctgcaacacactgtctttaatacccccagcccaggagctcgtgccttacatgctgggcccacattctgccccaagcagaagctgcagggacctcagtgtccacccttcctgcctcatgtctcaaggcagcagctcctctctggtaacctgatggtgatgtggccagggtgccgagatgggacagcaaagatgatgggctctgcacaccaactccaggaaactcattctgggccagctctatgcaaagggaaaagcatgttgcattcacctaggccaagaaacagtgttgtaggttaagggcatggactgcttgagttcagtgccagctatgccacttaccagctgtgggaccttgggcaagttgcctttgtgcctatgcttccactttccttttccctccaccatgaagatgggttaagagtctcaaggttgtggtgactgtagatatatgagtgtgcatttgctatgctttacctgtctggcatctagcaaacattcttcacatgtttgctgttatcaagattgttgtatatgtgaatgaaatgatacgatgtctcagatttgctttaaaataatagggaggttggggaagtgggttggggtacagacgaaacaggagtaggtgtgagttgataattgttgaagttaagtgatcagtacgtgggtttattacactattcttttcacatttgctttgaaactgttcataaaaatttccataataaaagttctatatatatataaatatatacatacatatgagaaaatgatgtttatagcagagcttcactagacatggtatgtagcatgtagtgcacaagctgattttaagtgatattcagatggccttttaaatttaattattatgtatttaaaatttaattaattatagcaagtgatatgaactgtgataatgcagaaggtttccttttaaaataaagttcagtcaaaaaa

SEQ ID NO: 261238 - DNA, 617 bp, Homo sapiens
gcagtatcttcctggattttttcactccagccacactgactggccttcattttttccttcaagagtcttcaccctagcatttcctgctgccttaaactgctccttctgcttaatcttcactcaccctcagaaagcaaaggattggcttttcaaagaagtttttctgactctttcatattaacacaggctcttcctctgcaatggaccgaatgtttctgtccccatcccccaaagttcatatgttgagatcctagactccaaagtaatgattttaggaagtgggtcctttgggagcatgtggatctcagacttccagcctccagaaatattaggtttcagctctgagggaaaaaaaaaagtatggtactggcatagaaacaaacccatagaccaaaggaatagaatacagagcccagaaatacacccgaacatatatagtcaactaatttttgacaaaggcaccaagaggacataatgagaaaataatagtctcttcaataaattgtgctgggaaaaactgtattttcatattcaaaagaataaaattagacccttagtttacaccatggatgaaaggcccaaaagtaagatcagaaactataaaatttctagaatag

SEQ ID NO: 261239 - DNA, 675 bp, Homo sapiens
  misc_feature (607)..(607): n is a, c, g, or t
attcattattcacttcatctttttttcttacatttctcatcactctggcttttctatttttagcaacagggtaatttttttgcttttttacaaaattttacattaaattgcattatatattttctaaatattttctgtattggttttgagaatttactatagatggagaagttttcctgaatattatgactggaaagcaagtgtcaattgtatcatgctagcaatgttttaattgcgtcgtacatagcaaggggtcaggactcacaggctgttctgtgctctctccatggatcctcaaagatcactttgtgacaaatgattctatagctgatgcagagaaatgtcatttagaggcgaatgcctggttgttgcttccttttttttagcatatatttttaataattatgtcattttacttcatgtatgctaactaatgattcaagttttgtacaaatatgtaacattttaacttaagcaaacaaaatttaacacttattaaaattagaatgactgaagaaacgcaagtaattttatgttattctattctacagtaataaacatttatgaaaatctaacaggcttgatacgtcactgggtcctttcaacntgggttttgatctactgcttctggttgctttgtgaagaagacacttagacatgttcgttgttgcttgt

SEQ ID NO: 261240 - DNA, 655 bp, Homo sapiens
cagattgtagatgggtgcacacaggaaaatgtacagctcctacaatgtattctgaggaaaaaaaaaacatacaagtgggggaataaaagaaggcaaagagataatggagaaacttcccagtctattcaggcctgaatccaagaagggacaagaagaagggcactggcttttcctcgaagtgaaggatgtgggattggcctttggaatgtcttggaccatcacagaaagcagcatgggttgcagctcagacaacaggtaaataaaaccaagcaaagctgctggtcacagatttgaccagggtggcaagaaatgacaagctaccatgagattcaacagtggcacggaaggatgatgagaagcaaacagattaggagaagctgccaccaccgtacatagaggcacagatgaccaagcagaacagcaccagtccctgcaaggtgtgctcagatacagctcagcacagccatctggccaggagggaatgataatgcacatggtgtgcactgcagccgggaagttgagaaccgctgtgggcacctcaggactgagtctggttaccctgctgatccaagaaatgaagccatctaaaattttgcctgctttcacaattttctgtgtgtgtgtgtgttattaaacaaagtgaactaagaagcct

SEQ ID NO: 261241 - DNA, 696 bp, Homo sapiens
gtatcagcatagttactctgtgatgaagaaaaactcagaaaactatccagatgtgggaatttctcgggtattccttgcacttgaacttaaggatgaatgaaggtatatacaagtctctacttctcctacataaatgccttgcatggcgggaactaaatcaactacacagacccatacatccagagagcagaggtgagctggatacaagtggcttagagatgtggtggaaggaggccagagctccaagggaagggcagcaaggagacaacaggcatgggttgcagctcagacaacaggtaaataaaaccaagcaaagctgctggtcacagatttgaccagggtggcaagaaatgacaagctaccatgagattcaacagtggcacggaaggatgatgagaagcaaacagattaggagaagctgccaccaccgtacatagaggcacagatgaccaagcagaacagcaccagtccctgcaaggtgtgctcagatacagctcagcacagccatctggccaggagggaatgataatgcacatggtgtgcactgcagccgggaagttgagaaccgctgtgggcacctcaggactgagtctggttaccctgctgatccaagaaatgaagccatctaaaattttgcctgctttcacaattttctgtgtgtgtgtgtgttattaaacaaagtgaactaagaagcct

SEQ ID NO: 261242 - DNA, 594 bp, Homo sapiens
cagattgtagatgggtgcacacaggaaaatgtacagctcctacaatgtattctgaggaaaaaaaaaacatacaagtgggggaataaaagaaggcaaagagataatggagaaacttcccagtctattcaggcctgaatccaagaagggacaagaagaagggcactggcttttcctcgaagtgaaggatgtgggattggcctttggaatgtcttggaccatcacagaaagcagcatgggttgcagctcagacaacaggtaaataaaaccaagcaaagctgctggtcacagatttgaccagggtggcaagaaatgacaagctaccatgagattcaacagtggcacggaaggatgatgagaagcaaacagattaggagaagctgccaccaccgtacatagaggcacagatgaccaagcagaacagcaccagtccctgcaaggtgtgctcagatacagctcagcacagccatctggccaggagggaatgataatgcacatggtgtgcactgcagccgggaagttgagaaccgctgtgggcacctcaggactgagtctggttaccctgctgatccaagaaatgaagccatctaaaatttt

SEQ ID NO: 261243 - DNA, 365 bp, Homo sapiens
ttgtttttcaaaaatagtgggggtgttcccccttatgctttgtcctttgtgtcttaagttattttaaatgtcatccctgttctccatctcattcttctgtgatctcaaattcttgctggttcttcagtctgctgactcttgcttatggtgaacgtttccacgtgagtcttatggcttaggcttgtgagttcattttcaatggagatttaatctgtgggtgtcccaggttgactggattgagggcatatctatccagctaggttttgtttcttcttctagggaccttaggggtatcattggtctaaaacccatttttttttttttttttgcatattttcaacttgaaagttcctggattaaaaaaa

SEQ ID NO: 261244 - DNA, 400 bp, Homo sapiens
agaggctgcagtgaaccgaggtggcgccactgcactccaccctgggcaagactctatctcaaaaaaataaaaaaaaatttatctggtagatgtcattccagttagtgatttgctgttagaattcatgaaattgaaattgtaagctccagagctgacctgcttatcacttcagtaaataattaccctccatgggtctcagatttttaataatcaaatagcaccatgtatcttgatgtacaaagcatgtataaaaatattgttggataaaaaagaaagtttcattttatggttctctgtttttcttatctcttcaaatagggtaggaacgatgacttatatttttattctaacgctgcagtgactagaatagtaaatgacactttatatatccaatcaatac

SEQ ID NO: 261245 - DNA, 379 bp, Homo sapiens
agatgattacagaatgagtacttattcctctgtcccactaggctttcttttcctcctcttcccctgcgtgattcactgcttggccagtgaactcccacacattcagcaaagaaacaagacttccaacattactggagacacctgggaatatggcagggctgttaaaactggctggccattttctctaagactaaaaaaaaccctccaaaaacaagacacatcctcaaaataaatcaaagtaacagcaacaaaaaaatgatgtctaatttttaaactatctgtctaaagtctttgtgccatcccttacatttcttcatacctcactgagaaactcttatatggagctataaaaatgaataaaaattaatgtgaaatgaaa

SEQ ID NO: 261246 - DNA, 402 bp, Homo sapiens
agcaaattctggagctgattcgtgctcggccccggttttgacattacaaggaaaggattccttggtaaaaacacatttaaagccagagtttgtgaaggaaaggaattttctccccgtggctgccagaaagctcagacttggcaccaccaccaagtgtggagcagttcccatttgtccctgtctgggagggaatgctgctagcaacatgtgaaccaatacgtggccctcatgtctccccatgatagaaaaagagagaaaccaagaacatgcaacaaaaactgttacgtttgctttccaaaaagaggttcattcattgaaaatggattttccagaaggaaaacaaatcaatgacttctgttgaaatgtttattcagagaaaaatgtctttctgtagttacagga

SEQ ID NO: 261247 - DNA, 157 bp, Homo sapiens
ttgcttcagggactatataataagactttcaaggctggcacctggccaagggggagggaggggccaagcacatgaggggccacagtagccagcatctagggtggcaggagagggagcagaaatagattagatttgcctccagtgagaatttgcggtc

SEQ ID NO: 261248 - DNA, 377 bp, Homo sapiens
tccactttaaaactgacaaatgagtgttttcacaagtaatctcctttaggaaactgagagtgatgtttggacaattatgaattaccttttaaaaattgctatgtaaattattcattaatagtttagagaatttttatgctaatcattcacttctagtcataatactattctagtaaaatatgaaagtgctatgcagaattagttgggaaagcaatgtaaaagagataatttgttaccaacagctaaaattgtatggtaatgcctttttgccacatggcttaaaaatacccggaaaaaaaaaagattttaaagacttcaggtgaatttaactgtattgttctatttactctagcatatcttttcaagtagtaatagtt

SEQ ID NO: 261249 - DNA, 488 bp, Homo sapiens
aaaacattacaataaaatgactcatgcaagacacccaggtagtttatagcagctaataaaaacagaataactataaaatatggtaagtttataaaagttacattgagtatactttataagaactgcttattgagtttgcctaataaccacacagcacaataataatatgtatatatttttaaatatgtgtaaatatgtgtaacacaaacttgtagaaggtatatctgagtacaaccctattctgtttggttaccttttctagttcattatgtaagtggcatagctacctaaggacttatgcttataaatgttactcaaaaaaatacagaggacatatgtggatagataatggaagagataagataggtaggttgaagggttgggctgcccctccacacctgtggttgtttctcgttaggtggaatgagagacttggaaaagaaagagacacagagacaaagtatagagaaagaaaaaaaggggtccag

SEQ ID NO: 261250 - DNA, 652 bp, Homo sapiens
  misc_feature (639)..(640): n is a, c, g, or t
  misc_feature (645)..(645): n is a, c, g, or t
gctgagactcaggggcagcaattctgatgaattctgaacaatggtaaaaccgatacctttaaaattcaagaatgttgagttctaatggcagtttgaccattgagatattaatataggaacatcatttagcctcttaagcttgaacatccattaagtgggaaaaatagtgctcatttcctagaggtcttcagattggctaatcaagttttgattttgctggtaagtaatgagcaaattttcttagatgtgatcgcttcattttctcttatattgattggcagcagccaaatgggcattccagtccctaatctcctgcaagagaaacacttctatttcataaatctggtaatttttgagctcttttcccaacagggtgctgcagctcaccaagcggaacccacagcattttctgctaccaggatagcagcttgccagtagcatatactaaattactgggtttcagtatgattttggctggtacagacttcaatcatcgaatcgacatgcgttcagccattctcataatgaatgtttccttctctttcaaacattctcagtttattggatatcccattactctttttgtggagaaggaacgtgataaagaagtaagcgatgatgaggctgaagaaaaggaanncaaanaagaaga

SEQ ID NO: 261251 - DNA, 1854 bp, Homo sapiens
  misc_feature (1490)..(1491): n is a, c, g, or t
  misc_feature (1651)..(1651): n is a, c, g, or t
  misc_feature (1660)..(1660): n is a, c, g, or t
gatggagtatcactctgttgcccaggctggagtgtagtgactcgatctcagctcactgcaacctccacctcccaagttcaagtgattctcgtgcctcagcctcctgagtagctggaactacagatgtgcaccaccacacccggctaatttttgtatttttagtagagacggggtttcaccatgttggccaagctggtcttgacctcctgacctcaggtgatctgcccgcctcagcctcccaatgtgctgggattacaggcgtgagccaccgcgcctggcctgtacatataactcttaaaatgctgccctgaccctggggctcactttcaaagatgtccacactctgtaggccaggaccccacctgtcccgtacccttcctggcagccctgtccctgctacatcgcccttcagctacaccagctttctttgggtccctggaccacacctgataccttcccgcccagaagtgttatctctgtcctggcagttgctcaaccttttatggtccctaccaccaaggccatctgcttggttgacatacccaccccaactgtaattaaatcatccccggtgtctcctcactagacagctccacataagcacagctggtccttttagggctgtgtccccagcacctcccacaaaggaggatgcagttcatcaggatgggttggatgaacagcccattttacagatgaataaactgaggcacaggcaggtgcagaattttggcagcactgcacacctgtcctggctttgtcctcctccctggggaatgagcttggagcacccctctaggaactgggatgccagcctcttcccttgaccatcttggtccttgtcatgtgggccccagtaccaggggtggctttaatttggctgcccagggaggtggttcagggctgccaggacccctgaagtaggctctctgggctctgtcctttgccccccaacatggtgcctgtttctcctgcctcttcatgcagagtggccagctcctggcccattcagctctgagtttgagctcctgggcggagatttttgttgccttgtaactgggattcctagatccagcctccaccctctgattgccctaaggaggttttggggttttgttttgttttgtttgtgttttcgtaggatggtggcagtgattttgaggaggggaagaggaaggaagatacaagcaagggaagtcacaggctgtggtgcctaggcagaccctggtttgaatcttggccttaccactttttgcatgtaagtggtaggggcagcagatagctcaggacatatcttgggtttttttgtttgtttttgttttgagacatagtctcgctctgttgcccaggctagagtgcaatggcacaatcttgactcactgcaacctccaccctcccgggttcaagtgattctcctgcctcagcctcccgagtagctgggattacaggcaccggccaccacacccagctaatttttgtatttttaatanngatggagtttcaccgtgtttgccaggctggtctcgaactcccgacctcaggtgatccacctgactcggcctcccaaagtgctgggattggccaggtgtggtggctcatgcctgtaatcctacactttgggaggccaaggcaggtggatcatttgaggtcngtagttcangaccagcctggcctatgtggtgaaaccgcatctctactacaagtacaaaaattagccggacatggtggcacacgcctgtaggcccagctactcaggaggctgagaatcacttgaccctgggaggcggaggttgcagtgagccgagatggcaccactgcactccagcctgggtaacagagcgagactctgtctta

SEQ ID NO: 261252 - DNA, 1405 bp, Homo sapiens
gatggagtatcactctgttgcccaggctggagtgtagtgactcgatctcagctcactgcaacctccacctcccaagttcaagtgattctcgtgcctcagcctcctgagtagctggaactacagatgtgcaccaccacacccggctaatttttgtatttttagtagagacggggtttcaccatgttggccaagctggtcttgacctcctgacctcaggtgatctgcccgcctcagcctcccaatgtgctgggattacaggcgtgagccaccgcgcctggcctgtacatataactcttaaaatgctgccctgaccctggggctcactttcaaagatgtccacactctgtaggccaggaccccacctgtcccgtacccttcctggcagccctgtccctgctacatcgcccttcagctacaccagctttctttgggtccctggaccacacctgataccttcccgcccagaagtgttatctctgtcctggcagttgctcaaccttttatggtccctaccaccaaggccatctgcttggttgacatacccaccccaactgtaattaaatcatccccggtgtctcctcactagacagctccacataagcacagctggtccttttagggctgtgtccccagcacctcccacaaaggaggatgcagttcatcaggatgggttggatgaacagcccattttacagatgaataaactgaggcacaggcaggtgcagaattttggcagcactgcacacctgtcctggctttgtcctcctccctggggaatgagcttggagcacccctctaggaactgggatgccagcctcttcccttgaccatcttggtccttgtcatgtgggccccagtaccaggggtggctttaatttggctgcccagggaggtggttcagggctgccaggacccctgaagtaggctctctgggctctgtcctttgccccccaacatggtgcctgtttctcctgcctcttcatgcagagtggccagctcctggcccattcagctctgagtttgagctcctgggcggagatttttgttgccttgtaactgggattcctagatccagcctccaccctctgattgccctaaggaggttttggggttttgttttgttttgtttgtgttttcgtaggatggtggcagtgattttgaggaggggaagaggaaggaagatacaagcaagggaagtcacaggctgtggtgcctaggcagaccctggtttgaatcttggccttaccactttttgcatgtaagtggtaggggcagcagatagctcaggacatatcttgggtttttttgtttgtttttgttttgagacatagtctcgctctgttgcagtgagccgagatggcaccactgcactccagcctgggtaacagagcgagactctgtctta

SEQ ID NO: 261253 - DNA, 462 bp, Homo sapiens
accagaaaagtgcacaccgagcctctctaaacccccgcagtgaacagcacggatggaggaggtgttccagagtcacccacgtggcccacaaatgcatgacctgccacagcgcatcctaatggcagcacggggcacctgctctcccaagaccccctgcacctgtcttgggcacagacatgtgcaagacgtgtgtgagcagagtccaggtggcagccatacacgccgcacagggatgggaggctgcccgggtgcaccaggatgcgtgtgatatcacacctgccgggggccaagtcacaggcggagacccagggataggagccgtggcccgcaacatcagaccagaaagtcacagccctgcagcagcagagaagccaccacatcagaggccacagcttgtgcagatcccatggcactgtttccagcccagtgagctgcgcctcttccagggtcgagggccggccg

SEQ ID NO: 261254 - DNA, 456 bp, Homo sapiens
aaaataatgtgggagagaaaaatccactcatgtttcatgtttcaattttctcctttgttttttcaaatctgtactccctttactattatgcttctcttttcctatatccagtacttctgtgctgacaaaacaaatggaatgaattgaagaattagttgatataaagtcaagacaccctttgggtgtctgcttccccttcgaccttctgccatgctgtgacattgcacaaaagccctcaccagaagccaagcagatgctgatgccatgcttcttgcactttccagcctgtagaaccatgagtttctaatctctcttctttataagtgacgaagccttaggttgtctgttacagcaacacagaacagactaagactattatctaatttcaatttctcgtctattaactaccaaaagtactttttttcctgctctgaaatatatatatatatatatgca

SEQ ID NO: 261255 - DNA, 92 bp, Homo sapiens
atgcaggcaaacattttgggggcttgcaaaggaacaaagccctgcatcctcgcaccgcccgccacccccgcggagtcctgccagcctggccc

SEQ ID NO: 261256 - DNA, 601 bp, Homo sapiens
ggtgacctgtcagagtcagcatggacacgtgggtgttcctccacagcgtctctcctgttcttagggttaaagggacattccccccagggaccttgcatgcaagttttctaggcaggtgagtctgcaagcttcatggcagccaggttgcacaggatctcattctctttccttcttccccagctttacctttataattctcttccattctccatgagtaacaagaaacgaacagatcccaggcgagttgtttattcccactttgttttacaatggactttgtgagatttataagggaacagaaattaaaatagaaaaaacagaaaaccaaatactatatattcttacttataagagggagctagacattgagtacacatgaacacaatgaaaggaacaatagacactggggactgtttgagggtagaggataagaggagggtgagtgtcaaaaaactacctatggagtactatgcttattacctgggtgacaaaataatctgtaaaccaaatcttcatgacatgcaacttacctatataacaaacccgtacatgtacccctgaacctaaaataaaagttttttaaattttcaaattaatgtac

SEQ ID NO: 261257 - DNA, 599 bp, Homo sapiens
catcagcccccgtgaagggccctctgcgatatcctcaccgccctgagtatgctcctcgtacatacgttgatcattgcacaactgcaattaggggttggcgcgtctgtctcctaccaagccagatgcgacagggattgggccttttgtctttgttttaaatctctggtgcccagatactgcctgcagagaaacaggcactcaggaacgtctagctgacaggtgggtgagtcggtaaacaacatctgcacagccctttccagtttacgaagccttttcccgtcctccatctcacaagcttcctctaaccagggcagcaaggaagggaggctcccggagcccgtccctgtccataggtgctgcctctgaaggcctgggagcttcagggccccttgtcttcacctaggcaggagctggggtcttcagggctcaccaaaagcagctgggacctcctttcagctgtaagccacccatttcctctgccaaaggctccctccccgcccatcccctggagagggtttgctgagtgcccaggtggtggccgggttggtagggcttgtggcggccctgccatcctgcccggagctgctgggatgcggccg

SEQ ID NO: 261258 - DNA, 845 bp, Homo sapiens
caatcatggcttactacagcctcagcctgatggtctcaagtaattcttctgcctcagcccgagtagctgggactgcaaatgtacaccaccgtgcctggctaattttagaatttttggtagaggaagggttttactgtgttgcctagactggtcttgaattgctggcctcaagtgatcctcctgcttcagcctcccaaagtgttgggattataggtgtatgctaccatcccctacttggatttttaaaattattaaaaattacattttaattttaacattttaatttcaagatagttgtagattcacatacaattataagaaataatatacagtgagatctcatgtaccctttaccaagtttccccaaatggtaacatcttacaaaactgtagtacagtattacaaccaggatattgacattgatacaagcaggatacaaaagcttctggaattcctcatggtgctcttttgtagcaaacccacttccctcctgcatgatctcaccccctgcctaacctcaggtaacctgtagtctcttccccatttctatggttttgtcatttcaagaatgttatataaattgaatcttacaatatgtaaccttttgggatcttctttttcactcaactttcactggagatttatcgaagttgttgtatgtatcagtagttgttctatttgataactgagaagtatttcacagtttgagtgtaccactttgtttaaccattcaccagttgaaggacacctagtttgtgtccagtttttgactattaaaaaataaagctctgcagtccgcagtccggcctgggcgacagagcgagactccgtctcaaaaaaaaaaa

SEQ ID NO: 261259 - DNA, 660 bp, Homo sapiens
cttctccatgctccagtcaagctcagcctggagataggtaaggggagtggaggagcagcctctcagatggggtgggaagggtttgtgtcttggtctctagaacctccccagccccaggccttctcctgaacacccactatgcactctgttggtgtcactctgaatggagaaagaattgactttcatcgttgtggtaccatgatgcacaaattgtatacttcacctctctggctgctcaaaataatctgtgtcttgcatgatagtggtcctaatttacagatgagaatacagcttagtcagagatggagctggccatgctttcccctgcaccagtggttctcagactcagctgctccttggaaacacctagggcccatgtcacccccagagattctcatgtacctgggactgggtgcagcctaggcatttaacggtttcaaaatttcccaggtggttccaacatacaaccatgtttggaaaataattgcccacacggcatggggttaacatgttattcagctggctgtgattcagctggctctccagtgctgtggaaacagacagatgctgggccacgcccatcaggtccaggtcactccattcgcccctctgaccttccgtgcccctcttggggccctcagcaggcatgtcctcacggta

SEQ ID NO: 261260 - DNA, 274 bp, Homo sapiens
ggagagagagagaaagaaagagagtgcgcgtgcaagagtgcacatacatgagctctctggtatctcttacgaaaacactaatcctatcagattcaggcatcacccacaggaccacatttaaccttaattacttctggctgtgattcagctggctctccagtgctgtggaaacagacagatgctgggccacgcccatcaggtccaggtcactccattcgcccctctgaccttccgtgcccctcttggggccctcagcaggcatgtcctcacggta

SEQ ID NO: 261261 - DNA, 173 bp, Homo sapiens
tcacacaactgaaatcacctaacaatgtgtttctcagaacatatcccttagttaagcggtgcatgactgaagttacattgtgaattttaccttatttttgcacagatggtatatcagatgctgtaagcccatcatactgatataaatggactgatataaattgtataatggta

SEQ ID NO: 261262 - DNA, 461 bp, Homo sapiens
tgagcagcttgatgtgctagaaagagctgtgaatttggacttggagcaattaggattctggttccagcttttttccagctacagctcgcgagtaacttagtttagcttctttgaccttggtttcctcatctgtaaaatgagagggtttgctcagatgatctttgacctaatgagtctacgaaaagtgaatgttggaagcacatgttcaccttctccaattaccagctgtgattatgtgactggaccaaatggcactaactgtcgaaaccttttaggctgaaggggaagcactaactgttgaaaccttttaggctgaaggggaagcattctgaaataggacaaggggcacctcgtgttgaaacctggagctggtcaaccctctgaggccaatgccgacctttgcatctgcctcccacgccctgcttgttttagctggaccaggagaaactaatgtcaagaca

SEQ ID NO: 261263 - DNA, 440 bp, Homo sapiens
agccccaattgagaagcttgaaagaggagggaatttaaagtgtctcttcacaaaggcacaagcaacaggcagcggacatttttatccaaagagactcttgtcaggaactgagtcagagaaacatcagtaagtctagatcccaattaaatttgccgctaactgggaccttagctctcatgtaatcctgcattcttattttatacacgagaagctagaggtgcagaggagttaagtgggtcgcccaaggaggtaggcacaggatccaaatagggacctcaaattgcatctccaagtttgtctaccctatttagccactgctattctaggttccttgatggagccccactcccacgcctactccacgttaatgttctgaaattgggatgtacttcataattatttcatgtaattctttttcttgtttattgtttttttcttta

SEQ ID NO: 261264 - DNA, 470 bp, Homo sapiens
tacttctgtatcctcagtacctgtaactcagcattacttagtacctagtagatgctcagtgattatttgttgaatgaatggatgaatgaatgaatgaaaaccatggcagaatggactggccctgacaacctctcagtatatactcgtgacatctaatgaaatgctaatttatcctatcacagtataatcgtgaaggtaaatgtgatagaaatgtcataggatgcattttgaagtcagctaaatacatgttttgtctcaccattaatcgactgtagccctttgaaaaccaagaatgctttcttatgaccatgaaataggtcatgtagaataggaaagttaatgacacaagtggttactaccccaaagtagtatttcgatacgaatagaattgaacataatacctagcatatagtggagactcaatgcatgttggtccatttaactgaattcaacggaattgccttgctagg

SEQ ID NO: 261265 - DNA, 222 bp, Homo sapiens
tcagggagtttctgcaaccagatttccagtgagatgaattaatcagctaatgctgcagagacactaaatgagatgacaggcagctcccacaaagcagatgctcaattaattgctgagtaatacttcattgtctggatgtactacagtttatgtatccatttacctactgaagaacatcttggctgcttccaagttttgacaattatgaataaaggtgccata

SEQ ID NO: 261266 - DNA, 425 bp, Homo sapiens
ctctatgtgtctggttttgcaaactaaaacgccattgcccatactcaggctgacaggttctggaggtgccatggactcctgctctgtatctcacctctagttccatcacaatgcatgagctgtcagtgggagccttttaatgcagatgctaatacccattcctaatgctagcccatccccacacctcctgagttggtgcgatatatcctgggaacaagaaaatctgaaggctcctggtcctcaggctagcaagagccttgcctgtaagaagtgggagaaggtcacctctctcaggaggcagaactaaggctgcacagcacaagggagatgtctgaatgcacagtctgggtggcagaaggactcctgtcctttcttccacacagacctgagcacctctccaggtgccaccattttctgtctgggaa

SEQ ID NO: 261267 - DNA, 211 bp, Homo sapiens
tcatgttaatctcaacgcccgatgtagaatttcatgtcaagtctcaatagttgattttctaaaccacacaccatctataggataatatccccattcattcattcattcattcattcattcatctgctatgggctaggcactgcccatgcctaaacaaagacataatcttacagagcttagagtctagcaacaccattaccaccaccatccc

SEQ ID NO: 261268 - DNA, 315 bp, Homo sapiens
cccgagcatggaggctcaagagtcctgttacagaattttctggggttcaaataccctctagaggtttccgttggttacttggtgtatgccttatgtaaatgaagggggtgaagtaaagttacaaaattatttacttggtgtatgccctatgtaaatggagaggatatttcctgtcatggctgaagtggttccatttgatttagttctaggaagtcagcatgaatcagccttatgttccctgcctccagaccctatcctcctgcctcagtaatattaatctcttacccagtacagtgaaggagatagtagaaacaa

SEQ ID NO: 261269 - DNA, 488 bp, Homo sapiens
tttgtagagatggagtttcaccgtgttagccaagatggtcttgatctcctgacctcgtgatccgcccgactcggcctcccaaagtgctgggattacaggcgtgagtcaccgctcctggccgctaagtgtgattttatttcatctatccaattgtgttttgtagaatttctgaagtctttgtagatggatgtattttgtcaattattttttagttttgcaaacttcccattcattatttcttatgattttgtccatctgctttaaactgcatttttctattgataaataattctgttaatatattgtctctttagttgcctctaatctgttgttaagcacatctactgagttcataatttaaactacattttatgttttttgaagttcattcattctttttataaatttcaattcaatgccgaaattttgctttattttatttatattcttgaccttacagttgtaaattaaacattttgacaatactg

SEQ ID NO: 261270 - DNA, 286 bp, Homo sapiens
atacaatccatcaatcttcttcaaactttcccagttttctctgtacttatttgtgtgttagttctatccaattgtatcctgagtgtgggttcatgtatcgaccatcatagtcaagatacagagcagttccatcaccaggagaatttgtcctgttatccttttatggccacaccctcttccgtcttgccccttccccacatctctaacccctgacaaccactcatctgttctccatttgtgtactttggtcatttcagaaatgttatataaatggggccaggcatgg

SEQ ID NO: 261271 - DNA, 462 bp, Homo sapiens
cagcactaattaccgtgggaatgctgtttttatatggagaaaataaatctaccttccaacttagttttatgaacaccacatacttttcacagttccacacctttgtgtatgctctgcctagaattctagctcttactactttcctatctaggaaacttacctcaacattcaacattcaacttaaagctttcctttacccttctacggtctgatttaatgctcctatagtaagcaccctgtgcacacttccatcataattcttctcacagtgaattaaaattgtgtgtttacttgtctttgtctcagtagacttgagagccaggaccgtatttttttccttgccttaaaatccccactgcctttcattgtacacgggcaaagtaataacctttcctgctgattctgtgttttagtgaccagacttcaactaaaaagtgttgcattaaagaaaaaattgaagtt

SEQ ID NO: 261272 - DNA, 540 bp, Homo sapiens
ttttctgaaccatgtgtttgtacacatgacctttttaaaaataagtgaatgaaggaatgaagtaggattatgagaaagagataagaacaaatgatctaaggggctgcccatctttttagtacccagtgaatattaatatataacaatagcagcaaaaattggaagagtagccccaggagggtagggagtcagcctttcctttgtcttttcctcaatttcatatattaaacaaaataatctgagaacgataaaacaatttgaaataaaaaatgtctccagatctcttaaaaggaagctggggcagctttctgtagcgcacttcccaaaaatgggctgatttacctcaagaggcagggattctagcctacatgggatacatacaggagaaaacaaaatcagaaaaagaaaagagatttaaatataaataaatgaaaataacaattctccctcattataaaggaaatcattctttttgtaataatttggatgacaaatattaagaaaaatctttaatttgccactcaaaacattgtggtttgt

SEQ ID NO: 261273 - DNA, 436 bp, Homo sapiens
agttttctcttagtctctatagttcattgactgggacctacatagcagctgatttttgcaggcacaacacaaacacatacatgattcctatagtgtggactctccctatgattcacaaaagcatatctgaatggaaaagtgtgaaaaagatatcaccaaaataattttaaaaatattttcaatagacaaaagagaagtaattcacttgtaaactttagaatgttagttaagattactcataccactaatgataataacatatagcatcaatgacactgattgagttccattgttctgccctaccaattcaataagtaccctatctatttattttattgtctacaacttcttggggcttagaaacaatacctcaaaatgaagacctcagaaatagcctcagaagttaagtttttctttgatcttctcccgtactcct

SEQ ID NO: 261274 - DNA, 438 bp, Homo sapiens
ttcaataaataattgttaaaattagaacaacgtgattgcgaggtgagatgttaaattgacatcttgaaaagcagaaacttagtatgggcatccaaacactagaatcagcaccggattacgaaacttccaagaaatgtaacgactgaaagtaatggacgagcctattgttctgtgcgagaaaggcgcaaggggagaagaaaagacacacacaccatacttttaaggactgtggaggattcaccaccacaccgggaagcaacagcctgggctccagagtcggacactacactcaccagactacagaggattctcatgaagtttcctcatggtctgggaccctagctcttatcgtaacaagttgtttggcatgagacccagtcacaagggcccttcccgactggactcaaggaacacaaaaaggtcaacttgtgtttgcga

SEQ ID NO: 261275 - DNA, 381 bp, Homo sapiens
aattggaaatagaatgggagcttcttttctgaatggatattaatgaaagcagggtaggagcttatagctgccagcaaagatcccgccaccaggagaggagaccccatctccttgagaaaggatctaacacaacaaaggaagagctgataagtgaaaagaaactgagacctgatgagaatgtataagcctctggatccaactttgcctaaagctgaatactacaagatttttcattacataaatcaataatttatgtttttgcttgcataatttgaattagattttctatgtcaagcatcaagcagttgaagttccaacgaatacaagcactcttccttattttttttaatttagttattctaaataggaacaaatcaaaga

SEQ ID NO: 261276 - DNA, 429 bp, Homo sapiens
aatcttgcacaggtgaatgctggcaatcgtgacaataggaaaagactacctagaggccaggcatgttcaacatggcagatccatcttccattttcattgccaaccacgtgtacagtaaggagcagacaacatgatgcctgccagatagaaaaactgtttgcataataaaagattagggtggggcagccagcttctttgagctaggtaaatgtcacacctggtccaaccaatctttgggctctatgtaaatcagatactgcctcctctagctagtctgtaaaacccgtgcatttcccaggggactggaaaacccacttgggcactcctctatctcttcaggagagagagttattttcttttctctttcttttgcctattaaacctccgctcttaacttcactccatgtgtgtctatgttcttgatttcct

SEQ ID NO: 261277 - DNA, 592 bp, Homo sapiens
gtgaattcctggagagtctgggttatggaccaccctaaggaaggtgtagaaatatgggtaaagcgtgatgaaaatgttatttgaaaatgacatagtgtctcctccatcaaagaatggtatcaagtccattcagccctttgagggctttgtaacatttcataagggttgttaattccttacctttaaaatgtgcatcagtgtcattcctgaatagcccttaaaagagtcagggtttagatgcttccaaaatacagtaacactacttctcagctactctacagaatttggatactgaggtgacccaccatctttgagatttgctttagtgcctccctccaaaaacacaacagatggaacctgagtgagttaacctcaggttctaacctgagttagagctgagagtcaattgagagtgggcaggatggagattataatgaagctggaatagacacacatgagggagccctaactggatcccagtggagacaactaaaatgttaaaattaaaaaaaaggcaatgagttcaaaagctggccctgctgagacaacatagaactgtcctcatagaagacaagatatcccttgagagatg

SEQ ID NO: 261278 - DNA, 518 bp, Homo sapiens
atagggacaatagtccctgctccctgctactttccatgcaaacacagagtgaaagaataagcggaattatatgaaaatgctttaagttggaggcaaggtggtcgaggaagattaagtactatcagtttccataagacacactagcatccaggaggaacgacagatatttgtgctgctactgctccatacagtgtgaattctgccaagtcagcaacagtgactccataacaacagacagccgtgtcccagaatgtgctcttggcaataatgcccctcctacatgcacagcctgcttcttctcttgcttttcatttcttctctataagctccttggcacagacctctttttttcaacatttaacccttctctcctttctagtacctctgtattaagtgctaatactatcatcttcttccttgacactgctgtcaatggaaactgctaaaatgcaaatatagtggtcctactcctctgcctgaactcatcaatgcctcctatcccttgtccaatctgcagg

SEQ ID NO: 261279 - DNA, 247 bp, Homo sapiens
ctgaaggtcctgtcgcagaacacactggaactggggctgtgcaggaaacatgcccagacaggaggacagttcagtgacagcaggaaccgggactgccgtgggctccaggctttgaagcttgtgtggttctgggagtccgaattcaggagtgaggaaggggacttcgagacctccctcccttcagccaggggatgtttgtgggaggaggtcggcttcatgaagggcatttggttaactcaaaggatga

SEQ ID NO: 261280 - DNA, 491 bp, Homo sapiens
agtgatcctcttgccccagttgagtagctgggattacagatgtgcaccactatgcccaacttaattacagtcttaaaagaatatatactcagagcttagcaaattggtggataaattttacttttttctatttaatttttgaattttaaatgggtaagtgcatgaaattttcttacattctgtgtgtttttgcagtaaacttttgcatcttgttaattgagttggaataaaaaatgcatacaaacaaaactataactcttaatctggcatctaactgggtaattatagggatgtgtaattatacagtaacaaactgtaatctttttgcctagaaagccactgaagattaaagaggtcttatattggcccttggcattattgatagaccacaacagacaagccaaaaacctttgaaatattgttgaagcctggcaaaatttagccaggcaggtttggattgtttacacatgcatgcatgcattcattcatcc

SEQ ID NO: 261281 - DNA, 442 bp, Homo sapiens
ttccagggacatttccatgttgattcacaactacccctttaccttacactttcctgtgttactagacgtctctttctgtaaaacttctctttgttgttactttttacttttgtatgtgttacctgattactttggcttcctctgtgactactgagggagccaattgtggctgtgatgagcttagagaaagggagatggggaagactcgcttaaatgagttacaaattctctgtagtctgatctttatctggctattgcagtatgaccatgggtgatactaaatgaaatagaactcaactccccaaaatttggatttgtcttataagtcgtaatggctccaggtgggatactgtgtcagaccaaggataggcagatgatagtttattgccacagtcaaaagatcgaacccttttttttcatgttatctagaaatgaatcttta

SEQ ID NO: 261282 - DNA, 420 bp, Homo sapiens
aaccacccactgaagattctccctgattccataccctcagaaactgtgtgaaatatcaaacgtttgctgttttaggctgctgagtttggaagtaatttgctatgcagcaatagataatgaatttacaacatatgtactgatttgttcaccattgtttttgaacgttagtcatccttcatgccattttctttattcctaaagaacatctttcaaaattttctttaatgaagatctgttcgttagaaactctgtttctgtttatttggaaatgttttcatttcacctttatggcaagagaccctacggcgatccccagtcattccagccttctagtgttcaatgctttgagtaatctctttcctttgaatactggcaggagctgcaacacacttttaaccaacagaatgtggcaaaagtggc

SEQ ID NO: 261283 - DNA, 699 bp, Homo sapiens
ctcaatcatgggccacgagaaaagaaagcacaggtgaagagggtcaatattcacaggcttgcagtgagagggcacagagaaagcagaagagggagagcagggtgaaataaatggagaggtgggagatcagtcttctcagatcggagaatcagtttcttcaagttgtaggaagctggaaaactggacaccccagggtattttttacaagagttgctgtgtacaatgtgcttagatcttcattaatgtttttgaagagctgcaagtcaaaaaggcaattcttgcttctatcatgcccctctgagtgtggctcatcccaggacggagccacagagtcacagctggccattgcttatgctccaactctaccttaaacactcttctttttttgtcctaggcaataagttgctttcccttcaaggacaaactcaaaggtgatttccttggagaagtttgcacagcattatcctacctgagtccaaagcaatagacttccctaatcactccagaagcacttttaaaatgacctcagttctaattcgtatcacagtctggcacattgtgtatgaggatacatttatccttgtcatatatctagcttggtcatgtttgtatccctagcatctagcaaggtgccttacatggtgcatatgaccaggacatattgcacagagtagaatgaattcagatgcagtctggtcc

SEQ ID NO: 261284 - DNA, 357 bp, Homo sapiens
  misc_feature (339)..(339): n is a, c, g, or t
  misc_feature (345)..(345): n is a, c, g, or t
actgggtcccgcgcaggcgtccccgggaccgcagagcaaactttctggactatctgaggacacttgtccagcgagccccactgctcggggaggaggagccacggccggggacagatttttaaagtcttcttctaggggtttccagcagagccaaatgttagaaaaatctttccgctcctctgaagagtgaagtgagcaaatacaacccagcagtaggttattgaagacagcagccccaggttttggaaggtgacaatgaaatgtgaagaagttacatttctcaaacttgaaagttagtgacggcttacccaatttttaatgaaaattaaatatgacttnagaagncattggatttat

SEQ ID NO: 261285 - DNA, 314 bp, Homo sapiens
  misc_feature (137)..(137): n is a, c, g, or t
  misc_feature (246)..(246): n is a, c, g, or t
  misc_feature (255)..(255): n is a, c, g, or t
actgggtcccgcgcaggcgtccccgggaccgcagagcaaactttctggactatctgaggacacttgtccagcgagccccactgctcggggaggaggagccacggccggggacagagtgatacacttgggtgttgaangacatttttgaaatcatgagaactcaatgtttgactatgaatgtttcgttataactgcctggaaggttagcgtcaaagaagttgagtgaaattctagagaatccaagancaagttaantcctcagtgtttgattagcagcattagtggaggcattggaagaaaattggatccactaa

SEQ ID NO: 261286 - DNA, 470 bp, Homo sapiens
tcactcaaggccaggagttctagaacagcctgggcaacatagcaagaacccatctctataaaaaataaaaaacaaaaaaaatcagccagacacagtggtacatgccaggaggggggtagctactcaggaggctgaagagtggggatcacttgaacccaagagtttgaggttgcaatgagctatgactgtaccaccgcacttcagcctgggagaaagagcaagaccttgcttttaaaaattagaatttttttttttaatgatagtattgcaatgtagcggaactactttttaaaacatactattttaaagaaaatgtttactttttctttttctttttgggacaggatcttgctgcgttgcccaggctgaatgtgaactccttggctcaagctatcccccagcctcaatctcctgagtagctaggactacaagcatgtgcccaccacacttagctaaaattttctttcaat

SEQ ID NO: 261287 - DNA, 703 bp, Homo sapiens
gaacagttgaactagcagcaatggccaatgccattggcaaccaaattgtgctcataactctatggaccagatcttaagactccaacactgggaaatttgctgtcattctttgatccctgggcttaaatgtctacttcttaatgctatgagctaaatattcaatgttaaaatggacagggggtcatgctccatctcatttatcataagtgaataactgggttattttgaccatagatcaaactccaaaaatttaagcaaagaaataatatgtgtaggttccagaaagagatggggaaaatgtgaaaatacagctaaaataacccacaatttaaattttggctacagagttaatgtcctatttgtaaaccagaattttataatctcaacactgctgagcagataactaatcatattttgaaccaaataattatttgctgtgtgagcctgtagatgtttagcagcattcctgcctgtacttataaatgccacttgtgccaccaacccccggttgtgacaaccaaaaactggcttgactcccaaatccactggagcaaaagtaccttcgattgagaaccactgctctatactctttttttttaggcagagtctcactctgttgcccaggctggagtacagttgtgtgaacaaattcattgcagcctcgacctcttgtgctcaagtgagcttcccacctcagcctccc

SEQ ID NO: 261288 - DNA, 442 bp, Homo sapiens
aagacctggattgtagcttttgaaaattctgttgtatttttgaaattttatcatacatttccttatgtaaataatctatttatatttataaccactttaaaaaatttttgtctaccaattgagtcaagtgtttaaagatagcaattgtatcttgtgctttatttgtatttctttcacacagcacagtattggtcaaaacatagtgactcaaattattaaagagtttgcattgattgttttactttttacttctaactcaaataccaatataattcaaaattattttctgaagtttcctgtagatcttatatattttccatttcagtgagttccctggattgaagaatgccaattatctgaattccactgagttctactttgatattagtagctgaaaatctgttttgtacattttttagctttattaaaactcactatcttg

SEQ ID NO: 261289 - DNA, 394 bp, Homo sapiens
tcagacgtctaggctcaagcaatcctcccatctcaacttcccaagcagctaggactataggtacatgccaccatacccagcagcagagacaacttacaatgtcaacaatgcctttggcccaggaacctgctaatgaacgtacgctgcagtggtggttcagggagttttgtaaaggagaggagagccttgaagatgaggagcatagtggtcggccattggaagttgacaatgactaattgagagcaatcctggaagctgatcctcttacaactacacgagaggttattgaggaactcaacatagaccattctatgatcttttggcatttaaagcaaattggaaaggtgaaaaagcttgataagtgcatgcctcatgagctgactgaatatcaaaa

SEQ ID NO: 261290 - DNA, 346 bp, Homo sapiens
gaatggggttctgagggatgcggcatatggctcagaagagaaaggagtgggtaggcagggagctcccaaccttagggacgtctttgactgggagggcgttgtgaaaggaaaggagaatctcaaggctttcctgtgacaaaagaatgctcacacctagcgggagatccctgaggaaagtggaccttgttaacgaagtggatctgccttttcgggtcatctcgcctgcccggcccaccttctcctcctgaccatgcctcttgtacacattctctggaaagcgctgtgcaaaaggcttatcctctctcccagagtttctccccgagaaacatgagggctacaaggctta

SEQ ID NO: 261291 - DNA, 486 bp, Homo sapiens
gcattatgctaattgaaaagaagccagattcaaaatgctgcgtgatgccatttatagaacattctggaacagtcagaatgctcgtggttgcaaggagttgagaggaggtggagggtctgactgcgcagaagcagcatgagggaactcttaggggcagtagaactggttgtggtgactcaaatctatgcatttgtcaaaactcacaaaattgcccatcaaaagggtgagatttacagtatgtacattaaaacaactttttaaaaaatgaaattttgaaaagatcatgaccattggacagatctgtgataatattttaatgctacctgttattacctgtaagatcttggagaagaaatgtaaccttctgaggttcagtttcctcttctgtaaaatagggataatacttctccgttgttcagaattcttttagttgcaaatgacagacactcaactccaatagctttaataaaaaaaaaaaagagagtc

SEQ ID NO: 261292 - DNA, 380 bp, Homo sapiens
gtataatgacatgaatccactagtgtagtatcatacagagtgtgttcacatgaatttagaggatttctaaatcctctgtgctctgcctgcttatcccttctgccctcctgcccccaacccctggtaaccacttatgttttttactatctccatagttttgccatttccagaatatcatatctttggaatcatatagtagtagcctttttagattgttcttaatatgcatttaagtttcctccatatcttttcatggctaactttttagcattgaaaaattcgttgtgtataccacagcttttttaatccattcacttactgaaagacgtagttgcttctaagttttggcaattatgaataaagctgctataaacactgta

SEQ ID NO: 261293 - DNA, 497 bp, Homo sapiens
ttttttaaagatgatttataaaggatgtgtacaggttagatttcgaggggactgttttctgtttaagaagtaactcattttgccgggtgcggtggctcatgcctgtactttgggaggctgaggtgggctggtctccaactcctgggcttaagtgatcttccctctgtggtggcctcccaaaatgttgggataacaggcgtgaaccactgtgcctggctgggttttcatacatgcaagtttacacatgtattttatcttacatgatagactgacattcacttagacaactctagaagctaaatttgtaatctgttcagataggtgttggcagctagtaacaactatcccatagagttatcccataggcatcaatattttaaccaaaatctggattggagaaacttagtcattatggggcctatctgttagcaaaatcgaatagtcagatatgctttgaccttaggttcctttagccaaaccttttttgtttttcccag

SEQ ID NO: 261294 - DNA, 419 bp, Homo sapiens
tttttagttttctatagagatcaggtcccactgtgctatgttgcccaggctggtctccaactcctgggcttaagtgatcttccctctgtggtggcctcccaaaatgttgggataacaggcgtgaaccactgtgcctggctgggttttcatacatgcaagtttacacatgtattttatcttacatgatagactgacattcacttagacaactctagaagctaaatttgtaatctgttcagataggtgttggcagctagtaacaactatcccatagagttatcccataggcatcaatattttaaccaaaatctggattggagaaacttagtcattatggggcctatctgttagcaaaatcgaatagtcagatatgctttgaccttaggttcctttagccaaaccttttttgtttttcccag

SEQ ID NO: 261295 - DNA, 418 bp, Homo sapiens
gattctggcttggcttttcatcttaaccttagattaattacttagtcgctctctgtctcaatttattcatctttaagataagacaaatggtagtacctaccttgttataaaatgagatattccctgaagagtgcttaatgcatactatgtattcagtagatgttacattattattttgatctacttctttttttacttttttatagaaataattcttgctgtgttgcccagactaatctagaactgggaaggaagtatgatcctcacctcagcctcccaaagtgctgggattacaggcgtgagccaccttgcccaatctactactcgtgtgtgtgtgtgtgtgtgtgtgtgtgtgtgtgtgtgtgtgtgtgtgtcagagtctcgctccagcctgagtgagactccatctaaaaaaaaa

SEQ ID NO: 261296 - DNA, 679 bp, Homo sapiens
tcacatgaaccttgggtaagttgctttgatccaattaaagagattatttatttgtgaatatgaagactaaaaaacttactgaagccagaaatttccaagcataattttgctacccaccagggcatacataaaaatatgcaaataaatcccattttaattcacttattgtatcaaaaataaatatgtcacctgtaacaatttaaaggaaggataaaatatactccaatgtcaagcaaacaactgaaaaattaaaatattaaatctgctaaatgatacacatacaaactgcaaacacaagtctttacccattttttatttcttcaaagaaaaaggttttgaatatactattgccctctacaatattttatattgtaatactctgagcaagagcattttctttttctatcagctcaaatctggtatgttttgattttccaaatataacaaagcagagttcttaattatatctgaagtcagtgtaaccagattttaaaagaaaacagacgcaagagaacattatatttttgaaagtttaggtataaaacatcaaatattaaccttactttttctataatttaaaaatatttataaaatattgatttttctcaatagagaaatttacacagctccataactttattctttttgaagtacataaggaaatttatattttttaaat

SEQ ID NO: 261297 - DNA, 441 bp, Homo sapiens
cttctataaacactaagaggcaggtttttatgtgaacataattttcagctcatttgagtaaatgccttagtagtgcaattaccagattgtatggtaagactatgtttagcttgcaagacattgccagactagtttccaaagtggctgtgccattttgcattcccaccggcagcgactgatcagtagtatttttgaaaagcttcccaggtaattctaatgtgcaccccagctagttgagaaaccactattcttttcttttcctgtttgaaaaaaatcactattccacatcattaatttaaagatggcagtatagcaagcatggtaattaagagatcagactctaaaaacagactgagttcaaaccctgtctctcttaattcctgactgtatgactttaagcaagttgtttaacttttttttttatatttttggagacaaggt

SEQ ID NO: 261298 - DNA, 198 bp, Homo sapiens
ctgggaaaagtgaccaggagtctcttattccagcttctgagactgctgtgttcttggtgagtctcccgcccgcggcttccaggcccaatctctccgttgttactgtgcaccaccaagcagagagggatggtaattatagatgctttaggagccgccatttgcttcacatggcaaggtgactcagaacattagatcagt

SEQ ID NO: 261299 - DNA, 241 bp, Homo sapiens
tatagctaatttgttagtcctactgaaaggagttggccagcatgctttatgtagacagtaagggaagggtcctggagaatctccaaccttccccacaagtgtttacactagatgttttgtgcagataaaggaatctgcacaggagggttgcccaaacatgcccccagcagactaatggccccttagtctgaggatggggtggagtctcttacaaataaggaacccagcctcatcagcctta

SEQ ID NO: 261300 - DNA, 538 bp, Homo sapiens
acatgcaccaaactatagatcttgggagctcagagtaacatcacgcaggataaatgccaaacattctacacctaggaatatcatattcaaacttcagaaaaaaacaaagacaaagagaaactcttgaaagaagccaaagaaagacaaacacctttgcctctacctataaaggagcaaagatgagaattacagtggacttctcatcagaaactatgcaagcaacaagagagtggagtaaaatatttaaagtgttgaaaacaaaacaaaacaaaacaaagaaacccaccaacctagacttctacatccagcaaaataatcctccaagagtgaagagaaaaatggagactttggcagacatacaaaaacaggaaattcatgaccagcagaaatgccctataagagatgctaagagagattcttcagaaagaaggaacagtacataggtcagaaatgcagatttacatgataaaaggaaaagtatcagaaaagacataaataaagataaaataaaatcttttatttttcttaatctaataaa

SEQ ID NO: 261301 - DNA, 368 bp, Homo sapiens
tatgagagctggttccgccctgctccaggagtggacatgtgactctggactggccaatcagaactcccacccctgcccggcccctgtgattggttcaggtgagccaatcagattcagggaaataatagaagggtgaggaagtgagggcggccttggccctgcagtggcctttattccccacagtggagggatggaaaccaaagaggtccgcgaagcccagacagcgggccaggcctggggccctgtgctcccggatccaaccaaccacgccccaaggtgtccagcttcagcttctggtgtttattgctgctgtttcttttcagttacccaagccaataaagttttctttctcttttttttaacctcca

SEQ ID NO: 261302 - DNA, 298 bp, Homo sapiens
atattaccctctcagagagtgctttgctgaccatctaacctaaagtagcccaaagttacttctagctcttactctgtttcatattctgcatagtactttttgttttttattttgaagtttttgtttcactttatccctaccccagaagctatacaatgacatacagcaagggtcctgagccctttccacttgtgaagagataatgattccagcttccaagagatgttgtagtgatttagaggtacccataaaacctcagcatcaaatccaataaaaaatgctgagcgctaaccagtgg

SEQ ID NO: 261303 - DNA, 717 bp, Homo sapiens
cgtatgtgttggcaggaacagcagcagcggcagcagcagcagaggcagcaggagcagagaaatggaaagagtgtgggttttaatgcatcactagctgctctcccaacctcatgaaaagtttcacctccctactcatctctatgtaggtctttctaaggaagaaagagggagatcaagattcttggggtctctttagaccaataccttccattattgaaaacagctttaattagaaggccttaaactcccttcccaattagctctgtgatgaattgtgcggtgtcaggaaagaaactgtatttagccttgcttggcatgcaggagttccatggtggtatttacagggaacactcctggcaaggttggcgatattgctaccaccatttgggtttgtttgctttttctcactggcatctgccattgtgctggcagaaataaatctgataatttgggattttaaagaaaaaggtggtttacctattatctgtgccctaactatatccttgcttgttccacggggttataaaacgtcaagcccagatcatgcatttgcccagtatcctaaaagataaatggtacttcactctgtgtagaatcaagcataaggtgctgagaaataagcaaattatatgggtcactaaaaattggcttccaatctgggaataaaatccagaattactaactctagtttctagattctagttgccaggcttcctt

SEQ ID NO: 261304 - DNA, 478 bp, Homo sapiens
gatataattaaggttactaaccttaaaatagagagattttcctgtattatctggacggccaaatctaatcacaggagtccttaaaagcagagaatgccctccagctggaggcaagaggaaggtggaataagaagtcacagaggttcgaatcaggagagagactcaacctgccatgtttagaactccttggaaagcatgaaaagaatgcaggtggcttctaggagcaaataccagtccttggctgacaaccagtaaggtaacaaagacctgagttctacaactgcaagaaactgaattcaagaattaaactgaatgagcttggaagcagatttctcctcagaggtgccaataaggaatactgctctgccaacacctggagttaggctttgttaaactttagcaaaagatccagtcatgcccactcaggcatctgaccaacagaaattgtggtacaataaatttgtgttgtcttaatcta

SEQ ID NO: 261305 - DNA, 1641 bp, Homo sapiens
tccttttttttttttttctgagatgggttctcactctgtcacccaggctggagttcagtggtgtgatcacagctcactgcagcctcagcctctccagagtcgggtgatcctctcgcctcagcctcctgaggagctgggaccacaggtgcacaccaccacacccaaccaatgttcttattttttgtagagataggatctatgttacccacgcttctctcaaattcccgacctcaagtgatccacccacctcagccttctaaagtgctgggattacaggtgtgagccactgcacgtggcctagggctcttcatttctgaaataacattccaccaatcatcctcattttagcctccatgtttagaagaacccagaccaacaatgtctgagacttttaggaactcaagtgtgaattgggcttattttctgcttttcctactgccggctatttggctttcttggatctgggatgtcagataccactcagccaccttcaaactctccaaaatatttttagtcctttttcttcttctcttctccctgccttcaatagaaatcccgctgctattattttagggagctttggggaaggaaaaaagttagatgccggaattcagtctgttatctaaacctgggagtcccccaagccacccttctgtctccttccagttctccaacctccgagaagataagaaacaccaagagatgatggggctcattgaaaaggacaaccagctcctccgacaggtgacagcctgggtgtcgttaaatgatcagccaggccactgttcttactgtaagtcccaacacagcaaagggcaagacggggctggagcgtcttcacagctgagccaggaccccttcggtagcatgccactcgacagatctctgcaccccacgtccacacagaaggctcctcgcaattgctgggtccagactggactggagggacccagcaagcgttcccagtccttttttttttttttttttttttgagacagagtcctgctccgtcaccaggctggagtgcagtggtgtgatctcagctcactgcaacctccgcctcctgggttcaagtgattctcctgcctcagtctcccgagtagctgggactaccagcacttgccatcatgcccagctaatttttgtatttttagtagagacagggtttcaccatgttggtcaggctggtctcaatctcttaacctcgtgatccgcccaccgcagcttcccaaagtgctgggattacaggcgtgagccactgcacctggccgccggccatcttttaggaaaaagtggatgggtgccacacatactcaggttgggcgaaatgaccccacctcttttttctccccggctgtccccagcaagtgtcggaactggagagaaagctcaccaagcgggactgtgtcatctcagagttggacaccaaggtcagccagctgcaggagcaggtggaactggaccagaaccacctgcagaggtggaagcagctgcaggaggatttgcagagcaagaaggagatgattcagcaggcagagcagcacacccgcgtggccctggagagctcccagtccagggtatgcccagctgctgggacagaccctcaggaggaagggctggacagaccctcaggaggtatgc

SEQ ID NO: 261306 - DNA, 1939 bp, Homo sapiens
tccttttttttttttttctgagatgggttctcactctgtcacccaggctggagttcagtggtgtgatcacagctcactgcagcctcagcctctccagagtcgggtgatcctctcgcctcagcctcctgaggagctgggaccacaggtgcacaccaccacacccaaccaatgttcttattttttgtagagataggatctatgttacccacgcttctctcaaattcccgacctcaagtgatccacccacctcagccttctaaagtgctgggattacaggtgtgagccactgcacgtggcctagggctcttcatttctgaaataacattccaccaatcatcctcattttagcctccatgtttagaagaacccagaccaacaatgtctgagacttttaggaactcaagtgtgaattgggcttattttctgcttttcctactgccggctatttggctttcttggatctgggatgtcagataccactcagccaccttcaaactctccaaaatatttttagtcctttttcttcttctcttctccctgccttcaatagaaatcccgctgctattattttagggagctttggggaaggaaaaaagttagatgccggaattcagtctgttatctaaacctgggagtcccccaagccacccttctgtctccttccagttctccaacctccgagaagataagaaacaccaagagatgatggggctcattgaaaaggacaaccagctcctccgacaggtgacagcctgggtgtcgttaaatgatcagccaggccactgttcttactgtaagtcccaacacagcaaagggcaagacggggctggagcgtcttcacagctgagccaggaccccttcggtagcatgccactcgacagatctctgcaccccacgtccacacagaaggctcctcgcaattgctgggtccagactggactggagggacccagcaagcgttcccagtccttttttttttttttttttttttgagacagagtcctgctccgtcaccaggctggagtgcagtggtgtgatctcagctcactgcaacctccgcctcctgggttcaagtgattctcctgcctcagtctcccgagtagctgggactaccagcacttgccatcatgcccagctaatttttgtatttttagtagagacagggtttcaccatgttggtcaggctggtctcaatctcttaacctcgtgatccgcccaccgcagcttcccaaagtgctgggattacaggcgtgagccactgcacctggccgccggccatcttttaggaaaaagtggatgggtgccacacatactcaggttgggcgaaatgaccccacctcttttttctccccggctgtccccagcaagtgtcggaactggagagaaagctcaccaagcgggactgtgtcatctcagagttggacaccaaggtcagccagctgcaggagcaggtggaactggaccagaaccacctgcagaggtggaagcagctgcaggaggatttgcagagcaagaaggagatgattcagcaggcagagcagcacacccgcgtggccctggagagctcccagtccagggtatgcccctcgagaggttaaggaataagatcatccaggccacctttagcatctccgggaccaagtccttggccaacgagatctctgacaatgacatcctggaagccctgcagagaattatctcagagagaagcgactactataatcagctgaagcagaaaggcgtcaaagtgccccccctgcaacagtcagaggccttcctgaccagcaaatccaagaaggggacctccaagtaggcccagccaggcccccaaatacggtcagcccagcagaggccggggcccagctccagaaccacccgcccccaccatgcgtcctgctctcagactcagaattaaaccccggtgttggcactgtcccac

SEQ ID NO: 261307 - DNA, 406 bp, Homo sapiens
cttagaaagatggctcaggttgcagggctgaggctgatacggagaggccaagccggcatggggagtgccaacagcgtgtccaggccagggcacacggaagtggtcagtcttttttgtaaagctgtttctgcaagttttctgatgtgatccacagtaagaaagatattttgcattacatcctagtatatacacatgtccacctgcacacacaaagttagaacaaaatactcagtactagttcttatgaagagtgacgtgctggggtgtttctattctatgatatttgatttgttctagaagactgattttatggcccattaatggttagaatgcagtttcagaataccagcatccagcatagtcccatgaaacgaaggaaaagggttccttggggaagtaggtttag

SEQ ID NO: 261308 - DNA, 414 bp, Homo sapiens
tgagacagggtctcaatctatcacccaggctggagtgcagtggcatgatcatggctcactgcagcctcaaccccctgggctcaggtgatcctcccacctcagcttcgtgagtagctgggactataggtgcacaccgtcatgcctggctaatttttgtatatttttgtagagacgaggttccaccatgttgcccaggctggtctcaaacacctgggttcaagtgattcgcccacctcaacctcacaaagtgctaggattacaggcatgagccactgtgtctggccctaaatgaacatcttttaattctcaatagcacctgccattttgccatatgcgaatatactagacaagtgcttctgaatgcaaattaaagtaatattgaggtgccaagttctaccttgcaaataatttttt

SEQ ID NO: 261309 - DNA, 280 bp, Homo sapiens
gaatatgatactgtttaagagaaaatgaaaaggattacaagttttttatagtatttgactttgtgatgctctattatagcaatatttaatttagaaatctgagaaaataatttttgaaattttctacatctcttcacatttcgatgtatcatggcatgttaggttttaatgttggtgagtgaggcaggagaatggcgtgaacccgggaggcggagcctgcagtgagccgagatcgcgccactgcactccagcctgggcgacagagcgagactccggctca

SEQ ID NO: 261310 - DNA, 274 bp, Homo sapiens
gacagggaaaataaaggagttaaaagtatgcctgcagctctaaaatatgtcaaattagtgtattgattacttcaagctcaaagtactttggaaactgtagttccagaagtgactatctgacctgtcttttcctgcatatagcaagccataaaacttccatggagaaagatgccttccctgtgccgggacaagaaaataaccctatccccaggattggaaattgttgcttcagtagacctgtacaaataaactaaagtaactcttatctcccaac

SEQ ID NO: 261311 - DNA, 408 bp, Homo sapiens
ttctatcaaacatgtaggctgttaacagtgtttcagtattacaaataaacatattataagcctcaaactgccttaaaactgagaggagatttattggaggtttagtagaccagtctaccagaagttagacttctgggtactcagatttgtttgcttgtcttctgatggtctgtcaactccttatgggatgggactctgtccaattattttgggatccctactgcttaatttattgcctatgcacagaagaggcagacagtaatgatgcacttacagtgacatggagcctttgttatgggcgctctcaaagccctttatgcttgtaatgtttaattatcataactgaaaaatacataccattttaaactttatttaaccgacgagaaactaagttatggagagaaagtt

SEQ ID NO: 261312 - DNA, 206 bp, Homo sapiens
gagccagcaacaggattattctcatagaaaatggaccattgacggctcagtcgttaaagccaattcagacgaatcatgtcttcttccaagtgcacaactatccctaatgtgtaactaatacatatttgtgaaataacttattactgaaaattaggttttagtaatttgtagttatcaaaataaattcagtttgaacaaatggaata

SEQ ID NO: 261313 - DNA, 436 bp, Homo sapiens
ctgaaatgaatatagccaaagaggacgtggtctttcagcacctcaagctaaaaaatgctgcagaggaacttcctgtattaagtacagatggggtttcaccatgttcgccaggatggtctcgatctcctgacctcgtgatctgtccacctctgcctcccaaagtgctgggattacaggtgtgagccaccactcccagcctttgtcatcatttcagatagggtgaaggaatggtttaagtcgcctccaaggtatcttgttgggggtgaggggtacagaggggtcttactgaatggtgatgaaaaaggggacacaagcgaaaaatcaacattggagaaaagataactaaaccctgggaagcttaaggaacaaagtgtaacaaaacaacatggattgttttataaaatactttgagatatccaggattaaaagtatgata

SEQ ID NO: 261314 - DNA, 665 bp, Homo sapiens
acagaatctatgtgcgaagtaggtttccttttgagaatatgaaagtaatacatgagaaataagaaaaattggtctaagtcagaaacattgaaaaacaaaataaaacaaatcattcagtttaatcagccaaagacaatcactgttaacaccgaaatacatttctctaaccaccttttttctcctgcatacatatatgtttatatatattacacccagtataaataagcatttaaaaaaccacagtctttaaggagatttgcttttatgttgtttgtttttgtggctttagagaatataatcttgactacaataatttcaagtatccacatatatgtatctagaataagaaaggttttgctttttttttttttttttagatggagtcttgctctgttgccaggctggagtgcagtggcgcaatctcagctcaccgcaaactccgcctcctgggttcaagtgattcttctgcctcagcctcctgagtagctgggattacaggtgcgtaccaccacacccaactaatttttatatttttggtagagacggggtttcaccttgttggcctcgatctcctgacctcgtgatctgcccaccttggcctcccaaagtgctgggattacaggcatgagccactgtgccctgccttgctttctatttttaaaggt

SEQ ID NO: 261315 - DNA, 375 bp, Homo sapiens
aagtttatcaataatttttttttttgctaagtagtattccactgtatgaatatatgacaatttgtttattcattcgtctattggttgacattttggttgtttttggtttttggctattgcaaataaaactattaatttgtgcatacaagtctttgtgtgggtctatgctttcttttctggtaaacacctattaatagaagtggaatgaccgggtcacatgtcaggtatatatttaattttttagtaaattgttttccaagccaggcacagtggctcatgcctgtaatcccagaactttgggaggctgaggtaggaggaacacttgaggccagaagtccaagaccagcctaggcactatagcaagaccccatctct

SEQ ID NO: 261316 - DNA, 521 bp, Homo sapiens
tgttccaggccctgggcaggtattattttaattagttctcacaataatccaataagggagatactaatttactcagatgagaaagctgaggctcagagaggttaatgaacttagccaaggctcactgttaataaatagcaaaaggaaaataaattccatatctgcttgagatagaggccttgctcctaatagctgcagcctgtcagggcctggcagcagtaacctctcctttcctcttcccaccattcccctgcactgctttctgtaccacatctcttttcagagtgatgttgccccaattgcggaggccactgtgctgtttatccagtgaaagctgtagcacagccaacccaaagcgtccccagtgaaaacaacctggctccttacagcacttccagcctcagagcagtatttgaaaaatatcatgaatagcaaacacagcagtctgtctgtggcttttatatgtgtatatggtgtgtgtgtatgtcccttctcttgagcaaaataacttttagaattat

SEQ ID NO: 261317 - DNA, 1098 bp, Homo sapiens
gcacctgtaatcccagccactcaggaggttgaggcaggagaatcacttgaacccgggaggcagaggttgcagtgagccgagatcacgccattgcactccagactgggggacaagagcgagactccgtctcaaaaaacaaaaacaaaaacaaaaataaacctagcagtcagccttggttagtgagattatgaggcatttaaatttattttttgttcttttgtaaattctgaagtgaaagtctttagtaaaagttttaaaggagttctctttaaaatgtgttgaaatataataaacacagaaaagtacacatcagtgtactcctcaatgaatttttaaaaggccaggcacaatggctcgcacccataatctcagcactttgggaggccaaggcgggtggatcatgaggtcaggagatcgagaccatcctggctaacacagtgaaacctcgtctctactaaaaatacaaaaaattagccgagcgtggtggcgggcacctgtagtcccagctacttgggaggctgaggcaggagatggcgtgaactcgggaggtggagcttgcagtgagccgagatcatgccgctgcactccagcctgggcaacagagtgagactccgtctcaaaaaaaacagacaacaaaactgagcacaaccatgtagaccctgatgaattatagaacattttagcacctagaacccccttttacttcctaacactttccctgccaatggcaacactatcctcattaaggagaaggttttatttttattttttaacttttattttcaggggtacatgtgcaggtttgttatatcgtaaactcatgtaggccgggcgcggtggctcatgcctgtaatcccagcactttgggaggccgaggcgggtggatcttgaggtcaggagatcgagaccatcctggctaacaaggtgaaaccccgtctctactaaaaatacaaaaaattagccgggcgcggtggcgggcgcctgtagtcccagctactcgggaggctgaggcaggagaatggcgtgaacccgggaagcggagcttgcagtgagccgagattgcgccactgcagtccgcagtctggcctgggcgacaga

SEQ ID NO: 261318 - DNA, 192 bp, Homo sapiens
ccaacatcttttattaatagcaactcttaaaaatttccatagcacactgctcagacacactccaaacatgcaaaatcaggtaccatacaagggcttgttcccccaaacctttggagatgacggggcaatggcttaatcatgacagtgtggggaacggtgtggacaccacacttatgaaagaacatcgctggg

SEQ ID NO: 261319 - DNA, 339 bp, Homo sapiens
tccttcaatagtttggctgccttcatctgggtgaaaagtttatattcccgatacagaaaacagccaagtctgatgggccagcttataatttggggtgatatcaattctctcacacttctacatgaagcctaaaatattatagctggcaaagaggcctagccaggtcattatagatgccttctttcactactcatctcacattccctttgactcatctaagcacttcaactctacagtgttctttatttgatgacatgatatgagttttagtagtgtgtgtgtgtgtgtgtgtgtgtgtctgtgtgtctgtgtgtctgtgttgtaacattttcactaaaa

SEQ ID NO: 261320 - DNA, 2376 bp, Homo sapiens
ccagtgcccccaattcgcgctcgggagtgaggagccgccaacaccccagctccgctgctgccgccaccgcagtgctctctagtcgccattggttacctaaactttccagtacccgcgacctttccgggactccgcggcggcggggcagaggcggcccaggggcggcacgcggctgctccggtgcgccgggctcttttcggccgccgcacggccgggcctcacaggctgccctcctgagagaggctcagaacacggccaggtacgcgccgccgccacagttgcgctgctagcgacgaggtgttttcctctgctggcacgccagaatccctggttcagcctggaaggcgaggggcaggactccccagacagtggcctcagtgtggggaatgccagctgttctcttaacagaagggcagtttttgaagaaatgaagcaggacttgatgtggattgtcataaactgtttctccctaaagaggctggtccccacagacggcttgccatttctatgactggatgctgagaagcctgctggttcagaggtccacacatgaagttaccataaagagggtggttccaacttcatcaatacctcatcgccatgaggtgaggctaagatgagcataaccagtgacgaggtgaactttctggtttatcggtatctccaggagtcaggtttttctcactcggctttcacgtttgggatcgagagccacatcagccagtccaacatcaatgggacactagtgccaccgtctgccctcatctccattctccagaagggactgcagtatgtagaggctgagataagcatcaacaaggatggcacagtgttcgacagccgccctatagagtccctgtccctgatagttgctgtgattcctgatgtggtgcagatgcggcagcaggcatttggagagaagctcactcagcagcaagccagtgcagcagccacagaggcatcagcaatggcaaaggcggcaaccatgaccccagctgctatttcccagcaaaatcctccaaagaaccgagaggccacagtgaacggggaagagaatggagcacatgaaatcaataatcactcaaagccaatggaaatagatggggatgttgagattccacccaacaaagccacagtccttcggggccacgagtctgaggtgttcatttgtgcctggaaccctgtcagtgatttgctagcctctggatctggagactcaactgcaaggatatggaacctgaatgagaatagcaacgggggctccacccagctcgtgttgagacattgtatacgagaaggggggcacgacgtcccaagtaataaagatgtcacctcactggactggaacagtgatggaacactattggctatgggttcatatgatggtttcgcaagaatatggacagaaaatggtaacctggccagcaccttaggccaacataaaggccccatcttcgctctgaaatggaacaaaaaggggaattatgttttgagtgctggtgtagacaaaacaacaataatttgggatgctcacacaggagaagccaaacagcagtttccttttcattcagcccccgcccttgatgtggactggcagaacaacatgacctttgcctcctgtagcacagacatgtgtatccatgtgtgcaggctcggctgtgaccacccagtcaaaaccttccagggacacacaaacgaggtcaatgccatcaaatgggatccttctggaatgttgctggcgtcctgctcggatgacatgacattgaagatctggagtatgaagcaggatgcatgcgtccacgatcttcaggctcacagcaaagagatctacaccatcaagtggagccccaccgggcctgccaccagcaacccaaactccagcatcatgttggcaagtgcttcatttgattctacagtgcgactgtgggatgtggagcaaggtgtctgcacccacacactcatgaagcatcaagagcctgtctacagtgtagctttcagccccgatggaaagtacttggctagtggatcctttgacaagtatgttcatatctggaatactcagagtggaagtctcgtccacagctaccaaggcactggcggtatcttcgaggtgtgctggaacgcccgaggagataaagtgggcgccagcgcgtctgatggctctgtgtgtgttctggatctgtgaaagtaaacacaaaatatagaaaaaaagaaaagaattctaatgacctgccttgaatgcatggggttgcagctctgttcaaacacaattctatcagctccaaaatgtgtgaacttgacttgtgttagagtatattctgaaaccaacttgtcccaggccacaggagtgtatatgtttcataatctttatcaaga

SEQ ID NO: 261321 - DNA, 2407 bp, Homo sapiens
ccagtgcccccaattcgcgctcgggagtgaggagccgccaacaccccagctccgctgctgccgccaccgcagtgctctctagtcgccattggttacctaaactttccagtacccgcgacctttccgggactccgcggcggcggggcagaggcggcccaggggcggcacgcggctgctccggtgcgccgggctcttttcggccgccgcacggccgggcctcacaggctgccctcctgagagaggctcagaacacggccaggtacgcgccgccgccacagttgcgctgctagcgacgaggtgttttcctctgctggcacgccagaatccctggttcagcctggaaggcgaggggcaggactccccagacagtggcctcagtgtggcattgatgtcctaggttgtaaggtgctaaggggaatgccagctgttctcttaacagaagggcagtttttgaagaaatgaagcaggacttgatgtggattgtcataaactgtttctccctaaagaggctggtccccacagacggcttgccatttctatgactggatgctgagaagcctgctggttcagaggtccacacatgaagttaccataaagagggtggttccaacttcatcaatacctcatcgccatgaggtgaggctaagatgagcataaccagtgacgaggtgaactttctggtttatcggtatctccaggagtcaggtttttctcactcggctttcacgtttgggatcgagagccacatcagccagtccaacatcaatgggacactagtgccaccgtctgccctcatctccattctccagaagggactgcagtatgtagaggctgagataagcatcaacaaggatggcacagtgttcgacagccgccctatagagtccctgtccctgatagttgctgtgattcctgatgtggtgcagatgcggcagcaggcatttggagagaagctcactcagcagcaagccagtgcagcagccacagaggcatcagcaatggcaaaggcggcaaccatgaccccagctgctatttcccagcaaaatcctccaaagaaccgagaggccacagtgaacggggaagagaatggagcacatgaaatcaataatcactcaaagccaatggaaatagatggggatgttgagattccacccaacaaagccacagtccttcggggccacgagtctgaggtgttcatttgtgcctggaaccctgtcagtgatttgctagcctctggatctggagactcaactgcaaggatatggaacctgaatgagaatagcaacgggggctccacccagctcgtgttgagacattgtatacgagaaggggggcacgacgtcccaagtaataaagatgtcacctcactggactggaacagtgatggaacactattggctatgggttcatatgatggtttcgcaagaatatggacagaaaatggtaacctggccagcaccttaggccaacataaaggccccatcttcgctctgaaatggaacaaaaaggggaattatgttttgagtgctggtgtagacaaaacaacaataatttgggatgctcacacaggagaagccaaacagcagtttccttttcattcagcccccgcccttgatgtggactggcagaacaacatgacctttgcctcctgtagcacagacatgtgtatccatgtgtgcaggctcggctgtgaccacccagtcaaaaccttccagggacacacaaacgaggtcaatgccatcaaatgggatccttctggaatgttgctggcgtcctgctcggatgacatgacattgaagatctggagtatgaagcaggatgcatgcgtccacgatcttcaggctcacagcaaagagatctacaccatcaagtggagccccaccgggcctgccaccagcaacccaaactccagcatcatgttggcaagtgcttcatttgattctacagtgcgactgtgggatgtggagcaaggtgtctgcacccacacactcatgaagcatcaagagcctgtctacagtgtagctttcagccccgatggaaagtacttggctagtggatcctttgacaagtatgttcatatctggaatactcagagtggaagtctcgtccacagctaccaaggcactggcggtatcttcgaggtgtgctggaacgcccgaggagataaagtgggcgccagcgcgtctgatggctctgtgtgtgttctggatctgtgaaagtaaacacaaaatatagaaaaaaagaaaagaattctaatgacctgccttgaatgcatggggttgcagctctgttcaaacacaattctatcagctccaaaatgtgtgaacttgacttgtgttagagtatattctgaaaccaacttgtcccaggccacaggagtgtatatgtttcataatctttatcaaga

SEQ ID NO: 261322 - DNA, 2312 bp, Homo sapiens
ccagtgcccccaattcgcgctcgggagtgaggagccgccaacaccccagctccgctgctgccgccaccgcagtgctctctagtcgccattggttacctaaactttccagtacccgcgacctttccgggactccgcggcggcggggcagaggcggcccaggggcggcacgcggctgctccggtgcgccgggctcttttcggccgccgcacggccgggcctcacaggctgccctcctgagagaggctcagaacacggccaggtacgcgccgccgccacagttgcgctgctagcgacgaggtgttttcctctgctggcacgccagaatccctggttcagcctggaaggcgaggggcaggactccccagacagtggcctcagtgtggcattgatgtcctaggttgtaaggtgctaaggctggtccccacagacggcttgccatttctatgactggatgctgagaagcctgctggttcagaggtccacacatgaagttaccataaagagggtggttccaacttcatcaatacctcatcgccatgaggtgaggctaagatgagcataaccagtgacgaggtgaactttctggtttatcggtatctccaggagtcaggtttttctcactcggctttcacgtttgggatcgagagccacatcagccagtccaacatcaatgggacactagtgccaccgtctgccctcatctccattctccagaagggactgcagtatgtagaggctgagataagcatcaacaaggatggcacagtgttcgacagccgccctatagagtccctgtccctgatagttgctgtgattcctgatgtggtgcagatgcggcagcaggcatttggagagaagctcactcagcagcaagccagtgcagcagccacagaggcatcagcaatggcaaaggcggcaaccatgaccccagctgctatttcccagcaaaatcctccaaagaaccgagaggccacagtgaacggggaagagaatggagcacatgaaatcaataatcactcaaagccaatggaaatagatggggatgttgagattccacccaacaaagccacagtccttcggggccacgagtctgaggtgttcatttgtgcctggaaccctgtcagtgatttgctagcctctggatctggagactcaactgcaaggatatggaacctgaatgagaatagcaacgggggctccacccagctcgtgttgagacattgtatacgagaaggggggcacgacgtcccaagtaataaagatgtcacctcactggactggaacagtgatggaacactattggctatgggttcatatgatggtttcgcaagaatatggacagaaaatggtaacctggccagcaccttaggccaacataaaggccccatcttcgctctgaaatggaacaaaaaggggaattatgttttgagtgctggtgtagacaaaacaacaataatttgggatgctcacacaggagaagccaaacagcagtttccttttcattcagcccccgcccttgatgtggactggcagaacaacatgacctttgcctcctgtagcacagacatgtgtatccatgtgtgcaggctcggctgtgaccacccagtcaaaaccttccagggacacacaaacgaggtcaatgccatcaaatgggatccttctggaatgttgctggcgtcctgctcggatgacatgacattgaagatctggagtatgaagcaggatgcatgcgtccacgatcttcaggctcacagcaaagagatctacaccatcaagtggagccccaccgggcctgccaccagcaacccaaactccagcatcatgttggcaagtgcttcatttgattctacagtgcgactgtgggatgtggagcaaggtgtctgcacccacacactcatgaagcatcaagagcctgtctacagtgtagctttcagccccgatggaaagtacttggctagtggatcctttgacaagtatgttcatatctggaatactcagagtggaagtctcgtccacagctaccaaggcactggcggtatcttcgaggtgtgctggaacgcccgaggagataaagtgggcgccagcgcgtctgatggctctgtgtgtgttctggatctgtgaaagtaaacacaaaatatagaaaaaaagaaaagaattctaatgacctgccttgaatgcatggggttgcagctctgttcaaacacaattctatcagctccaaaatgtgtgaacttgacttgtgttagagtatattctgaaaccaacttgtcccaggccacaggagtgtatatgtttcataatctttatcaaga

SEQ ID NO: 261323 - DNA, 320 bp, Homo sapiens
gaaggtatttcatccataatcctttatatccttttcccaacgtagacaagggcattccatgctcactgcctccgggagaggagaactcggcagaatacagttggcagggtaagtgcccaggaaagctttgttatgaaaagggatagttacttgccagggtgtggctaaggcccataagctacccacaccggcacctgtggagacctccttgattctgcctggctttgggctgcgggttcataaaggtcaccaggtccagttgggttggagagcccgccgtgtgccagctctgtgctgctccttcgcatgcagtaccggac

SEQ ID NO: 261324 - DNA, 475 bp, Homo sapiens
gagaagaaaaatcttgcttaattaattgcaatattaaattgaaatatattttagcttccttagacagtcctgaaagagatttgcataactggggtcttcccttggttccagtggaggggaaatatttcagttcacttacttggggctataaaagtttgttcttcctttccctgaagcaagaattgtgaacataaagtcataaaacagtttcagtgttaatttttaaaacttctccatatttccaccctcatcagtggtaaataatgtgcctgatgtaaaatggaaaaagttgaaaatttccacttgtacattttgagcttttcagaggtactatatacactctggaaataataataaaagatactaaggcttatacagtgctttttgtttgaggaactcatataaacactaatgcattgatcctaacacagtgcttgattgtgactttaaaaggtcatgagttactgctgttaca

SEQ ID NO: 261325 - DNA, 384 bp, Homo sapiens
atgaggatttagggtccccgtctgctaatgccccagatttgcttgataacgttgtcgtcggaagcaagtccaggatgtgagatgggaaggagagtagatggactcatgatgaaaggacagaaatcaactgccatcttttcctgttctcccattgcagtggcagtgatcacagaggagagatgcctatgttcacctcttccacctggatggatgctgagctcttagaaattgactttccaggggatacagaggctcatgcctatagtcccagaactttgggaggccgaggtggaaggatggctagaggccaggagtttgaagctgcagtgagcttgagaccagcttgagactagaccctgtctctataaaaaatgtttaataaaa

SEQ ID NO: 261326 - DNA, 442 bp, Homo sapiens
ttaaaactagccttctggttcccagtctggtgttgaaaccactgtgccatattgaatcttgtataagttatttggagcttcagttggcttgatgggggctctctgtagtttggaaaatcaggcagattatatttccacacattgaaataaaaataaaagttttgtgcttaagatatattttaattcctcatctgaaatatctttatcttgaactttaaattcttttcatgtgaatatttcctatatcattacttattaaagattattctaaacccccaaatcatatttttcatgggcctctccatgcgatgaacatcctcaaaagagtcttgactctgccgagtacagtggctcaaacctgtaatcctggcactttgggaggctgagtcgggtggatcacttgaggtcatgagtttgagaccagcctggccaacatgatgaa

SEQ ID NO: 261327 - DNA, 373 bp, Homo sapiens
tagcttccctccagttaacactgtaatttggcatttgtcttaaaaacaattctgaactagatgaagatgttcataatatcaccttgtattcatataacactttctaaacacttttccttctatgatctcatttttatttttatttttatttttatttttttgagacaaggtcttgctctgtcacccaggctgggacgcagtggtgtgatctcggctcactgcaacctccgcctcctgagttcaagcaattctcctacctcaggaggctgaggcaggagaatcgcttgaacccgggaggtggagatggcagtcagctgagatagcaccattgcactccagcctgggcaacagagtgagacttcgaatcaaatag

SEQ ID NO: 261328 - DNA, 661 bp, Homo sapiens
cccattatgtggatgagaaaacaagtcctgagtgattacatgactttctcaaggcagtcaccactcaccagtaagtggtgaagccaggattcaaacacaggtataattgcaaagcccatgttctttctaccacaccaagatgattcaagattatatggagttagagtcttcacagaggtaatcgagttgggtctctagattgaaccctaatccaaaatgactgctgcccttataaaaaggagaaatttggaccaagacaaacgaacacagggaagaacgtacagacaccaggagaaggtggccatctacaaaccaaggcacacctgaggctaccagaagctgacaaagaagcatggaacagattttgtcttacgggccatcagagggaaccaaccctgccaacatcttgattttggacttctggcctccagaaattcaagacagtacatttctgttgtttaagccacctagttgtttgtactttgtagtggcactaagggaaactaacacacagatgcgtgccaagatggtggtttcttttggttggcttcatatccgttagtgaccactcctggtgaggcactattctaagcctgaaagtccagtagttggaatctcgctgagagttataacccaaataaatattccaaggacaaacaag

SEQ ID NO: 261329 - DNA, 416 bp, Homo sapiens
ggtaggtagctctaaatccagatagagaatatgtgagattgagagacatggagaagacaggggagtttgaccagagtaagataaacggcaggcaaccaacaccacaaatgagaaaaggagagggagaagaatgaggattggaagtagactgaaaaacgaaaaaagactaacagagggtagtgtgagagtgtgtagaaaagagagtaggagaggagaaaataaagagaaatggttggcagaactgaaagttaagcaggaatatacttatcatctataagcatctgaagatgaggatgggtgcagtagctcacatctgtaatcccagcactttgggaggccaaggcaggagaatcacttaaagccagaagttcaagaccagcacaggtgacatagtgagtacctgtctctataaattc

SEQ ID NO: 261330 - DNA, 657 bp, Homo sapiens
cccatctgaatcgatgttggacatttgttgaaaatcaatcgtccatatatgtgtagatctatttctggactgtgtattctgtttcattgatctagtctacctttgtgccaatgctatacagttttgattactaaagattataagttttagaatcagctagtgtaaacagtgaaaatcactgagagttcagaagttaaagttgtactgcggtttcaaataaggtacttaatggtcctttttcatcattcagcatgaatatcccctacgtatctctgaaggttgattttgttctttattttaagaataaaataacgttgtgaacagcttgaacctgacaagttcacttgaaagcattgcacaggaagtggatttctcagcagccattggtggggccttctgatcccctgatagtgagcagctctgggaacagaactgacatgagtgtctgggaggggacatgggaaggatctgcatacaaattgaagatccaattcctataaattttctatacaattgtatattttaatatataattataattgattttaagtctgtctctggaaatataagctttaataatttacatcttcacttaatcacttatgaaatcattttataacccttaataaaattagatagtgtaacttgtcaaaaaaa

SEQ ID NO: 261331 - DNA, 262 bp, Homo sapiens
tgtaggcggcaaactaagagagcaccctgtaacacatgcccactggggcttcaggagctgtaaacatccacccctagacactgccatggggttgaaaccccacagccttcctgtctgtatgctcccctagaggtttgagcagcggggcactgaagaagcgagccacacccccatcacatgccctgaaagggggccaagggaacctttctcgtttcactagtgctttgtcttgtcttggatgtcaaagtacttgtgtagcctc

SEQ ID NO: 261332 - DNA, 530 bp, Homo sapiens
cagatccttgccccgaaaggagaggatctgagaaaatggatgcactgagacctctctgaaaaccctccgagagagcgcgagaggagcgaggacacgttactcgcagctaaaatcacatttaaggaccaaaacaacaacaaccaaaaatttcattaaaacaataagcgcccaagaacccagatcgggctggtggggggaggggaagaggcgggaaggggagggtcgcacggaggtagctttgcagtgagcagtcgaccccgccgccccccggcacagctggaccggctcctccagccgcggctcagactcgcccctggattccgggttagcttcggtgccaggaccgcggcccgggcttggattcccgagactccgcgtaccagcctcgcgggagccccggcacctttgtatgagcacgagaggattctgcctccgcgcagcagcccgggaagcaggagccgaagcgcgggccgtggagcaaggcgggaaccggaggcggcggcggcggcggccaggggcgcacggtgcca

SEQ ID NO: 261333 - DNA, 365 bp, Homo sapiens
aggtcgcgggttcgatccccgtactggccaagtattctctgtggcttttatcaccagaatggatagtaacccagacatctatctaaacgtgtacctgtgtgtttctccaggcttaactttgccccgagaaaacggatctgtgaatttggtgcgccctcgcttactcgacagcggttaatttgaacggggacgtttctttccgctgcctccaaggcatacccacatcctacccgtaaaacaaaggggctataggcaccttacagtgacagaggtacgttacggttggaggcttttgtgatttttgtcctcctctgccccggggaaattttcttggagtaaaatactgaattatttgattacttcca

SEQ ID NO: 261334 - DNA, 2892 bp, Homo sapiens
tacggctagtcgagcccgggattatctcggccgaggcagccaagatggcggcctcatgcttggtcctgctggcgctgtgtctgctgctgccgctgctgctgctgggaggatggaagcgctggcgccgggggcgggcggcccggcatgtagtagcggtggtgctgggcgacgtgggccgcagcccccgtatgcagtaccacgcgctgtcgttggccatgcacggcttctcggtgaccctcctggggttctgcaactccaaaccccatgatgagctcttgcagaacaacagaattcagattgtggggttgacagaacttcagagtcttgcagttgggccccgagttttccagtacggagtcaaagttgtacttcaggctatgtacttgctgtggaagttgatgtggagggagccaggtgcctatatctttctccagaaccccccaggtctgcctagcattgctgtctgctggttcgtgggctgcctttgtggaagcaagctcgtcattgactggcacaactatggctactccatcatgggtctggtgcatggccccaaccatcccctcgttctgctggccaagtggtacgagaagttctttgggcgcctgtcccacctgaacctgtgtgttaccaatgctatgcgagaagacctggcggataactggcacatcagggctgtgaccgtctacgacaagcccgcatctttctttaaagagacacctctggacctgcagcaccggctcttcatgaagctgggcagcatgcactctccgttcagggcccgctcagaacctgaggacccagtcacggagcggtcggccttcacggagcgggatgctgggagcgggctggtgacgcgtctccgtgagcggccagccctgctggtcagcagcacgagctggacagaggacgaagacttctccatcctgctggcagctttagaaaagtttgaacaactgactcttgatggacacaaccttccttctctcgtctgtgtgataacaggcaaagggcctctgagggagtattatagccgcctcatccaccagaagcacttccagcacatccaggtctgcaccccctggctggaggccgaggactaccccctgcttctagggtcggcggacctgggtgtctgtctgcacacgtcctccagtggcctggacctgcccatgaaggtggtggacatgtttgggtgctgtttgcctgtgtgtgctgtgaacttcaagtgtttacatgagctggtgaaacatgaagaaaatggcctggtctttgaggactcagaggaactggcagctcagctgcagatgcttttctcaaactttcctgatcctgcgggcaagctaaaccagttccggaagaacctgcgggagtcgcagcagctccgatgggatgagagctgggtgcagactgtgctccctttggttatggacacataactcctgggccagaggctaaaaccccaggacccctgctgtccttcccgcagcttcttcttggagtctcagggcaaaccctttcgagcagcacctcccagtggccagaagctgaaatgacagcagtggtactgcctggtaaaagaattggttctgtgacccgggaagctttggttggccttgatttcttctctggaggcttggaaacgcttcctctcttcttctgttcttcacgccccatgcccctgctagcgtattactgttctgtgacttccctgtgacctctgcagaactcctcatcctgcgtttggtctccaggtgtcccctttctgccgtgttcctaacattttgattcctgtcttgaaaaaagcacctgctgcaccgtaagcccagggatgtggcagctgcagtgggcttggctttgtgaggaactgagtgtgtccacgttgggggaacatcatacttgatacacacgtttttatttgcacaaagaaaatgctatttttggagccagaattttcatgtctgatttatggtgattttcttaagaaccagaactgctggcagaaagggggcacccacacgcttagatagccgatgtcttattagagggcagtttgtggttcctgatttggaaattaacattctccaaacattccagtccaatgaaagttttatccgctttcccatataaaaattcttcccatgagagtgacttgattctcacaatcccgttggagtcgtgtgtgagtcctacagggtgagattcagcattgccatctccaagtgctcttcgtagggaaacagtttctgctcatgacgaggttccacttcccatctgatcccggcccggcctggaaacagagcacatgtgtttgaggatggcggtgtttggggacaggacatgagggtattgtgtggggctgctaggacaggcctggcggggtaggggggtgtccaagtcagtttacttggttcacaggttcccaggcccacccaggtgcctagaattggcctccaggatgggaccagaaagctggttttgcatagaaatggctagcagcaggcaccgtgccgctgtccactctctgcctgtgtccgccccagcacttggcacagcgggacagaagcagagatctgaatagtcaacccactcttcacaaagcttagaaagcggccgggcacagtggctcatgcctgtaatcccaacactttgggaggccaaggcgggcggatcacttgaggtcaggagttcgagaccagcctggccaacatggtgaaatcccatctctgcaaagatacagaaattagccaggcatgatggcgagtgcctgtaatcccagctacttgggaggctgaggtgggagaattgcttgagcccaggaggtggaggttgcagtgagctggattgtgccactgcactccagcctgagtgacagggtgagactaagtctca

SEQ ID NO: 261335 - DNA, 2760 bp, Homo sapiens
tacggctagtcgagcccgggattatctcggccgaggcagccaagatggcggcctcatgcttggtcctgctggcgctgtgtctgctgctgccgctgctgctgctgggaggatggaagcgctggcgccgggggcgggcggcccggcatgtagtagcggtggtgctgggcgacgtgggccgcagcccccgtatgcagtaccacgcgctgtcgttggccatgcacggcttctcggtgaccctcctggggttctgcaactccaaaccccatgatgagctcttgcagaacaacagaattcagattgtggggttgacagaacttcagagtcttgcagttgggccccgagttttccagtacggagtcaaagttgtacttcaggctatgtacttgctgtggaagttgatgtggagggagccaggtgcctatatctttctccagaaccccccaggtctgcctagcattgctgtctgctggttcgtgggctgcctttgtggaagcaagctcgtcattgactggcacaactatggctactccatcatgggtctggtgcatggccccaaccatcccctcgttctgctggccaagtggtacgagaagttctttgggcgcctgtcccacctgaacctgtgtgttaccaatgctatgcgagaagacctggcggataactggcacatcagggctgtgaccgtctacgacaagcccgcatctttctttaaagagacacctctggacctgcagcaccggctcttcatgaagctgggcagcatgcactctccgttcagggcccgctcagaacctgaggacccagtcacggagcggtcggccttcacggagcgggatgctgggagcgggctggtgacgcgtctccgtgagcggccagccctgctggtcagcagcacgagctggacagaggacgaagacttctccatcctgctggcagctttagaaaagtttgaacaactgactcttgatggacacaaccttccttctctcgtctgtgtgataacaggcaaagggcctctgagggagtattatagccgcctcatccaccagaagcacttccagcacatccaggtctgcaccccctggctggaggccgaggactaccccctgcttctagggtcggcggacctgggtgtctgtctgcacacgtcctccagtggcctggacctgcccatgaaggtggtggacatgtttgggtgctgtttgcctgtgtgtgctgtgaacttcaagtgtttacatgagctggtgaaacatgaagaaaatggcctggtctttgaggactcagaggaactggcagctcagctgcagatgcttttctcaaactttcctgatcctgcgggcaagctaaaccagttccggaagaacctgcgggagtcgcagcagctccgatgggatgagagctgggtgcagactgtgctccctttggttatggacacataactcctgggccagaggctaaaaccccaggacccctgctgtccttcccgcagcttcttcttggagtctcagggcaaaccctttcgagcagcacctcccagtggccagaagctgaaatgacagcagtggtactgcctggtaaaagaattggttctgtgacccgggaagctttggttggccttgatttcttctctggaggcttggaaacgcttcctctcttcttctgttcttcacgccccatgcccctgctagcgtattactgttctgtgacttccctgtgacctctgcagaactcctcatcctgcgtttggtctccaggtgtcccctttctgccgtgttcctaacattttgattcctgtcttgaaaaaagcacctgctgcaccgtaagcccagggatgtggcagctgcagtgggcttggctttgtgaggaactgagtgtgtccacgttgggggaacatcatacttgatacacacgtttttatttgcacaaagaaaatgctatttttggagccagaattttcatgtctgatttatggtgattttcttaagaaccagaactgctggcagaaagggggcacccacacgcttagatagccgatgtcttattagagggcagtttgtggttcctgatttggaaattaacattctccaaacattccagtccaatgaaagttttatccgctttcccatataaaaattttcccatctgatcccggcccggcctggaaacagagcacatgtgtttgaggatggcggtgtttggggacaggacatgagggtattgtgtggggctgctaggacaggcctggcggggtaggggggtgtccaagtcagtttacttggttcacaggttcccaggcccacccaggtgcctagaattggcctccaggatgggaccagaaagctggttttgcatagaaatggctagcagcaggcaccgtgccgctgtccactctctgcctgtgtccgccccagcacttggcacagcgggacagaagcagagatctgaatagtcaacccactcttcacaaagcttagaaagcggccgggcacagtggctcatgcctgtaatcccaacactttgggaggccaaggcgggcggatcacttgaggtcaggagttcgagaccagcctggccaacatggtgaaatcccatctctgcaaagatacagaaattagccaggcatgatggcgagtgcctgtaatcccagctacttgggaggctgaggtgggagaattgcttgagcccaggaggtggaggttgcagtgagctggattgtgccactgcactccagcctgagtgacagggtgagactaagtctca

SEQ ID NO: 261336 - DNA, 2816 bp, Homo sapiens
tacggctagtcgagcccgggattatctcggccgaggcagccaagatggcggcctcatgcttggtcctgctggcgctgtgtctgctgctgccgctgctgctgctgggaggatggaagcgctggcgccgggggcgggcggcccggcatgtagtagcggtggtgctgggcgacgtgggccgcagcccccgtatgcagtaccacgcgctgtcgttggccatgcacggcttctcggtgaccctcctggggttctgcaactccaaaccccatgatgagctcttgcagaacaacagaattcagattgtggggttgacagaacttcagagtcttgcagttgggccccgagttttccagtacggagtcaaagttgtacttcaggctatgtacttgctgtggaagttgatgtggagggagccaggtgcctatatctttctccagaaccccccaggtctgcctagcattgctgtctgctggttcgtgggctgcctttgtggaagcaagctcgtcattgactggcacaactatggctactccatcatgggtctggtgcatggccccaaccatcccctcgttctgctggccaagtggtacgagaagttctttgggcgcctgtcccacctgaacctgtgtgttaccaatgctatgcgagaagacctggcggataactggcacatcagggctgtgaccgtctacgacaagcccgcatctttctttaaagagacacctctggacctgcagcaccggctcttcatgaagctgggcagcatgcactctccgttcagggcccgctcagaacctgaggacccagtcacggagcggtcggccttcacggagcgggatgctgggagcgggctggtgacgcgtctccgtgagcggccagccctgctggtcagcagcacgagctggacagaggacgaagacttctccatcctgctggcagctttagaaaagtttgaacaactgactcttgatggacacaaccttccttctctcgtctgtgtgataacaggcaaagggcctctgagggagtattatagccgcctcatccaccagaagcacttccagcacatccaggtctgcaccccctggctggaggccgaggactaccccctgcttctagggtcggcggacctgggtgtctgtctgcacacgtcctccagtggcctggacctgcccatgaaggtggtggacatgtttgggtgctgtttgcctgtgtgtgctgtgaacttcaagtgatgcttttctcaaactttcctgatcctgcgggcaagctaaaccagttccggaagaacctgcgggagtcgcagcagctccgatgggatgagagctgggtgcagactgtgctccctttggttatggacacataactcctgggccagaggctaaaaccccaggacccctgctgtccttcccgcagcttcttcttggagtctcagggcaaaccctttcgagcagcacctcccagtggccagaagctgaaatgacagcagtggtactgcctggtaaaagaattggttctgtgacccgggaagctttggttggccttgatttcttctctggaggcttggaaacgcttcctctcttcttctgttcttcacgccccatgcccctgctagcgtattactgttctgtgacttccctgtgacctctgcagaactcctcatcctgcgtttggtctccaggtgtcccctttctgccgtgttcctaacattttgattcctgtcttgaaaaaagcacctgctgcaccgtaagcccagggatgtggcagctgcagtgggcttggctttgtgaggaactgagtgtgtccacgttgggggaacatcatacttgatacacacgtttttatttgcacaaagaaaatgctatttttggagccagaattttcatgtctgatttatggtgattttcttaagaaccagaactgctggcagaaagggggcacccacacgcttagatagccgatgtcttattagagggcagtttgtggttcctgatttggaaattaacattctccaaacattccagtccaatgaaagttttatccgctttcccatataaaaattcttcccatgagagtgacttgattctcacaatcccgttggagtcgtgtgtgagtcctacagggtgagattcagcattgccatctccaagtgctcttcgtagggaaacagtttctgctcatgacgaggttccacttcccatctgatcccggcccggcctggaaacagagcacatgtgtttgaggatggcggtgtttggggacaggacatgagggtattgtgtggggctgctaggacaggcctggcggggtaggggggtgtccaagtcagtttacttggttcacaggttcccaggcccacccaggtgcctagaattggcctccaggatgggaccagaaagctggttttgcatagaaatggctagcagcaggcaccgtgccgctgtccactctctgcctgtgtccgccccagcacttggcacagcgggacagaagcagagatctgaatagtcaacccactcttcacaaagcttagaaagcggccgggcacagtggctcatgcctgtaatcccaacactttgggaggccaaggcgggcggatcacttgaggtcaggagttcgagaccagcctggccaacatggtgaaatcccatctctgcaaagatacagaaattagccaggcatgatggcgagtgcctgtaatcccagctacttgggaggctgaggtgggagaattgcttgagcccaggaggtggaggttgcagtgagctggattgtgccactgcactccagcctgagtgacagggtgagactaagtctca

SEQ ID NO: 261337 - DNA, 2830 bp, Homo sapiens
tacggctagtcgagcccgggattatctcggccgaggcagccaagatggcggcctcatgcttggtcctgctggcgctgtgtctgctgctgccgctgctgctgctgggaggatggaagcgctggcgccgggggcgggcggcccggcatgtagtagcggtggtgctgggcgacgtgggccgcagcccccgtatgcagtaccacgcgctgtcgttggccatgcacggcttctcggtgaccctcctggggttctgcaactccaaaccccatgatgagctcttgcagaacaacagaattcagattgtggggttgacagaacttcagagtcttgcagttgggccccgagttttccagtacggagtcaaagttgtacttcaggctatgtacttgctgtggaagttgatgtggagggagccaggtgcctatatctttctccagaaccccccaggtctgcctagcattgctgtctgctggttcgtgggctgcctttgtggaagcaagctcgtcattgactggcacaactatggctactccatcatgggtctggtgcatggccccaaccatcccctcgttctgctggccaagtgaagacctggcggataactggcacatcagggctgtgaccgtctacgacaagcccgcatctttctttaaagagacacctctggacctgcagcaccggctcttcatgaagctgggcagcatgcactctccgttcagggcccgctcagaacctgaggacccagtcacggagcggtcggccttcacggagcgggatgctgggagcgggctggtgacgcgtctccgtgagcggccagccctgctggtcagcagcacgagctggacagaggacgaagacttctccatcctgctggcagctttagaaaagtttgaacaactgactcttgatggacacaaccttccttctctcgtctgtgtgataacaggcaaagggcctctgagggagtattatagccgcctcatccaccagaagcacttccagcacatccaggtctgcaccccctggctggaggccgaggactaccccctgcttctagggtcggcggacctgggtgtctgtctgcacacgtcctccagtggcctggacctgcccatgaaggtggtggacatgtttgggtgctgtttgcctgtgtgtgctgtgaacttcaagtgtttacatgagctggtgaaacatgaagaaaatggcctggtctttgaggactcagaggaactggcagctcagctgcagatgcttttctcaaactttcctgatcctgcgggcaagctaaaccagttccggaagaacctgcgggagtcgcagcagctccgatgggatgagagctgggtgcagactgtgctccctttggttatggacacataactcctgggccagaggctaaaaccccaggacccctgctgtccttcccgcagcttcttcttggagtctcagggcaaaccctttcgagcagcacctcccagtggccagaagctgaaatgacagcagtggtactgcctggtaaaagaattggttctgtgacccgggaagctttggttggccttgatttcttctctggaggcttggaaacgcttcctctcttcttctgttcttcacgccccatgcccctgctagcgtattactgttctgtgacttccctgtgacctctgcagaactcctcatcctgcgtttggtctccaggtgtcccctttctgccgtgttcctaacattttgattcctgtcttgaaaaaagcacctgctgcaccgtaagcccagggatgtggcagctgcagtgggcttggctttgtgaggaactgagtgtgtccacgttgggggaacatcatacttgatacacacgtttttatttgcacaaagaaaatgctatttttggagccagaattttcatgtctgatttatggtgattttcttaagaaccagaactgctggcagaaagggggcacccacacgcttagatagccgatgtcttattagagggcagtttgtggttcctgatttggaaattaacattctccaaacattccagtccaatgaaagttttatccgctttcccatataaaaattcttcccatgagagtgacttgattctcacaatcccgttggagtcgtgtgtgagtcctacagggtgagattcagcattgccatctccaagtgctcttcgtagggaaacagtttctgctcatgacgaggttccacttcccatctgatcccggcccggcctggaaacagagcacatgtgtttgaggatggcggtgtttggggacaggacatgagggtattgtgtggggctgctaggacaggcctggcggggtaggggggtgtccaagtcagtttacttggttcacaggttcccaggcccacccaggtgcctagaattggcctccaggatgggaccagaaagctggttttgcatagaaatggctagcagcaggcaccgtgccgctgtccactctctgcctgtgtccgccccagcacttggcacagcgggacagaagcagagatctgaatagtcaacccactcttcacaaagcttagaaagcggccgggcacagtggctcatgcctgtaatcccaacactttgggaggccaaggcgggcggatcacttgaggtcaggagttcgagaccagcctggccaacatggtgaaatcccatctctgcaaagatacagaaattagccaggcatgatggcgagtgcctgtaatcccagctacttgggaggctgaggtgggagaattgcttgagcccaggaggtggaggttgcagtgagctggattgtgccactgcactccagcctgagtgacagggtgagactaagtctca

SEQ ID NO: 261338 - DNA, 2233 bp, Homo sapiens
tacggctagtcgagcccgggattatctcggccgaggcagccaagatggcggcctcatgcttggtcctgctggcgctgtgtctgctgctgccgctgctgctgctgggaggatggaagcgctggcgccgggggcgggcggcccggcatgtagtagcggtggtgctgggcgacgtgggccgcagcccccgtatgcagtaccacgcgctgtcgttggccatgcacggcttctcggtgaccctcctggggttctgcaactccaaaccccatgatgagctcttgcagaacaacagaattcagattgtggggttgacagaacttcagagtcttgcagttgggccccgagttttccagtacggagtcaaagttgtacttcaggctatgtacttgctgtggaagttgatgtggagggagccaggtgcctatatctttctccagaaccccccaggtctgcctagcattgctgtctgctggttcgtgggctgcctttgtggaagcaagctcgtcattgactggcacaactatggctactccatcatgggtctggtgcatggccccaaccatcccctcgttctgctggccaagtggtacgagaagttctttgggcgcctgtcccacctgaacctgtgtgttaccaatgctatgcgagaagacctggcggataactggcacatcagggctgtgaccgtctacgacaagcccgcatctttctttaaagagacacctctggacctgcagcaccggctcttcatgaagctgggcagcatgcactctccgttcagggcccgctcagaacctgaggacccagtcacggagcggtcggccttcacggagcgggatgctgggagcgggctggtgacgcgtctccgtgagcggccagccctgctggtcagcagcacgagctggacagaggacgaagacttctccatcctgctggcagctttagaaactttggttggccttgatttcttctctggaggcttggaaacgcttcctctcttcttctgttcttcacgccccatgcccctgctagcgtattactgttctgtgacttccctgtgacctctgcagaactcctcatcctgcgtttggtctccaggtgtcccctttctgccgtgttcctaacattttgattcctgtcttgaaaaaagcacctgctgcaccgtaagcccagggatgtggcagctgcagtgggcttggctttgtgaggaactgagtgtgtccacgttgggggaacatcatacttgatacacacgtttttatttgcacaaagaaaatgctatttttggagccagaattttcatgtctgatttatggtgattttcttaagaaccagaactgctggcagaaagggggcacccacacgcttagatagccgatgtcttattagagggcagtttgtggttcctgatttggaaattaacattctccaaacattccagtccaatgaaagttttatccgctttcccatataaaaattcttcccatgagagtgacttgattctcacaatcccgttggagtcgtgtgtgagtcctacagggtgagattcagcattgccatctccaagtgctcttcgtagggaaacagtttctgctcatgacgaggttccacttcccatctgatcccggcccggcctggaaacagagcacatgtgtttgaggatggcggtgtttggggacaggacatgagggtattgtgtggggctgctaggacaggcctggcggggtaggggggtgtccaagtcagtttacttggttcacaggttcccaggcccacccaggtgcctagaattggcctccaggatgggaccagaaagctggttttgcatagaaatggctagcagcaggcaccgtgccgctgtccactctctgcctgtgtccgccccagcacttggcacagcgggacagaagcagagatctgaatagtcaacccactcttcacaaagcttagaaagcggccgggcacagtggctcatgcctgtaatcccaacactttgggaggccaaggcgggcggatcacttgaggtcaggagttcgagaccagcctggccaacatggtgaaatcccatctctgcaaagatacagaaattagccaggcatgatggcgagtgcctgtaatcccagctacttgggaggctgaggtgggagaattgcttgagcccaggaggtggaggttgcagtgagctggattgtgccactgcactccagcctgagtgacagggtgagactaagtctca

SEQ ID NO: 261339 - DNA, 1754 bp, Homo sapiens
gggcgacagataatcgaacatctagtagctcgtctctctgtgcttcctcctcagtgctgcctcgtctgtgctgtcccagcacagaggaggccgaggactaccccctgcttctagggtcggcggacctgggtgtctgtctgcacacgtcctccagtggcctggacctgcccatgaaggtggtggacatgtttgggtgctgtttgcctgtgtgtgctgtgaacttcaagtgtttacatgagctggtgaaacatgaagaaaatggcctggtctttgaggactcagaggaactggcagctcagctgcagatgcttttctcaaactttcctgatcctgcgggcaagctaaaccaagcttcttcttggagtctcagggcaaaccctttcgagcagcacctcccagtggccagaagctgaaatgacagcagtggtactgcctggtaaaagaattggttctgtgacccgggaagctttggttggccttgatttcttctctggaggcttggaaacgcttcctctcttcttctgttcttcacgccccatgcccctgctagcgtattactgttctgtgacttccctgtgacctctgcagaactcctcatcctgcgtttggtctccaggtgtcccctttctgccgtgttcctaacattttgattcctgtcttgaaaaaagcacctgctgcaccgtaagcccagggatgtggcagctgcagtgggcttggctttgtgaggaactgagtgtgtccacgttgggggaacatcatacttgatacacacgtttttatttgcacaaagaaaatgctatttttggagccagaattttcatgtctgatttatggtgattttcttaagaaccagaactgctggcagaaagggggcacccacacgcttagatagccgatgtcttattagagggcagtttgtggttcctgatttggaaattaacattctccaaacattccagtccaatgaaagttttatccgctttcccatataaaaattcttcccatgagagtgacttgattctcacaatcccgttggagtcgtgtgtgagtcctacagggtgagattcagcattgccatctccaagtgctcttcgtagggaaacagtttctgctcatgacgaggttccacttcccatctgatcccggcccggcctggaaacagagcacatgtgtttgaggatggcggtgtttggggacaggacatgagggtattgtgtggggctgctaggacaggcctggcggggtaggggggtgtccaagtcagtttacttggttcacaggttcccaggcccacccaggtgcctagaattggcctccaggatgggaccagaaagctggttttgcatagaaatggctagcagcaggcaccgtgccgctgtccactctctgcctgtgtccgccccagcacttggcacagcgggacagaagcagagatctgaatagtcaacccactcttcacaaagcttagaaagcggccgggcacagtggctcatgcctgtaatcccaacactttgggaggccaaggcgggcggatcacttgaggtcaggagttcgagaccagcctggccaacatggtgaaatcccatctctgcaaagatacagaaattagccaggcatgatggcgagtgcctgtaatcccagctacttgggaggctgaggtgggagaattgcttgagcccaggaggtggaggttgcagtgagctggattgtgccactgcactccagcctgagtgacagggtgagactaagtctca

SEQ ID NO: 261340 - DNA, 307 bp, Homo sapiens
tcttaaagccttatagtgtcatggctaagagctagggcttggtaatctggcctgttgccagttcttttactagctctgtgatcttgggcaacttagcccctgagtttcatctgtaaaatgcagttaaaaatagttcctacctcatgggtttattatgtattatacatactaagtaccgtaaaacaatgcatggaaaactgcttggcatgatgcacatgctcaaagttagctaatgttaatatgaatcctcagcggaagaaggggtagttggggaggtgtttttgttttaggagacagggtctcactc

SEQ ID NO: 261341 - DNA, 467 bp, Homo sapiens
ataaataaataaataattttacttaatgaagaaaatgtatatataaattttttgatggggtgttgcccaggctggagtgtagtggcgcaatctcagctcactgcaacctctacctcctgggttcaagtgattctcctgtctcagcctcccgagtagctgagattaaaggtgcctgccactgtgcctggctaatttttgtatttttagtagagacagggtttcactatgttggccaggctggtctcgaactcctgaccttaagtcatccacccactctgcctcccaaagtgctgggattacttgcatgagccagtgtgcccggcctaaaaaatattttcagtgtgcagttgattgaatgtgcagatgcagaacccattgatatggagggctgagtgtctgaaataagcatatttaaactaaagcatagtgaaaataaaaaattttatatggtaagatataaataatat

SEQ ID NO: 261342 - DNA, 387 bp, Homo sapiens
ataaaactacctcttttgggagtatctggaaaaccctagagcagtcctgtccagtagaaatacaaaattaatatgcaaacgtcaatgttattcatatatacaaaaataatcagaagatattatggaagagacaaccccattaacaatagcaacaacgagaaaatatttaggaataaatgtaatgagaactgttcaaaagctaagtgaagaaaacaataagttgagaaagacacagaagtcgccttgagcaggtgaagacaccttgttctcggttaagatggcttggctcattaagatgtcagttgtcaggtaattttcaaatttaatgtgatgctaatatttgaaagcaaaaagactcagcttttttttcttgggctggacatgtcg

SEQ ID NO: 261343 - DNA, 364 bp, Homo sapiens
gcccacttaactagtcagatgtgaaaatgtaaaaaaattaaatgacctgaaagctgaatgccggaaataacgttttccttaagcagctactaatcttatgccaggtgcaggctgtgacacccttcaatgaatgtcttcttagtgtgccctctggccactcaaaagttggaaatttcacagcaactttgggctgagtatttatatgagatgagacacttcaggctaggattgtcatcagctggcccttcacaggatgagaattaacaagcaacatttttggaactcttcaagtgttctgagtgcttggcaatcatttaccagttaatcctcctttgagggaggtcagtcctctgcttgaattttc

SEQ ID NO: 261344 - DNA, 467 bp, Homo sapiens
tgtgaaaacctgagggcccagcgtgaggatgttccaggagagtggagttgatggtgcgcaggggattagcttgctctggttatagagacatgattaaaatctatttgatttcagtacttaactggcaaatctgatgcaacttctggaaaattcctagatggctttaggcatatttaaaagaagccatatttttccttttaaaaatagatatgcaccaaaatattttattttcatctaatcccgctttaacaaccagaatccccttaaaagcaattccaaactaaaagatgtaaatccatttcctatgtgcatttgttctttggtaccatcagggttaatgtttgcatcctctgtgctgaaattaaggatgttgggaaagaagtgtcattgctttgcctactaaatgtcacttgagtatgcttagctttcatccataagagagctgaacttcccctgtaaaaaaaaaa

SEQ ID NO: 261345 - DNA, 264 bp, Homo sapiens
gtagcactcccatttcttttgtaaaatatactaaatatatatatatatataaacctttttgtagtttgttttaaaacgttaccaattctctatacattcaaaaataaaattaaataaacaagtatgagaaaaaatgcaaattgaatgcaaacagaaaccaatgaactgtatttcaaatgaatagcccaactacatggaagaaaaagaaaagaattaatccaagtaacatttgaacccaatactttggctaaatatcctcagtca

SEQ ID NO: 261346 - DNA, 714 bp, Homo sapiens
cagcaatcttgattagtgagttcatgagtaagaattctgaaagtggaagaaagtgggttgggtaccccaggtagagagaccaatatatacagagacataaagatgggagaaaacagaaactctactatcagattaggtgtttggtaggagataagactggaaaggggagcagggaccagcagaagagccttatgggccatctccggagtttcgcccattctgagttactcttaatgcattttaggcaggagcgtcaacatgattgactttctgggttgggagctggactcagagagcagtgtggaaagtgagctttgagagttgatctaggagacaggaagaccagttagcccaaggtcagcaattgcaacccatgggtcaagtctgacccatcatctgtttttgtgtgaccattaactaagaatggtttttatatttttaagtggatgaaaaaaaggggaaacaatattttttgacacataaagattatacatctataaataaagtttgattggaaaatgctaccattatccttcatttattatgtatggcactaccacacttgagttgaatatggtcctcaaagcctaaaatatctactatctgtccctttacagaaaagtgtaccaactcctcaggaggctgtttagttcaagtaagaagtcaagagggcttgaataatgacagattcaaatatgtatttaaagaaggtaa

SEQ ID NO: 261347 - DNA, 405 bp, Homo sapiens
ggctctcatgatactggctgacaccataaagtcagtggtattccctgaggttctgctagctgttctgtctcgcttatgttaccctggcatttcagggagtccacagttccaaagaagtcttggaagcaggaaaatagtctataagatcatacatttgcaatttaatttttaaataactaagtttcaaatactacacagttacatggggatgttcacaatataatatccagttacaaaatgtaaaactttataaagtttatttttatctttattagtgtgctgcccattttatatatatgtatttgtgtgtacacgtgtgtgtgtgtgtgtgtgtgtgtgagcagaggagaactagacagaaataaatccaaacgttaatggtgttaactattttttataagataa

SEQ ID NO: 261348 - DNA, 1332 bp, Homo sapiens
  misc_feature (1)..(1): n is a, c, g, or t
  misc_feature (6)..(6): n is a, c, g, or t
  misc_feature (9)..(9): n is a, c, g, or t
  misc_feature (11)..(11): n is a, c, g, or t
  misc_feature (13)..(14): n is a, c, g, or t
  misc_feature (16)..(18): n is a, c, g, or t
  misc_feature (20)..(20): n is a, c, g, or t
  misc_feature (23)..(23): n is a, c, g, or t
nggctnccngngnncnnncnggngtcgctgaagcgctggaacgaagagcggggcctctggtgcgagaagggggtgcaggtgctgctgacgacggtgggcgccttcgccgccttcggcctcatgaccatcgccatcagcactgactactggctctacacgcgcgccctcatctgcaacaccaccaacctcacggccggcggcgacgacgggaccccccaccgcgggggcggcggcgcctcggagaagaaggaccccggcggcctcacgcactcgggcctctggaggatctgctgcctggaagggttgaaaagaggcgtctgcgtgaagatcaatcatttcccggaggacacggactacgaccacgacagcgcggagtatctactccgagttgtccgggcctccagcatcttccccatccttagcgccatcctgctgctgctcgggggtgtgtgcgtggcggcctcccgcgtctacaagtccaagaggaacatcattctgggcgcagggatcctgttcgtggcagcaggcctgagcaacatcatcggcgtgatcgtgtacatctccgccaacgcgggcgagccgggcccgaagcgggacgaggagaagaaaaaccactactcgtacggctggtccttctacttcggcgggctgtcgttcatcctggccgaggtgataggcgtgctggccgtcaacatctacatcgagcgcagccgcgaggcgcactgccagtctcgctcggacctgctcaaggccggcgggggcgcgggcggcagtggcgggagcggcccctcggccatcctccgtctgcccagttaccgcttccgctaccgccgccgctcccgctctagctcccgctccagcgagccgtcgccgtcgcgggacgcgtctcccggcggccccgggggcccgggctttgcctccacggacatctccatgtacacgctcagccgcgacccctccaagggcagcgtggccgcggggctggcgggggccggcggcggcggcggcggcgccgtgggggcgttcggcggcgcggccgggggcgccgggggcggcggcggaggcggcggcggggcgggtgccgagcgggaccgcgggggggcgtccggcttcctcacgctgcacaacgccttccccaaggaggcgggcggcggcgtcacggtcacggtcaccgggccgcccgccccgcccgcgcccgcgccacccgcgccctctgcgcccgcccccgggaccctggccaaggaggccgccgcctccaacaccaacacgctcaacaggaaaaccacgcctgtgtaggggcgcggcgggggagccgaggggcgtgtccggggc

SEQ ID NO: 261349 - DNA, 947 bp, Homo sapiens
taccatggggcatacctaaggctgattgcctggtgaatgaggaagtctttcgggctagaggataattaaagcatccagggcactgttgaggcaggtgaactgtgaattctttaacccatttcccagtcagtactcaacaagcagtcacctctccaattagagtataaaaaagttttcttccctgagaagattcagggtagtgaattttgttttgaatagcaattttagttagcgtaatgatttttttactttaaaaatgaaattttgaaatagtacagaaaagttgaaagaatcatacagtggtatagtcatatgcccaccatacaaattttattatatttgtattattacatatccgtccctccatcctttcatcaacccatattcttttctgttgttcggtttcaaagtaaattgcagacttcaatacacttcaccccaaaacacttcagggaacttatcattgatgataattcaatacttaagtttgttttaagtgaaaggcacacattacaaatatacaatttaatgaattttgagaaatgaatatacatctataacccccaattcctatcaagatatagaacactagttcacccctgagagtaacatgtatttttacatgcagtcaatcccacatctcccaaaggaaactactgtaatgatctttttaaaccataggttagtgttatctgttatagaacttcatataaatgtaatcacacagtatctgtagtattttgtgtacattttactttactcagaaagatatttttgagattcattcgcctcgtgttaacagaagtagattcctttgtattccagagtagtattctattgtgtagatataccaacatttgtttatccagtctgttgattgatacctgtgctatttccagtgtttgacaatgaataaagctactataaatatcgttgcacatatctta

SEQ ID NO: 261350 - DNA, 354 bp, Homo sapiens
ccaaatcaaagaaagaaaattagagatgggcagctggaaatactggaagttatagattcactatttgggaactcttatatgaactccaggtgtgaccttgaccagcgaacacagcaagtctcagcctaagtaaatcagaatgtaggactggtgggctagatcacccttactcctgggtctgggccatgcagagtgggcacttaggtggtgaggtcactgtttataccagaataccccttatcgaatcataaaatcatcatcttggcagtttttgaccatgtcagtcttaaagattaatgtaaaactcaatgttagactttggagaccattaaaatatcagtgttagaactcatt

SEQ ID NO: 261351 - DNA, 547 bp, Homo sapiens
tctttgcaaatagttcctccaagattctgactggttctttttctgggaaatttaaggagaggattggcaggaaaaaccacagctctgtcactacagcaatggatcctgagaggccagctgattatctcactcttctacccgttctagagtcccttcacccttggctatcatctctgttggtttcggtggcttagctgctggggtgacctagaccctcatctttgatgggtctgagaccctggttgtcacgtccttctcaggctgcaaccatggcacttggcaatttgccatcaaaattggtaaagggagtacaaggagattctcctggagatgtcccgggtgccaaatattatatacctttcctggcactattgtatatcagcagttttacttcctcttagtgatcagagtcaatgacccctgctgaatccccaatatgacacattcccagaatggtgactccttttttcttgtctcttataacaagaaacctaaagtaattaggcagtagctataaaatttaatgggactggccgggcgcagtggg

SEQ ID NO: 261352 - DNA, 238 bp, Homo sapiens
atgcattgatcaggctttgcaaataattacatttgcaaatgagaaagacagtcctttgccagacccctgtatcctgatttgcaattgtgcgctgtatcccttactagatggctacatcccccaggggagagactatgccttaatatgcagaatatctaaatttttttggaatcgtggtgggaaaaaattaagaagtttggaaaaaatggaaatataacatctttttgcactcttcaca

SEQ ID NO: 261353 - DNA, 517 bp, Homo sapiens
cctcagatgacttcgggggcctgtgaggtgcctcactgcttccagggcagaacagggtctgggatctgcagagggttctagtgcctgctctgggagcagccctgggtgcagaaaatgcagggccagctcagtctaggaaatggggacatggagggagggccctccccagctttccacctgcccattttctcaccgccagctgactcagtgattgagacgagttcctgtctctggttttgttcggcacatcagagtctgcgactgagcctttggtctggagtttgagcaaactggagctgaaattgcctcgacagataccttggagcgctgacaccgcagcaccagccctgctgtggccaggaagggagggaggggactgcctttcctgtgtgtctgtgggtcacggccttgagttagagccccgggcctcctgccctgggacgtggaggaccttacacaggtgcctgaggaactaaatgttgatcaatgaaatatttataacaaataaaaaagtgga

SEQ ID NO: 261354 - DNA, 417 bp, Homo sapiens
cactggtcagagtcttgcaagaagtctctttgcctttgagtctcatcattttcatcttcaaaataggactgttgtaactaggacaagaggtgttgtgaaagcactttgtgaactgtagagcatcattctcctgtgagataataatagtgttttaagtggagtcggtactttttgagagttaaaggatatctcacagggcatggtagacgtactagggccaaggactgcctgaaacctgctcctgtgctgccacctgctggtgaagggacacaatgaccacccaagccctcaaagctttctgcaggggccaggcaggagccactggggcaagtgaaggcagggctgggaggacgcctgccactaaacccttgaggacatcggtgatgtccgcaataataaaaaactcttcatttttta

SEQ ID NO: 261355 - DNA, 333 bp, Homo sapiens
tgtttctgtgtagctttgtaggtggttgcttgtgaaagccaggtgggatatcactgtgtggccatcccacatgattctggtctgtggaattgccatgctttctggggacacatccaggagtcactggcactctggcctgtccggacagtgtgcttcattctggctgcccaggcttttgggtctttgtttgctctgctcctctggtgaaactgccccatgattgtgattaattgctgcacagaatgaagctggttttgtgtctgtgtgtgtgtgtgtgtgtgtgccgagcttctatttcatattgcaaatataaataaaggaaggcagtttacg

SEQ ID NO: 261356 - DNA, 733 bp, Homo sapiens
atccttgcattggaattcatgaaaactaggaaagaaattacttggcattattgaaatgtatacctgaatgttcaggaagtcagaattcaagaaggtcacgaaaaagatggagtgcgatcctgtagaatgagattctgaaagcagtgttaagtactcagggaagtccccacccaccccactttttttttgagacaaggtcttgctctgtcggccaggctcaagtgtagtggtgtgatcatggcacactgcagctttgacctcctgggctcaagtgatcctctcacatcggcctctcaagtagctgggactacaggcaagtgccaaccatgcttggtttattttttgatgttttgtaaagatagggtttcaccatgtggctcaagctggtctcgaactcctgggctcaagcaatctgcctgccttggcctcccaaagtgctgggattagaggtgtgagccaccaagcccggcctcactgggaaagtcttaaaagcatgctacttggtttaccattaggaatccttttggccacacaagatagaaaacaccagagaagagtggtttaaacagtatctgtctcacacatcaaaaatgtgcagaggagacagtccagggctgccatggactctgcaggatcaggaacctagctcctaccagtgtttctctactattgtctgtacatgaggtttcttcctcatggtccaagacagatactgaacactagccataatgtc

SEQ ID NO: 261357 - DNA, 432 bp, Homo sapiens
gatttttttcttttcaatgtggaagagttaaattatcttttcctattgtggttttgtttcagacagtattcataagaaaattctcttattctttttactaaatgactcacatattttgtttcaaatttaagtttttaatcccactgggatgaatttagtgtaaggcgtaagtacggatccacaatgtttcaatatggatatctgaatggtttaactgcttttattttattttatttatttatttattttgagatggagtctcgctctgacacccaggctggagtgcaatggtgtgatcttggctcactgcaacctccgcctcccgggttcaagcgattctcctgcctctgcctcccaagtagctgggattacaggcgcccaccaccacgccaggctagttttttgtatttttagtagagagggggtttcacc

SEQ ID NO: 261358 - DNA, 415 bp, Homo sapiens
agaaggtaagtagttgaaaagcacttatgttgtagctctcaaattatgaaagaattttatttaaaaagtttaaaactggggactcggtttattttagaaactatggcagataagaagataaccttttattcatttaatctaagacacaggtaaacactaatgtcatagggattttgtagataaactctattgtaatgtaaaccttttacaatttttagagagcattgacacagtttatcacattgcatctatgagaagggtcagcttaattatcgagtctttgcagttagtccagcagcaagagctctgagtttcttgaatccttacttcatactggtccatagaagtagcaacactatcaagactccagtggcaaagagaattctgagtgtagcgaggggtgggcagtccccaa

SEQ ID NO: 261359 - DNA, 635 bp, Homo sapiens
acaaaaaattatcaaggtggtgaaacaaagaaaattttttttcttttctgaaggacttttacgtctttattgtctttgctaagggtactaaggtgcattgtgactctgcagtcgggggcttagaagttaaagaactcgattacttgccagtcttattttttcagaggatggaggttgtcctataagcaaccatttgtgtgtgtgtgtgtgtgtgtgtgtgtgtgtgtgtgtgtggtgtgtgtgcatgtgtgtgtgggtattcccttctcaaaacacttgaagtgagaggctaaattatgacttaaaatcaaaattattatttgaagccatgggtatagaagtttaagagccacctggaattggagctttgttattggggggtgtgtgtgtgtgtgtgtgtgtgtgtgtgtgtgtgtgtgttgtgggggtcaaaattttggaattaaaatgacattgctatttaatattatctgcagcagtgtttgaattagctggaatattgttcatttccatagaaactggtcacaaatgagaaacaatattattcagttttgttaggaaaaactcaagagcttgtaattttgttaggccttgattataaatactggtcttaactaattcacgcaaatttcatc

SEQ ID NO: 261360 - DNA, 1344 bp, Homo sapiens
tggagtttaggacgtggctgtgagagtctctgacgggtgtaggtgtggaccccagcatctgaaggcagaattgttccctggttggtcatgcgtgttgggtggaaggtgaagcagcagatggtgagggaagccaggcgccctgtggagaatccttgctccagagcgctggccttcctgccaactgcatccccatgaagtgttccctgtagcctttccatgttctgtacactttatgggtgtgagctgcaggagaccagggaccgtcaggttgagattccctgtgttgccacaggacagtcattttgcaaaggccccgggcaggggagcagaggtgagccaccaacactgtggaaagcacacagacacgtttgctaatgagctggtttctttgtggagctttcatcaaggaggaagggggaagtttggcttttcttactgcttccggagagttctttacagggttgggttaaatgaggtcaaaggagcactctgtaggatcccaaggcattggattccatggctcgcaccagccctccttagttcctgaggcccagctccctggagggcacagccttctactttccaggctcctctgggaaccacgaggaagagaggaggcgggattgtcttgtccataaaaaaagaatagagtttctaccgcttagaacatttttctgcctcataaggcatttccagctgaattgacagttctctgtgataaatgtacttgagttttaggttaaaaattttttttcatcctatatgcattaatccagacatggatttatggttgggtagcccaaccctcccctgaagggaaaaaaaagaacaatttaaaaagtcaaaccattggctgggtgtggtggctcatgccaggtaatctcagcaatttgggaggcctggcgggaggattgcttaaggcccaggagtttgagactagcctgggcaacataacatagtgagactcctatctctacctacacaaaaaattaacaaaccaacccagtgctttgggaccctgtaatttgaaacaagctggtgaatgctagttatagctaccgttaggttagttgcctacacggagcccctctctgcgaatccgtgtgctgcaccacagctcaacaggcccgtctaccttgtaagatccccaaggggactgctgcagccctcagtgcctaagctgatacctgatctgctgggcatgggtctgctggcatgtcagtatcaccgtgggggcgggggtgggggacttgtcggaaatgcagattcaaggctccaacgcagaccttcttaccggaaccttgtgttgggggctgggatctgtatttaaaataagtgatagac

SEQ ID NO: 261361 - DNA, 578 bp, Homo sapiens
aaatagttcccaggtgagatgaagtagggaaagacatcccaggcctctgtagcgtatgtaatagtatatgcaaaggcaaggcgggccaaagcatgatattcatgagggttgtggggtatgtgattgcattagagcagagggagccaaggttgatcctaaagaaatagtttaaggttggatccttgtatgtcatgctaaggaattttacatattcatgtaggtaatgaatgaagagccactgagaggttcaaagtagaaaagtagtacgataagagtttttaattaattctggtaatgaagaatgaactggaaggaagaacttctggtgatggagagagtagagtggagagaattataattatccgagagagaaacaccaagatcctgaactaaatagtggtattgggaacaaggaggaagaatctccttggtagtatttcagaggcagagcataaactctacaaggcagcagcctacaaagggaggcaggaggtaggaacagcctaacccaggaggacgcaagggcatgcattatgtgtagagaatttaaaaacaacaataaaacttactaaaactca

SEQ ID NO: 261362 - DNA, 574 bp, Homo sapiens
atgctcacaaagccctggagcctagccagatgcatcacctcagtgcagggtgaaaacccccacatggcacaggctgtggcttcagaactgaaaatatttcactggcccttatgcatctctctgaagttcactagccatgatacaagccatgtggggctcaggagagccagcaattgctacagctttgcctcatctgggctggagctgaagcaggctaagaaggctaggatctggaactccacaagctagtctctggccaggcaggcagaacctgcttcacaaaggcccagttgattgagtactttctggaggctgggagtgggtccctctgctggctgtttgtgggattcacatttcctgatggggcccagggaagtttagcagtggctcagggtcacagaggagctagggttgaaatcaggcctgtctgattccagagttcatactttttttttttttcttttctttgagacagagtttcgcttgaacctggaggtggaggttgtggtgagccaagatcaagccattgcactctagcctgggcaacaagagccaaattctgtctaaaaaaaaa

SEQ ID NO: 261363 - DNA, 485 bp, Homo sapiens
aacaggaaagctcactttctccggggatattcaggccaacactaggaaaccacagccaagtcaggcagggcttggggcggaactgctgacacctccaccctagccaatccaaggtgcacgcctgcctcatgcagcccagcgtgactcccgccattggcacactgtgcccatcacaggctggagctcctttcctccaccgtcttcccaactcctgccaaccagaacttaactactcctttggattctgcttttcacttgttcttcatcagactatggaagcttagacttcataatttggctgagacttcaaaaatagttttaaagaaagctattcccaccctgctaaagtaattacatgattctgcccccttaaacacccaaagccctaatctgtgttctcaaaactctgatcttaatcgcttttttccagtcttatctccaactacttttcttcatgaatacttccttcataaacactgtacttt

SEQ ID NO: 261364 - DNA, 206 bp, Homo sapiens
catcccaggcagagctaaccacgttctcctttgtgcttttgctggccccacgtgaacgtctcaccgcatgtgtaagacttctgagcatctatgtactgatgtatttgtcttctcgccagactctgaactctttgaggacaggcgccatgtcttatttatttttgcacgtccagctcattggtcagggctgggcaggggcatatcat

SEQ ID NO: 261365 - DNA, 982 bp, Homo sapiens
  misc_feature (314)..(314): n is a, c, g, or t
tcattctgggagccgcagagagaaaggtaggatcttgttttgctgcaggctgaccttgtgaggtttaggtttaggtggggccatctggaagagtaagctctaccccttagaacagggcaggaggaggggaggactcttccattctgagatacaaataaaacccaccttataccatgaacattattttccaaaaaaccctgatttggactccatatggcagtcatatatattctttctggtaacataactttgcttggcctcatttcttgtgaacagtcgtggtcttattttgtttagagattgttcatgcaatngctgccttgggtaaccaacagagctgtaggacgttgtcagacaatgacgcattctgtgcccaatctcttctcctgaattcccaggattcacctccaagttaggaaggcagtggtatttttatttaagtagctaccctatgcaaagccatatctctccttaggactcagccagtttccccaggttctgctaaaggcgtattttggaattgtcaccacactatcctctgagccaccactcttctcgggaggttaaagtctgttcctggtacagctcttgaagccaacccctgcactcatcaggttgagttctcccccaaaaatgagttaacagagcaggtctgaggctgctatgcttagaaagacctgcaggcatggccgtcatctgggaacttggacttggggagggtttccaccttccccagaattgataagcgtggctcacagtacctaaacagacgatgtggtatatgttgaacttctgctttcccttctgggagtctggaattttggtatgtgccaggtagaggcagacaataaaagccttgggccctgagtctctaagaagtattcctggtagacagcatttaacacatggcatgacttgttgctggaagaattgaatatatgccatgtgaccccatggggaaaagactcttgggagctttcct

SEQ ID NO: 261366 - DNA, 426 bp, Homo sapiens
taatgagagtagtccgaggagaggcacttcaaaagcaaatctcctgaaatgacagacccatgttagtgctgagggactaaggagtggggaaggactgagtgagccaggagagtgagccaggaaaacaagcccctggacacctatgtgccttcaaagtctgctgtcttctttgccttgatcacctgagaaggactccacattcttacccagtgtgatctcctaggtgatattgactactcttctcaaaaccatcacttcaaggttcaggcggaactgtggggtaaggcctagctctttctttaatgttgtttcttcttgctaacgtttggaaatccttcttttccacctgctcatgagagaaattatcggtttctaagtttcttttcatttcccttcccacctaccgaaataaaaatacaacactgt

SEQ ID NO: 261367 - DNA, 659 bp, Homo sapiens
acattcaaagtctattcattgcaggaattatgactcctcttggacatcaccctacagacatcaggctcatcttagcagtaagcatcaattgctatttttgttaataatgatattctccccttcccttgttaatggaataaacaaagaagccttttggttcgaatttggtttggaataatttgagtggtctttaagagccactaattttcaaaaacaaccttaaaattatgccatttaacagtttctccatcacatgattgaaagaggagagagagatttatttttctaagtgacattttaacctactgggatatgaaggggagagagagagagagaaactggggtctcttaaatgtgtgaaaacaacaaagtctctttgagctttcacttttcattaaaatacagaattagaaagctcccaatttaaaaactaacaaatgtgccaaaagcaaaatccaagggccatagaggtcctcccatcataccagccagtgaccctcctggctgaggttcagaaatgaacagaaaacgccactcttctctaaaaacaattggtatcattttggtttccaagtaacattttcctgtacagctgcatcagatagaattctcagttaaataaatgactcacttaagaattaaaagcactggaaaaggcc

SEQ ID NO: 261368 - DNA, 307 bp, Homo sapiens
ctgcctcaatttgacactcaaatgatgcaaaaatcagtcctgaattatgcaaggtttaaccaaaataaaagagagaaataggcgaggcacggtggctcccgcctgtaatcccagcactttgggaggctgaggccggcagatcacctgaggtcagaagttcgaaaccagcctgaccaacatggagaaaccccgtccctactaaaaatacaaaaattagccaggagtggtggcgcatgcctgtaatcccagctactcaggctgaagcaggagaatcgcttgaacctgggagttggaggttgtagtgagc

SEQ ID NO: 261369 - DNA, 601 bp, Homo sapiens
ctcaactacagatcagcaccacatgccaggaccaaaatagggaaggaggcgacaaaaaaaaaaaaaaaaaaaagaaaagatgcaggtacaggtacagtattaataacttcaaactttattttcttagataaagcagattagagtaagtgtatgcatatactattcacacctgaatctaccacccctcatactcagctccatcatcctcataaaaagaaaaaaatattaaaagtttaattgctcacaatttaaatgaataataaattacattaaatcatcctcaataaacataattctataaatttttctttagtcccaagtatggtccagttagagaagaagggagaaaagggagtggagagtaggcaataaaaaagaaaatggtaaatagagaagagaaataaaggagagaaagggggaaagataatgagggaggtgaagaataacaaaaagaaagtcaaatatatcaaaacaattggaacgagtacaaactccttctttattgaatttgtaataatcttttaatttaaatgttaataataggggacatataacacttgaattttaaaaactattttaatttaaattttaagaaatttaa

SEQ ID NO: 261370 - DNA, 736 bp, Homo sapiens
aaaaagaaagaaagcaaaagaaagaaagagagagaaaaagaaaaaagaaagaaagagagaaagaaagaccatggtgtcacagtcttgatctttgggaaactgaccacccaagattccttaggtggtggtgacagaaagtagccagcagtcaacaccatggacccttcagcatggagggatttgatttgtgtcccagcgttctggctcatttcagcctctgcgaggccccacctcagtccagcagagcgtcccagtccgcagtgcggggaatcctggctgggcagtttgtcctctgcggcgtctttgccttgcactgctcagcttgcctccccactgtgtgctgctgcctgtgctctccagtgcggcgcattgctttccttcagattctggccccgaggccccacttccccaagtgtcaccctcctctatctcctttggcagcaggcgccccagggatgggttcactgatgatgacatcctgtttggcccagctttggcctccttttctcatatgtggtctgcgtggtcaggttgcagcaggtgtgggccccacttttcatgcaggcagaagcagcagcctggagtcccctgtctagtatcttagacagacaatgtctcattgacacagccccttctttctgcagccagccctttgtttcctgtcctgagtccttgttattttctctagccatttcttgcatgtgtgcagtaggtcagggcgtatgtcttggtactg

SEQ ID NO: 261371 - DNA, 880 bp, Homo sapiens
cgatcatatcagagtttctgaggatcagaaatccaggaggggcttaatagggtagttctggctcagggtctgtcatgaggtggccgccaagtgaaaccttccctggagctggaagagctgcttcagagaagactgccaccggatgcttggctggagttttcagtttttctccacatgggcctctcccagggctgctgagtgtccttgaactgtggcagtcagcttccccacagtgagtcgtgagagagggagacagccaaacagaagccctggagtctttcatgatctcatctcagacatgatgggccatctcctctgctgcactcgacagtcatacagaccaaccctgggaccacatgcaaggggaccacctgagggtgtgagtgctaggaggtgaggagccatcctggatgctggctacctcataggtgactggccaggcaaagtttattaactaaaagttctttgtgttgactcaggtgaactaacatttactgcttcagttgttcatttaatttaattttcttgagagatttaaagtaagtgctcaaagccaggcatggtggctcatgcctgtaatcccagcactttgggagcccaaggcgggcagatcacctgaggtcaggagtttgacaccagcccagccaacacgatgaaaccccatctctactaaaaatacagaaaattagccgggcgtggtgacgggtgcctgtagtgccagctacttgggaggctgaggcaggagaatcacttgaacctgggaggcagaggctgcagtgaaccaagatcgcaccactgcactccagcctgggctacagagtgagactctatctcaaaaaaattaattaattaaaaataaataaatgaataaagtgagtgc

SEQ ID NO: 261372 - DNA, 416 bp, Homo sapiens
ctctgctgaaagaagcatcatggaaacctggacacacatgagaaccggccttccacgcagggagaaagaagaggagcatgtgagtggtttgaagtaccctgccattccttacacatctgggcaaaactcatcataataaggaagaaatgaaaattgagacggaggctgaaggaggagccctgattctgttttcggctatccacaggatgggacattttatgaaaggattcaaaggaagctttcaagaaaagagttgcattcaagaggtattggggagctcaaacaattgtttcgaggattagagagctgcgcaagggagcctgggaagccatctcaatgtgaagatgatgaggatgaagacctttatgttgatccacttccacctaatgaacagtaaatacattttctctttctta

SEQ ID NO: 261373 - DNA, 819 bp, Homo sapiens
gagaactcaaagctggccatgtttcttctgcctgtgaccctttagaggcttcccaccaacctcaggatcaagaccaaatacttacactgctaagcatgcatggcatggcctccacatggctccagcctctttaggagccatgcgcctccatatctccacaggagctccctggcctcttccagcccctcccactgcaatgcttctcccatggggcctttgtatccctgttcccttcttccctgagctagcccttctcatcctttgatctcagcacccatgctgcttcctcagggaagtgaaacctccatgatggactctcatggtgccatttcattgttgcacttgtccctgtggcagctcaacaactgatggtctgagaatttgattaatgtttgtctctgcaactagactttacccctaaaagggcagggactgtggctgtttctgttaaccattgtaccccccaggcctgacacacagtaaacatcagaaaatagttgtggcatgttttcgagtgaatgaatggatgaatagcactctcctgtgtgcaggccgtgaggccatcccctagagtgtctcacaccagagttacaaactcgctggcataactggccatagttcaggagagatgagggcaggtcaaaggctggggccacgcactaagtgtgtccaaagggcaagaacgaatggaactggccgcagaccaacactgttgttctcactttcagtggggctgggctcacccccaggtgtcctttccctagctcactgtctttttcttttttgtgccttgagccattaaaccattattaggtctat

SEQ ID NO: 261374 - DNA, 457 bp, Homo sapiens
ctgtacatcctgcataggtacccctgaacttaaaagttggaaattttaaaaaaaaagaaaagcattttgtgtatttaaaagaacatcaaaagtgtgagatagaaagaaatctgtagttttgccaaagcataaatttgaatcttgaatttacaagctaaaatgggttctgagagcaagtgggtccactagtgaatgagccacgcccactgctgatcctcccaatctcatagggccatgagaaaggtccattccaagtctggaccagggaatgctcacactgtgattttttttaaggtgtcttctttagaaatggctccccaaagaaagtcaagtgctagtatcagagatggaagtgaagaagactaagaaagtaattctacctaacccggaaaatggaagtattgaccagattaaagagtggttaagtcatggccatgaatgaatttaccatatgaaa

SEQ ID NO: 261375 - DNA, 432 bp, Homo sapiens
tctacacagacacagtaacaatctgatctctcttgcttttctccacaccacaaaccccttagtattaagctccaagacatatttttgtcatatctttattgcttataattttctatctttagatattaagtatttgttgaaaatcccatgaaaagctttcagaaattggattgcatttcttgcttattatacatcccttgactattttgtaattgtgtgtatttgtggaggtcacatgtaaataaacttaaagtgactctactttgtgaaaatgtgaaacttcgtgtaggtactcagtaaatcagtaaattcttactaacgttagcccccagcctagctatggagggtgcatgctgagcccgaagcagagagctctgtaatctctgcattcatcaccaccatgaggaggcctcagaagcttctagcactgtt

SEQ ID NO: 261376 - DNA, 501 bp, Homo sapiens
tccagtgagggataaaacctttagcagagacttatcccacttgaggtaaggtcacttttcacactctgggcaccaatatccttcctgttccttgtaaggggagaagcaaagctaagaaatgcttgtaagggacatggaccccctaaaagactgtgatgtaatcataagagtatagaatacttcccctatgccaaccttctcaccacactaacagggctccaatgtaactgtggattacacctaaaagagccagaaaacacagactctctgtggaggagtatataaggatgcccaaagtcaagagtggagacaaaataaggatactagaggaatttgaagccaccgctacctacatctacagcaaacattatatatagcttgattctcagccagattaataataacaacaaaaaatgctcactaaaggcctgtttgcctcactgattactcttcaatatattatgtatgggttttaatggaaaattttaaggtatgaaaaaa

SEQ ID NO: 261377 - DNA, 415 bp, Homo sapiens
gcactgggggcattgctggggagcagcagtgtttgaggatgactggagctgtgcagagcatctcctgtgacctgaggatgtgccagtcatgtcctggtaccactcggggcaggccatctgcccctttcacttcatctcttccccctcacccacagcagcactggctccttggtgtgtgtatggccgaagagggcctggacacagggtaccctgggtgaaagatggggccgaggctccaaggctcctgctgtacttttcttctttttgagcaggagctggagggtgcctcaggaatacaggagggacatgggaggagggctgttgggctgagggctccctgtctggctgccatctcttcttcctgctaccctgttcacaaactgggggtgcttaactccctctgtgaatcaacatg

SEQ ID NO: 261378 - DNA, 434 bp, Homo sapiens
cagccaagagagcaattcctcacccactcattaacgcccgctgagccatccctcttcccgcagagctgcccttggggctgctgctgctgagatggcggcagagctctgaagccacgccctgggtcagagaggagacatagcctctggggccagtgggcaagccctaggctgctggtggttgctggcggtggtccctggccttggccccatctgtaggcccagctcgggcacccagtccgggccccttggtctagtccctgtgatctttggctcagcacgccactttgtgatgactaggtcagtttcccagagagcttgatgtggcgaagagttgctatggagagagcaagcacaaggattttaatcacaagaaccggcatccctggtgaaaatgcttacatcaggcagtgcctgctttaaactgaaataaaaat

SEQ ID NO: 261379 - DNA, 541 bp, Homo sapiens
cttaccttttctctgtagctacctgtgtagcttcccttatttgtgcagctgcaagcatgtattaggcaagcacagagtgcagcttctcttgcctgagcaactacgggcatgttttaagcaagcctccaccccaccccatgcaagttctcatggagcccactgtgtacatgcccaaaaaggggaggaaactttttcctgggagtgcactgattacacagagaaccaaggcatttctatgttgggcctcactcccttatctgtgcctgtagcttgatttttccaagctgctctttatgtgcctgcagcttgattttttccagactgctgttttgtttgaaagaatttcaccgaggacctgccctaactgtctgcctgctttttttctttctccttcctcacttgggaggctgaggcaggaggaccacctgaacttggggaggttgaggctacagtgagctgtgattgcatcactgtactccagcctgggtgacagagtgagatcctgtctcaaaaaacaaacaaaaaaaccaaagaaacatgc

SEQ ID NO: 261380 - DNA, 433 bp, Homo sapiens
ccattctaattattgacttggaataaattcttcaatataaaaatatttggttaaattataggaagtttttaagaagttctttgttcattacttctaaattgttcccaagaaaatttatattcatttatagttcaacaaagggagtgtgaaacggccattcctctacccccaataatcattttcctttaattatacacttttaatcttaatatgcatggagtataaagaaaaatacagagtaatttatgactagtatattcaacatctctctctctcctaaataaataaaattaattccgagttctatgttaaaaatacttattatttttattttaaattaaatattatattctgtcttattctaaaagagatttaaaatttgttgataaaatatataataatcaacagatacatttaaagtattactaaaaaa

SEQ ID NO: 261381 - DNA, 478 bp, Homo sapiens
tccaggaggtagaggttgcagtgagctgacatcctgccactgcactccagtctgggtgacagagtgagaccctgtctcaaaaaaagccatcattgacttccactttcagctatttggacataactgttatggactagcttcctgctatgtattcaactgaatttatattgttataaacttttaatactatatgtgaagaggtattcactttaaggtagactgtgaaagttaaatacgaatagtataagggttaaagtaaccactaaattagtatgacaaagaggtataggtaatatgaccaaaaaagggagataaaatggactcataaaaaaataaatccaggctaggcacagtggcttatctctgtaatcccagcactttggaaggctgaggtcggcaagttcgcttgagcgcaggggtttgagaccagcctgggcaacatagggagatcctgtctcttaaaaaaatccaaaaggca

SEQ ID NO: 261382 - DNA, 297 bp, Homo sapiens
agggggtgccctgtctgcctgcagctgttattgaagatgtcccttttctcaccgtcaggttttactggaacagaagagaaagccagtgagatactaatcattagcaatgttaatattacctgatatttagttggctttatgcttttacaaaatgtacctccctttctgttgccaggaagattctagagcatgtagcaagaaaagcaagtaattgtctttctctgcagccctgtggaatcgtcgaaagagcacatactataccctaaaattaaacctagattgaagttctagctcctt

SEQ ID NO: 261383 - DNA, 229 bp, Homo sapiens
ttgttttgttttggatttccctaatgactaaacatgttcggccaggcacagtagtgcacccctataattgcagctattcaagagactggggcaggaggatttcttgaagccaagagtttgatgttacagcacatggtggtcacacctgtcagtagctactacattccagctgggacatcatagcaaaaccacaactctaaaaaagaacaaaacccaaagccaaccaaac

SEQ ID NO: 261384 - DNA, 502 bp, Homo sapiens
gcccccacctccctccttctatctcctgcccccctgtgcccttggagacacgctgggcagactccccatgtgatcaatctgacgtcttaagtttaaacgtcattacctcagtatatcagcagaaaaagttctatttcattgtgtcttgtggcaaacttcagttcggttaatggagggtttcgtatacttttaaaagtaagtcaggctgggtgcagtggctcacccctgtaatccccagcactttgggaggccaagatgggaggatcacttcaggtcaggagttcgaaaccagcctggccaacatggtgaaaccccgtctctactaaaagtacaaaaaattagccaagtgtggtggcgggcgcctggagtcccagctactcaggaggctgaggcagaagaattgcttgaacacaggaggcggaggttgcagtgagccaagattgcaccactgcactgtagtctgggcaacagagcgagactctgtcttaaaaaaaaaaaaaaa

SEQ ID NO: 261385 - DNA, 357 bp, Homo sapiens
cacaatctgcattgtatatctagtaagagaaatcttgttgagaattaaaatggttaaagataaaatagaaattattttttcaaataccgatgttttatttgcctctgtgttaatatttaaaaccaaaaacatttaatgaatatatcttcaaattcttcaagctgaaattcttaaatccataattaattcaaaaggaattagaagagcagttcaaatcttagttggtagtgctagggatgcattactgtcctttgtcaaaagttactgcttagtattctaactatggtgatttcttgctttatttttagattttaaagggaaaaaaattaaaataaaaaaactttttgggaaaaaaat

SEQ ID NO: 261386 - DNA, 465 bp, Homo sapiens
attttactttctgtagaaagggtgctgcccatcagcaatcctgccaggagagcacaatgaacaaagaaaggcaggaatatttatcccttatgcattgggtccttactgctgtgtcctgtctccattggttggagctggacctcacagtctaagctaaacccaattggctaacaacttaaaaaactttcttaaataggtaaaggcaatggagaacaaaggaaaagaggaagttgcttgccaaaagacttggagaagtaataacatttccaaataaggaaagggcataagctgtgagctgggacatgcttgagcacgtcgagaccaaatatcttggttaacgtacaaggacacagaaggtacttatttccttatatctaacaactacataagatatggtttaaaaaagagttactaacacaaagcaaagaggcttaaaaaaagttaattaaaaatattatttctaac

SEQ ID NO: 261387 - DNA, 1955 bp, Homo sapiens
gccgggcttccgcccggtctgccggcaacgctgcggccccgcccacgtcatggcgcccgaggagaacgcggggaccgaactcttgctgcagagtttcgagcgccgcttcctggcggcacgcacactgcgctccttcccctggcagagcttagaagcaaagttaagagactcatcagattctgagctgctgcgggatattttgcacaagactgtgaagcatcctgtgtgtgtgaagcacccgccgtccgtcaaatatgcccggtgctttctctcagaactcatcaaaaagcacgaggctgtccacacagagcctttggacgagctgtatgaagcgctggcggagaccctgatggccaaggagtccacccagggccaccggagctatttgctgccctcgggaggctcggtcacactctccgagagcacggccatcatctcctacggtaccacaggcctggtcacatgggacgccgccctctaccttgcagaatgggccatcgagaacccggcagtcttcactaacaggactgtcctagagcttggcagtggtgctggcctcacaggcctggccatctgcaagatgtgccgcccccgggcatacatcttcagcgactgtcacagccgggtccttgagcagctccgagggaatgtccttctcaatggcctctcattagaggcagacatcactgccaagttagacagccccagggtgacagtggcccagctggactgggacgtcgcgacggtccatcagctctctgccttccagccagatgttgtcattgcagcagatgtgctgtattgcccagaagccatcatgtcgctggtcggcgtcctgcggaggctggctgcctgccgggagcaccagcgggctcctgaggtctacgtggcctttaccgtccgcaacccagagacgtgccagctgttcaccaccgagctaggccgggccgggatcagatgggaagtggaacctcgtcatgagcagaaactgtttccctacgaagagcacttggagatggcaatgctgaatctcaccctgtaggactcacacacgactccaacgggattgtgagaatcaagtcactctcatgggaagaatttttatatgggaaagcggataaaactttcattggactggaatgtttggagaatgttaatttccaaatcaggaaccacaaactgccctctaataagacatcggctatctaagcgtgtgggtgccccctttctgccagcagttctggttcttaagaaaatcaccataaatcagacatgaaaattctggctccaaaaatagcattttctttgtgcaaataaaaacgtgtgtatcaagtatgatgttcccccaacgtggacacactcagttcctcacaaagccaagcccactgcagctgccacatccctgggcttacggtgcagcaggtgcttttttcaagacaggaatcaaaatgttaggaacacggcagaaaggggacacctggagaccaaacgcaggatgaggagttctgcagaggtcacagggaagtcacagaacagtaatacgctagcaggggcatggggcgtgaagaacagaagaagagaggaagcgtttccaagcctccagagaagaaatcaaggccaaccaaagcttcccgggtcacagaaccaattcttttaccaggcagtaccactgctgtcatttcagcttctggccactgggaggtgctgctcgaaagggtttgccctgagactccaagaagaagctgcgggaaggacagcaggggtcctggggttttagcctctggcccaggagttatgtgtccataaccaaagggagcacagtctgcacccagctctcatcccatcggagctgctgcgactcccgcaggttcttccggaactggtttagcttgcccgcaggatcaggaaagtttgagaaaagcatctgcaaaaaaataaagagcagagcttacctc

SEQ ID NO: 261388 - DNA, 2367 bp, Homo sapiens
gccgggcttccgcccggtctgccggcaacgctgcggccccgcccacgtcatggcgcccgaggagaacgcggggaccgaactcttgctgcagagtttcgagcgccgcttcctggcggcacgcacactgcgctccttcccctggcagagcttagaagcaaagttaagagactcatcagattctgagctgctgcgggatattttgcacaagactgtgaagcatcctgtgtgtgtgaagcacccgccgtccgtcaaatatgcccggtgctttctctcagaactcatcaaaaagcacgaggctgtccacacagagcctttggacgagctgtatgaagcgctggcggagaccctgatggccaaggagtccacccagggccaccggagctatttgctgccctcgggaggctcggtcacactctccgagagcacggccatcatctcctacggtaccacaggcctggtcacatgggacgccgccctctaccttgcagaatgggccatcgagaacccggcagtcttcactaacaggactgtcctagagcttggcagtggtgctggcctcacaggcctggccatctgcaagatgtgccgcccccgggcatacatcttcagcgactgtcacagccgggtccttgagcagctccgagggaatgtccttctcaatggcctctcattagaggcagacatcactgccaagttagacagccccagggtgacagtggcccagctggactgggacgtcgcgacggtccatcagctctctgccttccagccagatgttgtcattgcagcagatgtgctgtattgcccagaagccatcatgtcgctggtcggcgtcctgcggaggctggctgcctgccgggagcaccagcgggctcctgaggtctacgtggcctttaccgtccgcaacccagagacgtgccagctgttcaccaccgagctaggccgggccgggatcagatgggaagtggaacctcgtcatgagcagaaactgtttccctacgaagagcacttggagatggcaatgctgaatctcaccctgtaggactcacacacgactccaacgggattgtgagaatcaagtcactctcatgggaagaatttttatatgggaaagcggataaaactttcattggactggaatgtttggagaatgttaatttccaaatcaggaaccacaaactgccctctaataagacatcggctatctaagcgtgtgggtgccccctttctgccagcagttctggttcttaagaaaatcaccataaatcagacatgaaaattctggctccaaaaatagcattttctttgtgcaaataaaaacgtgtgtatcaagtatgatgttcccccaacgtggacacactcagttcctcacaaagccaagcccactgcagctgccacatccctgggcttacggtgcagcaggtgcttttttcaagacaggaatcaaaatgttaggaacacggcagaaaggggacacctggagaccaaacgcaggatgaggagttctgcagaggtcacagggaagtcacagaacagtaatacgctagcaggggcatggggcgtgaagaacagaagaagagaggaagcgtttccaagcctccagagaagaaatcaaggccaaccaaagcttcccgggtcacagaaccaattcttttaccaggcagtaccactgctgtcatttcagcttctggccactgggaggtgctgctcgaaagggtttgccctgagactccaagaagaagctgcgggaaggacagcaggggtcctggggttttagcctctggcccaggagttatgtgtccataaccaaagggagcacagtctgcacccagctctcatcccatcggagctgctgcgactcccgcaggttcttccggaactggtttagcttgcccgcaggatcaggaaagtttgagaaaagcatctgcaaaaaaataaagagcagagcttacctcattgcctgtccccaccccatcccaggtcaccacctggctgaccccaggtccccgacccaacaacaacccctcccaagtccctaactccctcacttggactcgagacccttcacaccccagcagcactccgcctccaacttgacatcacagtttctggaaacttccccgcatgtcccactttcccacacttggtgccctggagcacctcccggcctctacgtgctgcccattcccctgtgagcaccctcctctcgcctctggccaacgcagtcccacccatctgtgggtaacaagggggtgtcggtgttctttgcagccttgctaaactgtctgaatcaaggatcacaaactacagctgcaggccaaatccagcccacagcctgtgtttgtaaataaagttttattggaacaa

SEQ ID NO: 261389 - DNA, 2345 bp, Homo sapiens
gccgggcttccgcccggtctgccggcaacgctgcggccccgcccacgtcatggcgcccgaggagaacgcggggaccgaactcttgctgcagagtttcgagcgccgcttcctggcggcacgcacactgcgctccttcccctggcagagcttagaagcaaagttaagagactcatcagattctgagctgctgcgggatattttgcacaagactgtgaagcatcctgtgtgtgtgaagcacccgccgtccgtcaaatatgcccggtgctttctctcagaactcatcaaaaagcacgaggctgtccacacagagcctttggacgagctgtatgaagcgctggcggagaccctgatggccaaggagtccacccagggccaccggagctatttgctgccctcgggaggctcggtcacactctccgagagcacggccatcatctcctacggtaccacaggcctggtcacatgggacgccgccctctaccttgcagaatgggccatcgagaacccggcagtcttcactaacaggactgtcctagagcttggcagtggtgctggcctcacaggcctggccatctgcaagatgtgccgcccccgggcatacatcttcagcgactgtcacagccgggtccttgagcagctccgagggaatgtccttctcaatggcctctcattagaggcagacatcactgccaagttagacagccccagggtgacagtggcccagctggactgggacgtcgcgacggtccatcagctctctgccttccagccagatgttgtcattgcagcagatgtgctgtattgcccagaagccatcatgtcgctggtcggcgtcctgcggaggctggctgcctgccgggagcaccagcgggctcctgaggtctacgtggcctttaccgtccgcaacccagagacgtgccagctgttcaccaccgagctaggccgggccgggatcagatgggaagtggaacctcgtcatgagcagaaactgtttccctacgaagagcacttggagatggcaatgctgaatctcaccctgtaggactcacacacgactccaacgggattgtgagaatcaagtcactctcatgggaagaatttttatatgggaaagcggataaaactttcattggactggaatgtttggagaatgttaatttccaaatcaggaaccacaaactgccctctaataagacatcggctatctaagcgtgtgggtgccccctttctgccagcagttctggttcttaagaaaatcaccataaatcagacatgaaaattctggctccaaaaatagcattttctttgtgcaaataaaaacgtgtgtatcaagtatgatgttcccccaacgtggacacactcagttcctcacaaagccaagcccactgcagctgccacatccctgggcttacggtgcagcaggtgcttttttcaagacaggaatcaaaatgttaggaacacggcagaaaggggacacctggagaccaaacgcaggatgaggagttctgcagaggtcacagggaagtcacagaacagtaatacgctagcaggggcatggggcgtgaagaacagaagaagagaagaagaaatcaaggccaaccaaagcttcccgggtcacagaaccaattcttttaccaggcagtaccactgctgtcatttcagcttctggccactgggaggtgctgctcgaaagggtttgccctgagactccaagaagaagctgcgggaaggacagcaggggtcctggggttttagcctctggcccaggagttatgtgtccataaccaaagggagcacagtctgcacccagctctcatcccatcggagctgctgcgactcccgcaggttcttccggaactggtttagcttgcccgcaggatcaggaaagtttgagaaaagcatctgcaaaaaaataaagagcagagcttacctcattgcctgtccccaccccatcccaggtcaccacctggctgaccccaggtccccgacccaacaacaacccctcccaagtccctaactccctcacttggactcgagacccttcacaccccagcagcactccgcctccaacttgacatcacagtttctggaaacttccccgcatgtcccactttcccacacttggtgccctggagcacctcccggcctctacgtgctgcccattcccctgtgagcaccctcctctcgcctctggccaacgcagtcccacccatctgtgggtaacaagggggtgtcggtgttctttgcagccttgctaaactgtctgaatcaaggatcacaaactacagctgcaggccaaatccagcccacagcctgtgtttgtaaataaagttttattggaacaa

SEQ ID NO: 261390 - DNA, 2731 bp, Homo sapiens
gccgggcttccgcccggtctgccggcaacgctgcggccccgcccacgtcatggcgcccgaggagaacgcggggaccgaactcttgctgcagagtttcgagcgccgcttcctggcggcacgcacactgcgctccttcccctggcaggtgggcggcggggcgagcggagaggcccgcggggctcgcgggagtccaggggcagacgggacgggtctccgtgctgaagcccctggcgctcccgccacgtgagttcctgggctcccgccggtcagggccgcgcgacccggtccccgtccctggggcctggccagagtcgctcgcacccctcctgccccgcgagctggcgggggaagctgggggcgtctccacagccttggggggcagacgcgcgctcggtgtggggtacagttcacgatcattttcacgactttttaaaggcagtaatcgttctggtcactgggacacagctgccctcgcccattctaaaaagtcagcgccgtcaggaccgcagagcttagaagcaaagttaagagactcatcagattctgagctgctgcgggatattttgcacaagactgtgaagcatcctgtgtgtgtgaagcacccgccgtccgtcaaatatgcccggtgctttctctcagaactcatcaaaaagcacgaggctgtccacacagagcctttggacgagctgtatgaagcgctggcggagaccctgatggccaaggagtccacccagggccaccggagctatttgctgccctcgggaggctcggtcacactctccgagagcacggccatcatctcctacggtaccacaggcctggtcacatgggacgccgccctctaccttgcagaatgggccatcgagaacccggcagtcttcactaacaggactgtcctagagcttggcagtggtgctggcctcacaggcctggccatctgcaagatgtgccgcccccgggcatacatcttcagcgactgtcacagccgggtccttgagcagctccgagggaatgtccttctcaatggcctctcattagaggcagacatcactgccaagttagacagccccagggtgacagtggcccagctggactgggacgtcgcgacggtccatcagctctctgccttccagccagatgttgtcattgcagcagatgtgctgtattgcccagaagccatcatgtcgctggtcggcgtcctgcggaggctggctgcctgccgggagcaccagcgggctcctgaggtctacgtggcctttaccgtccgcaacccagagacgtgccagctgttcaccaccgagctaggccgggccgggatcagatgggaagtggaacctcgtcatgagcagaaactgtttccctacgaagagcacttggagatggcaatgctgaatctcaccctgtaggactcacacacgactccaacgggattgtgagaatcaagtcactctcatgggaagaatttttatatgggaaagcggataaaactttcattggactggaatgtttggagaatgttaatttccaaatcaggaaccacaaactgccctctaataagacatcggctatctaagcgtgtgggtgccccctttctgccagcagttctggttcttaagaaaatcaccataaatcagacatgaaaattctggctccaaaaatagcattttctttgtgcaaataaaaacgtgtgtatcaagtatgatgttcccccaacgtggacacactcagttcctcacaaagccaagcccactgcagctgccacatccctgggcttacggtgcagcaggtgcttttttcaagacaggaatcaaaatgttaggaacacggcagaaaggggacacctggagaccaaacgcaggatgaggagttctgcagaggtcacagggaagtcacagaacagtaatacgctagcaggggcatggggcgtgaagaacagaagaagagaggaagcgtttccaagcctccagagaagaaatcaaggccaaccaaagcttcccgggtcacagaaccaattcttttaccaggcagtaccactgctgtcatttcagcttctggccactgggaggtgctgctcgaaagggtttgccctgagactccaagaagaagctgcgggaaggacagcaggggtcctggggttttagcctctggcccaggagttatgtgtccataaccaaagggagcacagtctgcacccagctctcatcccatcggagctgctgcgactcccgcaggttcttccggaactggtttagcttgcccgcaggatcaggaaagtttgagaaaagcatctgcaaaaaaataaagagcagagcttacctcattgcctgtccccaccccatcccaggtcaccacctggctgaccccaggtccccgacccaacaacaacccctcccaagtccctaactccctcacttggactcgagacccttcacaccccagcagcactccgcctccaacttgacatcacagtttctggaaacttccccgcatgtcccactttcccacacttggtgccctggagcacctcccggcctctacgtgctgcccattcccctgtgagcaccctcctctcgcctctggccaacgcagtcccacccatctgtgggtaacaagggggtgtcggtgttctttgcagccttgctaaactgtctgaatcaaggatcacaaactacagctgcaggccaaatccagcccacagcctgtgtttgtaaataaagttttattggaacaa

SEQ ID NO: 261391 - DNA, 1374 bp, Homo sapiens
gccgggcttccgcccggtctgccggcaacgctgcggccccgcccacgtcatggcgcccgaggagaacgcggggaccgaactcttgctgcagagtttcgagcgccgcttcctggcggcacgcacactgcgctccttcccctggcagagcttagaagcaaagttaagagactcatcagattctgagctgctgcgggatattttgcacaagactgtgaagcatcctgtgtgtgtgaagcacccgccgtccgtcaaatatgcccggtgctttctctcagaactcatcaaaaagcacgaggctgtccacacagagcctttggacgagctgtatgaagcgctggcggagaccctgatggccaaggagtccacccagggccaccggagctatttgctgccctcgggaggctcggtcacactctccgagagcacggccatcatctcctacggtaccacaggcctggtcacatgggacgccgccctctaccttgcagaatgggccatcgagaacccggcagtcttcactaacaggactgtcctagagcttggcagtggtgctggcctcacaggcctggccatctgcaagatgtgccgcccccgggcatacatcttcagcgactgtcacagccgggtccttgagcagctccgagggaatgtccttctcaatggcctctcattagaggcagacatcactgccaagttagacagccccagggtgacagtggcccagctggactgggacgtcgcgacggtccatcagctctctgccttccagccagatgttgtcattgcagcagatgtgctgtattgcccagaagccatcatgtcgctggtcggcgtcctgcggaggctggctgcctgccgggagcaccagcgggctcctgaggtctacgtggcctttaccgtccgcaacccagagacgtgccagctgttcaccaccgagctaggccgggccgggatcagatgggaagtggaacctcgtcatgagcagaaactgtttccctacgaagagcacttggagatggcaatgctgaatctcaccctgtaggactcacacacgactccaacgggattgtgagaatcaagtcactctcatgggaagaatttttatatgggaaagcggataaaactttcattggactggaatgtttggagaatgttaatttccaaatcaggaaccacaaactgccctctaataagacatcggctatctaagcgtgtgggtgccccctttctgccagcagttctggttcttaagaaaatcaccataaatcagactgacaaaacacaaaaaaacccggggctttcttcggggggggaaggttaagggcctggattgtctcgcccctttttgcaggggaaatcggggccccaggggga

SEQ ID NO: 261392 - DNA, 2167 bp, Homo sapiens
cggctgtcggtcgccgtttggattcgtcacccaggcgtcgcgaggagaacgcggggaccgaactcttgctgcagagtttcgagcgccgcttcctggcggcacgcacactgcgctccttcccctggcagagcttagaagcaaagttaagagactcatcagattctgagctgctgcgggatattttgcacaagccctcgggaggctcggtcacactctccgagagcacggccatcatctcctacggtaccacaggcctggtcacatgggacgccgccctctaccttgcagaatgggccatcgagaacccggcagtcttcactaacaggactgtcctagagcttggcagtggtgctggcctcacaggcctggccatctgcaagatgtgccgcccccgggcatacatcttcagcgactgtcacagccgggtccttgagcagctccgagggaatgtccttctcaatggcctctcattagaggcagacatcactgccaagttagacagccccagggtgacagtggcccagctggactgggacgtcgcgacggtccatcagctctctgccttccagccagatgttgtcattgcagcagatgtgctgtattgcccagaagccatcatgtcgctggtcggcgtcctgcggaggctggctgcctgccgggagcaccagcgggctcctgaggtctacgtggcctttaccgtccgcaacccagagacgtgccagctgttcaccaccgagctaggccgggccgggatcagatgggaagtggaacctcgtcatgagcagaaactgtttccctacgaagagcacttggagatggcaatgctgaatctcaccctgtaggactcacacacgactccaacgggattgtgagaatcaagtcactctcatgggaagaatttttatatgggaaagcggataaaactttcattggactggaatgtttggagaatgttaatttccaaatcaggaaccacaaactgccctctaataagacatcggctatctaagcgtgtgggtgccccctttctgccagcagttctggttcttaagaaaatcaccataaatcagacatgaaaattctggctccaaaaatagcattttctttgtgcaaataaaaacgtgtgtatcaagtatgatgttcccccaacgtggacacactcagttcctcacaaagccaagcccactgcagctgccacatccctgggcttacggtgcagcaggtgcttttttcaagacaggaatcaaaatgttaggaacacggcagaaaggggacacctggagaccaaacgcaggatgaggagttctgcagaggtcacagggaagtcacagaacagtaatacgctagcaggggcatggggcgtgaagaacagaagaagagaggaagcgtttccaagcctccagagaagaaatcaaggccaaccaaagcttcccgggtcacagaaccaattcttttaccaggcagtaccactgctgtcatttcagcttctggccactgggaggtgctgctcgaaagggtttgccctgagactccaagaagaagctgcgggaaggacagcaggggtcctggggttttagcctctggcccaggagttatgtgtccataaccaaagggagcacagtctgcacccagctctcatcccatcggagctgctgcgactcccgcaggttcttccggaactggtttagcttgcccgcaggatcaggaaagtttgagaaaagcatctgcaaaaaaataaagagcagagcttacctcattgcctgtccccaccccatcccaggtcaccacctggctgaccccaggtccccgacccaacaacaacccctcccaagtccctaactccctcacttggactcgagacccttcacaccccagcagcactccgcctccaacttgacatcacagtttctggaaacttccccgcatgtcccactttcccacacttggtgccctggagcacctcccggcctctacgtgctgcccattcccctgtgagcaccctcctctcgcctctggccaacgcagtcccacccatctgtgggtaacaagggggtgtcggtgttctttgcagccttgctaaactgtctgaatcaaggatcacaaactacagctgcaggccaaatccagcccacagcctgtgtttgtaaataaagttttattggaacaa

SEQ ID NO: 261393 - DNA, 2409 bp, Homo sapiens
ccttctgatcgctggactgactctctcgccttctcttggtgcagccctcgggaggctcggtcacactctccgagagcacggccatcatctcctacggtaccacaggcctggtcacatgggacgccgccctctaccttgcagaatgggccatcgagaacccggcagtcttcactaacaggtgacctcggggcgcagggcagggcaccgaggcaggcttacctcccgttccagtcgttaccacatggctctgtcccagagccatgccctgtgtccttcagagaccacaggaggaaaacaaccacttctgggacgaagacagggcccttgagagaaggtggtgtttggctgggccaccgaaaacccctcacccctgccagcacactcagtcccctctctggtggaacagagctctgcctgtggtcctaggtcccagccctgaaacccacaggtccagcggtggccagggacacaagcccacccctgcaagccagcagacaaatcagcagatgcctgaaacatgaagttcatggcagggtcaggctttgtgtcattcaaagccctctagataggccaagaaccagagctggttttttaaggaacaccagtgagtctggagatttttttcttttgcttcggtcttttgcagctttctctactaagggttctcctttttcacccaagtaattgcctttccatctaatggcccaaatggtcaaatggcatctactagtctcatatgaccgctgcctctctggcctcgccctgctgctgacgtcagcatgacctggacctgtccactggtccctttcagtaacctgaagctttcaccatagatgtgctgtattgcccagaagccatcatgtcgctggtcggcgtcctgcggaggctggctgcctgccgggagcaccagcgggctcctgaggtctacgtggcctttaccgtccgcaacccagagacgtgccagctgttcaccaccgagctaggccgggccgggatcagatgggaagtggaacctcgtcatgagcagaaactgtttccctacgaagagcacttggagatggcaatgctgaatctcaccctgtaggactcacacacgactccaacgggattgtgagaatcaagtcactctcatgggaagaatttttatatgggaaagcggataaaactttcattggactggaatgtttggagaatgttaatttccaaatcaggaaccacaaactgccctctaataagacatcggctatctaagcgtgtgggtgccccctttctgccagcagttctggttcttaagaaaatcaccataaatcagacatgaaaattctggctccaaaaatagcattttctttgtgcaaataaaaacgtgtgtatcaagtatgatgttcccccaacgtggacacactcagttcctcacaaagccaagcccactgcagctgccacatccctgggcttacggtgcagcaggtgcttttttcaagacaggaatcaaaatgttaggaacacggcagaaaggggacacctggagaccaaacgcaggatgaggagttctgcagaggtcacagggaagtcacagaacagtaatacgctagcaggggcatggggcgtgaagaacagaagaagagaggaagcgtttccaagcctccagagaagaaatcaaggccaaccaaagcttcccgggtcacagaaccaattcttttaccaggcagtaccactgctgtcatttcagcttctggccactgggaggtgctgctcgaaagggtttgccctgagactccaagaagaagctgcgggaaggacagcaggggtcctggggttttagcctctggcccaggagttatgtgtccataaccaaagggagcacagtctgcacccagctctcatcccatcggagctgctgcgactcccgcaggttcttccggaactggtttagcttgcccgcaggatcaggaaagtttgagaaaagcatctgcaaaaaaataaagagcagagcttacctcattgcctgtccccaccccatcccaggtcaccacctggctgaccccaggtccccgacccaacaacaacccctcccaagtccctaactccctcacttggactcgagacccttcacaccccagcagcactccgcctccaacttgacatcacagtttctggaaacttccccgcatgtcccactttcccacacttggtgccctggagcacctcccggcctctacgtgctgcccattcccctgtgagcaccctcctctcgcctctggccaacgcagtcccacccatctgtgggtaacaagggggtgtcggtgttctttgcagccttgctaaactgtctgaatcaaggatcacaaactacagctgcaggccaaatccagcccacagcctgtgtttgtaaataaagttttattggaacaa

SEQ ID NO: 261394 - DNA, 742 bp, Homo sapiens
cttctcaatggcctctcattagaggcagacatcactgccaagttagacagccccagggtgacagtggcccagctggactgggacgtcgcgacggtccatcagctctctgccttccagccagatgttgtcattgcagcaggtaatgcccagccccgggcaccctgtgcaggtggtgtccttgcagctctacccagctcttggctctgggaaaagggaacaatggacgctgtcgggcatggacatgatggggcttccagaagagttactctgggcctccagggtgacatcacaggacaggggtgcctcttaaggtgaccttcaacccacagccctctttttggagacaggcatactcccgttccagtcgttaccacatggctctgtcccagagccatgccctgtgtccttcagagaccacaggaggaaaacaaccacttctgggacgaagacagggcccttgagagaaggtggtgtttggctgggccaccgaaaacccctcacccctgccagcacactcagtcccctctctggtggaacagagctctgcctgtggtcctaggtcccagccctgaaacccacaggtccagcggtggccagggacacaagcccacccctgcaagccagcagacaaatcagcagatgcctgaaacatgaagttcatggcagggtcaggctttgtgtcattcaaagccctctagataggccaagaaccagagctggttttttaaggaacaccagtgag

SEQ ID NO: 261395 - DNA, 998 bp, Homo sapiens
  misc_feature (882)..(883): n is a, c, g, or t
  misc_feature (888)..(888): n is a, c, g, or t
gccgggcttccgcccggtctgccggcaacgctgcggccccgcccacgtcatggcgcccgaggagaacgcggggaccgaactcttgctgcagagtttcgagcgccgcttcctggcggcacgcacactgcgctccttcccctggcagagcttagaagcaaagttaagagactcatcagattctgagctgctgcgggatattttgcacaagactgtgaagcatcctgtgtgtgtgaagcacccgccgtccgtcaaatatgcccggtgctttctctcagaactcatcaaaaagcacgaggctgtccacacagagcctttggacgagctgtatgaagcgctggcggagaccctgatggccaaggagtccacccagggccaccggagctatttgctgccctcgggaggctcggtcacactctccgagagcacggccatcatctcctacggtaccacaggcctggtcacatgggacgccgccctctaccttgcagaatgggccatcgagaacccggcagtcttcactaacaggtgacctcggggcgcagggcagggcaccgaggcaggcttaccctggtgcagtcgcagacacggtcccctttcctcccgccaggactgtcctagagcttggcagtggtgctggcctcacaggcctggccatctgcaagatgtgccgcccccgggcatacatcttcagcgactgtcacagccgggtccttgagcagctccgagggaatgtccttctcaatggcctctcattagaggcagacatcactgccaagttagacagccccagggtgacagtggcccagctggactgggacgtcgcgacggtccatcagctctctgccttccagccagatgttgtcattgcagcagatgtgctgnnattgncccaaaagcatcatgtcgcggacagggaaccggggagaggggagagcctggcgggaggcaccaaggggacactgaaggataacgcgggcatatacggacggaaccccaaa

SEQ ID NO: 261396 - DNA, 2424 bp, Homo sapiens
cggctgtcggtcgccgtttggattcgtcacccaggcgtcgcgaggagaacgcggggaccgaactcttgctgcagagtttcgagcgccgcttcctggcggcacgcacactgcgctccttcccctggcaggcagtaatcgttctggtcactgggacacagctgccctcgcccattctaaaaagtcagcgccgtcaggaccgcagagcttagaagcaaagttaagagactcatcagattctgagctgctgcgggatattttgcacaagactgtgaagcatcctgtgtgtgtgaagcacccgccgtccgtcaaatatgcccggtgctttctctcagaactcatcaaaaagcacgaggctgtccacacagagcctttggacgagctgtatgaagcgctggcggagaccctgatggccaaggagtccacccagggccaccggagctatttgctgccctcgggaggctcggtcacactctccgagagcacggccatcatctcctacggtaccacaggcctggtcacatgggacgccgccctctaccttgcagaatgggccatcgagaacccggcagtcttcactaacaggactgtcctagagcttggcagtggtgctggcctcacaggcctggccatctgcaagatgtgccgcccccgggcatacatcttcagcgactgtcacagccgggtccttgagcagctccgagggaatgtccttctcaatggcctctcattagaggcagacatcactgccaagttagacagccccagggtgacagtggcccagctggactgggacgtcgcgacggtccatcagctctctgccttccagccagatgttgtcattgcagcagatgtgctgtattgcccagaagccatcatgtcgctggtcggcgtcctgcggaggctggctgcctgccgggagcaccagcgggctcctgaggtctacgtggcctttaccgtccgcaacccagagacgtgccagctgttcaccaccgagctaggccgggccgggatcagatgggaagtggaacctcgtcatgagcagaaactgtttccctacgaagagcacttggagatggcaatgctgaatctcaccctgtaggactcacacacgactccaacgggattgtgagaatcaagtcactctcatgggaagaatttttatatgggaaagcggataaaactttcattggactggaatgtttggagaatgttaatttccaaatcaggaaccacaaactgccctctaataagacatcggctatctaagcgtgtgggtgccccctttctgccagcagttctggttcttaagaaaatcaccataaatcagacatgaaaattctggctccaaaaatagcattttctttgtgcaaataaaaacgtgtgtatcaagtatgatgttcccccaacgtggacacactcagttcctcacaaagccaagcccactgcagctgccacatccctgggcttacggtgcagcaggtgcttttttcaagacaggaatcaaaatgttaggaacacggcagaaaggggacacctggagaccaaacgcaggatgaggagttctgcagaggtcacagggaagtcacagaacagtaatacgctagcaggggcatggggcgtgaagaacagaagaagagaggaagcgtttccaagcctccagagaagaaatcaaggccaaccaaagcttcccgggtcacagaaccaattcttttaccaggcagtaccactgctgtcatttcagcttctggccactgggaggtgctgctcgaaagggtttgccctgagactccaagaagaagctgcgggaaggacagcaggggtcctggggttttagcctctggcccaggagttatgtgtccataaccaaagggagcacagtctgcacccagctctcatcccatcggagctgctgcgactcccgcaggttcttccggaactggtttagcttgcccgcaggatcaggaaagtttgagaaaagcatctgcaaaaaaataaagagcagagcttacctcattgcctgtccccaccccatcccaggtcaccacctggctgaccccaggtccccgacccaacaacaacccctcccaagtccctaactccctcacttggactcgagacccttcacaccccagcagcactccgcctccaacttgacatcacagtttctggaaacttccccgcatgtcccactttcccacacttggtgccctggagcacctcccggcctctacgtgctgcccattcccctgtgagcaccctcctctcgcctctggccaacgcagtcccacccatctgtgggtaacaagggggtgtcggtgttctttgcagccttgctaaactgtctgaatcaaggatcacaaactacagctgcaggccaaatccagcccacagcctgtgtttgtaaataaagttttattggaacaa

SEQ ID NO: 261397 - DNA, 2265 bp, Homo sapiens
gccgggcttccgcccggtctgccggcaacgctgcggccccgcccacgtcatggcgcccgaggagaacgcggggaccgaactcttgctgcagagtttcgagcgccgcttcctggcggcacgcacactgcgctccttcccctggcagagcttagaagcaaagttaagagactcatcagattctgagctgctgcgggatattttgcacaagactgtgaagcatcctgtgtgtgtgaagcacccgccgtccgtcaaatatgcccggtgctttctctcagaactcatcaaaaagccctcgggaggctcggtcacactctccgagagcacggccatcatctcctacggtaccacaggcctggtcacatgggacgccgccctctaccttgcagaatgggccatcgagaacccggcagtcttcactaacaggactgtcctagagcttggcagtggtgctggcctcacaggcctggccatctgcaagatgtgccgcccccgggcatacatcttcagcgactgtcacagccgggtccttgagcagctccgagggaatgtccttctcaatggcctctcattagaggcagacatcactgccaagttagacagccccagggtgacagtggcccagctggactgggacgtcgcgacggtccatcagctctctgccttccagccagatgttgtcattgcagcagatgtgctgtattgcccagaagccatcatgtcgctggtcggcgtcctgcggaggctggctgcctgccgggagcaccagcgggctcctgaggtctacgtggcctttaccgtccgcaacccagagacgtgccagctgttcaccaccgagctaggccgggccgggatcagatgggaagtggaacctcgtcatgagcagaaactgtttccctacgaagagcacttggagatggcaatgctgaatctcaccctgtaggactcacacacgactccaacgggattgtgagaatcaagtcactctcatgggaagaatttttatatgggaaagcggataaaactttcattggactggaatgtttggagaatgttaatttccaaatcaggaaccacaaactgccctctaataagacatcggctatctaagcgtgtgggtgccccctttctgccagcagttctggttcttaagaaaatcaccataaatcagacatgaaaattctggctccaaaaatagcattttctttgtgcaaataaaaacgtgtgtatcaagtatgatgttcccccaacgtggacacactcagttcctcacaaagccaagcccactgcagctgccacatccctgggcttacggtgcagcaggtgcttttttcaagacaggaatcaaaatgttaggaacacggcagaaaggggacacctggagaccaaacgcaggatgaggagttctgcagaggtcacagggaagtcacagaacagtaatacgctagcaggggcatggggcgtgaagaacagaagaagagaggaagcgtttccaagcctccagagaagaaatcaaggccaaccaaagcttcccgggtcacagaaccaattcttttaccaggcagtaccactgctgtcatttcagcttctggccactgggaggtgctgctcgaaagggtttgccctgagactccaagaagaagctgcgggaaggacagcaggggtcctggggttttagcctctggcccaggagttatgtgtccataaccaaagggagcacagtctgcacccagctctcatcccatcggagctgctgcgactcccgcaggttcttccggaactggtttagcttgcccgcaggatcaggaaagtttgagaaaagcatctgcaaaaaaataaagagcagagcttacctcattgcctgtccccaccccatcccaggtcaccacctggctgaccccaggtccccgacccaacaacaacccctcccaagtccctaactccctcacttggactcgagacccttcacaccccagcagcactccgcctccaacttgacatcacagtttctggaaacttccccgcatgtcccactttcccacacttggtgccctggagcacctcccggcctctacgtgctgcccattcccctgtgagcaccctcctctcgcctctggccaacgcagtcccacccatctgtgggtaacaagggggtgtcggtgttctttgcagccttgctaaactgtctgaatcaaggatcacaaactacagctgcaggccaaatccagcccacagcctgtgtttgtaaataaagttttattggaacaa

SEQ ID NO: 261398 - DNA, 2322 bp, Homo sapiens
cggctgtcggtcgccgtttggattcgtcacccaggcgtcgcgaggagaacgcggggaccgaactcttgctgcagagtttcgagcgccgcttcctggcggcacgcacactgcgctccttcccctggcaggcagtaatcgttctggtcactgggacacagctgccctcgcccattctaaaaagtcagcgccgtcaggaccgcagagcttagaagcaaagttaagagactcatcagattctgagctgctgcgggatattttgcacaagactgtgaagcatcctgtgtgtgtgaagcacccgccgtccgtcaaatatgcccggtgctttctctcagaactcatcaaaaagccctcgggaggctcggtcacactctccgagagcacggccatcatctcctacggtaccacaggcctggtcacatgggacgccgccctctaccttgcagaatgggccatcgagaacccggcagtcttcactaacaggactgtcctagagcttggcagtggtgctggcctcacaggcctggccatctgcaagatgtgccgcccccgggcatacatcttcagcgactgtcacagccgggtccttgagcagctccgagggaatgtccttctcaatggcctctcattagaggcagacatcactgccaagttagacagccccagggtgacagtggcccagctggactgggacgtcgcgacggtccatcagctctctgccttccagccagatgttgtcattgcagcagatgtgctgtattgcccagaagccatcatgtcgctggtcggcgtcctgcggaggctggctgcctgccgggagcaccagcgggctcctgaggtctacgtggcctttaccgtccgcaacccagagacgtgccagctgttcaccaccgagctaggccgggccgggatcagatgggaagtggaacctcgtcatgagcagaaactgtttccctacgaagagcacttggagatggcaatgctgaatctcaccctgtaggactcacacacgactccaacgggattgtgagaatcaagtcactctcatgggaagaatttttatatgggaaagcggataaaactttcattggactggaatgtttggagaatgttaatttccaaatcaggaaccacaaactgccctctaataagacatcggctatctaagcgtgtgggtgccccctttctgccagcagttctggttcttaagaaaatcaccataaatcagacatgaaaattctggctccaaaaatagcattttctttgtgcaaataaaaacgtgtgtatcaagtatgatgttcccccaacgtggacacactcagttcctcacaaagccaagcccactgcagctgccacatccctgggcttacggtgcagcaggtgcttttttcaagacaggaatcaaaatgttaggaacacggcagaaaggggacacctggagaccaaacgcaggatgaggagttctgcagaggtcacagggaagtcacagaacagtaatacgctagcaggggcatggggcgtgaagaacagaagaagagaggaagcgtttccaagcctccagagaagaaatcaaggccaaccaaagcttcccgggtcacagaaccaattcttttaccaggcagtaccactgctgtcatttcagcttctggccactgggaggtgctgctcgaaagggtttgccctgagactccaagaagaagctgcgggaaggacagcaggggtcctggggttttagcctctggcccaggagttatgtgtccataaccaaagggagcacagtctgcacccagctctcatcccatcggagctgctgcgactcccgcaggttcttccggaactggtttagcttgcccgcaggatcaggaaagtttgagaaaagcatctgcaaaaaaataaagagcagagcttacctcattgcctgtccccaccccatcccaggtcaccacctggctgaccccaggtccccgacccaacaacaacccctcccaagtccctaactccctcacttggactcgagacccttcacaccccagcagcactccgcctccaacttgacatcacagtttctggaaacttccccgcatgtcccactttcccacacttggtgccctggagcacctcccggcctctacgtgctgcccattcccctgtgagcaccctcctctcgcctctggccaacgcagtcccacccatctgtgggtaacaagggggtgtcggtgttctttgcagccttgctaaactgtctgaatcaaggatcacaaactacagctgcaggccaaatccagcccacagcctgtgtttgtaaataaagttttattggaacaa

SEQ ID NO: 261399 - DNA, 2346 bp, Homo sapiens
cggctgtcggtcgccgtttggattcgtcacccaggcgtcgcgaggagaacgcggggaccgaactcttgctgcagagtttcgagcgccgcttcctggcggcacgcacactgcgctccttcccctggcaggtgggcggcggggcgagcggagaggcccgcggggctcgcgggagtccaggggcagacgggacgggtctccgtgctgaagcccctggcgctcccgccacgtgagttcctgggctcccgccggtcagggccgcgcgacccggtccccgtccctggggcctggccagagtcgctcgcacccctcctgccccgcgagctggcgggggaagctgggggcgtctccacagccttggggggcagacgcgcgctcggtgtggggtacagttcacgatcattttcacgactttttaaaggcagtaatcgttctggtcactgggacacagctgccctcgcccattctaaaaagtcagcgccgtcaggaccgcagagcttagaagcaaagttaagagactcatcagattctgagctgctgcgggatattttgcacaagactgtgaagcatcctgtgtgtgtgaagcacccgccgtccgtcaaatatgcccggtgctttctctcagaactcatcaaaaagccctcgggaggctcggtcacactctccgagagcacggccatcatctcctacggtaccacaggcctggtcacatgggacgccgccctctaccttgcagaatgggccatcgagaacccggcagtcttcactaacagatgtgctgtattgcccagaagccatcatgtcgctggtcggcgtcctgcggaggctggctgcctgccgggagcaccagcgggctcctgaggtctacgtggcctttaccgtccgcaacccagagacgtgccagctgttcaccaccgagctaggccgggccgggatcagatgggaagtggaacctcgtcatgagcagaaactgtttccctacgaagagcacttggagatggcaatgctgaatctcaccctgtaggactcacacacgactccaacgggattgtgagaatcaagtcactctcatgggaagaatttttatatgggaaagcggataaaactttcattggactggaatgtttggagaatgttaatttccaaatcaggaaccacaaactgccctctaataagacatcggctatctaagcgtgtgggtgccccctttctgccagcagttctggttcttaagaaaatcaccataaatcagacatgaaaattctggctccaaaaatagcattttctttgtgcaaataaaaacgtgtgtatcaagtatgatgttcccccaacgtggacacactcagttcctcacaaagccaagcccactgcagctgccacatccctgggcttacggtgcagcaggtgcttttttcaagacaggaatcaaaatgttaggaacacggcagaaaggggacacctggagaccaaacgcaggatgaggagttctgcagaggtcacagggaagtcacagaacagtaatacgctagcaggggcatggggcgtgaagaacagaagaagagaggaagcgtttccaagcctccagagaagaaatcaaggccaaccaaagcttcccgggtcacagaaccaattcttttaccaggcagtaccactgctgtcatttcagcttctggccactgggaggtgctgctcgaaagggtttgccctgagactccaagaagaagctgcgggaaggacagcaggggtcctggggttttagcctctggcccaggagttatgtgtccataaccaaagggagcacagtctgcacccagctctcatcccatcggagctgctgcgactcccgcaggttcttccggaactggtttagcttgcccgcaggatcaggaaagtttgagaaaagcatctgcaaaaaaataaagagcagagcttacctcattgcctgtccccaccccatcccaggtcaccacctggctgaccccaggtccccgacccaacaacaacccctcccaagtccctaactccctcacttggactcgagacccttcacaccccagcagcactccgcctccaacttgacatcacagtttctggaaacttccccgcatgtcccactttcccacacttggtgccctggagcacctcccggcctctacgtgctgcccattcccctgtgagcaccctcctctcgcctctggccaacgcagtcccacccatctgtgggtaacaagggggtgtcggtgttctttgcagccttgctaaactgtctgaatcaaggatcacaaactacagctgcaggccaaatccagcccacagcctgtgtttgtaaataaagttttattggaacaa

SEQ ID NO: 261400 - DNA, 515 bp, Homo sapiens
tccacattggcagtttccaccaactggagatggaaaatagatttaaaaaaaaaagaaatggttgcatctctactgagaatgttcgtatttttttcttgtcattattccccaaacaataaagtataacaactattaacatagcatttacattgtctaggtattaaaagtagcttagagatgacttaaggtatacagcagagtgtatataggttatatttaaatactgagtgccagtttatatcagggacttgaacatccatggattttggtattttgtaggggagtgttctagaaccagtaccccacagataccaagggatgacagtactagtgaaaacaaacaacatcaaattttttgaatctaagatactattgattgggagataagtcagtatcttaatttattatattttatattttacatatttaaaagtatattttcatatattttctgctactgccagaaaagaatatgccatttcacttggagaaaatggtgttaaatacaaaatcaa

SEQ ID NO: 261401 - DNA, 232 bp, Homo sapiens
tgttggtattttttcaatttgaggaaatgataaaatcaccatgctattgtttcattttctttgttctaaaactttcagaatgtattaagtgcttgttgatcatatttttatttattcttcaacctggattatattttttgcctaattttaatcttccattttacagatttcaattgagcttattttttaaaacaggttgattaaagtataattaactttcagtaagctgcac

SEQ ID NO: 261402 - DNA, 262 bp, Homo sapiens
accagtttatgaccccattttactaacaagcaaactgaggctcatagaggacaatgatttaacgagggtcatacagctgttaatgggtagagaattaaaacccaagtttttctgcttctgggtcaatgttctcttcaatataccactctgccttcttaatttctagattaagaataagggctgctcaaaagtttgaggctgcagtgacctatgatcgtgccactgcacttcagcctggagagcagagcaagaccctgtcttt

SEQ ID NO: 261403 - DNA, 567 bp, Homo sapiens
acgctggtaaggtgaatgatgagaactattatcttgctaagtcaaacaagaagacttccctcatcagaacttttaagacaaaattattttacacaaaaatcacctgaacaatcacctaaatttccaattttcataaggcagtgccacctcttaggttagtatgatacagaagtcagcaactgcccattgttcctgagacaagtcaaggagcaatacacaattaaatttcaatgtatattactccaccttataccttaaccgttccaggaatgaatgataagactacaataagaatgctgtgtgggactgttatttgctttaaaaaaaatagcagaggaggggaatcataacaatcatgattcactcagacttaaatgaagaatatggtaccaaaattatacagaacagagaagatacgaaacactcattttaacatcaatatattgggctaagggttcagaaaaatgaagcagtgtatatgtactaacatgtttaaaacacacacatacatttcttgagttaaagaaaattcaaaaatttactgagagccaagtagaacatgaatgt

SEQ ID NO: 261404 - DNA, 564 bp, Homo sapiens
ggacccatttattgatatgaggtggagatctatctgggcccctcagccagcttgggactaggtatcttcatctgcaagtcactcaagagtcatccccctccttaccaggctgcttccaatcacagctgcctgcgccccacctccagagactgattcaatggatctgaggtgctctctgggaatgtgtttgtttgtttgtttatttatttatttttgagacagagtctcactctgtcacccaggctggagtgcaggtgtgagccaccatgcccagccgtgttagtataattttcatggcactttatttccttattctcaccccattccatacaatgattcaactgattgaacctctgcagagacaactgtgggttctgcttctccttttccagtcaggcagtgctgctggcattgcccagtagctgctatcctcttcccacaccaccactgcccccaccagccagtgatctccctaaaactcagagctaatctcatcttccacttgcgggtctttcccagctctcctccttagatgacattgagaattctcacctttcacttggc

SEQ ID NO: 261405 - DNA, 409 bp, Homo sapiens
ttagtttgtgttgtgtcacctgtgagcctccttgtctggcctttgtctttattaaaatgcttggatataatacaagttttgaaaaagacttgtttttagtaagtagcatgtctttaagaagtcaccccccttctcatcccagtgcttagtctgtactatcaaaacaagatgagagaatctgccgggcacagtggctcactcctgtaatcccagcactttgggaggccaaggcaggaggatcacctgaggtcaggagttcaagaccagcctggccaacttggtaaaacgttgtctctactaaaaatacaaaaattagctaggtatggtggcacacgcctataatcccagctactcaggaggctgaggcaggagaattgcttgaacctgggaggtggaggttgcagtgagc

SEQ ID NO: 261406 - DNA, 391 bp, Homo sapiens
caaccgcagggaactgatccaaccagcaggtggcagaatcaggattcaaacctaggcacgtctgttccaaagcctgggctctgaaccacagccactccaggccccctcccagcccagcaggcttgggctcgtttctttgctgagtctctgttacctcctctttattttaattttaatttttttattttaattttttgaggcaggctcttgctcttggggttctggaggcgggaattctgaaatcaaggtgtcataggctgtgttccacctgaaagctcagaggggcctcctcgcctctccaagcttctgggtggttcaaggtgtcccttggctttggagcaacttggatggaggccggggtcattattctaagtgaagcaactcaggagtg

SEQ ID NO: 261407 - DNA, 234 bp, Homo sapiens
gttattacaacattcttgaaattacaccaaataactcctcctctaaacagagaaatacccatgttgggtggcacatttggatggctgggggtaggagcgtggtactgtctgatatactctcagccagtcagattgggtaacatgtggatggagaagacagcatggccagtccagggctagacactggggtagagaacgaaggagacagggagcagaggacatctagcccctcag

SEQ ID NO: 261408 - DNA, 124 bp, Homo sapiens
tccctttgggaagaccaggtggtggactgggaagagggagacggtccttcctagagacgcagagtgacaggagccgagccaggtgcagaagacagggaggtggattcacaggcaatgacagatc

SEQ ID NO: 261409 - DNA, 425 bp, Homo sapiens
ctgaatgaactacaagatctcttctgtatccattacattaaaagcactgtgctagagccactatgtggagaaattaaagtatgagtactatgctttaaaaaattacaatctaataggacatgtccacgaaaaggtaaataataggtcgggcaccgtgcctcacgcctgtaatcccagcactttgggaggctgaggaggatggatcacgaaagtcagcaattcaagaccagcctgttcaagatggtgaaaccttgtctctactgaaaatacaaaaattagcggtcgtggtggcgggagcccgtaatccagcttcttggaaggctgagacagagaattgcttgaaccgaagaggcggaggttgcggtgagccgagatcgcgccgctgcctccagcctgggcgacagagtgagattctctcaggaaaa

SEQ ID NO: 261410 - DNA, 400 bp, Homo sapiens
ttgactggagagagcattttggggtttttgttggttgaaagaggaggacaaaataggagccaggctagggctgccaaggagtagctgaatgtagaactaactggaggagtgaagagaggcaggagaaagagaaagtcttttttagatgttaaaaactctggtggacaaacctattttttctgaggcaggaatattgtttgattccaggagttcaagaccagcgtgggcaacatatcaagaccacccatctctactaaaaaaaaaaaaaaaaaaaaaaatagccaggcgtgcctgggcatgactgtagactcagctgtaagggaggctgaaatgggaggattgcttgatcccaggagttcaaggccagactgggcaacatagtaagaacctgcctctatta

SEQ ID NO: 261411 - DNA, 1037 bp, Homo sapiens
gtaacaggcaattaggattcataagcatcgcatggctgagacatgatttaaggtcttagatggaaagagttctgttattaagataacagaatttaaatgctgtatctgtctaggtcttatgcatgtcagaagtgagaaaactactccttcattttccatttttatgagctctgatgtaacacagtttttttttttttctgtgttgaaaatgatgaatatagttcttggcacatttgttccatagtaaagaagaatttaacttgcaagtgaaaaacctctgcctttggccatggattaaaaagatgttatatgatgaagtttacttcctaaggaaaggttagttttgtgtggcactttctgaaaatttgtttgggacatatacaattcttttgtataaattctggaggtctgaggaaaattacttaatcacattagatgagaacatttctttttgtgtgaattgagttcttatcaaggttctgatgttttttctcatgtatttgcccttgggttcatctcaatacaatgcatttgtgtactattgaataaaaagcaggctgcaacagtatttatgacatatgatcctatatacacgtaaaatcttgtgtgtgtgtttgtgtgtgcacatgcatataaaaaaaactacattgttaaagttgttaatagttaactcccggtggtgggttttaagtgattattattttctttgtataagaaaaatagtgcacagttttcttttgttgttacgaaaggtgtcatacatttgaaagaggacatatgcacagtttaaataataataacatagtgaatacccactgcttggctgaaaaaaataatttattactctgttgcagaaggcaagccttccttctgcccctgcctctgtcatggaggtagctacttgcttgaattttgtgctaatcatgtctttgctttcttatatagtttagccagctgtgaatgtctccataaaacatacacagttttattttgattgtttttgaactttaaataaatgaaatcatactggataaaaa

SEQ ID NO: 261412 - DNA, 911 bp, Homo sapiens
tgagaagagaattcaatatcaggggcctgtttctagacagcactcttccagctcacacgccctccccttctcattgagaccatggcggggtgggggcatgaaggactggcaggggtgaggagaacacaggttggccaggtgcccttcacaccaaccccaagtgccccaggggtcatgcagacctgtccagcttgtgctgctgaccagcagagctggccgctcgtggagacgtgtcaccagcctactcccagcatcccgctctgtgaaggccaaccgctctgtggctgggtcctcaggttctgagatgaaggagcagaaaaaaaccctgtgagaggccacagagcaggcccaggacccagaacgggcatctcttgccatggcgaggcctgcagactcccaacggttggggtggccagccacatcagcagcaccaggccatccctgccatccggggcctgggcttgctttctctaatattgttgctgggtgctaaggttacaacagcaaacaagactgactcattccttttctccatgggacttactgtcttatcatcccctggactcaagatgagcatgctaggacgccctcccacaccaccccagcttacccaggtgcccacctcagggtgtgtggacctgcagaaaggtcccctccttagccccgtgagacaccccaggggacacacaggtccacagatcctgccgcaggcctgggaacccactggcaggagagtaagacagtgcaggggtccacaaacatttcctaaaaggccagagagtaaatacttcaggctttgcgggccacaggttctctgttgcaaaacgcaattctgctattgtagctcaaaggcggctgtagacaactcagaaggcaatgagtgtgttgtgtcccaataaaacttgatttac

SEQ ID NO: 261413 - DNA, 435 bp, Homo sapiens
tgggaggtaaggcagagctactggggagcctggaaggctgagatatgtctcccatacgcaagaccattccagaagccccttggagctctggctgctggccacaggggaaggtagaccttcccggaccctcaggggtctccccgccctaccccaccagcctgggttcggtacctcggggctcagatgtgcagtcagctgttaatgtggcaaaatttggggaagtcctctgcagccgcaaaatccagttcccaccaggcacagggacccacatcagccctctggccacagaaggcgctgatgatttgaggtggactcagccaccactccgagcctctgcctccctctaaaagtggggcatggcacattcctgtgtcaggcaaccaggcactgagcctggcccacctgcaggggtcggggggagcagcttgtccctgt

SEQ ID NO: 261414 - DNA, 369 bp, Homo sapiens
aaagcaaccgggagggtaagagaagggaaccccaggaacaccctttttcttaggggagcagaaacctacccctcccgattggaagtgccctatacaggtccttaggtgttgatatcacatgaagtcttgttgaaaacgaagatggaacaaaatgcagcttagtattttgaagaaaattggcttatgttttgcacttgcagttaaaaacaacaaccttaggcttgtgcttgcccctttcctccctcacctacctctcctaggttaaaacaaagctggaagcaaatcagttgtatataaaattatgaattgctatgggaactattgaaatgtagcccaatttaatagcatgtatcaagtttacttgtgtgg

SEQ ID NO: 261415 - DNA, 393 bp, Homo sapiens
tgactccagctgtccacctcgcacccagaagcaactccgaatttcctcacaggacttcaaagcctggcttgtatctaaacattcgttggccatgtaaatcagaggcacaaaaggagaatgctcctatttcatggtgctaggctagcttaagtctggctttgtgcagcacgtgccggtggggagtgccagcaacggaaggactctgttctgactcgtgtgacaaatgtagttaacaccggatccatattaatgttgtcaagttccctcgatgtatttaaacagattttaattattttcagcgtccacaggcctgaaatatatagcctaatagttcttcaaagaaagcttacttaatgtgtgaatgtaaaacctctcataaaaatgaaactttta

SEQ ID NO: 261416 - DNA, 738 bp, Homo sapiens
cttgctgctgcttttactagagatggctggaccagttgatgagaaacacccgaattttcacagaatgttaaatgtgccacataccaaagagtttctatttttttttaaatcattctgttatatccaccaagattcacctagattcgagattatttcatttgagaacgtgagattatagaagtaattgggcacatcgttactgttgggatggacggtggactttttggctcttagcaacactgaaagggaagacgtgcctagattggtttgggtaaccatattcagactggcacaggaaggcgagtcaagacaatagcactagaaggcttaggggaaagaaagccagcctcttcctcctcaggaactggtcaccaggtaagcctctttgcatcctcaactgagttctcatgttttaattgggttcgtgatatagaatctagaaaaattgtgtatgttctgagatcctgaggaagacaagaccaccacaaaattccacctcttaaacacacccttgcttaattcagtcctaaacaaattagctgtcactgacctcaagccagttaggcctctctctagttgggaaaactgctgtttgcaaaagcccagtaaaacacagttaatacatgaacaaatattaccaacacttgcaagccgattgcggtcatgagtgtcttaagagcgccatcgtgtacggtgggggtcagccaaggtgggaagaagggtatcattttgaagccc

SEQ ID NO: 261417 - DNA, 659 bp, Homo sapiens
caggctgattacttccttgtaaatacaccagaaggtgaaactagtttctgtgatcactatatcacaatagatttttatagagtactgtaaattaaaatccctaaggaatgtttatgagtggatacattccatatttcccccattttgtaaatatgtagttggtattttggattcattggtaggacctcatatctgcactaaatttaatttaaagaattcattccagcctttgagatacctatcatctcttggatcctgatttattatttcttctgttttttcccctaaaattctcatatgattttgatagaagtacattctgtatatatccatccaatatattaatttaaaaataatgtcaatggtacagggcagagatctgaaatgttttacgggaagacttatgcacccttctaggtaagagaccacacttaattattttattactctagcctcaagctcagtacttggctggccggagctgctcaagaaatatttgctgcattgaaagagctgttgaacatgcttaagctgtcttcatctaaccactctctagtaccaaacccatcagctgggctaccatccaatctgcattcctgcatgttaaagacaagatataatgagaaactttgccaaatgccttggtgaaatgtgtgtgt

SEQ ID NO: 261418 - DNA, 307 bp, Homo sapiens
tgtttgctgtgtggatcaaaaacccttaacctatggttgccagaccaggtaccttcttttctattctgcctgctccggatgcactttcaaccttagcaatcctcttttggtaaggcaaaatgctgcacttgatgaaaatgtttagaccgataaactttatgctttataatttagggcttgtgtaaatgcttggggcttttgagttgtattttatttaaagattttcatatttctgctcaactgttaaattgtgacaattttttctgaactgatttgatctataataaagcttcaatttgtattctaa

SEQ ID NO: 261419 - DNA, 338 bp, Homo sapiens
ggagagaagctaacggtgctcatcgtgtggcacgcaggtgcgttgttttctctccactaaggctgctgggtggggccaaaatagtccaggcagccaagtgcagaggcgttgggggcggcaaagatgcaaaggatccccactgtggctgcaccccgaggaggagtccgtggcaggaggcccacacccaggacccggcgccaacagtgaggagacgaacctggaagacatcccgctgtccagacaccgcgagggaggcgagtggtgctcgcagcctgggacttaggaacacagggaaacagcttccacatgtccatttgctgaataaatatttcttgcag

SEQ ID NO: 261420 - DNA, 249 bp, Homo sapiens
gagagatagagagagagagagagagagagagatagagagagagagagagagagagagagagagagagagagagagagagagagagagagagcttagtctttcaattacaataagctattggaataaccataaatgtaatatatatatgaaagtcgtgactgcatactataagatagcaacacatgtgctttgtactaagcactttcatatatctcacttcatcctcaactctgattgaaacttatccaa

SEQ ID NO: 261421 - DNA, 530 bp, Homo sapiens
gcccagagccagcacaaccagagcctcgagtgccacgccttcctctgcaccaagcggaagatgagatcctgactaatacgccaaggcccagggctgcatgcccaggactcaggaagagtctcgaagaatcctctgcacacaagaacactgctatccgccgaagctgatgtcagctattccctgcagactggcctggtccagcagagccagctctgctaaactaccacaggcaggaagaaaatgagccaccaggggcctccacacttgtctctcataaaagatatatgctccacaaggacaggggttgagtctgtcttgttccctgctcaataattgtgtgctatggataagtaaatgaatggatcaagagataaggatggaagagcaatttacaaacccaaagcattgtgcaaggcagggcataattgggtaggaatgcttcttctagaagttattccttaggaaaggccaaacaaaaagtctattaatagacccgattaataaacatcagccaaggtaaatgttaacag

SEQ ID NO: 261422 - DNA, 707 bp, Homo sapiens
ttacagtagctgaatataactggccagtgcagaagagcctatgaaggtggaaaatggaggaaggaggaccccatgctggagaagtgatggagatttgaagccttggaagatggcggcaagggagatgccagagatgagacaatgttaaacatctgtaatctaacagtcttctatgggagtttattacatttccatatcctatgttcacttctagtgaaaaataaaaataaaatcttaagccccccacagctgactaaatggatcccattgtgaaaggaaaatatcttgagcctccaaaatcactaaggaaaattcaagctggaaacttcttaggacaaacctgcctcccattctcttcaaagttattcctctgctcgaggagctagatgcatatctgattgccgcctttggaaaggctaaccagaaactcaaaagaatgatacagtttgttatcacctacctgtgacctggaagctccctccctccccacttgagtcttcctgcttttgtttcaagctgtcctgcctttccagaccaaaccaatgtacttcttacgtatattgattgatgtctcactcatgtctccctaaatcgtataaaaccaagctgtgccccaactaccctgggcatgtgtcatcaggatttcatgaagctgtgtcacgggcgcattccccaaccttgaaaaaataaactttctaaattaactg

SEQ ID NO: 261423 - DNA, 200 bp, Homo sapiens
tggaggggaaggaattgagtacttttcatagaattttttcaagaaaaaccaattccatcaaattggctttagcaaattcacaagatgctaaccctcacgctctcagatctgagaatgccattattcgagttgctttccatgagatcttcctcttgcagaattctcacttccttcctaaaatgtccctctttccaaaaact

SEQ ID NO: 261424 - DNA, 545 bp, Homo sapiens
tcaccgtgttagccaggacggtcttgatctcctgacctcgtgatccgcccgccttggcctcccaaggtgctgggatcacaggcgtgagccaccacgcccagccaaaaagttgttttaaaattttttcgagagataggatctcgcttagttgcccaggctggtcttgaactcctgggctcaagcaatcttcccactttggacccccacagtgctgggattacaggggtaagccaccacacccaacctcaatcttcttgtgatctgttatgttgacaaccaagacagctacttagtggttggttgatgggtggacagtgtatacagcatggacacactggacagaggcatgactcaatgttccagtattttcagatttcaggtgactgctgtaacttgaagcaagaaaagtgaaactacagaaaagggaggaccactggacggctgctttcattctacgcccactttttagagtgcattcctacaataagcaccctaataatgtaaaccaggggccaagggatgcaccttccactctacttccttcc

SEQ ID NO: 261425 - DNA, 1613 bp, Homo sapiens
cggcgccggaagcacgggtccgggccctcccgcggggcgggtactcgtctcccggccgagcgacttcagctcggggacctgccccatggccgctccccagcaggacagggtaaccgccgaggtggggggcttcttgtccgtcccagcccccccaactcaggccctctcgctgcccctggcgaccaccgcgtgcgcccttccccagggcgggcgcagtcctggacgcctccgccgagcgtgactgcgtgcattttctctcctttcccttcccaacctgcggagagaagacagccccagagccgctgtctccatcctctgctgatgcctgctgtctttatgttggcctcgtcgtccgcactgcagtgtggcaggggcgtccctcgtttcccgcggactgaggtgggcgccgggcattcagtaaacgaagaaaccaaagcggagaaggttgggaatcaaacgtctgtcatacctgccaccagcagacaagcggctttgggtacctcctggacccaaagacgaactcagcccctccaggagcgcagtcattggcaccctcgtgggaacaatgccagtgggatgggtggccaccggatgtttccggggcccctcagaggcccagcagcgcaggtcttggagaatgaatgtgggtcactgggccgcgctgcagagggccggtcctgagtcgcttcctggaggagaggcccatggccagcacttggcttcgcctggaggaagaagcacgtgctaaaccacgagcgttcagggtttgtctgtttgataaaagatgctggctttgacacaccaactgacaaagtctttcataggttggagctgctaggttgtgcccctgcccctcctgaaaattagccacacgaaaggaagggtctggaaggtggcagggaagccagcagagaccagggaagtggcagcagcatggggcaggggcacacaggaaggagatggagcttgcgggagcccccactgccactccgacagggagccctgccccgtgccctgctgatgttgacactgaccccggctctattatttcagtttttccttgtaatttctgaaaatctagcaacaagttgagcaatgaaaaaaagtaaaaaagttaaaattgtgttagaaattatgactgtaaagaaattttgaaactaatgaagaaaaaattgccaaaattgccaaagcttttaggactcttaaaaatatagtaacattgagtattatgaactaaagactcatactattatatcagtgtctggtagtgaatttggatggaggactgtctagtaacttcttaacaaaacattgattagaagtctttcttggcggggcgccgtggctcacgcctgtaatcccagcactttgggaggcgaggcaggtagatcatgaggtcaggagatcgagaccgtcctggctaacatggtgaaaccccgtctctactaaaaaaatacaaaaaaactaggcaggtgtggtggtgggcccctggagtcccagctactcgggaggctgaggcaggagaatggcgtgaacccgggaggcggagcttgcagtgagccaagatcgcgccactgtactccagcctgggcaacagagcgaggctccgtctc

SEQ ID NO: 261426 - DNA, 1120 bp, Homo sapiens
cggcgccggaagcacgggtccgggccctcccgcggggcgggtactcgtctcccggccgagcgacttcagctcggggacctgccccatggccgctccccagcaggacagggtaaccgccgaggtggggggcttcttgtccgtcccagcccccccaactcaggccctctcgctgcccctggcgaccaccgcgtgcgcccttccccagggcgggcgcagtcctggacgcctccgccgagcgtgactgcgtgcattttctctcctttcccttcccaacctgcggagagaagacagccccagagccgctgtctccatcctctgctgatgcctgctgtctttatgttggcctcgtcgtccgcactgcagtgtggcaggggcgtccctcgtttcccgcggactgaggtgggcgccgggcattcagtaaacgaagaaaccaaagcggagaaggttgggaatcaaacgtctgtcatacctgccaccagcagacaagcggctttgggtacctcctggacccaaagacgaactcagcccctccaggagcgcagtcattggcaccctcgtgggaacaatgccagtgggatgggtggccaccggatgtttccggggcccctcagaggcccagcagcgcaggtcttggagaatgaatgtgggtcactgggccgcgctgcagagggccggtcctgagtcgcttcctggaggagaggcccatggccagcacttggcttcgcctggaggaagaagcacgtgctaaaccacgagcgttcagggtttgtctgtttgataaaagatgctggctttgacacaccaactgacaaagtctttcataggttggagggcacacaggaaggagatggagcttgcgggagcccccactgccactccgacagggagccctgccccgtgccctgctgatgttgacactgaccccggctctattatttcagtttttccttgtaatttctgaaaatctagcaacaagttgagcaatgaaaaaaagtaaaaaagttaaaattgtgttagaaattatgactgtaaagaaattttgaaactaatgaagaaaaaattgccaaaattgccaaagcttttaggactcttaaaaatatagtaacattgagtattatga

SEQ ID NO: 261427 - DNA, 1232 bp, Homo sapiens
cggcgccggaagcacgggtccgggccctcccgcggggcgggtactcgtctcccggccgagcgacttcagctcggggacctgccccatggccgctccccagcaggacagggtaaccgccgaggtggggggcttcttgtccgtcccagcccccccaactcaggccctctcgctgcccctggcgaccaccgcgtgcgcccttccccagggcgggcgcagtcctggacgcctccgccgagcgtgactgcgtgcattttctctcctttcccttcccaacctgcggagagaagacagccccagagccgctgtctccatcctctgctgatgcctgctgtctttatgttggcctcgtcgtccgcactgcagtgtggcaggggcgtccctcgtttcccgcggactgaggtgggcgccgggcattcagtaaacgaagaaaccaaagcggagaaggttgggaatcaaacgtctgtcatacctgccaccagcagacaagcggctttgggtacctcctggacccaaagacgaactcagcccctccaggagcgcagtcattggcaccctcgtgggaacaatgccagtgggatgggtggccaccggatgtttccggggcccctcagaggcccagcagcgcaggtcttggagaatgaatgtgggtcactgggccgcgctgcagagggccggtcctgagtcgcttcctggaggagaggcccatggccagcacttggcttcgcctggaggaagaagcacgtgctaaaccacgagcgttcagggtttgtctgtttgataaaagatgctggctttgacacaccaactgacaaagtctttcataggttggagctgctaggttgtgcccctgcccctcctgaaaattagccacacgaaaggaagggtctggaaggtggcagggaagccagcagagaccagggaagtggcagcagcatggggcaggggcacacaggaaggagatggagcttgcgggagcccccactgccactccgacagggagccctgccccgtgccctgctgatgttgacactgaccccggctctattatttcagtttttccttgtaatttctgaaaatctagcaacaagttgagcaatgaaaaaaagtaaaaaagttaaaattgtgttagaaattatgactgtaaagaaattttgaaactaatgaagaaaaaattgccaaaattgccaaagcttttaggactcttaaaaatatagtaacattgagtattatga

SEQ ID NO: 261428 - DNA, 222 bp, Homo sapiens
attctttagaagttgaattaataaacggctattgtattaaattttattttaattacaatggttttccttcctttccttttttacctgagtagaatctcttgttattttctggacagaaaaacagatctgcatgtggtggtaattttactccttccatttgaatatatgtatctctgttatgtgcttgtttatctaatattaaataaaattattcactttcta

SEQ ID NO: 261429 - DNA, 823 bp, Homo sapiens
ctggccctgccaccgagtctgccttcgccacagagaccagtggtcatgcagttgttcccagggaccatttgcataatgttcatgtatttatttgggggttggccagacgtcctccatctctaccagtagctatggaaatcgctccagttaaggaaaatgtcatctgtttgaaacagcaggacaccagctacaggcggatgactccagatgcccctagcagatgttgcatgcttcaagcgtgggcaggctgctgggtggaacaccttcaaagaaagatggaagcgcgggttcctgttctggactcttaactgacagtggttctttaagtaggctaagaaatcagaacaagcaaaataaagggtaaaaggccaaagaaatgtaattctgttggaatgtttttatccaactgttagagaaaataaattgtgggtgttgcctttcactgagaagcacatattgttttctgactgattttttaagtgtcttcaaacaaataaacacatctatttgctttcctccaaacaccattagggtaagaaatgctgatacataaaggaacaagagagcagcgggtcacactttattggttgtatagtaccaaagccaaagctaatttaaaagtccttaaaattttacatacacacacacacacacacacacccctatgccccacacaattcatgtgtctatgaagaattttccaaacacgtggagaccataaccccatttcccttgccttaatagtgaggagacttatgtattccactaaaccaatatttttattacttttttgtcctgtgtcctaatttttattatctttaaa

SEQ ID NO: 261430 - DNA, 505 bp, Homo sapiens
agagtcccctactcccaattccaaggatgtccacctctgccttggcccaaagttctcacctctaccaggctctcccgcacctgtggtctgagacatcagctggtgggtttggctttgagaataaacctgggtcacttggcgggcttttttctgtctgcttgccaggaagcctgctgaattcctctccacctctgcccttgtccacagagaggggcggcccatgcagttcacagctaaacttagcctggcaacgctggagtcacggggcaacaggggctgagggaagatggaagcttctgggtggcccggacagagggctgcaggtggctggctgggaccagtggtttattcagacctttactgtgaggctggccggaagccaagaccctgggagaaatccaaggcttccttccttcactggggtccctcactcctgggtcccccagagcctgcagcactccccaccatagcttaatccaataaacaccacaaagcattgcctaac

SEQ ID NO: 261431 - DNA, 490 bp, Homo sapiens
cagttatcctgaaaatgggaggggaggagggaaatgaaccagggaccgcatcagcaccagaactgaaggagtggaaaataattagaagggaaataagacacagagaaaccaggatgggcaaagagaaatgtgtgattggggaaaaacaatatccttacctcatccttttcgtttcttcctactcacagaatgttaaatgcactcctaaatgaaaatagtgtggatgtgtgagtggctgtcactcagacagaggagggaaaaaacccaacttatttcatcttcatcatcttattttgtcagaccaagcagaatcctcctcaaactatccagagtaactttggttaaaatatgggtgtgtggccaaaagctttggatagatttattttgtacgaattttaaaaaacaaaatgttagcatctttgcttatggtagttttgaaagaaaaatatacatatttcctaagctgatattaaaagtggcatttatgtaa

SEQ ID NO: 261432 - DNA, 335 bp, Homo sapiens
taatgcgtgataaatacatgttcactattgtaattattctgaaatgcccatttatatttcccacactggcccgtgcaaactattttgagatagggcgaaatcaacgcatcatcacactgaaacccccggtcacaatcagatgcagtttcctataatatgactttaaattgtcaaaggatgccataaaaaacacaaagagttggtttccaccacatgaattcagggagcttctcatattctatgcccagataaataatgactgtgtctggaaacaggcaaagaaagacaaaagggagataaactcctagacctctctttccaggctcaaagcaaaa

SEQ ID NO: 261433 - DNA, 318 bp, Homo sapiens
ccatctcctgaatggttttcatcttcccatactgaaacacagtagccattaaatcatcttttggcttccctgggccacattggaagaagagttgccttgggccaaacataagttacagtaacactaacgatagctgatgagcttaaaaaaaaaaccacacaaaaaactcaacgttttaataaagtttatgaatttgtgttgagcctcattcagagctgtcctgggccacaggttggaccagcttgcattaaacactaactcctgctcccgcccaggagttcgagaccagcctcagtaacatagtgagaccccatctcc

SEQ ID NO: 261434 - DNA, 524 bp, Homo sapiens
aggaggatccttagccttctgtgctggcctgtttgtaagggaacctttctgcatctgtggcctgcttgggagcaccctcgattgcagctgttggagagccaacggtaataagaactgaacattcgtttgcactttagagatttctggaacaatgaggggttgtgtgccatgcgctgaactgtgtccccaggccccaccaattctatgctgaagtcatcatcctcaggccctcagagtgtgactgcatttggagacagggtctttaaagaggcgattatagttaaatggggtcactggagcaggccctcatccaataggaccggtgtccttataagaagagaagatgatagggacaccagtcctattggattaggacacagacatattagtgtgggacaaccgtgtgaggacatagggagaaggtggcatctacaagccaaggggagaggccacaggggaaaccaaccctgctgaccttgatctcagtgtaaggaaataaatctctgttgcttaagtcccaaaaa

SEQ ID NO: 261435 - DNA, 593 bp, Homo sapiens
ctaaactatgccagggcagtcagaaataaaagaggcaaagcataaaggtcattgcagattctcaaagcagattctcaaagcggattctcaaagcggattctcaaattagctcaaagaaatggaacttggtcatcagtttcctgtggaacttgacaaagctcttgttcttgatgctgcctctctcattcccttcagttactactgctctcaggttcatctctcttcaagcttcctacaaaaccatgtttcttcctgcatagctagtgttattgcctcttaattagtcaaaataattaagtccatcaggcataatcttgctcagattcctgccccacttcccatagaggcttgtagggttctggatctcaatactagtaggcctcagaaaagcaagatctctacaaatggaccatgttgtctagaatcttacagtctggcatactttcagcaagcttttatttttaccttgatatgtctttggaaaattgttaacttctattagtaatatccttatacaataaaggttaagggcagtggttctggattcagacaatccttaaagcatagatgaatatacatggaaatataaaaaa

SEQ ID NO: 261436 - DNA, 423 bp, Homo sapiens
gagagtagtaactgggacccagtaggtggccaggtggtttgtatcttggtacaagggtaagtaaaatagttgatgtccaaggctccctttgctttctttttctcttattttcctttcttgagatatattttctctgtaagtgctgtgttattaacatactacattttatcattctgtaaattaagttatactatatgcttttagtcatctttgtggttatatagtgatatgtacaatctcacttaggaaatcaacaattgttgttttttattttgagacagggtctctatcgcccaggctggagtgcagtcgtgtgatcacagctcactgcagccttgacttcctgggctcaagcagtcctcccacctcagcctcctgattagctgggactacaggcgcaagccaccatgcccggctaagttt

SEQ ID NO: 261437 - DNA, 1288 bp, Homo sapiens
agcggaggcggcccaggtctccgagcactcgggcctgcgcctgggtgctggcagccttgccgctcgctgtgccagtgcctggtgggccgttctggccatccagcatggtggactactacgaggtgctggacgtgccccggcaggcctcatccgaggccatcaagaaggcgtaccgcaagctggcgctcaagtggcaccccgacaaaaaccctgagaacaaggaggaagcggagaggagattcaagcaggtggccgaggcctacgaggtgttgtcggacgccaagaaacgcgatatctatgaccgctatggcgaggcgggggcggagggcggctgcacaggcggcaggcccttcgaggaccccttcgagtacgtcttcagcttccgcgacccagccgacgtcttcagggagttcttcggcggccaggacccattctcctttgacctcttgggaaacccgctggagaatattttgggggggtcagaggaactgctggggaagcagaagcagagcgtctgcaccccttttctctgccttcagtgaatttccagcttttgggggtgtttttcttcttttgatacaggatttcgttcctttggctccctgggaagtgggggcctttcttccttctgcatgtcctacggtagtgatgggacaggcagcttcaagtccatgtcgacttccactgaaatagttgatggtaaaaaaatcaccaccaagagaatcattgagaatggccaagaaagggtggaagtggaggaagatggagagttgagttaaagtccttcataataaacggcatagagcagttgctccccattgacaccaagtaattccagtccacatttgcctttaagcacatctggaggaatagcggactttttttaggattgaaagtgaactttactttcagaacagctgtacccaagaatttataaacactttatgccaacacctgttcttatcgttgggactacacggataggacctctgtttgtctttcaatcgttgtaaaatatctgtatgcaatttgctatttattaaacttaagcctgaggcagacaatgattatttgctagtggtaggacagaatgttcagttcagcactttgagcattacctttttccgttgggaaagtgtgagccaggtggtttgctctaaatcatttgactttattgtttagtgtgtagtggtgaaatctacaaataatatcaatacttctggcttaatttaatgatggttcaaaacaacatgcatttattatcttaatattttggaggtcagacatt

SEQ ID NO: 261438 - DNA, 1059 bp, Homo sapiens
agcggaggcggcccaggtctccgagcactcgggcctgcgcctgggtgctggcagccttgccgctcgctgtgccagtgcctggtgggccgttctggccatccagcatggtggactactacgaggtgctggacgtgccccggcaggcctcatccgaggccatcaagaaggcgtaccgcaagctggcgctcaagtggcaccccgacaaaaaccctgagaacaaggaggaagcggagaggagattcaagcaggtggccgaggcctacgaggtgttgtcggacgccaagaaacgcgatatctatgaccgctatggcgaggcgggggcggagggcggctgcacaggcggcaggcccttcgaggaccccttcgagtacgtcttcagcttccgcgacccagccgacgtcttcagggagttcttcggcggccaggacccattctcctttgacctcttgggaaacccgctggagaatattttgggggggtcagaggaactgctggggaagcagaagcagagcgtctgcaccccttttctctgccttcagtgaatttccagcttttgggggtgtttttcttcttttgatacaggatttcgttcctttggctccctgggaagtgggggcctttcttccttctgcatgtcctacggtagtgatgggacaggcagcttcaagtccatgtcgacttccactgaaatagttgatggtaaaaaaatcaccaccaagagaatcattgagaatggccaagaaagggtggaagtggaggaagatggagagttgagttaaagtccttcataataaacggcatagagcagttgctccccattgacaccaagtaattccagtccacatttgcctttaagcacatctggaggaatagcggactttttttaggattgaaagtgaactttactttcagaacagctgtacccaagaatttataaacactttatgccaacacctgttcttatcgttgggactacacggataggacctctgtttgtctttcaatcgttgtaaaatatctgtatgcaatttgctatttattaaacttaagcctgaggca

SEQ ID NO: 261439 - DNA, 936 bp, Homo sapiens
agcggaggcggcccaggtctccgagcactcgggcctgcgcctgggtgctggcagccttgccgctcgctgtgccagtgcctggtgggccgttctggccatccagcatggtggactactacgaggtgctggacgtgccccggcaggcctcatccgaggccatcaagaaggcgtaccgcaagctggcgctcaagtggcaccccgacaaaaaccctgagaacaaggaggaagcggatttcgttcctttggctccctgggaagtgggggcctttcttccttctgcatgtcctacggtagtgatgggacaggcagcttcaagtccatgtcgacttccactgaaatagttgatggtaaaaaaatcaccaccaagagaatcattgagaatggccaagaaagggtggaagtggaggaagatggagagttgagttaaagtccttcataataaacggcatagagcagttgctccccattgacaccaagtaattccagtccacatttgcctttaagcacatctggaggaatagcggactttttttaggattgaaagtgaactttactttcagaacagctgtacccaagaatttataaacactttatgccaacacctgttcttatcgttgggactacacggataggacctctgtttgtctttcaatcgttgtaaaatatctgtatgcaatttgctatttattaaacttaagcctgaggcagacaatgattatttgctagtggtaggacagaatgttcagttcagcactttgagcattacctttttccgttgggaaagtgtgagccaggtggtttgctctaaatcatttgactttattgtttagtgtgtagtggtgaaatctacaaataatatcaatacttctggcttaatttaatgatggttcaaaacaacatgcatttattatcttaatattttggaggtcagacatt

SEQ ID NO: 261440 - DNA, 707 bp, Homo sapiens
agcggaggcggcccaggtctccgagcactcgggcctgcgcctgggtgctggcagccttgccgctcgctgtgccagtgcctggtgggccgttctggccatccagcatggtggactactacgaggtgctggacgtgccccggcaggcctcatccgaggccatcaagaaggcgtaccgcaagctggcgctcaagtggcaccccgacaaaaaccctgagaacaaggaggaagcggatttcgttcctttggctccctgggaagtgggggcctttcttccttctgcatgtcctacggtagtgatgggacaggcagcttcaagtccatgtcgacttccactgaaatagttgatggtaaaaaaatcaccaccaagagaatcattgagaatggccaagaaagggtggaagtggaggaagatggagagttgagttaaagtccttcataataaacggcatagagcagttgctccccattgacaccaagtaattccagtccacatttgcctttaagcacatctggaggaatagcggactttttttaggattgaaagtgaactttactttcagaacagctgtacccaagaatttataaacactttatgccaacacctgttcttatcgttgggactacacggataggacctctgtttgtctttcaatcgttgtaaaatatctgtatgcaatttgctatttattaaacttaagcctgaggca

SEQ ID NO: 261441 - DNA, 1073 bp, Homo sapiens
agcggaggcggcccaggtctccgagcactcgggcctgcgcctgggtgctggcagccttgccgctcgctgtgccagtgcctggtgggccgttctggccatccagcatggtggactactacgaggtgctggacgtgccccggcaggcctcatccgaggccatcaagaaggcgtaccgcaagctggcgctcaagtggcaccccgacaaaaaccctgagaacaaggaggaagcggagaggagattcaagcaggtggccgaggcctacgaggtgttgtcggacgccaagaaacgcgatatctatgaccgctatggcgaggcgggggcggagggcggctgcacaggcggcaggcccttcgaggaccccttcgagatttcgttcctttggctccctgggaagtgggggcctttcttccttctgcatgtcctacggtagtgatgggacaggcagcttcaagtccatgtcgacttccactgaaatagttgatggtaaaaaaatcaccaccaagagaatcattgagaatggccaagaaagggtggaagtggaggaagatggagagttgagttaaagtccttcataataaacggcatagagcagttgctccccattgacaccaagtaattccagtccacatttgcctttaagcacatctggaggaatagcggactttttttaggattgaaagtgaactttactttcagaacagctgtacccaagaatttataaacactttatgccaacacctgttcttatcgttgggactacacggataggacctctgtttgtctttcaatcgttgtaaaatatctgtatgcaatttgctatttattaaacttaagcctgaggcagacaatgattatttgctagtggtaggacagaatgttcagttcagcactttgagcattacctttttccgttgggaaagtgtgagccaggtggtttgctctaaatcatttgactttattgtttagtgtgtagtggtgaaatctacaaataatatcaatacttctggcttaatttaatgatggttcaaaacaacatgcatttattatcttaatattttggaggtcagacatt

SEQ ID NO: 261442 - DNA, 458 bp, Homo sapiens
tgtttttagataccttttataaatttaagaaagtcaatttttaaagtaattttgttaaaagtttttaattttaaatttcattcagtgcattttgatatattaagataatcttacatatttaatctatcaatgaattaaatcacatttaatgatttttaaaactaatgtatttaatttctgagacaaaattatttgagcataaaacaccatttatatgttgctgaacaaattctgttaggattttgtttaggatttgtatgttatgaataagatggtgctataattttcctctctcatattgttctttgcaagttatagatctcaaactaatcccagtcccttacctatatcaccccttagctgatctaatttttttccatagcacatataactttataacatactatagagtttaactgtttactacagctatttttttatgttgacctctctccaaa

SEQ ID NO: 261443 - DNA, 571 bp, Homo sapiens
caggtgaccagcctggaaggcaccactgctgcctgtggagaagcacatacagcacagagaaggtgggtagcccaattaaggcaagcctttccgaaatgggtcgagaattctgactttgtcccaggaaagtgagaagccagtgaaggtctctgtgcacatgagtgaagagatcagatcagtattttagcctgaaaaggatgttaggatttggaaagaacttctctgctagaaatgcagagagccagtggccataatccagttgtggagtggagcagggaggcaggcagtgattagagcagtgaaaaggatggaaagaaaaggcagttccagaaagcctgggacagaatcaagaaggcttggtaaccgatgaggcataaatggaacaggggggattagatcagaggcttaaaacttgataaatagcaccttcaaaagggatggattttttaccactcattcaatccatgtcacatcacaactctacagaaaattattcagaaaaacatgaagtatttccatccttttaataattaaagatcatagacataaaaaggaagttttctgaataact

SEQ ID NO: 261444 - DNA, 509 bp, Homo sapiens
aataagcttcactttcaaatttattaatactttatgctacttgggtagctagttggtaatttaatgaacataatgaatgctgctgaccaagagctaccttggaactgaaataaaaatgggaatgtataattgattccatattggctaaaggtttgtgatttgaaacgattcaattatacaactgacttacaggccatgaagtttggctccaaatatctatatacaataagatatatctatgaccctttccttcttattaaagtggaaaggtgctgggctgggataccattgtgacacttagaagctttgagaccaggtgcaagttatttttctctttgagattcatattctttaaatcccaaaagacagtactgaagactttaaaacacatcatgaactttaaatattatcattaatactagtagttttatctctactcatcaactaagtcatatttttaaaggttatttccctaacaagtgtttgaaattcagtgtaaggatttttaa

SEQ ID NO: 261445 - DNA, 345 bp, Homo sapiens
gtgatatcactcagcaaaatcatttaagggccaaattggcatctgggtagttttggacaagccccttgaacttctagttataattattgacactaaacctgacttttatctgatttaaataaacttacttcattaataatttattagtatgttgaccatccgtatatttggaaatgtttcctcatttgttaattgagatagtggtgcttacagggctttgtgaaaattaaatttgatgtttctagatatagtaagcaatcaatgtacgctgttgctgctgctgtttctattactaaaactaataataataatgcgatttataccaagttacccatcatgtacgtt

SEQ ID NO: 261446 - DNA, 660 bp, Homo sapiens
tcatggaatattcctcacaatagactatatactaggtcatagaacaaaccccaataaagataaatgatttaaatcatacagaatatgttctgtgagccaagaaaataaatttgaaatctataatggaaagataatttgagaaattccaactacttgaaaattaattcattaatctacatgtctaagaagaaattacagggaaattaaatgatacttttaactgaatgaaaataagatagaaggtatcaaaatttgtatgatgcagctaaaacaatacatagtgagaattttacagcttcaaagtcttatattaaaaaaagaaagtactaaatcattaacctaagcttccatctcaaaaagctgggaaaagaacaaattaaacccaaagtaagtagaaagaaagactaaaataacagaagaactcaatgaaataaaaaataaattgtaaataccaaagacaaatcaaaagttgtttatttaattttctgtcttacttatactgtccttactaagatcagaaaataaggagactacacttactacttctatttaacactgttctggatatactagccagtacaaggcaagaaaaataaataaaagttatttccattagaaaggaagtagaacattttattcacagatgacgcaatcaggtat

SEQ ID NO: 261447 - DNA, 680 bp, Homo sapiens
cggggtgtctccaaaggcagcttgtgcttgtttgtgaccagggtgacaaaggacttcactgtcctgtagcacagatgaggttccaccctcaggtgggtggaaacagcccaggccattagtgcaaatcccctgcctggcccagggccacgttcagcccactgtctgtttgctttgggacccacccaaggtcacattttagcttttgagaaatgtgaaagtggaaaacattgcaaaacaaaaagcccctggaaaactgtgcacacacccatcccctcagcctgatgctccagcttggctgctaggagatcaatgcagctctgccttcctgctccctgtgcagaggtgccggctcctgcttcctggttcccagctttccttttgggaactgcctgaggtggtttgacacacagctgttgggcttctcttcccttgaggtctctgaaccagggcacccatgcaggtaaacacaaaagcggagtggggtggaatgggggtgctggctgtagcctcggcagaaggggacccgcctctctcctcacgagtatccaggatgtgggactggatattgaccagaccagaacccactttgggcccacatgggagctaatgtcagcaggggcctgtggactgttcccattgaacggctcttcctgctagctgtggttctcagtgtggctggc

SEQ ID NO: 261448 - DNA, 321 bp, Homo sapiens
gactcaaaaagctgcttactgttatgttctatttatatgacattcttgaaatgacactacttagggatggataatagattagtggttgccaggagttggggtagtggaaggggtttactacaatggagtggcataaggaaattatttggggtgttgaaactcttaattgttgttacataattctatgcatttgtcaaaattcatggagctgcacacccaaaagagtgaattttatacatccctccacattttgtcattcagcaccttaatatctatgcaaatttaaaaataaacaaataaaagatattagttaacaaatta

SEQ ID NO: 261449 - DNA, 155 bp, Homo sapiens
gccaatgtatgttgatctcatgagggttacaggttagtagagataggcaaatatataaaataaaagatgattaaaaagatgatcaagtgctcaaataagagcatctgtgatgtatgaaggagcataaagtagggtatagtcatctggggggaaaa

SEQ ID NO: 261450 - DNA, 343 bp, Homo sapiens
cgcggccgcgcgacacggtgcgagaagacgacagaagggggagtagcactctgctagcagaagtgagcgcgggtcggctcacccactttgctgctagctcagtacttctccacctccgacggtagtgcctggcatggtgtaggcacttggcacatgggtgttgaattggaggaaggaggaagggttttgttgggtgagtggggtcccgtctttcctcctcaccccattggccctggagagatccccctttcccaccacttcctccttggcatataagttctgtttgcctggagcctaggccctttgcagcccaaaggtaaacaggtttataacgactttagat

SEQ ID NO: 261451 - DNA, 1257 bp, Homo sapiens
agcggaatggggcggtcggaacatggcggaccagatcccgctttacccggtgcgtagcgcagcggcggccgcagccaaccgcaaacgcgcggcctactacagcgccgcggggcccaggccgggagccgaccggcacagcaggaacgagcatccggcacccttgtgcatgtaccctacaatgactgccaggcttggatggatgtccccactcctgacttggtctgccctgacaccacctgggcaatggggagagtgtcttcctacggctggggcgtgtgggagtccaggcttcacgcactctttgctgttcaatgtaccagctggaggatgagtctgcgcatttggatgaaatgccactaatgatgtctgaagaaggctttgagaatgaggaaagtgattaccacaccttaccacgagccaggataatgcaaaggaaaagaggactggagtggtttgtctgtgatggctggaagttcctctgtaccagttgctgtggttggctgataaatatttgtcgaagaaagaaagaactgaaagctcgcacagtatggcttggatgtcctgaaaagtgtgaagaaaaacatcccaggaattctataaaaaatcaaaaatacaatgtgtttacctttatacctggggttttgtatgaacaattcaagtttttcttgaatctctattttctagtaatatcctgctcacagtttgtaccagcattgaaaataggctatctctacacctactgggctcctctgggatttgtcttggctgttactatgacacgggaagcaattgatgaatttcggcgttttcagcgtgacaaggaagtgaattcacaactatatagcaagcttacagtaagaggtaaagtgcaagttaagagttcagacatacaagttggagacctcatcatagtggaaaagaatcaaagaattccatcggacatggtgtttcttaggacttcagaaaaagcaggttcgtgttttattcgaactgatcaactagatggtgaaactgactggaagctgaaggtggcagtgagctgcacgcaacagctgccggctctgggggaccttttttctatcagtgcttatgtttatgctcagaaaccacaaatgggcattcacagtttcgaaggcacatttaccagggaagacagtgacccgcccattcatgaaagtctcagcatagaaaatacattgtggcagcaccattgttgcatcagtactgtaataggtgtaacaggtagcgagctcgatt

SEQ ID NO: 261452 - DNA, 1085 bp, Homo sapiens
agcggaatggggcggtcggaacatggcggaccagatcccgctttacccggtgcgtagcgcagcggcggccgcagccaaccgcaaacgcgcggcctactacagcgccgcggggcccaggccgggagccgaccggcacagcaggtaccagctggaggatgagtctgcgcatttggatgaaatgccactaatgatgtctgaagaaggctttgagaatgaggaaagtgattaccacaccttaccacgagccaggataatgcaaaggaaaagaggactggagtggtttgtctgtgatggctggaagttcctctgtaccagttgctgtggttggctgataaatatttgtcgaagaaagaaagaactgaaagctcgcacagtatggcttggatgtcctgaaaagtgtgaagaaaaacatcccaggaattctataaaaaatcaaaaatacaatgtgtttacctttatacctggggttttgtatgaacaattcaagtttttcttgaatctctattttctagtaatatcctgctcacagtttgtaccagcattgaaaataggctatctctacacctactgggctcctctgggatttgtcttggctgttactatgacacgggaagcaattgatgaatttcggcgttttcagcgtgacaaggaagtgaattcacaactatatagcaagcttacagtaagaggtaaagtgcaagttaagagttcagacatacaagttggagacctcatcatagtggaaaagaatcaaagaattccatcggacatggtgtttcttaggacttcagaaaaagcaggttcgtgttttattcgaactgatcaactagatggtgaaactgactggaagctgaaggtggcagtgagctgcacgcaacagctgccggctctgggggaccttttttctatcagtgcttatgtttatgctcagaaaccacaaatgggcattcacagtttcgaaggcacatttaccagggaagacagtgacccgcccattcatgaaagtctcagcatagaaaatacattgtggcagcaccattgttgcatcagtactgtaataggtgtaacaggtagcgagctcgatt

SEQ ID NO: 261453 - DNA, 420 bp, Homo sapiens
taccacatcagcgagtcttcccacctgttcctacagaagatatcctttatcagccaacatatccagatgacaactgctgccagcctggtttgagccaccttgaaatctcatgggaacgctgagaaataatcaaaatatttaacaactgctaatggcacagcatggtgccaaccaactgcatccagtcagcaaatgttggccataaagaatccaggccacagtaccagtatttgccagctaaatattagccctgcacctgcactccaatagcttatctggtctcttccacaagcctctctgtaatcatctttcatacaccagtcagaatgatcttttaaaaatgtaaatcagactaagctacttccctgcttaaaaccttccaaaggttttcttcccatttctctcagaaaagaaaaatta

SEQ ID NO: 261454 - DNA, 383 bp, Homo sapiens
ctctgcaatgcacttgtagatagaataccaaaaaataactattatttattatattcttgagagcttaccatttgctctatggcatattgctggtcctctgctgccatgagtgaaacacttggaggagttgtcagtacccccttaactactacactttttattctgtagttgccgactgatcctggcctctttcagtattagcagtatcaagtagcctatttttctactcatttcccagtatctctctttaggagaaaaaaaaaagttctgtgactcctatcaaaccttccaaagttcttctgataccttggctatcccattacttttcctgagggaaaagagtgaataagtaatgtctgcttggtcccctggccaggctatgg

SEQ ID NO: 261455 - DNA, 1038 bp, Homo sapiens
ttaaagtctaagacaaaaactcacacctggaccaggctgactctcctggtgtaaagcaggaagatgtgatgaaaactagagccaggaatgtcaactcgcactttagtctgggatgcttgtgtggtcagtttcgcccacagaaccccaaaagaaattacactgagggctacatcctgacccctttccccagtccccagggtcacggggcagaaacttctctcccacacaccaagccccaggccagggccctgggaaacctcccatgtcctcgtcccacctgccccatgtggttgtcactgtttctcccatattagagatgacagaaccaagactcagacaagggaaatgcatccaatccaaaggcacagaaatgatggtggagatgcaagtgctgcatcccaggtctagctgactccaaagcccatgggcttttttccagcgtttctttctgcacttgaccaaaattgggagactcctggtgatggcaagctgactgtctcctgcggcgtttcattgcgtctgtcaagtttcatttcaggggatagggatgcagcagcacagattcgaaccttcccaaatctccaataaaaacagacagaacaatgagaaggcaaaactaaacccttagacaacctcaacagcaaatgaggtgacaagctgtccccaaactacaaatacaatcaggtggcggagggcaccaaatacaagtacctgtgtgtcaccagcatctgtgtagggcacagcaagggaagctccagggctctggcaggctggagatcagggaacagcaaagtagccaacagatgctcagaggcaaacatgacaaaccacaggactgtggcagaagctgagaggagtttctaactaaaagcaggtgatgtcaagaagtctagtctagggtaggctgacctccatagattctccagaatgaatgtccagggcttccttccagggcagggcccttgctgacagcagattcaacactgagacaagagggatgacagagacaaaggaagagtgggaccagataacagggag

SEQ ID NO: 261456 - DNA, 5992 bp, Homo sapiens
aaattgctgtgaccgcagcatctctaggaagacgctttattcctgaaggacactgactgtcacttgggaaccaagaagccctctgcagtcatgagctctgacgcagaaatggccatttttggagaagcagctccctacctccggaaaccagagaaggagagaatcgaggctcaaaatcgtccattcgattccaagaaagcctgctttgtagcggataataaggaaatgtatgtgaaaggcatgatccagactagggaaaatgacaaagtcatagtcaagaccctcgatgaccggatgctcactctgaacaatgaccaggtcttccccatgaaccctcccaaatttgacaagatcgaggacatggccatgatgactcacctgcatgaacctgctgttctgtacaacctcaaagagcgctatgcagcctggatgatctacacctactcaggcctcttctgtgtcaccgtcaacccctacaagtggctgccggtgtacaagcccgaggtggtggctgcctacagaggcaaaaagcgccaggaggccccgccccacatcttctccatctctgacaatgcctatcagttcatgctgactgatcgagacaaccagtctatcctcatcaccggagaatccggggctgggaagactgtgaacaccaagcgtgtcatccagtattttgcaacaattgcagttaccggggacaagaagaaggagacacagccaggcaaaatgcagggaaccctagaggatcagatcatccaggccaacccactgctggaggcctttggaaatgccaagactgtgaggaatgacaactcctcaagatttgggaagttcattcggattcattttggagccacaggaaagctggcatcggcagacatcgaaacttatctgttagaaaaatccagagtgacgtttcaattatccagtgagagaagctatcatattttctaccaaattatgtcaaacaagaagccagaactaattgacctgcttctgatctccaccaaccccttcgacttccccttcgtgagccaaggagaggtcacggtagccagtatcgatgacagtgaagaactgctggcgacagataatgccattgacatcctgggcttcagctcagaggagaaagtcgggatctacaaactgacgggagccgtgatgcattatgggaacatgaagttcaagcagaagcagcgtgaggagcaggcggagccagacggcaccgaagtggctgacaaagccggatacctgatgggactgaattctgcagaaatgctgaagggcctgtgctgtccaagggtgaaggttggcaatgaatatgtcactaaagggcaaaatgtccagcaggtgaccaattcggtgggtgctctggccaaagccgtctacgagaagatgttcctgtggatggtcacccgcatcaaccagcagttggacaccaagcagcccaggcagtacttcatcggggtcttggacattgctggctttgagatctttgatttcaacagcctggagcagctgtgcatcaacttcaccaatgagaaactgcaacagtttttcaaccaccacatgttcgtgctggagcaggaagagtacaagaaggaaggcatcgagtgggagttcattgacttcggaatggacctggctgcctgcatcgagctcatcgagaagcctatgggcatcttctccatcctggaagaggagtgcatgttccccaaggcaacagacacctccttcaagaacaagctgtatgaccagcatcttggaaaatccaacaacttccagaagcccaagcctgccaaaggcaaggctgaggctcacttctcgctggtgcactatgccggcaccgtggactacaacatcgccggctggctggacaaaaacaaggaccccctgaatgagactgtggtggggctgtaccagaagtcttcgctgaagcttctctccttccttttttccaactatgctggtgcagagacaggtgactccggaggaagcaagaagggcgggaagaagaagggctcctctttccagaccgtgtcggccgtgttcagggaaaatttaaacaaattgatgactaacttaaggagcacccaccctcactttgtacgatgtctgattcccaatgagaccaagactcctggtgtgatggaccactacttggtcatgcaccagctgcgctgtaacggggtcctcgagggcatccggatttgcaggaagggattccccagccggatcctctatgctgacttcaagcagcggtaccggatcctcaatgccagtgctatccctgaagggcagttcattgacagcaaaaatgcctcagagaagctcctcaactccatcgatgtggaccgggagcagttcaggttcggcaacaccaaggtgtttttcaaagctgggctcctgggacttttggaggagatgagagatgagaagctggtgacgctgatgacaagcacgcaggcggtgtgcagggggtacctgatgcgggtggagttcaagaagatgatggagaggagggactccatcttctgcatccaatacaacatccgctcttttatgaacgtcaagcactggccctggatgaacctgttcttcaaaatcaagcccctgctgaagagtgcagaggccgagaaggagatggccaccatgaaggaagactttgagaggaccaaggaagaactggcccgatctgaggctcgccggaaggagctggaggagaaaatggtctccctcctgcaggagaagaatgacctccaattgcaggtccagtctgaaacagaaaatctgatggacgctgaggaacggtgtgaaggactcatcaaaagcaagatcctactggaagcaaaagtcaaggagctgacggagagattggaagaggaagaggagatgaattctgaattggttgccaagaagaggaatctggaagataaatgctcctctctcaagagagacattgatgatctggagctgaccttgacgaaagttgaaaaggagaagcatgccacagagaacaaggtaaagaatctttccgaagaaatgacagcacttgaagaaaacatttccaaattgaccaaagaaaagaaatctctacaggaggcccatcagcaaacactggatgatcttcaggtggaagaagataaagtcaatggtctaatcaaaataaatgccaagcttgaacagcaaacagatgatcttgagggttccttagagcaggagaagaaactgcgggcggacttggaaagggcgaagaggaagctggaaggagatctgaaaatgtcccaggaatccattatggatctagaaaatgaaaagcagcaaatagaagagaaattgaaaaagaaggagtttgaactcagtcagttacaagccagaatagatgacgaacaagtccacagtttgcagtttcaaaagaagattaaagagctgcaagcccgcatagaagagctggaggaggaaattgaagcggaacacacgctcagagccaagattgagaagcagcgctcagatctggccagggaactggaggagatcagcgagaggctggaagaagccagtggggccacttcagcccagattgagatgaacaagaagagggaggctgagttccagaaaatgcgcagggacctggaggaggccaccctgcagcacgaagccacagcagccaccctgaggaagaagcaagcagatagtgtggccgagcttggggagcagattgacaacctgcagcgggtgaagcagaagctggagaaggagaagagcgagctgaagatggagatcgacgacatggccagcaacatcgaggctctctccaagtcaaagagtaacatagaaagaacgtgccggacggtagaagatcaatttagtgaaatcaaagccaaggacgagcaacagacacagttgatccatgatctgaacatgcagaaagcaagactgcagacccaaaatggggagctgagccaccgagtggaagagaaggagtctctgatttcacagctgaccaaaagcaagcaggccctcacccagcagctggaggagcttaagaggcaaatggaagaagaaaccaaggccaagaacgccatggcgcacgccctgcagtcctcccgccacgactgtgacctgctgcgggaacagtatgaggaggagcaggaagccaaggccgagctgcagagggcgctgtccaaggccaacagtgaggttgcccagtggaagaccaaatacgagacggacgccattcagcgcacagaagagctggaggaggccaagaaaaaactggcccagaggctccaggaagcagaggagaagacggagacggcgaactccaagtgcgcatcgttggagaaaaccaagcagaggctgcagggagaggtggaggatctgatgcgggatctggagcgctcccacaccgcctgtgccacactggacaagaagcagaggaacttcgacaaggtccttgcagagtggaagcaaaagctggacgaaagccaggctgagctggaagctgctcagaaggagtccaggtcactcagcactgaactcttcaagatgaggaatgcctatgaggaggtggtggaccagttagagacactgaggcgagagaacaaaaatctgcaagaagagatttccgacttaactgagcagattgcagaaactggcaagaatcttcaggaagcggaaaagaccaagaagctagtggagcaggaaaagtcagatctgcaggtcgccttagaagaagtggagggttccttggaacacgaggagagcaagatcttgcgcgtgcagctagagctgagccaggtgaaatccgagctagaccgcaaggtcattgagaaggatgaagaaatcgagcagctaaaaagaaacagccagcgggcagcagaggccctgcagagcgtgctggatgctgaaatccgcagccggaacgacgccctgaggctaaagaagaagatggagggagaccttaatgagatggagattcagctgggccactccaaccgccagatggcagagacccagaggcatctgcgcacggtccagggccagctcaaggactcccagctgcatctcgatgacgccctgaggagcaatgaggacctcaaggagcagctggccatcgtggagcgcaggaatggcctcctgctggaggagctggaggaaatgaaggtggccctggaacagacggagcggacccgcaggctgtcagagcaggagctgctggacgccagcgaccgcgtgcagctcctgcactcccagaacacaagcctgataaataccaagaaaaaactggaggctgacatagctcagtgccaggcagaggtggagaactcgatccaggagtccaggaacgcagaggagaaggccaagaaggccatcacggatgctgccatgatggctgaggagctaaagaaggaacaggacaccagcgcccacctggagcggatgaagaagaacctggagcagacggtgaaggacctgcagcaccgtctagatgaggctgaacaactggcgctgaagggcgggaagaagcagatccagaaactggagaaccgggtgcgggagctggaaaatgagcttgatgtggaacagaagaggggagctgaagccctgaagggagcccacaagtacgaacgcaaagtcaaggagatgacttaccaggctgaggaggaccgcaagaatatccttaggctccaggacctggtggacaagctgcaggccaaagtgaagtcttacaagaggcaggctgaggaggcggaggagcaggccaacacgcagctgtccagatgccggagagtccagcatgagctagaggaggccgcggagagggcggacatcgctgagtcccaggtcaacaagctgagggccaagagccgagacgtgggcagccagaagatggaagaatgaggctcacctgatgctcgttgccatgggacacctccgagagagtggagggaaaatgtgtgagaaataaattctcctaaatactcgg

SEQ ID NO: 261457 - DNA, 1088 bp, Homo sapiens
taatgtaaatagtaatgtgatgaacatccttatggctaaatgtttgtgcacataaacacaatggtattcttatgtgtaaagttgttggtccagtggtacacagagcacactttagaaacaaaaatccatcagaattgccagcacattgcttaagagtgatttgagttttacttcctagtgttgctcctagcaaaggtggggacccgccgcagaggcagcctttggcccaggtaaccagtctctgggacatcagagaaggacctcatgtagcttgccgtgctgccttatctggctagtctggcaccagagtgctgggactctgcccctcgtcctttctccactcattcttccaacactgcttgagcagtgggccctgtagggacttaatacatattaattgacagattcagatgcttttccctgtgtaagagctcagtagtggagacccatttgtctgaatgctttttacgtccctgaaaccttgcatgagaggcacagattggactacagagacaatggggcatcagggaccttgttcgcaagaaggtttctgtctctgcttttattgcctggatcatgcctgactccaaaacgatggctggtattctcagaaggtgagtatcagggcgggggtttatgggcaagagcgattggtggcattctcccccgcacctatcttttgcccaagtagatcattttggaaaagaactggcttatggaggtagactaggattaacccttaaaaaccagctcagactccagcagcaaaggaaagaggcagccctacttctggcctctggtatgcgtggcactgtatcagatctttgcatgctacttcaggtgatccccatgagaacccgcagggtaaataatagcacagttccctttccagcacgagggattcggaggctctgagaggcttagtgccatgaacagtgtcactcagttgtaaatgggagggggaagtactgagactggaagccaggtttgtctgaatccaaagccacttcttaccaagctttcggtccaggaagattgaacgcttctaaagttttattagaattcaatcagaatggtttcaaagtctt

SEQ ID NO: 261458 - DNA, 406 bp, Homo sapiens
ggccaccatttccatgcacgtgtctcttggcgttgctgctgtttacactatgtggaagctggacactcagcctgtttcggggggacccaggctaaaggttctgccctaggtgtggtaagtatctattgatgcgtagtgtgaacacagcctttgtagcttccccaccctctgcgtggggaatggatagctctgattgcaatcttccttccctagcagcctcttccttatcctcctgggttcagcttcaacgtcacatgcccagactttcagcctccaggacttataccagcacccactctccctcctgattcccagccttcagccttagactgggagttataggattggctctcccagtaaagggtgagatagatgtattcttttatatataatatataacacaatg

SEQ ID NO: 261459 - DNA, 765 bp, Homo sapiens
tttcggtataaatagctttattatgttgggtacataccatctgtctttgaaagcattgaaactttggtaaacttttcttttaggtatttgacaccgaaatctcagtttgggtcagcctcacactctgaagctgtacaagaagtcaggaaagactccgtatctaaggtatgttgatactgaagatgttctgagttttgctggttcattaatgctgtagattagtgctatccatagttttctaccttttaacaaaagcccctatagttaatcaaacaccctgtctgagtcctcttaggctcacctagagaaaaagcactttttctccaaaggaaactacaattttttaaataaatatactacaaaaagcaaagtttttctctaagagagtgaatattttcgcctttgcagttagtgtgatctgtgtcacagcttctcagctacgctggtgtagtgtgaaagcatctatagataatatgtaaacacatcagcttgaatgcattccagtaaaactttgtttacaaaaacaggcaggaggctggatttggtccatgagccatagattactgatccttgacctatgtaatccaaactcacaaaactgaataggttatacctggcaccagcttcacttagaatgttacaagatggagctgaatgcggtggctcacgcctgtaatcccagcactttgggagactgaggcaggtggattatctgaggtcaggggttcgagatcagcctgaccaacatggagaaaccccatctct

SEQ ID NO: 261460 - DNA, 1940 bp, Homo sapiens
ttttaaggtggcggcagagcgacgggccagcgaggaagaagaaaacaaagccagtgaagaatacatacagaggttgttggcagaggaggaagaagaggaaaaaagacaggcagaaaaaaggcgaagagcgatggaagaacaactgaaaagtgatgaggaactggcaagaaagctaagcattgatattaacaatttctgtgagggaagtatctcggcttctcccttgaattccagaaaatctgatccagttacacccaagtctgaaaagaaaagtaagaacaaacaaagaaacactggagatattcagaagtatttgacaccgaaatctcagtttgggtcagcctcacactctgaagctgtacaagaagtcaggaaagactccgtatctaaggacattgacagtagtgataggaaaagcccaacagggcaagacacagaaatagaagatatgccgacactttctccacagatatcccttggagttggagaacaaggtgcagattcttcaatagagtcccctatgccatggttatgtgcctgtggtgccgaatggtaccatgaaggaaacgtcaaaacaagaccaagcaatcatgggaaagagttatgtgtcttaagtcacgagcgacctaaaaccagagttccctactcgaaagaaactgcagttatgccttgtggcagaacagaaagtgggtgcgcccccacatcaggggtgacacagacaaatggaaacaacacaggtgagacagaaaatgaagagtcgtgcctactgatcagtaaggagatttccaaaagaaaaaaccaagaatcttcctttgaagcagtcaaggatccatgcttttctgcaaaaagaagaaaagtgtcccccgaatcttccccagatcaagaggaaacagaaataaactttacccaaaaactgatagatttggagcatctactgtttgagagacataaacaagaagaacaggacaggttattggcattacaacttcagaaggaggtggataaagagcaaatggtgccaaaccggcaaaaaggatccccagatgagtatcacttacgcgctacatcctcccctccagacaaagtgctaaatggacagaggaagaatcccaaagatgggaacttcaaaaggcaaactcacacaaagcatccaacaccagagagaggctcaagggacaaaaataggcaagtgtctttaaagatgcagttgaagcagtcagttaatagaagaaagatgccaaattctactagagatcactgtaaggtatccaaaagtgctcactccctacagcctagcatttcacagaaaagtgtttttcagatgtttcagagatgcacaaagtaaggcctggtaaagggagtgctttgtgatctagtaaagctggaatgtgaagctctttcctatcatggaatcttcatccatgtgtcattcatgctgctctctaggcacactcattgtccttaatgaaggtctgtgtgattgtaaggactgcatagacacatgagcttctgcacagctcagcggtaagcaggggtcccctgtcgtttcccttcttaataacagatgtgtattaagctttacaattcttagagatatcttaagctttggccaactccaggaaatcttcaagtgccattgtctttccaaaaactgcatgttttatggcctttgctcacctttttgtcgtgactggtaatcaaagcaagattatactattctgagtgattaaggaacccatgcagggtttaaaatccattttcttgctattgtccaatgtttacagagtactcaaaaggttttcctaaagtaatctaatttccatctccaatttaattcaattttcagcattgtagcatttcctttggtgtttgttttttttttttagacggagtttcattggtcggatccagttgggtggggattccattaggggggggat

SEQ ID NO: 261461 - DNA, 518 bp, Homo sapiens
atggaatcttcatccatgtgtcattcatgctgctctctaggcacactcattgtccttaatgaaggtctgtgtgattgtaaggactgcatagacacatgagcttctgcacagctcagcggtaagcaggggtcccctgtcgtttcccttcttaataacagatgtgtattaagctttacaattcttagagatatcttaagctttggccaactccaggaaatcttcaagtgccattgtctttccaaaaactgcatgttttatggcctttgctcacctttttgtcgtgactggtaatcaaagcaagattatactattctgagtgattaaggaacccatgcagggtttaaaatccattttcttgctattgtccaatgtttacagagtactcaaaaggttttcctaaagtaatctaatttccatctccaatttaattcaattttcagcattgtagcatttcctttggtgtttgttttttttttttagacggagtttcaaaatttggattcatattcatatgtggg

SEQ ID NO: 261462 - DNA, 192 bp, Homo sapiens
tctacttaatattttggaaaattatttttctgtaaaacactgaagtgctaattaaatttcaacaaatttttttaaaaataaataaagctggtcacagtggctcatgcctgtaatcccaggactttaggaggccaaggcaggcagattacttgattgcccagcctgggcaacacagcaaaactccatctctac

SEQ ID NO: 261463 - DNA, 278 bp, Homo sapiens
tcttccaggaagcccccccgtgagtccagctgccactgtgtcccctgtcaaagcttcaacctctgagctgtagcttctggggcacacattgaccaccccccaccaaacggaggactccccaggggctcagggccagctgcccatttgcgaccatgccctcagcccgcagcacagagcatacacacagtgggtgcttaatgaatgttgttgtatgaataaataaatgaaatgcaagcgtctggcacatgacaggtgctcaatcagctcttgttaagtga

SEQ ID NO: 261464 - DNA, 411 bp, Homo sapiens
agtgttgggattacaggtgtgacccaccacgcctggccaatattctttaaagacaacaatatccagatacttaatgtagcacttgtaatgtctagcatgcaataaaaaattactagatatgtgaagcagaaaaatactgtaattggggtgggggtgaatctgttaatagaaacagacccagaaatgtgatagataagagaattagcagacaagttaacagttaacttaaaatagttggaataaatatgcgcaaggatttgaaggaaaatatgaacataataaggtgagaaaatagaagatataaaaaaaaattcaacagatgagcttaacgacagattggagactacagaagaaaataacagtgaacctgaagacaatagtaacacaaactatacaaaatgaagcagagag

SEQ ID NO: 261465 - DNA, 203 bp, Homo sapiens
gtcaggcagcactggtgctcatgaaaaatattggagaaggggactcctagtccccctcatccactactgcaatcacagctggggcttcttccatgacagctcagtttgggtgtacctgtagtcagtagtcagcctttctagaacacttcagggtgactgcatctccacaggaaaagtgttctccaggttcaggtttgcacaag

SEQ ID NO: 261466 - DNA, 559 bp, Homo sapiens
ctgatactgcaagcacttcagagtatgtataagcaatttcagctggttccgtcctgatatttacaaaactgcctggatcatacttacaaccatgcaatgatatatatttctattaagaaagcaacgatttgcttgaaagatgaaggaaaacaaactaagtatttatgtacaatgagtcctaagtgtacaccactatgttttccatcagcttttgattttctgtcactcctctttttctttgaaatttagagtcagaagtgaactgacttcatggttttcctcatgattatttgatatcctctagggaatcatgacttaaagactgcattcttccttctcaaaactcatgttaaagatttctccatgcagagccacaggctattttggagtttgaaatggagcagttaaaactaggaggtcacacacgttgagattattccttcactgcatctcgcccggcttgtgtgcctgaggagacacgcatctcagagggcagaggggcagccgttgtctagtgaggttatttcacctactatataataaaatgtacaggacaata

SEQ ID NO: 261467 - DNA, 457 bp, Homo sapiens
agcccagactggtcttgagctttggcctgaagtgctcctcctgccttggcctctcaaagcattggggttacaggtgtgaagcactgcaccttgcctacacattttttccaataattttttttattaatttgtaagagttaacatgtcgactatcatatataacatagaattgttcccattttgtcatttcctttcaactttgtctatgtagctttttttctgtgtgcaaattttacatttttaggtagtcagaaaatctcttcccttgtaattttttctgctactagaccaatgtttagaaaaaagcgtgcttccccacctcaaaattataaaaatagttacttgttctttttgagtactgtgtgtgtttaaatctttaatctttaaatttaaatctttgatccatctggtatttattttgatatgaagagagtggttgggatctggctgtatttct

SEQ ID NO: 261468 - DNA, 588 bp, Homo sapiens
gagggtggtgtctcacaattagcttctggagttcaactacaagtgttctaagaaagagttagtttatgtcagtcctaggccttgacacattcatgtgagtcagttttataactttctgttcctggatgcttccctctcaactattagtccaggcaggcatgtgctaaaattacctctctaaatcttatcaagcaaagatttgttggttagactttgcccccaaaaaaatgtgtctaggagtgggtctaaaaccggtgttggccgatgttctgttcttaggaaatggagagccaggaatagaaggatctgtgttagtagttctcaaacttcagtgtgcagaagaatcacccagagagctaggttaaagggcagattaatgcaccccagattcttctggcgtagtcagtctggactgaggtttgataaaacaagcatggcatgataataatgcaggtggtctacagtctaactcggagacgcattgtattattaaatcttgtcctctgtcatttgctgcgatgctctttacctctttagactgaaaatcacagccactcttctggttacatagaacaacttactgtgata

SEQ ID NO: 261469 - DNA, 1208 bp, Homo sapiens
  misc_feature (42)..(42): n is a, c, g, or t
cgcagcgcaataaaaaaactaggctaggtcgaggcctggtgntgatacagatcattgcactggaaaatattcccagcagtaaacacttccattaatgtgatctacagcttttaaaaaggagcatctcagaataagatggtggtacaattgcttattgagaaaggaaaaaaaaaacacacgagtatattacaaagggaaaagaaggaatgtgatttctcatgattgaaagcttgatttagattgcatacagcttttgctacccaagaccaagcggctctggcaagacagggtggttttccgaatgccagaccgaggtgccttatgaaggcagctgccgatggttccagatgtagagagataggtgatgcaggagggaaagctggattggaaaagggagagttttgtagaccggctacactcattgtgcctttgaaagagcagagccggcagcctctagtcatcatttggatatacaggactagagcatgaatctgatgtagagctacagaatgaagagcaacagcagctgtttaaataccgagaaagtgtgtagaatgaaattggacaagccaagcatggtggtttcatgcctttggtcctagctacttcggaggctgaggtgggggaattacttgagctcagcagtttgagtccagcctgggccagatgttgagaccctgtatcttaagaaaagaaaaaaataagaccaggtacagtatctcatgcctgtaatcccagcactttgggaggccaagttgagaggactgctcgagtgtaggagttcaagaccagactgggcaataaagtgagacccatttctttttttttttttttaacttcttaaatgcacaaatttattttttctcaacaaacacacatcttaatgcctttacaacttttatctccccaaatatatcttgcttttctttatatgtgctgtatacagagttgttttccttatatttagtagttattgcttttttgtgcccttttgcgtcctgaatttacacatcaggcatagatcttgggacaggaaagagctgtgaagcaaattcctggaaaatcaaaccccttccagcatggccaggtagcacagctgagccagggatgatggggccatattgggtttggctctgccttgcagctggcagtccaaacactgaggacatgcatatttctgcaggccagtgagacccatttctaccaaa

SEQ ID NO: 261470 - DNA, 424 bp, Homo sapiens
tactaaaaaatacaaaaaattagctgggcatggccgggcgtggtggctcacacctgtaatcccagcactttgggaggccgaggcaggcggatcacgaggtcaggagatcaagaccatgcctggctaatttttgtatttttagtacagatgaggttttaccatgttggccaggctggtctggaactcctgacctcaggtgatccgcccaccttggcctcccaaagagctgggattacaggcgtgagccaccgtgtctggccatacacatccctgccgaagcccgcattacccttcccctatgctatagaagccctgggtcgggggggtgggggtaatggcacagggatccaccatcttatcttggtgccatccctgacttggcttctgttcataaatgcctattaaatgtttctttctgagaaac

SEQ ID NO: 261471 - DNA, 940 bp, Homo sapiens
  misc_feature (42)..(42): n is a, c, g, or t
cgcagcgcaataaaaaaactaggctaggtcgaggcctggtgntgatacagatcattgcactggaaaatattcccagcagtaaacacttccattaatgtgatctacagcttttaaaaaggagcatctcagaataagatggtggtacaattgcttattgagaaaggaaaaaaaaaacacacgagtatattacaaagggaaaagaaggaatgtgatttctcatgattgaaagcttgatttagattgcatacagcttttgctacccaagaccaagcggctctggcaagacagggtggttttccgaatgccagaccgaggtgccttatgaaggcagctgccgatggttccagatgtagagagataggtgatgcaggagggaaagctggattggaaaagggagagttttgtagaccggctacactcattgtgcctttgaaagagcagagccggcagcctctagtcatcatttggatatacaggactagagcatgaatctgatgtagagctacagaatgaagagcaacagcagctgtttaaataccgagaaagtgtgtagaatgaaattggacaagccaagcatggtggtttcatgcctttggtcctagctacttcggaggctgaggtgggggaattacttgagctcagcagtttgagtccagcctgggccagatgttgagaccctgtatcttaagaaaagaaaaaaataagaccaggtacagtatctcatgcctgtaatcccaaagagctgggattacaggcgtgagccaccgtgtctggccatacacatccctgccgaagcccgcattacccttcccctatgctatagaagccctgggtcgggggggtgggggtaatggcacagggatccaccatcttatcttggtgccatccctgacttggcttctgttcataaatgcctattaaatgtttctttctgagaaac

SEQ ID NO: 261472 - DNA, 415 bp, Homo sapiens
gactgcagtggcacaatctcagctcactgcaaacttcacctcctgggttcaagcgattctcctgcctcagcttcccgagtaactgggattacaggcgcctgccaccatgcctggctaatttttgtatttttagtacagatgaggttttaccatgttggccaggctggtctggaactcctgacctcaggtgatccgcccaccttggcctcccaaagagctgggattacaggcgtgagccaccgtgtctggccatacacatccctgccgaagcccgcattacccttcccctatgctatagaagccctgggtcgggggggtgggggtaatggcacagggatccaccatcttatcttggtgccatccctgacttggcttctgttcataaatgcctattaaatgtttctttctgagaaac

SEQ ID NO: 261473 - DNA, 333 bp, Homo sapiens
tgtagacaacgccttgctgtgttgcccagggtagtctcaaattcctgggcttaaggatcctcctgccttgccctcccaaagtgctaggattgtaggtgtgaaccaccatgcccagccagaacccacatattcttctttgcctgtattccaagtgaagagcatcaggacatgctaccctaaaatatgccactttgacataagaattattttgagctgaaggcatttcattttctaaaacccctaaaataagtcaaagaaactcaattgtcataaatccccttcccaggaacaattctactcttctcagagaggagtcgccagcacacccaagca

SEQ ID NO: 261474 - DNA, 514 bp, Homo sapiens
agactgggtatctcctagagattcctgacccccacgcaccagccccaccaccagagggcgcccgagcacagagacgccgcaaccggagcaggagccctaaacctgtcagggtgggtcagccctggagtaatcctggagggagggtctgggagagggccccagtgtggggacctgcccggctcaaccaaatgtagtttgttaccttggtggccatctgcagccaggtggccctgccacactgctaaaccagaggatttaggaagcagacagggattcgggaagtggctgaagagcactggaaagacaaactcctgcggtgcaagagtcctggaccaggagtgcggagaactgggggcgctcctctccctgttaccctaggcttgttttctcatatgtaaacaaaggcaggggcggggagaagggaaggactcgatggtacccaggtgcccttcaggctctaaccaaagacatgccccaccctcctggaggaaccctgcggagcgccctgaacggc

SEQ ID NO: 261475 - DNA, 437 bp, Homo sapiens
gtcctttctgggttggcactgccagcctcaaagccccctgggtgggaggaaggggctccccctcaggaagaaggcagggtgagactcctgcccctcacactctgtggtttccttccacactgcctttttttgaagctgttgcccaagggtaaacaaactctgctccttgactccctttagcccagtgggggctggtagccttttagcctggtggctaaccaggagtttgcctaagaggccctgttgggcttagaacagaaaggcctctggccctttctacacatgtgactttgggattacaggcgtgagccaccacacctggccaaaatattcttgataaaatcattgttgaattcaaatcaaatcaagctaccagcctctagggtctacacttgattaccagcttagggaaatatgggggtagtggagcacattta

SEQ ID NO: 261476 - DNA, 468 bp, Homo sapiens
ctgcctcagcctcctgagtaactgggattacaggtgcccagcaccacacctggctaatttttgtattttttgtagagatggggtttcaccatgttggccaggctggtcttgaattcctgacctcaagcgatctgactgccttggcctcccaaaatgctgggattacaggcatgagccaccacacccggccaaattttgtaattttcatttctattgcttcattgacctccatagcagccttgagaaaaaggcattgtttatcctcattttatagatgagaaataacagagaacatgggtaacaaatgcagtcaactcatctaagaagttccaaagcctgagtccctgcatttctggttgctgggtgactgttttccccacaatactgctctgcacctcttacaaataaatacttgggcaactccacttccggtaagaaatacttggccagggagccatagctgtgagc

SEQ ID NO: 261477 - DNA, 699 bp, Homo sapiens
cttattcctcccaggataagtaagcccatctccctttcttattttttatggactttccccagtgaaatacaaaccccaagagagcaggagaggggtttgctgcattcccttggcatacccagagcctattgcagtgcctggcacgtggtcgtgatggaacgaagcactgataaatagcaggctggtggggttgccggatggatggaaggagggaggttctacacacagactcaggccctcagcctcctctggagggagggaggaggcacgctatggcatggccccattcctatggcagccatcctgcaacagctattcaactttccacttgtggagtgaaagcatgaagtttaattccaccagatgactaatgtcctaataactttggtaatatgccacccttataaactgcctgcattctccagcaggatcccaaggaagcagagataaatacatatatttagggaaaattgacctttaaaagtcaaggttccatgggccaattcccaagtcataaagagctcatgtgaaaagtaacctttagtttgccatcaaaactggtttcataaagaaagcgttttaaatatacatttgggagtttcacaataggttccttttacactgctgatctgtgacatgagacaaggcttgccaagattttcaataaaaaaggatatattgatctaattaccttctatt

SEQ ID NO: 261478 - DNA, 865 bp, Homo sapiens
gaattatgtaattttttttcctctgaacacatcccatgttttcctatagacatgcctttgttttctctcataactctatcactgtctgttgcaattctgctcctcacctgaagcccatctcaaatactatctcctttaataaagcttttgctgatcaccctaactagaaatggcatgttcagtctctaaatatctcctatggctttttacattaaacttatgttacagttacttattcacatttctcctaaatttgactgtaacctttttaaagcagaggctgtgtcttatccttataactactggagctcagtaggtgcttagtaaaatggctgtggaataagtgagtaaatggaccatttgcactagggttggcagagagctggtggccaggaccaaaattttatttaggtcaaaaattttatcctggaacacaattgaataataaaaaaacaaaaatccaatgaaaatgggcaaaaaatttgaacagaaactgggtaaaagaaaatatacaaatagctgacaagtgcataaaaagatgctcaacatcattaataatcagggaaacacaaattaaaaccacaatgagagacccattagaatggctagaataaaaaaaaatgacaattaaaagcattggccagtataaaatgctcataccttgctggtgagaatagaaaatgagacaacccttttggaaaacagtatagcagtatttcctataaagtatacataaagacatatatatagagatataaatctatcctattacctgttaattttactactaaatttttatattagaaaaatagcatgtctatgggaggtggggtgaggcatgagggaactttctggataatgaaaa

SEQ ID NO: 261479 - DNA, 202 bp, Homo sapiens
atggccaggagcccctacaaatgaagagcagcagggccagttagtttggaaggggaggtggagtccagggaaggccgcagagctccaggctgtggaatgcacgtgccactgcagaagggtttccaggccaggagactgcccaaatgggagagacacgcattgaggtgttattaaaattcacctaattattctggagacacta

SEQ ID NO: 261480 - DNA, 219 bp, Homo sapiens
ctatggatttattttcctgtggtcaggtctggaccaaagagaaacaagaaaagctggagtcacactaccaaaggccgaagctgagcaacagagctctggagtcagctgcctgggttcagcatgcagcgctgccgtggacgatctgtctctcttgcatatatgacttaccagttttactttcagtctctccatttctaattaaatgagatgcagaaatgc

SEQ ID NO: 261481 - DNA, 209 bp, Homo sapiens
gtctccaaacacagacaaaacgtaaatattgtccaagaaccgagataccaaacattccctttcccagctgatgtgaatgactactgcttgtttaccagttacagcattagcctccccctatattttagatttattgagtggtaccatcatagaattaaccccacttctaacagtgttcaatcctgagcaaagctccacttcctcaaatt

SEQ ID NO: 261482 - DNA, 651 bp, Homo sapiens
gtacataccagtttcttttcaatctgccacagatcaatacttttgtaatatacaacaagtcaacagactctactactctgttaaatagataaaggatttctaaagaactactcttaatttctgtacgtaccatttctttgacaactagcaaaatgagacctgccgctggtccatgaaacacactttaaatagcactgctatgtggctagaaagctgaatactacatttcccagacttccttgcagccagggttttgcatgtgatcttcctgtcaatcagaaatacccttcaatatgaagaagtgaaaatgaaaccataagtccatggacacatgggagacagacgaatttctggcaagtatatcccaaatacagcagacaaatattagataatatcactgatatggtttggctatgtccccatacaaatctcttcttgaattgtagctcccctaatcctcacatgtcatgggagggacctggttggaaggtaattgaatcatggggcgggtttttcctgtgctgttcttgtgatagtgaataagtctcaagaaatctgatggttttataaagggcagttcccctgcacatgctctcttgcttgcctccatgtaagacatgcctttgctcctccttcaccttctgccatgat

SEQ ID NO: 261483 - DNA, 286 bp, Homo sapiens
catcaccccccttcacacacacgcagtgacatgtgcttaggcatgagaaagccgaggcctttggtataaggtagagagtgagctgaacttgctgcactgggctactcagacagttctttgtcagttgcagctatacttgttcatcaggaagcctccctaccaccacatggtcttctccagttatgttagatgtgtatgtgtaccactttctggcattcatgttttaaattttagagaaatgctaaacctcatccagaaagcctgaaaacctcattctcactatgct

SEQ ID NO: 261484 - DNA, 636 bp, Homo sapiens
ctaaggcctaaggaaagcagccgatggctcccaagacaactctgtccggccagtactccagggcaacttcaaccccactaggacccaggccaaaaccatatatatatatatatatataaattaacgcaaaacagagccactttggtgcctacccctccacaagtaggtaggcacatccaggtagctctgtcagaagatgggacctggcgccttgcaggggtagccctatggagatccagaagccccgtttcgagctacgaagtctctcttctactgcagtcttctctccaacgtggagatctagcaacttccctccccctgggattccctgtgaatccactctagttgggatatagcctctctacagctcagtgacgtagcgcgccaaaaccaagtacccaccccggcaactggaagacctagctgtcctccatcccgcctccgcagtcgataatctccaggatccaagcaaagtgcctgtccacgttgtcaccagatccacaagcgcttttgatgagagctgctacccttttggaaacacgattccctctccctagtagagaagaatctattcttctgggctggcgtagacaaagaataaccaagataaagtatgtggtgtgaaaatatcagctg

SEQ ID NO: 261485 - DNA, 479 bp, Homo sapiens
ggctgctctgaggacagtacaagcagcaggggcagcactggagagtgtggccattgttttttctggcagtggagcccctctgctgtgccaggctctgtgtccagcacttgttccgggctatgccctaggggagtaggagtcacatgactatcctagccttggatttgactttggcctcatccacctagagggagtgagcacccctttctcacaggagccaagtggaaccctgggcccctcaggatgacttggtagggcgggctggttgtcactcatgttgggttgggtccccacctgccgtggcccttcccccttttctctgctccttcaccttcttccctaacgctgactgcccactgccaggcctttgtgcattcttggttctcctccttccagacagcctccttctccttcccgctggggacaccccaactactgtctcctggaaaccaaaaataaaactctaaccccccagccat

SEQ ID NO: 261486 - DNA, 446 bp, Homo sapiens
ataagttatctttatggtcccttccaaatagacttcctgagagtctataattctagttatcaaattctttggactaactagatgtcttccaaggaagcttttcatactgatatgctattctttggaggcgtttgatgaaaaaaggagagaaaccagacattagtctctgcccaaagtataaaatgtttcataaatgtttcaggctacccaatcacaaccttaaaagagtatctccataacttctagcacaatctaatccactgtatggctgtctactgtgttctcacagccctgccgcaggtatggaagcctatgttaattttagaagtcacagaatcctcaggtctttgatgagctgcacaggtttagcaaaactgagttgccagagagagagagagtgagagagaagaagacagatattaaacatggattttaatattgtaaaa

SEQ ID NO: 261487 - DNA, 232 bp, Homo sapiens
ccatcctgcttgaactcatgccacaggccatggggatcaccacctaaagactgaaaacggaatctccactcagtattcccgaacatatgaggagacgggagaggcaaaaataagtataagggagaaagaagagagtaaagcagaggctgagaaaaaaaagggtagggttatgttcctggcatccacttgggaactctgaatacattctcctgatacagtcagctagaccagt

SEQ ID NO: 261488 - DNA, 339 bp, Homo sapiens
agcaggaaatcagggacttcattctgtttgctgctgtatccatggcagatacaaccataactggcaagagtaggtgctctatagatattttttgaattagttcaataatttcaatatgggctctgaaattaaattattctgttcatctaaaaattaacaataaattcactccaagtatttgatgccatataatctacatgaatggaggctcaggagttatcatttgctattgcttttcattgctacaaaatcttatcctatgctatgataagaaagttcatcaaatttatcttgtcttctctatgagaaaataataaagaaaagcctgacatgcaaaaa

SEQ ID NO: 261489 - DNA, 293 bp, Homo sapiens
attcggtttgtcttttatttttgttagtgatatggaggtttaaaatatttatgcaggctaatctattgattgtcttttgcacttgcggttctccaactttcctctgtctatactaaaatgaacccttactgctctggaagtctctattctgaataatcagtgtttaaaattatatcccaaagtagggtatcacagggtttcctgatgaggataaatgggcctgaagtgcttatgggcacccactatgtatcatgggaaaacttgcacgtgtgtgtgtgtgtgagagagagaga

SEQ ID NO: 261490 - DNA, 340 bp, Homo sapiens
ccagcaaacgagagttctatggcaagactcacattgggtatggttggcaaggtcataactatgggttaaaggtatgactgctgggagtggttagcttgcaactagaaacagaaaaaaaaaaaagcatataaaggcactggttctgggatttgacagggctgagttacaatcttggcttcgttactatctagctctttgactagagttaataatttcactttgaatcagtaaaatggaataataataatcaattactgagttaagggacagttcagccctttcccactaattgtcccaaattaaaatacaatctatattaatacattgtgctatcaatgca

SEQ ID NO: 261491 - DNA, 623 bp, Homo sapiens
tatcttcatttaaatagaagacacacagagaaaataaagaagcatggaaaagacaaggtgtcatggactgtacgtttgtgttccatcaaaagtctcatgctgaagccttcaccctcaatgtgttggtatttggacatagggcctatgggaggtacttaaggtgagattagataatgaggatggagccctcaccatggcattagtggctttacaagagaaaaaggaaaagggatttctctctctctctttctgcgtccatgctcttgcagcaaggaaaggctatgtgaggacacggtgagaaggcaaccatcttcatactaggaaaagggccttcactaggaagctccagcagcgtcaaaaagaaatgtcttttgtttaagacaaaagatgtaaagtgtgacatcaataatataaaagggggtttgagattaagtaaaagggcagatattttggatgcaattgaagttgttataagcttaaacttaaaatggactgttacaattataacatgttttcatggtaaccctaaaaaaaaactgtagtaaatttataaaatataatgaggaataaatcaaataccactacaaaaacaatcaacaaatcacaaaggaagacagcaagac

SEQ ID NO: 261492 - DNA, 376 bp, Homo sapiens
cttgtccttcatacattaactaatcaagtaggaaaatgcaaatgagaacacagtgccaaacataggcaccacatggaaacaagtatgaggctgtcaggaagccatttttgtagctttgtagcccaattatatttttcctaatgtattgcacacaaaacttgggggttcatcctatcagaggaggaactatgtaaaacaaattttattgattgaatgtcctatttaatcgcaaaactgtatgagaacacgcttgtgacttatttagcagcttgtttgctttccactggcttcacgagtgtcctctggaaaaagaaagtacatttggaaccctgtacaccttttctttctccagtaccctcttctcacttccatcact

SEQ ID NO: 261493 - DNA, 264 bp, Homo sapiens
ccaacttggtagctcaacatagcacagctttattccctcctggctctggaggccaggtgtctaaaaggccatgctcccacaatggttctgaggaggatccttcctgcctctctggcttctggtggctccagcatccctgggctgtggctgcacctccccatgtcaacctccgtcttcacaaggccttttcctgtgtctctgcaaccacaggcccctctcctttctcttaataaagataccagtcattgagtttgaaaattgcta

SEQ ID NO: 261494 - DNA, 686 bp, Homo sapiens
ttcaagttcttctgtatctttgttttattttctttgttcttttttgtctcatttcctatactgtttttattccatactttgacagttcagtgaactcctttgatagatcccaagtcctcctttttcaatatttacacttataatcatttttgatcactccaaaactgagaactttgagtgtagattttctaggcttcttattttatttttagacattatatagaaaaattagagggaagggaaaagaaggatggcaacatggtaactgggacagtgttcaaaaggtctaagtcctacttctcactccatacaaattatctgcaatttttttatttttgagacaggctcttatctctcacctgggctagagtgcagtggcacaatcatagctcactataaccttgaactccagggctcaagggatccttccatttcggcctcccgagtagttaggactacaggtgtgtgccactacacacagctagtttttaatttttttttattttcatagacacagggtctcactatgttgctcaaactggtcttgaactcctggccccaagcaatcctcctgccttggcctcccaaagttctagaattgttacaggaaagaggtcccaatccaggcccaaagagattttatttatgtactagtgtggagcctagcctaggacacatcaagcaga

SEQ ID NO: 261495 - DNA, 267 bp, Homo sapiens
gagatttgtgagtgatgagcagatagatggaaatgaagtcatgtcaatatttaccccatgagagagtctatactgtgagagataaaaagggcttaaaacagagccctggccaggtgcggtactcacgtctgtaatcccagcactttaggaggccgaagcggcaggatcatttgagtccaggagttcgagactagcctgggtaacatagcaagaccttgtctctacaaaaatacaggaatcagccaggtgaactggcacatgcctgta

SEQ ID NO: 261496 - DNA, 482 bp, Homo sapiens
gtttgaagattttagttttcaaaggaaatatgattttgcctatggatatacaatgattacatttaattggaagtttaaactgcctcctggacatggtagatgccccatgacattgaacaaacacatagggaggttaggctactggctgggataactgcttctaactatcaaaagaatactgggcttgctgctacaaagtgggaaagagataaacaaggtttgaaattcatgtgttttttttttggcatctcttattacttctatatcaagtattgaaagtgggataaaaacttaagatgactcagtattcaacacagtaaaaatgaagacataaatcactccattaagacccagaacaggtgaagtttggactgaggtcatgaataatagaagaagaaaaagataaatataaactatgactttgtgacatgttacagaaatgagaatttcaactgctataatttttttttgcttgttatata

SEQ ID NO: 261497 - DNA, 312 bp, Homo sapiens
gtcttatttcaaatgtcgaaaaatccaaatttctgctgtaaaaccctaatatctgcatttttaatcaagtatgaggaccttcatgaggatgggtatatttgtctttttattcacaaatgtatcccaaaacactagatcacttcctaaaaacaccttaaaaatatatggttctctgtaaatatttattgatgagtgaacaaaccaaagccttgtaggattggcttagtaggatttgtttttgtttcttttactaaattatagcagaaaacagtgacaggaaagaggagtctttaatgggagaaaggcaggcta

SEQ ID NO: 261498 - DNA, 422 bp, Homo sapiens
gaatttggtctcatattcttagtgcctaaaagtaagcacaatctgtcatatgtatcttactaacttcgaagaaatctctaattttctcacaagtaacaactatttctctttctagaattttattgaataaatattcatatgaatcttaatatagaaggtacaaggcaatgtagtgctcaatattttcaattttatcacttataaattgttataaatttgtgatatatcttgccacagtctctgtgacaggacaaactcaatgaagacaattttaacacatgggtatgaagggaattttgaggcaatgaagggaggtgaaaaaatacaacacaaataagagtgagtttatataaattcagcctaagctaatgtaactgagaaaagtcagagggatatgtggatttacattcgttattcaattg

SEQ ID NO: 261499 - DNA, 990 bp, Homo sapiens
ggcacgaggttcctccccactctgtctttctcacctctccttcacttttcctagcctcctcaccaccatctgatctatcttgttctcttcacaaaaggctctgaagacatcatgaacccacaacgggaggcagcacccaaatcctatgctattcgtgattctcgacagatggtgtgggtcctgagtggaaattctttaatagcagctcctcttagccgcagcattaagcctgtcactcttcatttaatagcctgtagagacacagaattcagtgacaaggaaaagggtaatatggtttacctgggaatcaagggaaaagatctctgtctcttctgtgcagaaattcagggcaagcctactttgcagcttaaggaaaaaaatatcatggacctgtatgtggagaagaaagcacagaagccctttctctttttccacaataaagaaggctccacttctgtctttcagtcagtctcttaccctggctggttcatagccacctccaccacatcaggacagcccatctttctcaccaaggagagaggcataactaataacactaacttctacttagattctgtggaataaatccagcctaggctgtgggtggctggttccaggatagagaatcaagctgtcagagtcatcttaacagatcattatgcgactgagttcactagcagttcagcccatccatagcttacctcattcttactatccaaaagccacctcctcctccaaacatccatttctgtaccaagaccctcactcgaatgtcactatcccaagatgaaacctaaaaatcactttccattctttcttgatcttaccccaccatccactcagctgccatgcccagtttagtcaaccccccaaatgctgcttcatgcaaccttccattcctattccttttgccaacccatgatgtagagatgtggattcatgacattttgttcatacaacttcttcaataaaacattataatatgtgccc

SEQ ID NO: 261500 - DNA, 1189 bp, Homo sapiens
  misc_feature (918)..(918): n is a, c, g, or t
  misc_feature (980)..(980): n is a, c, g, or t
ggcacgaggttcctccccactctgtctttctcacctctccttcacttttcctagcctcctcaccaccatctgatctatcttgttctcttcacaaaaggctctgaagacatcatgaacccacaacgggaggcagcacccaaatcctatgctattcgtgattctcgacagatggtgtgggtcctgagtggaaattctttaatagcagctcctcttagccgcagcattaagcctgtcactcttcatttaatagcctgtagagacacagaattcagtgacaaggaaaagggtaatatggtttacctgggaatcaagggaaaagatctctgtctcttctgtgcagaaattcagggcaagcctactttgcagcttaagcttcagggctcccaagataacatagggaaggacacttgctggaaactagttggaattcacacatgcataaacctggatgtgagagagagctgcttcatgggaacccttgaccaatggggaataggagtgggtagaaagaagtggaagagttcctttcaacatcaccatctcaggaagaaggacaaagatttctcatccatgcggaccaacataggaatgccaggaaggatgtagaaataaggggaggaagattcccatctctacaatctttgagtgggtttgctatcaatgaaatgctacaaatggaataagttgcagaaatttttctcttttcttgggttctggagagtttgtaaaacaaggacactatgtatttttaaagagttggtaaatcttacctgtaaagctagagaaggtcggagtctttttaggagtagatttggactacataacctgtaaatgtgttttgtccagtccttagagtgttttttaaaaaattgtaaagtcaaggttttcatgaaaaatgggaagatcagacaacattgntcctgaattcccacagagcagcaagctactagagctcaatctgttatttcttttcctgatgnacaggggttaagtcctatggaagaaacagcagaattattcaaaattatttacataatgtgcaattattcactagagcatgaggagtgaaacgctctgtttagtatgtataacttaaaaggaacacatacaattaaaagtaattgaaagacatttcttcttaaaaattctataatcttacactggtaaaataaactagtttttcccatgt

SEQ ID NO: 261501 - DNA, 453 bp, Homo sapiens
atcctcactggtctccttgttcttacttgaatgggccaggcatattcctgactgattgcctttgccttaaccagttcttggaaagctctttcttcagctatcactgcagctaccctccttcaaggccccttttcattgaggcctactttgactatttaaaattgcaattgccttactccaactgcaacctgcactttctgaatggcactcctgatctccttgtcctgctgcattcttttcctctaacagttgacaatttaattatatttcttggttattgtttgtctctctacatagaatgtaaatttcacagggcagggttaaaacagtgcctggcatatactgctaaatttcttcagtaaaagacagtttacccacaaataacttgacatgagtgtctcataggttttactaacacagtcaccattgcatcaattagttatcttctagagc

SEQ ID NO: 261502 - DNA, 334 bp, Homo sapiens
ctagagaatactgaagagctgaggccaaaaacattcaatgacaagggcagcgatgtttccttgtcaatatcaccactgacaaaaattaagttcagagcccaggaactagccacaggttcagggcctttcaaaacttcatacagctactttttcaaagatattttcaaatatgcccacttggggaaatcaaggtgggtcataggttttagaggctcattttctgcatcttcccaggaagagactgtaccactttgagctttcatgttctcatctataaaatgggaatagtaatagtacccacttcatagaggattcaataaaagtgttaaacaaa

SEQ ID NO: 261503 - DNA, 403 bp, Homo sapiens
gcaatgacaaatgtggccagttcactttctgactccacatatccatgcaactgcttcagtatcatcattccaccagttctttgtcttctttaatctctggtgcctggtatgcctctgcattttcctagcattcatctctgctgtcatacctttcatcactattcacccttagatctcatgattctgtcctgcaatgtcttgtctgattactttctgtgtccctgtttggggaaaaaaaaaaccctccattccttggtgaatgtaagtcataggtctgactcctctcatgtctagtcacaggctgctaagcactcctgcaaaattcagacaacctgacattattataaattcataacctgaaatctcaattagatttattagcaatgtctaacaattctctgag

SEQ ID NO: 261504 - DNA, 396 bp, Homo sapiens
atgtctgatgttccatgggggatattttgtgcttaaaatgtattcagtttttatttttctttcatattctccaagtgacttttggcttctgcattccatacacattataagtggagttttggatgtgagtgtcagagcttgtttatgcaaagaaaatttcatcatactagatgcaactccttaatattctctcacccccaaattttagcaggagctatagaaagtgatttagatataatagtacctattatatgcattggtgtgggcataaaattaaattccaaattgcaaatagaactgctgcaagaaaataatatttcccaagacttattttacttaattgcatggaatattaatatgtataatgaaaataaaggagtctttcatctacttggt

SEQ ID NO: 261505 - DNA, 360 bp, Homo sapiens
gctggagctgagctctgccggcgggcacgtgctgcttgtcctcccaggagccttgggctgctccctccggaaggcacagggagaaataaggggtcctgagaaatgtcactgcctgcacccagcaaaagcccatttctttcttctccttctctttttatttttcttttcttcttgctctctcattgcccccagcccgccccactcctgttctctcctcctgcacctgcaattcctaaacaaccctgatgtttttctgatttccggtccctccgtcgagtctgtctttaaagatgagtactttttgctttgctactgttatttttttagataatttattgttaaataaagaattttaaagca

SEQ ID NO: 261506 - DNA, 133 bp, Homo sapiens
cttgcacgtcgggagtgggagagcctggtaaaggctgacagactatctcttaacaagtgaagattaatgccgcatctaaaactaagctctcctaagtgccgtcggtgcaacataaataccgagagtggggaaa

SEQ ID NO: 261507 - DNA, 400 bp, Homo sapiens
aaagaagtaaaactacctccatttccagatgacataatcttttatgtggaaaatcctaaggaacccataagaaacatgttaagcaaaattgaaggatacaagatcaatgtgcaaaactcttagctggccatggtggcacagttctgtagtcccagctactcaagaggctcaggcaggaggattgcttgagcccaggatttcaaggctgcagtgggccacaatcgcaccaccactttccagcctggggaacagagcaagactctgactcttaaaaaatcaaaaaggccaggtgcagtggctcataccttaaatcccaatgttttgggaggctgaggctggaggattacttgaagctaggagttcaagaccagcctgggcaaaataacaagaccgtatcttt

SEQ ID NO: 261508 - DNA, 255 bp, Homo sapiens
gccttaagcaaaaatcctgctaggttggtttagccagagccccctcattcctggtgtttccccttagtagtttttcctccactgatccccaccctgctccggctattaattcctacttttccttgctgtatatgtggctgagcccaacctctctccccaactgcagaatcgcatcacagtgggtcctatacctaaggcgatagttccttccccccacccctgacacccccaataaaatgtgccttcttaccatca

SEQ ID NO: 261509 - DNA, 618 bp, Homo sapiens
tactttgcagagcctgctcccaattttccctcaagctttttttcccattaatccccgcataaaccttccctatgcaacaaaagccctcttatcagtatttcctatatatgccttgtattttgactgccatcctttcctcacattgcactccagcctgggcgatagagcaagactccgtttcaatatatatgtatatataatttttgtgctgttatatgtacatgatccctttttcaccaaaattaagaatatgtttagtgagagccataaaactaaaaatgcttttgctagtttaaaactcggtttaacccatcatgataaagcagtttaatggtctgtttctaaaacttcaatttgatgcttagttttgatggctgtagaggtgaaaagaataaattcagaaagatttgtagcttcagatggaagaatcacagtgtcagttctgcttagtaacttgtgattgatccaacctatcaaccatgctgaatttttgttgttgaaatgcagggtatagtcttacaaactaatcaggtggtggcattttatatttttaacaaataggcttaagacccacctgaaattcttcatttgaaagatttttaaacaggttagaaaata

SEQ ID NO: 261510 - DNA, 562 bp, Homo sapiens
cacttggtgaccagaccaggcacggttgacacagtcacccagtagaggcaggcacatctcagaagggaactcctcacccagccaggcaaatgtgagtacaatgacagtaatagctcacgcttggatatcatgaactgcatgccagccattgttctaaaagctttacctagatgaattcttgtagtctcatcaccctatgagaatggtactattagactagactgtccatctcatagaagaagaatctgagggaggaagaaggcaaatgacttgtccaaagtcacacagtcagtcaacagcagaactgggcttcactctgttcacacgttgtgtgaagcacaacatggcttcagaaacctggcccctaaccaccacaccacactgcctctcaaggtaggcacccctgaagagaaactccagggacagccacatttgacccaggcagcaggacagagtcaggacctacacacacttgactgtaaatgtcacctcagagaggagggagggatgtttcgccacagccacggggggccgagctcggcctctgtgcatggacaccctc

SEQ ID NO: 261511 - DNA, 426 bp, Homo sapiens
agagtgaggaaggtgctcaagtttggaggaatccctcaagttaatgtaattcttagaggattgaagaggttaataaaaatcattatgaatcatttagcacaacctggaaatagtgctgccatgagaaatgaaaacttgaaatgatttctatcctggaggatttgagactcatgaaaactggagagacagtgttgtacaagaagaatttcttggcagattaaaaatataacccaaggagaagtaaaccactgaagattttaggactttataagtagaattattttctccagtctcttccttttcttgctcctattcatggagataaggcgatatttttttaaccacagaattcactaaagaatttgtgtctatttacaacctcagatgaatatatgaagaataaaagctgacaggaaaaaccatttc

SEQ ID NO: 261512 - DNA, 280 bp, Homo sapiens
ataatattgtcactttgaattttagtttctttcctttcacttcataacttcaaaagaagttttcagtagggcatggaacatttccaggattaagcagcaccagttcaacatgagattcagtcatattcagttcttcagagttcatggaatcctccaggtcctagactgttgctgaggatggttaatgtcaaataaattaaaaatactgaaaagaaaaaaataaaagtgtgtagatgctctatttttggactgagagcagtgaattggtagtggacatagg

SEQ ID NO: 261513 - DNA, 1050 bp, Homo sapiens
  misc_feature (1046)..(1046): n is a, c, g, or t
  misc_feature (1049)..(1049): n is a, c, g, or t
gaatggtgaataactgcatgactggcctggggtaggagactagactagaaggtgggttgagtccagcttgtaaagggtgaagtgtaccatgttgaggcaccagaagttgttactgttttctgttacgctttacctcttgactacagcattgcccccttatagaagaaatggacagacttctgaatcttacaggtttcttcctccagtcacatctcatgatttgttatgggtaaattgctttctttacatttttgtttccccatcaaaatctcacatcttactatacttaaaggacaaatatgttttgaagcatttaaagtattccccttttgggggttgctcttttagttggaaaactaagcaactgaggtaaagtagttgtagaagggaattgtctatttgatttgtgtctgttttgatagcttctgccttcctctaatttattctttcttttctttttttccaccacgtttattacataaaagacactgatattctattccatcattatcatcactaatgtttgtgacccactaaaatgatttcccagctcatcagtgggttacaatccatggtttgaaaaacactgcagcaaattttatgctaatctgccatggatacagggttaccatgtccatgataccttggcgtgaactagaaaaaggtgccctttcctcaagatgcctaattccatctgccaaaaaattgtcgtaatgtgctgactttgttagagtaggatactatcatatgccagagaatagttaaaaataagtaaaacttgatgtcaacattatgaatggtgtgcccagtaaataattatgttgtaagcaccctgtgcacaactgtacatatttgccctagtgtacactaaaccacatgacaaaataggttggaggtgtttgttcaatggataaattatctcagagtacctgtataccagggatttgtgacagctgttttgccttcttagggcttttctgctcatttccctattagagtagccagataaaatacagaacaccctttttaactggaatttatataancanc

SEQ ID NO: 261514 - DNA, 341 bp, Homo sapiens
ggcgggagccagaattgatgtcagtgaaggatgtttctttgcactgggctacttgtccagaacagaaagaactgggcatggtggtgggggtcaggtgatttcatatatatatatatatatatatatatatatacatttttttttttttttgagacggagtctcactctttgtcccaggctggagtacaatggtgtgatcttggctcactgcaacctccgcctccctccaacctcgcctcctgaggcaggagaatggtgtgaactggggaggcggagcttgcagtgagccgagatcatgccactgcccttcagcctgggcgacagaacaagactccatctca

SEQ ID NO: 261515 - DNA, 403 bp, Homo sapiens
agagatgggagtgtttgtattttacccacagcagcagactcagctctaggatatgtggggtgcatgtgtcttctgtctctcctggaactcagtatctgttcattcattcattgagtacctactgtgatcaaggcactggatggggcactatgacaatttctcttttggtattttttcaagatttgtttacttgatcttctagcccaggggtcagcaaaccacaggccatgggctagatccaggcctttgcctgtttctgtgcagcctcaatagttaagaatttttacatttttaaatgattaagaaggaaatcaaaagaagaacactattctgttacacaagaacattgtattcaatttgaattttggtgtcaataaataaagctctattagaacccagctgt

SEQ ID NO: 261516 - DNA, 401 bp, Homo sapiens
cagcaacgaggccaattatagcaactatgagagcaactataaatctttttgaacgggataaaagttttttaaggatttcatttactgtatgaatggatggagatgccgcccacggtctatttaaagacataggtatccagactccttccctggctttaattattaggacagtctgatttttattaaaggttgaactaatacaggtaaacaaatgacatgcggggcatgaaataaagtgtgtgtttatatcaagagtaacatttcctattgctagcagaaaaggtggccggacacaactttgaatccaaaaagtcctgttggaaagaaaagaaagagcatatttatttttacctccttcccctttatacttgttatatttaccctcccaaatttggattgaa

SEQ ID NO: 261517 - DNA, 358 bp, Homo sapiens
gaatggcagatacaaccagaccactttaaggaattgaggttgactttatagcaccaatacaaagccccttagaatgactggcttgatgtcctgtctacaaggatcctttacaaatttgctgtccttgtggtaagaagtaaagaatgtcactttctgatgggcccaggaacctcaagatatttggggaccttgagaagagaggactacacccattcataaaagtattacgggagagctggcaagatgtctgaataggaacagctccggcctgcagcacccagtgagatcaacacagaaggcaggtggttcatgcatttccaactgagcctccactggtgacacccaggcaaacaggtct

SEQ ID NO: 261518 - DNA, 104 bp, Homo sapiens
ccaggtgggccagagttagttcttactcacgctcccaaacatgggactctgtgctcacaggtaaccccaaacatcagagcaataaaaaccagggcaattccagt

SEQ ID NO: 261519 - DNA, 677 bp, Homo sapiens
cccccatcccatatctacccatttttttcaaaatgagaattttcaggttgggaatgtttattgaaataatacagctcctataccagtagtgtatattagttgtgtatgtgtagggcagaaaatatgttttagtttatagtttgaagaaaatgaagatttatctatctatctggatctggtagagagcactgcacttctccacattgcctagaaataatggattttagagctggatgtggaaatttaaaattgcctcctttgtatgtgtgagtgggtttatgtattgcaagaaatatatctgtggacacttgtgtgcttagaggaacggacgttggccaagcctgacaattattccctaatatctccagtttctttcttcccttcagcaataatgtcctaagttctgagcatatagccatctaaccaaaaaactccattttccagcatctctaatagctagggataatgctaccaagtgactacattctggacaaagggatttaatgggaaatgatgtattcaacttttgagagcaactttttaaagatgcttgcccttcacttttcatttttctttgtgaagagaacaggtgtctgttagcttcatcttcttcagccaagtatatgataactatatcataataaacgtcacagtaagtaagcaaagacaagactatg

SEQ ID NO: 261520 - DNA, 588 bp, Homo sapiens
gtagatgtagatttgcatttccctgctttgttgaaattaggagtgaccatatgacttgctttggccaacgtaatgtagttataagtaacactggccattttcaggtggaagatttaagaactagctgtgtgatttgctaggtcctcctttcctctacaacaggaactagtagcgcttttcatggaggctgttccatcagcctgggtcctggagtgagaatgatacagattagagaaataaagctctgttggattaagctgctgacatttaggagttgattgttacagcagcatagccctgactcacaagcctggataagctgtatctttgagggtccgatgatttcatgatttctgattctgattccccagttgtgtggcagcattccagagctgtgctgagactctccaagaagttgcttactaaatttttccagccaccatgtggttaagtgtttttaccgcaatttaaaattaacctcaaaaagatcaaggtcacatgtcgccatcttgaaaggaccagagatgtgctttgagtgcacatatcttggttagaaagccacctattgcattgtaccctaaagccctc

SEQ ID NO: 261521 - DNA, 488 bp, Homo sapiens
  misc_feature (50)..(50): n is a, c, g, or t
taccaatgtagcattactaataaacttaatgataattcactccagaaganaaatttttatacacttagagcttcagtcacaataaaaatttattaaactttaacttatttacatactttttgctgagacttataagatgaccaataacacttttaaaaacatacaaatctattacattaattctatggcagaagtggaatggaaatccaagttcaatgaataaaagggaaaatgtaaaattttcaaatattaaataacttgctattttaaagatggatggtggtaattatcaattcattaaggtatttacataccacttgatacatttcaaaaaacaatgtaacagttttattttaaaaagtcaatatttacactatgccagaaaatgaattctgagcaactttaaaatatgatgaataatcttatacgttaactttaaaagttaagttttcggctgggagcagtgtctcatgcctgtaatcccagca

SEQ ID NO: 261522 - DNA, 434 bp, Homo sapiens
tttctcaagaatcgttgctgtgaaagagccagtgaagtcacagagggtaaagtcaatggtcaaccttcctgattaatgaatattgattgagcattcaccatttaatagttagctccttctaagtctaatcgtttttagtttctcctgacacctgtcatgtaagaggctctatatgtgaggatagacttagggggcagttggttcctctttttggacacagaacaggaagaataaagagatctcagaaggaaaaggaaagtgggaggaggctgggtctgtgggttccccggtggatcacgctgaaagaatacctggcagacacttaatctctgcggcaaatgcatgaaagtagaaggatgaagccaactttccaaaaacttttatgaaattacttcagtgagaaaacctattaaataaattacagccattctata

SEQ ID NO: 261523 - DNA, 213 bp, Homo sapiens
ctgacctgatgtcctctccctgtgttctctgctctggttcaatcagttgcagcactcaccttctttgcctctccttgcacctgtgtagaaccaagcacacctgtaactttctttccctgaagctgattttcattctctgccagaatctccataactatctattgtgcgacattaagggatgttggtattacagtaaaatttccggagttagca

SEQ ID NO: 261524 - DNA, 423 bp, Homo sapiens
tcctgaaaacaaacacaaaaaacaaatactttctacacaaagtttccattttagtataaaataaagcaaaaaatgaagaacaacttggatattattaatagtgtggagattgctaaataagctatggtatataaattaacttagtgttatgccaccaaattaaaatggtttttatgaccacgcaatggctcatgcttgtaatcctagcacttgaggtcaggagttcaaaatcagcctgggaaacatgatgaggccccatctctacaaaatattaaaaaattagccaagcatggtggcatctgcctgtaatcccaggtggagctgaggcaggagcatttcttgagccttggagttggaggctgcagtgaaccatgatcatgcgggtgcactctagcttgggtgacagagtgaagcctgtctctt

SEQ ID NO: 261525 - DNA, 219 bp, Homo sapiens
tgtgaaataagatattttaacttttggcttcaaatcattattcatcgtaattctgttttcttaaatggctctcattcatggcagagatctttgaggtgagggtgttttaatcattgcatgcctagtacctgacacattgactggtatgtggtgtgagctcaatgatcttctgttaaattaatgaataaatgtactcagctgcccatccacttaggctca

SEQ ID NO: 261526 - DNA, 310 bp, Homo sapiens
ggatccatcagtgaaaagataagtaactcatgtagtatgttaggagatgattagtgcacaattcatttatgaatgacccataaaagaataagttgataaattagatttcatgaaaattaaaaaattctgcactttgaaaacattattaagaaaatgaaaaggtaagccacagactgtaagaaaatatttgcaaagaatatatctgataaagaacttatatccagaaaatacaaagaacttcgaaaactcaataatatacaacatattatttaaatgggcaaagatttgatcaggcacttcaccaaaaaaa

SEQ ID NO: 261527 - DNA, 177 bp, Homo sapiens
tatgctacatttttaaaaggaaaaataatgtgaaagttctatttgtagaacaaataatagtggcaatctcactttgatcttaaataacatagatatccaacttttatacaatttgaaacaaacaaaaccacaaccaaccttgtctttacaatcaattctttgtgactagagaagact

SEQ ID NO: 261528 - DNA, 418 bp, Homo sapiens
ggaggcccagactttaagtcctctgtgataggattgaggaggacagcctaggaacaatgagcctcctgctcgttgctgtctggtagctggccagaagtaggaaggggaaggaagagaggagcactgtggcctctcttctcctctccatgcctcgctgcaaaagtggagaagaaggaaggaaactagaaaggtgtcagaaaggggtgtcatgaaatctatgagcatccaaatttgattttttcagctagtcacaaatttaacataacaacctaaaattaaacttgaaacacagaaaaaacaaatacatttaagaaacatactggtaaatgatgaccttgtctatttaaaatccttactgactgtaaactctttgaacagcgattttgtgagccttatgtggctttttatcctgggtctt

SEQ ID NO: 261529 - DNA, 869 bp, Homo sapiens
attgacagacatttgtggagtgagtgctgggctgaggctgctgcatgaggctgattttgattcctgaggtcctggcccccagagataagaggcctcattcctggagttaagtaagatacagccccctcctcagatgactgcctgaagaatccattcataaatgagcgccatgtcataatcacctcacctgtctgtccagtaggattgaagaaggaaaaagtgggcggggcgtagtggctcacgcctgtaattccaactctttgggaggccgaggcgggcagatcacttgaggtcaggaattcgagaccagcctggccaacatggtgaagccccatcttcacaaaaaatacaaaaaattagcggggcgtggtggcaggtgccaataatctcagctacttgggaggctgaagcaggataattgcttgaacccaggaggtggaggttgtggtgagtcgagattgcaccactgcactccagcctgggcgacagagtaagactctgtctccaaaaaaaagaagaaaaaaaaaaaaaacatggaaaaaaaaagaaggaaaaagctgaaattccaaattatagagactttccttctcctaggcgccactctccaggacagtgactaaagaacagcttcaacaaacccctttctctccctttccctcccgggatctcacacacagggaaatggcaaggccttgggtgactgcgagaggaagcagagaccaccttgaaactcgggtgcattaagtccttggccttctcatcttaatctgctccagaataaaaaaatttaaaaaaaaaagtccgtggcctcactggtggtcaagagaccaccttgaaactcaggtgcattaagtccttggccttctgat

SEQ ID NO: 261530 - DNA, 316 bp, Homo sapiens
  misc_feature (303)..(303): n is a, c, g, or t
  misc_feature (309)..(309): n is a, c, g, or t
cctcttctcttctcgcttgggaacgccggtctcacctcggcttgcaatggaccccaactgctcctgcgccgctggaggctcctacgcctgcgccggctcctgcaagtgcaaaaagtgcaaatgcacctcctgcaagaagagctgctgctcctgttgccccctgggctgtgccaagtgtgcccagggctgcatccgcaaaggggcttcggaaaagtgcagctgctgtgcctgatgtcgggactgccctgctctcggatgaaaacagaatgacacgtaaagtccgggatttttttttctacaacnccgacncatttgc

SEQ ID NO: 261531 - DNA, 357 bp, Homo sapiens
cacatcagggaatctttagagagaggagcaatgagcctcaacctctttctcctgtttggtaactcttggtgctttcatgctaataatgctgtgaggaggtctggggctgctcctccatggggactgtgtccatcttgggaaggcccaggagtgagcagctttataagttagggagaaatagtatcattcccttgattttttcttccagggttaagattagctagtggttgaagattaagagatagaccaaccaagggcctgcatccagggcacagaagcagccctttgagtgacaaggggacaggtggtcaagctcaacttactggaacagtgtttttagacaggaggggttaaagg

SEQ ID NO: 261532 - DNA, 656 bp, Homo sapiens
ccaacgactatatgctaaggatgccaaatctgtatttccagctcaaatatctctcttgagatcctgcattatatatttaaaggctttctgggcatccccactcggaagacccacagataactctaacataagtacaaaactgagcctagattagctgggtgtgggggcgcacacctgtagtcccagctgctcgggaagctgaggtgggaggatggcttgagcccaggaggtcagactgcagtgagcctgagccgtaatcgtgccactgcactccagcctggatgacagagtgaaaccctgcacgcccccaaaaaaaccctgagcccagaatctgaacccgagtggaagggcattcccgttacataccaaggggggcatgaatacagggaggagtataattaaagtcattcttaaaaataacctaccacatttgcataaaccagaaattcattctgtggtgacaataattagtttttggcatgattataacactcagcccttgggtatttggccaaaagttatatttggtgcacctctaccaacgggcacagtaagtatcttataagctgtatcttttagctaagccagaaggctatggctcagacaagtttcttaggccacaaaactcaggtgttagaaacaagcaaacaaacaaa

SEQ ID NO: 261533 - DNA, 430 bp, Homo sapiens
atttttttcacctttctatattttactttcacaattataagtaaataaagacttgttttaacataaatcacactttatagtaataaagagcggatctctgttgctctccttttttactttaaaattttttatttttaattattatggagacataataggtgtacatatttatgggatacatgtgatgttttgatacaagcatataatgtgtaatgaccaaatcatggtagttggagtatccatcatcttaagcttttatcatttatttgtgttaggagcattccaattctaatcttttagttattttgaaatatacaataaattattgttaactatagtcactgtattgtgactatatagtgtttccatagaacactagatcttgttccttctatctaactgtctttttgtacccattaaccaactcctc

SEQ ID NO: 261534 - DNA, 680 bp, Homo sapiens
gccacattccccaaagcatttgcctaagaacatgagtcctgaaaggtgttattaggtagaacatgaaatatcaggataccttccaatattttggaaggtgatacctttctacattgcagcaattaccaaattcctgtagtctctaaatgaaaagcccccagaatgaaggggcagatttgtctgaagaattattcagatagcagtgcaagggagaagcaaaaataggaagacactgtgcctttgttgggtacaaggtatatcaattatatagcactgcataaatacacagagaacaagatttttcctctaaatcacaatcctggtcctcatagaatagaccctaaggaatatgcttatttaaaataagaaaatatcaattgaatgtaacttcaacaagagcaggaaggtcaggccaatcagtttataaggagtgaaacagtctaagagaccagatggcacagagacaggaagccagagagatgaagacaaaagttcgttggtaatatcagcaattctataggtatattttcgttgtctaaaacttattttttataaacacagccatttcacagtgtccacatattatttcttccttctgataaaaatctgtttaaaaaacagtcctacttttgaaaaatgttaggctatctttacagaacaaaataagactctctttgctt

SEQ ID NO: 261535 - DNA, 464 bp, Homo sapiens
atccgcagcatttaccacagacattttcctcagccttttaaaacatatgaaacacctgagaaatatttatgagcctcgtataatcatttttttaaagatctgaaatctctccttttagattaatacttaaacaattgatgaagataatctctcttatctgggcattacatttttcttctggtacttcaaagattaatcataatcatcctaaaattagtgactacgaatctttggcaggatggcccaacttccgttataaatatcatagacattttgcttttttatcccaccatgtttaagaaaaaaaaaaaagtatgtgtttatgtacagaattaaggagctaacaggccgggcatggtggctcacacctgtaatcccagcactttgggaggctaaggcgggcagatcacgaggtcaagagatcgagaccatcctgactaacacggagaaaccctgtctctact

SEQ ID NO: 261536 - DNA, 227 bp, Homo sapiens
ggaaataagtattctctgacagtaaactagactggaactcagggataggcaggatcatctccattacattctccagcactggccgggcgcagtggctcctgcctgtaattccagcactttgggaaggcgaggcaggagaatggcttgaggccaggagttcaggaccagcctggggaacatagggagaccccatctctacaaataaaaaaatttaggaattagtcggg

SEQ ID NO: 261537 - DNA, 659 bp, Homo sapiens
ttcatgatccacagaaaaataaaaaaacatggagccccagagcccaagcagagccaaacagacaagcaaccaaaataaaagttgaagttgtgggatctcatccaattcccaccagattgtatcctcacccctgtctgaccttattgttgctcacactctatgtcccaaaatgaaaacccaagacgatggagtattgcccccttatgatgtgaaccaactgcttggctgggacctgaatttgagtttattcctagggctctgtttgatgttacttctggctggctcatgtctgccctctcctgggatcacgggactatcccatggatccaacagagaagacaggtgaagttgctggaacccattctccattcagcagattgtatcctcaccccatgtgaccttattgctgctcagactctatgttccaggataaaatcccaagaagatggagaagtgcatccctcatgatgtgaagcatgtgcgcagctgggaaccaaattcgagagctcacagtttgaatagaagaatccaaagctacaacagcagcagcagctatagctgtgaccgctatgaggcccgtgatgacagctattaagggagactcaccaccaaggggattaccaccatcgtagctaccattagattactggtggtcagca

SEQ ID NO: 261538 - DNA, 425 bp, Homo sapiens
tgctttttaaaaagtaaagtttatttttttagagcacttttaagttcggagcaaaattgagagaaaggtacagagatttcctatatgttccctgcccccatccctgcagtttccctctttatcagcatccccccaagccccttcctctagtgcttccaaaaatacattaaaaactcctcttgctttatcatacagagaagtatttatcttttaaacctcaacatctcttatccagattaacacaaagaccttctctctccaaaaaaaaaaaaaaagctcatcaaagaggcttcccaaacagaacagttttcccaagagtaagaaaatagctacagtaagttttatttatttatttttaaaacagtaattttgcctttctgccccatgactatagcggtaatcatccacttgaatcctctgtagta

SEQ ID NO: 261539 - DNA, 448 bp, Homo sapiens
tcacttcaagccgtcctctccaccttccagactattcctatgggagatgattattagcccgtttttttccaatgttttgtctaaaaataaccaaaatttaacttttcctgagaattacatggacttctggaagtacttttcccactgcttttaagtgggctctcctccctttaacacccacccatttttttcatatgaactcttatttttttttttatcttaaaccttttcattcatagctttcaatctgcattttgaacctaataggaaatctctgttgggcttcagcactgtctgtatttaacaccatgtgtttctttctaggatttagatgttgtgcatgaaaaactatatagtgaatggttttataagttctaaagctaacagaaattactcttgtattttcctatatcaggaaataaagatggaggaagctatgacctacaca

SEQ ID NO: 261540 - DNA, 477 bp, Homo sapiens
atggaaaaagcattgaaaattgacacacctcagcaggggagcattcaggatatcaatcatcgggtgtgggttcttcaggaccagacgctcatagcagtcccgaggaaggaccgtatgtctccagtcactattgccttaatctcatgccgacatgtggagacccttgagaaagacagagggaaccccatctacctgggcctgaatggactcaatctctgcctgatgtgtgctaaagtcggggaccagcccacactgcagctgaaggaaaaggatataatggatttgtacaaccaacccgagcctgtgaagtcctttctcttctaccacagccagagtggcaggaactccaccttcgagtctgtggctttccctggctggttcatcgctgtcagctctgaaggaggctgtcctctcatccttacccaagaactggggaaagccaacactactgactttgggttaactatgctgttttaa

SEQ ID NO: 261541 - DNA, 484 bp, Homo sapiens
aaagctatattcatgctgacatgagggcacatgcttattttattatccatatgctgatatttttctgggaaacaaattattcacagaaagcacttgtaagacagaacccacatctgacattttctgtggtagagcagagtctctcctcaccatccctgctggcagggcatctggattaagtgcctgcagttttcctatacacaaaccgaggggttctggatcttttatactttctcttcaagggtggaaccaatgtttagaggtatctgctttctcttaactgtgctgaaaatccaatgtgttactctttaaaagagaaaagcccttatatgatacaattagagaagtgttacttccccttagcagcagtcccagttgatcaccaccttgaagtggaatttcctgatttttcttaatacctaataacaaacaactttattgaagaaataagaactttggttgtgtaatttttcagaaaaaaaaa

SEQ ID NO: 261542 - DNA, 541 bp, Homo sapiens
tttattcttgcaaacttttagcaagtccatctgtgaaaaactcagcttctcgttcattcaattcttctcctaagaagtctccagtgcactcactcctaactagttcagttgaaggttcaataggttccacatcacagtatagatctgccaaacctattcattcatctgattctgttaaagattcacagtctccgccaatagaaacaacaggaaaaacatgcaggaagcttcagaacagactagaaagcttgcaaactctggtagaagatttacagctgaagaaccaagcaatgtcttcaatgatcagaaatcaagaaaagaggatacagaaagtaaaagaccaggaaaaaatgttactaaaatgactcgttgcttgcctattctttacagaggaatgaggcccaattaattgtggtgttactcgtaattagtgccctgtgtactttttctttttatgtgaaaatttaataaaagataccctgtcttgtaaactctattttgaaataaactattcttgaatccctcacagtaaaacttcaaa

SEQ ID NO: 261543 - DNA, 402 bp, Homo sapiens
caaaaatatgctacatcacaatttttaagaatgtcttgagctcagaacatgtctattctatactatcaagctgatcttttaagtagcacatagtagaattaaagcctaagtagattttgttattctaactgttttatcaacattttcagcaatgtcttcaatgatcagaaatcaagaaaagaggatacagaaagtaaaagaccaggaaaaaatgttactaaaatgactcgttgcttgcctattctttacagaggaatgaggcccaattaattgtggtgttactcgtaattagtgccctgtgtactttttctttttatgtgaaaatttaataaaagataccctgtcttgtaaactctattttgaaataaactattcttgaatccctcacagtaaaacttcaaa

SEQ ID NO: 261544 - DNA, 669 bp, Homo sapiens
tttattcttgcaaacttttagcaagtccatctgtgaaaaactcagcttctcgttcattcaattcttctcctaagaagtctccagtgcactcactcctaactagttcagttgaaggttcaataggttccacatcacagtatagatctgccaaacctattcattcatctgattctgttaaagattcacagtctccgccaatagaaacaacaggaaaaacatgcaggaagcttcagaacagactagaaagcttgcaaactctggtagaagatttacagctgaagaaccaagtatgttcctgcagtggctcttggagcaaaagtcaacagtgtgagtctccacacgttgctctgtccatccaagttggagctgcacgttagccctgtctcctatctgccatcttcctctccacatctattcaatgtcttcaatgatcagaaatcaagaaaagaggatacagaaagtaaaagaccaggaaaaaatgttactaaaatgactcgttgcttgcctattctttacagaggaatgaggcccaattaattgtggtgttactcgtaattagtgccctgtgtactttttctttttatgtgaaaatttaataaaagataccctgtcttgtaaactctattttgaaataaactattcttgaatccctcacagtaaaacttcaaa

SEQ ID NO: 261545 - DNA, 425 bp, Homo sapiens
ggaaatgaaatgaaaaaagaaattgtattacttgaaactttgccatgtgcaagaaccctggaggtgatcgtgctctttcatccataaacttgatgtttatttagctgacagcaaagatagcataaataataggtaagtagtggacgaaatgttcccaactgttttttctccatcttttgtcatatttctagataatgccttctacagaacacttaatgttgaaacagtgaacaaaaagcaattttcccacaactgaggcatctctgttcttgatcagtaaatatcaaaattagtagatggcagaattgcatggagagaacagactgtcttgaagaaatatgtagaacaaattatgctagtacttggaaattttgcagcagacttgcaacactgtatcattgcttgttttctggatctatttagta

SEQ ID NO: 261546 - DNA, 2495 bp, Homo sapiens
  misc_feature (2420)..(2421): n is a, c, g, or t
  misc_feature (2461)..(2461): n is a, c, g, or t
  misc_feature (2495)..(2495): n is a, c, g, or t
acgcggggattctgtgtaattcctatccacagtcacttctgttcatttttaatgaaaacctattgctgttattttctattatgagttaacggtgatgtgtgttttttaaattttgtatacttgctctcaccctaaaatataccttaagagacttttcccctgtttttctttctgctttccaagactccaggaaaaacagcttccatggcacattttgtacagggcacatctagaatgattgccgcagaaagttctacggagcataaagagtgtgctgaaccatcaacaagaaagaacttgatgaattctcttgaacaaaagataaggtgtttggaaaaacaaagaaaagagctcctggaagttaaccagcaatgggatcagcaatttagaagtatgaaagagttatatgaaagaaaggtagcagagctgaagacgaaactggacgccgcggaaagattcctcagcacgcgggagaaggatccgcatcagaggcagagaaaggacgacaggcagagagaggacgacaggcagcgcgacctgacccgggaccggctgcagcgggaggagaaggaaaaggaacgcctaaatgaagaattacatgaattgaaagaagagaataaacttttaaagggaaaaaatactcttgcgaacaaggaaaaggaacattacgaatgtgaaataaaacgcctcaataaggctcttcaggatgccttgaatatcaagtgttcattttccgaggactgtttgaggaagtctcgagtggaattctgccatgaggagatgagaacagaaatggaagttctgaagcagcaggtgcaaatatacgaagaagacttcaaaaaggaacgatcggatcgagagagacttaatcaagagaaagaggagctacagcaaattaatgaaacttcccaatcccagttgaacaggctgaattcccagataaaagcttgtcagatggagaaagaaaaactagaaaagcaattaaaacagatgtattgcccaccctgtaactgcggcttggttttccacctgcaagatccatgggtaccaacaggccctggagctgtgcagaagcaacgggagcacccaccagactatcagtggtatgctcttgaccagcttccgccagatgtacaacacaaggcaaatgatggtgtcttgctccacctccagtctgttgccaggctggtctcgaactcctggcctcaagtgatcctcctgcctctggctcccaaagtgctgaaatttcaggtttatcctcagtaaagaaagtccatccgtagaagtacacactaacagagagagacaacaggcaacgagggagcgtggctgaggaccctcttctttgtttatactgaggcttgtttctgccacaaaggcacatcatctaccctgttatttgtgcctggtcatgttttcctttggtatgaatacaggaaaaggcttctgacagctaagatcctgatcaaattggaggagccagttattatacaaccaaatacaacttccagtttccttgaaatgagacttggcagatggatgatgcacgactccctgaaaatctcttcagcatattgctgttggatgcacaaaaatgattctatgatttaggcaactcagtgtttgctgcagggatattgtatgttgatttaaagtgcatatgtgtgtgtgtgtgtgtgtgtgtgtgtgtgtttcctggggtaaaaatttctgcagttgtaaacgtttaacattgctcccattcttcttccacagggccttagttctttagctatttgactacatattgttgacctcagtgatcctaaacgtagaattgaagaggtgtatatacctcgttaaattaaataagtggttcaatctgaataagatggttaattggaagctattccttagacagatcatttctttaagatgatgagaaattgtgcgcctgcatcacaagacttgattatgaaagataaagtcttgggctgggtgcagtggctcatgcctataatcccagcactttgggaggctgaggcaggtggattgctttgaggccaggagttctagaccagcctggccagcatggtgaaaccccatctctactataaatacaaaaattagccaggctcgtggcacacacctataaacccagctactcaggaggcttgaggcgggaggatcacttgagcccagggaggcagaggttgctgtaagttgagatcgccactgcactccagcctgggaaatagagtgagcaagactcagtgccccctacccacccactccacaccaccaaaaaaaaaaaaaaaaaaaaaaggaagacaaagtcctgatgggatgatgatggctatatggctatgctgtgtccatatatacttacagaaatatttcagacatatggatttatagttaaatctgtgtttttccttccnntggatttgattaattttaatgaaaaacttaattctgactnctcaagccaattaaaatgaaaatggaatttattn

SEQ ID NO: 261547 - DNA, 1284 bp, Homo sapiens
  misc_feature (1209)..(1210): n is a, c, g, or t
  misc_feature (1250)..(1250): n is a, c, g, or t
  misc_feature (1284)..(1284): n is a, c, g, or t
tattttaccatttccataagcacaagaagagggtttctttgttacccctcatgaaagtttgtccatccgtagaagtacacactaacagagagagacaacaggcaacgagggagcgtggctgaggaccctcttctttgtttatactgaggcttgtttctgccacaaaggcacatcatctaccctgttatttgtgcctggtcatgttttcctttggtatgaatacaggaaaaggcttctgacagctaagatcctgatcaaattggaggagccagttattatacaaccaaatacaacttccagtttccttgaaatgagacttggcagatggatgatgcacgactccctgaaaatctcttcagcatattgctgttggatgcacaaaaatgattctatgatttaggcaactcagtgtttgctgcagggatattgtatgttgatttaaagtgcatatgtgtgtgtgtgtgtgtgtgtgtgtgtgtgtttcctggggtaaaaatttctgcagttgtaaacgtttaacattgctcccattcttcttccacagggccttagttctttagctatttgactacatattgttgacctcagtgatcctaaacgtagaattgaagaggtgtatatacctcgttaaattaaataagtggttcaatctgaataagatggttaattggaagctattccttagacagatcatttctttaagatgatgagaaattgtgcgcctgcatcacaagacttgattatgaaagataaagtcttgggctgggtgcagtggctcatgcctataatcccagcactttgggaggctgaggcaggtggattgctttgaggccaggagttctagaccagcctggccagcatggtgaaaccccatctctactataaatacaaaaattagccaggctcgtggcacacacctataaacccagctactcaggaggcttgaggcgggaggatcacttgagcccagggaggcagaggttgctgtaagttgagatcgccactgcactccagcctgggaaatagagtgagcaagactcagtgccccctacccacccactccacaccaccaaaaaaaaaaaaaaaaaaaaaaggaagacaaagtcctgatgggatgatgatggctatatggctatgctgtgtccatatatacttacagaaatatttcagacatatggatttatagttaaatctgtgtttttccttccnntggatttgattaattttaatgaaaaacttaattctgactnctcaagccaattaaaatgaaaatggaatttattn

SEQ ID NO: 261548 - DNA, 402 bp, Homo sapiens
ggagatgagaacagaaatggaagttctgaagcagcaggtgagaagctggaagtggcatgatcctgtggagaacatactgcccatttttcatgcttctttgggcatttttagatgtcttgctgctagaaatatgtcaaaggtttttgcatttattttaagtagaattatctaattttcaagcttgatagaaagaatacagatcagctagttcagtcccaccatttagaacatagggaactgagtttcagacagattaaatgcttacccaagatcacacaattaaaagaggggcacgccaattaacctttgggtgaggttctattagcactggggctagggagtttcacgtagacatggtttttgtttttgtttttgagacagagtctcccattgtcactgagg

SEQ ID NO: 261549 - DNA, 2394 bp, Homo sapiens
  misc_feature (2319)..(2320): n is a, c, g, or t
  misc_feature (2360)..(2360): n is a, c, g, or t
  misc_feature (2394)..(2394): n is a, c, g, or t
acgcggggattctgtgtaattcctatccacagtcacttctgttcatttttaatgaaaacctattgctgttattttctattatgagttaacggtgatgtgtgttttttaaattttgtatacttgctctcaccctaaaatataccttaagagacttttcccctgtttttctttctgctttccaagactccaggaaaaacagcttccatggcacattttgtacagggcacatctagaatgattgccgcagaaagttctacggagcataaagagtgtgctgaaccatcaacaagaaagaacttgatgaattctcttgaacaaaagataaggtgtttggaaaaacaaagaaaagagctcctggaagttaaccagcaatgggatcagcaatttagaagtatgaaagagttatatgaaagaaaggtagcagagctgaagacgaaactggacgccgcggaaagattcctcagcacgcgggagaaggatccgcatcagaggcagagaaaggacgacaggcagagagaggacgacaggcagcgcgacctgacccgggaccggctgcagcgggaggagaaggaaaaggaacgcctaaatgaagaattacatgaattgaaagaagagaataaacttttaaagggaaaaaatactcttgcgaacaaggaaaaggaacattacgaatgtgaaataaaacgcctcaataaggctcttcaggatgccttgaatatcaagtgttcattttccgaggactgtttgaggaagtctcgagtggaattctgccatgaggagatgagaacagaaatggaagttctgaagcagcaggtgcaaatatacgaagaagacttcaaaaaggaacgatcggatcgagagagacttaatcaagagaaagaggagctacagcaaattaatgaaacttcccaatcccagttgaacaggctgaattcccagataaaagcttgtcagatggagaaagaaaaactagaaaagcaattaaaacagatgtattgcccaccctgtaactgcggcttggttttccacctgcaagatccatgggtaccaacaggccctggagctgtgcagaagcaacgggagcacccaccagactatcagtggtatgctcttgaccagcttccgccagatgtacaacacaaggcaaatggtttatcctcagtaaagaaagtccatccgtagaagtacacactaacagagagagacaacaggcaacgagggagcgtggctgaggaccctcttctttgtttatactgaggcttgtttctgccacaaaggcacatcatctaccctgttatttgtgcctggtcatgttttcctttggtatgaatacaggaaaaggcttctgacagctaagatcctgatcaaattggaggagccagttattatacaaccaaatacaacttccagtttccttgaaatgagacttggcagatggatgatgcacgactccctgaaaatctcttcagcatattgctgttggatgcacaaaaatgattctatgatttaggcaactcagtgtttgctgcagggatattgtatgttgatttaaagtgcatatgtgtgtgtgtgtgtgtgtgtgtgtgtgtgtttcctggggtaaaaatttctgcagttgtaaacgtttaacattgctcccattcttcttccacagggccttagttctttagctatttgactacatattgttgacctcagtgatcctaaacgtagaattgaagaggtgtatatacctcgttaaattaaataagtggttcaatctgaataagatggttaattggaagctattccttagacagatcatttctttaagatgatgagaaattgtgcgcctgcatcacaagacttgattatgaaagataaagtcttgggctgggtgcagtggctcatgcctataatcccagcactttgggaggctgaggcaggtggattgctttgaggccaggagttctagaccagcctggccagcatggtgaaaccccatctctactataaatacaaaaattagccaggctcgtggcacacacctataaacccagctactcaggaggcttgaggcgggaggatcacttgagcccagggaggcagaggttgctgtaagttgagatcgccactgcactccagcctgggaaatagagtgagcaagactcagtgccccctacccacccactccacaccaccaaaaaaaaaaaaaaaaaaaaaaggaagacaaagtcctgatgggatgatgatggctatatggctatgctgtgtccatatatacttacagaaatatttcagacatatggatttatagttaaatctgtgtttttccttccnntggatttgattaattttaatgaaaaacttaattctgactnctcaagccaattaaaatgaaaatggaatttattn

SEQ ID NO: 261550 - DNA, 288 bp, Homo sapiens
tggaacccacctcctttgaagatacagagtatttctatcatccagaaagttctcctgtgctttcatgctgtcccgcactcccccagcagctgatgaacatgctgaggacattggtactggattctggccgccccaaaagagccgctttgaccaggcttacccagcactaaatccctgcctgctctctcaaaatttccatctttaaactggttgtacctataaccctccctcatcaagtcaatagataaacaaaccctgaaaaataaacaactcttcctggcccagcag

SEQ ID NO: 261551 - DNA, 407 bp, Homo sapiens
caggccacctagcttcctgctgtcagaaagttctcattgctagtaagattttcttgacaatgtgtaaagtgctgcacctcccttgtgaataacgcctgggaagtggtgttagtgtcatggtttcccagtgcctttgaccttgtggattcctggtttcagtggcctctttcttcccactgggttgtgggaagaaaggcagacagccttgaggcagacagcctcggtgcattgttgaatgtaagaatgaataaattggtgcacaaagaccgcatgaaccctcaggatttctgagttcctatctctttagcctggtgctcggcactcatccagggtaattggtcaggcttggtgtactcaggaaaaggagacaccgttatctctccaataaagtctgtatctgatgacat

SEQ ID NO: 261552 - DNA, 466 bp, Homo sapiens
tgagcaagagcatgtgatctgcctaggtccggctctatgtggggaacaaaagtataagatgggggctctgtccccaaggaactgggtctaataggaagactaccaatggctgcaaagtaagtcagagatcaatgaagtgtggtaagtaattgaaagtgaaattgtgtggctctgaagcccgcatgagcggaatgtgaaaacagatcagctttgagtttcagctgtaacctcttttgctcccttacagatgggaaactgtgaagagcctccccaaagaaaatcaaatccacgtaattgttctgtctctcaaatgcttgtactcactccattcatctgagcccgggtctggtttatttcctcctgcacaatgtggggccctcctttacaggtaaaaatggcattttccaccctttgatgtttctccacagccccacaaagaaaccagaaaataaaactgtcaacaaca

SEQ ID NO: 261553 - DNA, 399 bp, Homo sapiens
agtgaaggaggaggaagaacaggagggccttttctgtccacagcacattttggaggattggtgttccatggaacactctttggaaagcatggccccccgctgttctgcaaagctgtgtgccttgcccttgttcattccagttgccctctgtttttccacttacttttcctaccctgagataacagtgatgcatctattgctacaaggaggattaggggatggggagaggctgttaagtccctctctaaccttttcctgctgttcaaagcatgaacaaagtgaacatcttatatggctgcactaaaaaagttgcccgcttacaagctgaactcaggcaaaatgaactcctgaatcctcacataaacggaaatagagccccaccctgtatcctgccattta

SEQ ID NO: 261554 - DNA, 652 bp, Homo sapiens
ggcagggtctccaagccactctcctcagcttgctggcatcctagccccagcctgtcggggttccctgctccctgcctggcatctatcttccatattccatcaacctgggttttttgtttgttggttggttttttttttgttttgttttttattttgagacggaatctcattctgttacccaagctggagtgcagtggagtgatctcggctcactgcaaccttcacctcttgggttcaagggattcttctgccttagcctcctgagtagctgggattacaggcatgtgccatcgcacccagctaacttttgtatttttagtagagacggtgtttcactatgttggccaggctggactcaaactcctaacctcaagtgatcctcctgcctcggcctcccaaagtgctaggattacaggcgtgagccaccacacctggcccatcaacctggttttgaactttctgcctgagccttgaacttgacccctctgggttgctaacctggggcatgtgtccccagacttcatgccagtcccttccccagacttcccccaggctacttagctggacccaaccctggcctagtcaggcccccactggctggggagagatagcaggcccagcacatgtggactatgagggttaatcgtaggca

SEQ ID NO: 261555 - DNA, 248 bp, Homo sapiens
cacacacacacacacaaaataatgttacttctcagtcacccgggaactgacatggttcccagttatttccttgcagcagccctccaagcggtaacacagccttggagaaagctactaagtcatgtatccttggggtaagcacacttggttcagaatagtttctgaaagaacaaaccaggtttttgctcaagagggttttgagggactggagaaaaccttagtgcttgttcctttctcttcggttaaaa

SEQ ID NO: 261556 - DNA, 526 bp, Homo sapiens
attgcttgagtccaggagtttgagtctgcagtgagctatgatcatgccactgcactccagtctgggtgacagcaagaccctgtctcaagcaatttttttatattagtttatgtaatgtttattgaaatcacagtgtcaacaagcacctctggcatgaaatagtcacaggagcgaacacaactatctcttggaagcatgcagtttgactcatggaatcaagcatgtgctgtactataataacttgtctctccatgccgtaatgccatcctgactgagatttacctggcccttcaatatagcattttgcatatctacctatgacatgatgggaggtggctaatggggagggatgcgccctggggagttttgtgaatgtgttaagtggagttaagagacctactgcatgctattgtatagattatacattatatatttaaccatttgttgctgtacagtgaagctttttctagtatttcttttttgctattataaacaatgttgcagtaaatatcctaaatactctaaa

SEQ ID NO: 261557 - DNA, 537 bp, Homo sapiens
tgaacctggggaacatagcaagaccttgttactacaaaattttaaaaaattaggagacgtggtggcacacgcctgtaatcctagctacttgggaagctgaagtaggaagatgacttgggcccaggaatttcaggttacagagagctgtggtctggtcactgcactccagcctgggcaacaaagtgagaccctgtctctaaaaaacagaagttatattttaattggcaaataaaactatatatagttatggtatacaacatagtgttttgaaatatgtatacattgtagaatgactggatcaagctaattaacatatgcattacttcacatacttatcttttttgtggcgagtacaattaacatctactctcagtgaatttcaagaatagaatactttgttagtaactatagtcaaaatgttatacagtattctgttgctttcagttgtatcaatctcaacactcccattgcctcattcaaatatgctaaaacatttacatttctaaataaaccttggatgtttcattggtaaaagga

SEQ ID NO: 261558 - DNA, 471 bp, Homo sapiens
gaaaccgagggagggagagagacagcgatcgagagagacaggggagggcgagagggaaggagacagacagagaggctgagaaagagagaggcacagagaaagagagagagagagacagagagacagagggaaaacgacagaagtagcgcgaggtccagggggaaacccagaagagagaggcggagggagctagagagcgagagcgatagagccttagagaggaagcgcccggctccgttaggcagcgccctcttgagcaagccgggatagggtggagggggcttgggctgcgcccagaacacgggggccaggcggtccgtgcgagaggaccaacggagcgctgaggcgggcgtcttcttggatgaattgcttgctttggaggtgggtttcgtaggctcctgcctttcttggcacctccctgtgctctgggtgccttgcggcgggccccgagatttgcagagcgcgcccgcc

SEQ ID NO: 261559 - DNA, 665 bp, Homo sapiens
ggagaagcccacccagcaagaaactgaggatggccaccagccaatcaccagtgaggaactgaggccctcagccaaccatcctcaagaaattgaattctgccaacaatcacatgagcttgaaagtgtatccttccctagtagagccttcagatgagaccccagtcctggccaacactttgctgcctacgaacaattctgttagaggtcccaactaagccatgcctgattcctgacctacagaaagtatgagacaataagtgtgtaatagagacaactactgaatcagattctttgagggtagggcccagcaatctgtgttttaacaagcttttcaggtaattctgatgcaaactaaggtttgagaatcactgcattaaactttgggacaatcttcttgctctacttcctaaatgtcatcaaccatgcatatggtttcagggcaagagataaaaagattagagaaccattctctaaaaaatggattcttgggttatatgaatcacagggaagaataagtctcatatatctcttccactggcacccagacaaaaacatattgctctttagagattagcaatccaaaattctttattggaagaattgaaaacttatgtgtgtgtgtgtgtgtgtatatatatacatatgagagacagagaatatatttg

SEQ ID NO: 261560 - DNA, 482 bp, Homo sapiens
ataaagaagatgtaaagactttttcagcaaacaaaagctatgggatttcatgaataccagatgcattctacaagcaaacctaaagggagtacttcagtcagaaagaaaaaagtgttaaggaacaatcaacaatcacctgaaggtacaaaacttatggataaaaataagtatggaggaaaacacaggatataataacactctaactacagtgtgtaaactactgttatcctaagtggaaaaactaagcaataaaaaaaaagtaataatcacaacattttaggacacagtagagtaaaatataaatagaagtaacaagtaagaaaagttgggtggaagctgaagttaatctgagtttttattagttttctttttgcttgttagtttatgcaaatagtgatatcaggttgaaataatgggctataagatagcatttgcaagtctcatggtaacctcaaacaaaaaaatattttaaaaatgcaaaa

SEQ ID NO: 261561 - DNA, 528 bp, Homo sapiens
acagaggcccctcttgtggtgcaagcccagctctgtcacctgagatccagccagagaccctcctccaccatccacagtcaatggctgtgctttcccttccaagccagggcttccaaagaccccactgccccggagctgaagccgactctgctcccatctcagccatgaggcctcaggacccactctgctcacaggtggcttccttaagccattgccctggctggggttgggctggtgcagcccagctggcggaggggcgaagctttggtgacagacggagagtgggggactagctgtgcatggcacctgctctgatccggtgggctccacgggtagtgcgacctcggttctgtgggctctggaaggccaccagggtagggtctccccagggctcctccccctgcacaacactctgcgtgcattgaggccgcctctttgacgggtccatccagggggaccctctcctttctgtgaaagggaatcgtgtgtgtgccccaggcacgtgtaataaagaacccgagcagatgc

SEQ ID NO: 261562 - DNA, 753 bp, Homo sapiens
acagaggcccctcttgtggtgcaagcccagctctgtcacctgagatccagccagagaccctcctccaccatccacagtcaatggctgtgctttcccttccaagccagggcttccaaagaccccactgccccggagctgaagccgactctgctcccatctcagccatgaggcctcaggacccactctgctcacaggtggcttccttaagccattgccctggctggggttgggctggtgcagcccagctggcggaggggcgaagctttggtgacagacggagagtgggggactagctgtgcatggcacctgctctgatccggtgggctccacgggtagtgcgacctcggttctgtgggctctggaaggccaccagggtagggtctccccagggctcctccccctgcacaacactcctgcacacgtgcaaacctgctgtcctctgcatttagaggaatggcccgtgcatccctgctagtctcaggcccatcccagagcactgagaggccacaatcgttcagccctgtgccctgaacaccactgcccccttcactgtctgtgtgtggtgaagaccacgccacaccaccctccagctcactggagacaagcatgagcttgagccccatggcctggtgcagggctgcgtgcattgaggccgcctctttgacgggtccatccagggggaccctctcctttctgtgaaagggaatcgtgtgtgtgccccaggcacgtgtaataaagaacccgagcagatgc

SEQ ID NO: 261563 - DNA, 169 bp, Homo sapiens
ttttccttctagtatcaatgcaaaattgatactagaggagaatgtcctgttagtgctatacattctctggcctggagactggtgtgaacagggttgacctgtcttactctggtaagaaagtaatcaggaagtaccctgagagctcttggcaagccgggttcactttttc

SEQ ID NO: 261564 - DNA, 295 bp, Homo sapiens
aaatgatgttggactatccacccacattgcaccagtgtcaaagtcttggttggaatactgtattataatcatgtaagatgtaacccctgagagaaactggatgaagggtgcagggggccactgtctttacaacttcctgtgaatctgtaattatttcaaaatataaagttaggaaaaaaagaaagcaacagctgtaagtccagcatggcatcctagattgtatcccaaagcagaaaaatgacattgttgggaaaaatggtaaaatccaaataaactctgtagttaatagtaaaaa

SEQ ID NO: 261565 - DNA, 328 bp, Homo sapiens
aatttactgcggccactgtccttgcatcgtcaatgcattgcagcaccaccaccagagccagcagcaaatcgcatctcagtaacactgtggagagtctttcacctcgtggacttcttgaaagggtctggggggaccctcggaagtgcacggaccatgctttgagaagcactgtgttggacacagtcggggatgctaggtaaatcagattcaattaattaagtctcaacccgtgggtagacagctttttaatattttgtgtaacaaaataaggagtctgtgtctagcacttctgctcctcctgcagtacaatgattacctcaaaaaaagg

SEQ ID NO: 261566 - DNA, 378 bp, Homo sapiens
ctacttcgggcggggctagggctcgggttacaccaaccaccacgagggcggggcagtggccgggaatagaaacttggcctagggccacaggggatttttggcttttgactctcttgtgaagcaatctccagctctttagtgctgttgcactctacagagtacatacattcagcgacataagccagtgcacagaacacagaaaggcagggtggaaaagcagttatgttgctgagctgcgagtcaggacgctagggctcaattcacagccgcatggctgtctcatgactcagaccactcacagtgtgtccacttctcccctcttctcgaactgcgaggtgctcatacacggtcaagaaattaaacaactcagccgggtgc

SEQ ID NO: 261567 - DNA, 376 bp, Homo sapiens
taagtgtaaatcatcacttgtggctcgtggctaccttactgggtagctctggctagctctacgggatctaggtcagccttcttaaaaagatggaagaggttgggtgtgatggctcacacctgtaatcccagcactttgggaggccgagacaggaggatcacgaggtcaggagttcgagaccagcctggccaacatggagaaaccctgtctctactaaaaatacaaaaatgagctgggcgtgatggtgggtgcctgtaatcccagttacttgggaggctgaggcagagaattgcttgaacccgggaggcagaggttgcagtgaaccgagattgcgccactgcactccagcctgatgacagagggagactccatctca

SEQ ID NO: 261568 - DNA, 690 bp, Homo sapiens
ctaatttcatgctttgcaaattcaagatcctattgttatgtagttgtgggggatacaggatgacagatgtttgcagaatttccatgtttccctaagaactagattttgcacatcagtaagtacgtgggagacaaggtgtaaactatgatacaactaaatacatagtagttacacttcatgaatataaagaaagtcatacaaaactacatttcttttagttttaagaaatactatagaagtgaattatcattttttaaaactcaacatctctttttagttaaatgtagagaactatgaagtcaatttatttgaattaaacattaaaaagggtattattctaagcagcaattaagacttaaatgtcataatttgatttctccctggaaagcagttgtttgccatcctatgagctgttaaattggccacatctggagagaaaccaaagacaatgctatatcaagcctcactttcagagggtacatctgcttcttgagaaaaatttaaaaaaagacaaccaaagaaatcaaagaaccacaacaaatatgtgagagtgggtgataaactcgttaccatggagagttgttggattaatttctatctcaccagtgtgtccctgtcatattattaatatgtaggtaaagagttccaaggagagaaataccatctcaggccacagctcccagcagtttt

SEQ ID NO: 261569 - DNA, 376 bp, Homo sapiens
agaattgcttgaacccggaaagtggaggttgcagtgagctgagatcgcaccattgcactccagcctaggcgacagatcaaggctccatctcaaaaaataaaaaaaagaaccaataatatttactgatggtaataactacagtgctacctaatgttgcactgtgtcattaattagatgactttatgtggctttaataggctgagggctgagattttattttggaaccatggagagttagacctgggctgttctgggaagcttgctaacttgggctgtgatgcaaattcatcttttttttttttttttttgagacggagtctcgctctgtcacccaggctggagtgcagcggcgcgatctcggctcactgcaagctcc

SEQ ID NO: 261570 - DNA, 510 bp, Homo sapiens
taccttgtatggtttgtggcaaggactaagtgagtgagatagcgtaaatgaagctcaatgcgtaggaattacttagtcattgggtttctttggacaagttacttcaacctctcagttaaagtaacctttcagttaaagagtttcagttgcctcatctattaaatagagatgattatacccttttccctgcctgtttttcaagactgtagtagtgaagccaggcatgatgactcaatcctgtaatcatagcacttcgagaggctcaggtgggaggatcacttgagcccaggagtttgagaccagcctgggaaacatagtgataccccatctttgcaaaaaaatttttaaaaaatcagctgagtgtggtgatgtgcacctgcagttctagctacttggaggctgaggtgggagggttgctggagcccaggagatggaggctgcagtgagctgtgatcacactgctgtacccccgcctggtgacagagtgagatcctgtctcaaaaaaaaaaa

SEQ ID NO: 261571 - DNA, 431 bp, Homo sapiens
tgattaatatttagaattaattgacaactacagagagccagtagtggtggtgctgataagaatgtggatggtaaccaaaacttagtctgtcttacagttttgcctacagctggtcatagtgaaaatatgtagtgtgaaagtgaatgtcattgatggacaagtcttctttaagacatttgacttcgttttctacttttgtccactccagattttttgccaaaacaatatggattttttttctttggcagaaataaaccccagctctctagctaccttgagcaaagaagggaagttattgatcgaatatcagtcaattcacagaatgatttggaagcctggaagaccagagttgcacaggaaccagggcaaccttgggtgatgaagcaacagaaactgctcatccttttgattgtgggatctccagtggatta

SEQ ID NO: 261572 - DNA, 714 bp, Homo sapiens
ctcacgtagttagaaactggcgaagctgattggatctaggcctgtgtgatcctgagcctacactcaggaccgttctgatcctgaccagtacttactgatttggggtctgagaagacagtaatgagcaagggcccccagagaagttttctgaccttcacaaagccctgctgagatcttgacctctgttcttaagaggtggatcttgcctcagttatgctcagccatttcattacacaggaagacctcattcttccttacattgcaatttattgttttttaaagaaactggccttgtattgtggaaataacattggaaaatggagattaaaatgggtaatggaaataacaatcagtaatggcttaagaacagaagcttgattggggaaaagtcttccgaatagaaagatgatcaagtgggaagaaaataaagtggaactttgagtttgaaatggctcactcatgcctgtaatcccagcactctgggaggccaaggcgggcggatcacgaggtcaggagttcgagaccagcctggccacactagtgaaaccccgtctctactaaaaattagctgtgtgtggtggtgtgcgcctatagccccagctatttgggaggctgaggcaggagaatcacttgaacccaggaggcggaggtggcagtgagctgagatcacgccactccactccagcctggatgacagagcgagactccgtctca

SEQ ID NO: 261573 - DNA, 374 bp, Homo sapiens
aatcaaaagggaactttaaaaaatgttttcaatgtattaggaacaaaataatgaaaaacaaaacaaacaaaaaaataaaatttaaatggcaaatttgacctctaatatataaataattacatgatatttagattgtctaaatatactaatcaaaagacagagatggtcaaagtggactaccttcattgctggtgggaatgcaaaatgatacaactactctggaaaatagtttagtggttttttgtttgtttgtttttgttttttttgtttgtttgttaagatccagcaaatgaacttctgggcattttcccagaaacatgattatttatgcccacaaaaataactgtatgtaaatgtttatagcacctttattt

SEQ ID NO: 261574 - DNA, 659 bp, Homo sapiens
gtgacttccctgggttcacagcaggggtggaactggattcttcctggatggggatccagatggaggtggagggttgatttgggaagcagagcacagcagcccaaatttgcttgtaatgtcggcgactacagcctgctggcctgccttcactgtcctgggggaagctcggggagaccaggtggactggagtagactgtacagagacactggtctggtgaagatgtccaggaaaccacgagcctccagcccattttccaacaaccacccatcaacaccaaagaggttcccaagacaacccagaagggaaaagggacccgtcaaggaagttccaggaacaaaaggctctccctaaaagaccaccgcttcaaaaaaacctgaggaatggagtgggccaacactatccagccactctgaccagccgaacgaggaactcaatcaaaatgcgccatagcaggaccacaagggcaaggagaccaccgccttctccagtgcttccttgggcagccagtaattcccaggcaaggccagagacttcaagtctatctgaaaagtctccagaagtctaaccccagataaatagccaacagggtgtagagtacgttttacaccccaaagggtatgccccatggtgatggaaataaaatgaacatgttgtaaaa

SEQ ID NO: 261575 - DNA, 873 bp, Homo sapiens
gtgacttccctgggttcacagcaggggtggaactggattcttcctggatggggatccagatggaggtggagctgcaccccttgtagagaatggctgcgggtcccaggccaggagctccctgcagggcgggagctcccacgatcgtattgacctctggaagaagacagacactttcccacgggagctcctctccagccagagctacacttggcaaacctttggtcctaaatgatttattcactgaattgaagaaatacggtttacatatcttccaagtatatatgtggttgatttgggaagcagagcacagcagcccaaatttgcttgtaatgtcggcgactacagcctgctggcctgccttcactgtcctgggggaagctcggggagaccaggtggactggagtagactgtacagagacactggtctggtgaagatgtccaggaaaccacgagcctccagcccattttccaacaaccacccatcaacaccaaagaggttcccaagacaacccagaagggaaaagggacccgtcaaggaagttccaggaacaaaaggctctccctaaaagaccaccgcttcaaaaaaacctgaggaatggagtgggccaacactatccagccactctgaccagccgaacgaggaactcaatcaaaatgcgccatagcaggaccacaagggcaaggagaccaccgccttctccagtgcttccttgggcagccagtaattcccaggcaaggccagagacttcaagtctatctgaaaagtctccagaagtctaaccccagataaatagccaacagggtgtagagtacgttttacaccccaaagggtatgccccatggtgatggaaataaaatgaacatgttgtaaaa

SEQ ID NO: 261576 - DNA, 1083 bp, Homo sapiens
gtgacttccctgggttcacagcaggggtggaactggattcttcctggatggggatccagatggaggtggagctgcaccccttgtagagaatggctgcgggtcccaggccaggagctccctgcagggcgggagctcccacgatcgtattgacctctggaagaagacagacactttcccacgggagctcctctccagccagagctacacttggcaaacctttggtcctaaatgatttattcactgaattgaagaaatacggtttacatatcttccaagtatatatgtggttgatttgggaagcagagcacagcagcccaaatttgcttgtaatgtcggcgactacagcctgctggcctgccttcactgtcctgggggaagctcggggagaccaggtggactggagtagactgtacagagacactggtctggtgaagatgtccaggaaaccacgagcctccagcccattttccaacaaccacccatcaacaccaaagaggcgaggaaggggaaagcatcctctcatccctggcccagaagccctatcaaagtgaatggcccacccaagctctgactcctaccctgtcctcccctggcacaacccccaccccagcctgtaccatttctctatgaaacccctgttctcacccctcctccatcctcttccccaaaccagtgccctcctgtgatctccctgttggctttccaggttcccaagacaacccagaagggaaaagggacccgtcaaggaagttccaggaacaaaaggctctccctaaaagaccaccgcttcaaaaaaacctgaggaatggagtgggccaacactatccagccactctgaccagccgaacgaggaactcaatcaaaatgcgccatagcaggaccacaagggcaaggagaccaccgccttctccagtgcttccttgggcagccagtaattcccaggcaaggccagagacttcaagtctatctgaaaagtctccagaagtctaaccccagataaatagccaacagggtgtagagtacgttttacaccccaaagggtatgccccatggtgatggaaataaaatgaacatgttgtaaaa

SEQ ID NO: 261577 - DNA, 1426 bp, Homo sapiens
  misc_feature (1425)..(1425): n is a, c, g, or t
gtgacttccctgggttcacagcaggggtggaactggattcttcctggatggggatccagatggaggtggagctgcaccccttgtagagaatggctgcgggtcccaggccaggagctccctgcagggcgggagctcccacgatcgtattgacctctggaagaagacagacactttcccacgggagctcctctccagccagagctacacttggcaaacctttggtcctaaatgatttattcactgaattgaagaaatacggtttacatatcttccaagtatatatgtggttgatttgggaagcagagcacagcagcccaaatttgcttgtaatgtcggcgactacagcctgctggcctgccttcactgtcctgggggaagctcggggagaccaggtggactggagtagactgtacagagacactggtctggtgaagatgtccaggaaaccacgagcctccagcccattttccaacaaccacccatcaacaccaaagaggcgaggaaggggaaagcatcctctcatccctggcccagaagccctatcaaagttcccaagacaacccagaagggaaaagggacccgtcaaggaagttccaggaacaaaaggctctccctaaaagaccaccgcttcaaaaaaacctgaggaatggagtgggccaacactatccagccactctgaccagccgaacgaggaactcaatcaaaatgcgccatagcaggaccacaagggcaaggagaccaccgccttctccagtgcttccttgggcagccagtaattcccaggcaaggccagagacttcaagtctatctgaaaagtctccagaagtctaaccccagataaatagccaacagggtgtagagtacgttttacaccccaaagggtatgccccatggtgatggaaataaaatgaacatgttgtaaaaaatccaaaaaaacaaaaaaacacaaaactaaacacaaaaaacctgtgtgttgcgcggcacctgacggccctctcgcagagagagcgctcttttgcaagaaaccacattcggtgtggggcgcggcgcgcggggcccccggtgcggcgtacgtggcgcacacctgtggcgcccaaaagccgggataccccaaaggagaaaacccccggggggacacaagagacaaagcgggcgagagagatctctcacccacagtataaaaaacaaagtcgcagccgcggggaggagacaaaccgacgaggagcggttctaggcagaagcacaagaactccccacacaaaatgagggagagcacaccacgagagggcgcagctcaactacgcagggcgagaaccactatcacacaaacccagcaggggagttaccaccaaagaggcggagcctccacgaagaaatactccagagaatataaaacgcccccccgaggcggctcgggaggggagnt

SEQ ID NO: 261578 - DNA, 924 bp, Homo sapiens
gtgacttccctgggttcacagcaggggtggaactggattcttcctggatggggatccagatggaggtggagctgcaccccttgtagagaatggctgcgggtcccaggccaggagctccctgcagggcgggagctcccacgatcgtattgacctctggaagaagacagacactttcccacgggagctcctctccagccagagctacacttggcaaacctttggtcctaaatgatttattcactgaattgaagaaatacggtttacatatcttccaagtatatatgtggttgatttgggaagcagagcacagcagcccaaatttgcttgtaatgtcggcgactacagcctgctggcctgccttcactgtcctgggggaagctcggggagaccaggtggactggagtagactgtacagagacactggtctggtgaagatgtccaggaaaccacgagcctccagcccattttccaacaaccacccatcaacaccaaagaggcgaggaaggggaaagcatcctctcatccctggcccagaagccctatcaaagttcccaagacaacccagaagggaaaagggacccgtcaaggaagttccaggaacaaaaggctctccctaaaagaccaccgcttcaaaaaaacctgaggaatggagtgggccaacactatccagccactctgaccagccgaacgaggaactcaatcaaaatgcgccatagcaggaccacaagggcaaggagaccaccgccttctccagtgcttccttgggcagccagtaattcccaggcaaggccagagacttcaagtctatctgaaaagtctccagaagtctaaccccagataaatagccaacagggtgtagagtacgttttacaccccaaagggtatgccccatggtgatggaaataaaatgaacatgttgtaaaa

SEQ ID NO: 261579 - DNA, 3068 bp, Homo sapiens
  misc_feature (1940)..(1940): n is a, c, g, or t
  misc_feature (2367)..(2367): n is a, c, g, or t
  misc_feature (2402)..(2402): n is a, c, g, or t
  misc_feature (2440)..(2440): n is a, c, g, or t
ccatctgagcgagaagagcagacaccgtgctcctggaatcacccagcatgttgcaaggtctcctgccagtcagtctcctcctctctgttgcagtaagtgctataaaagaactccctggggtgaagaagtatgaagtggtttatcctataagacttcatccactgcataaaagagaggccaaagagccagagcaacaggaacaatttgaaactgaattaaagtataaaatgacaattaatggaaaaattgcagtgctttatttgaaaaaaaacaagaacctccttgcaccaggctacacggaaacatattataattccactggaaaggagatcaccacaagcccacaaattatggatgattgttattatcaaggacatattcttaatgaaaaggtttctgacgctagcatcagcacatgtaggggtctaaggggctacttcagtcagggggatcaaagatactttattgaacctttaagccccatacatcgggatggacaggagcatgcactcttcaagtataaccctgatgaaaagaattatgacagcacctgtgggatggatggtgtgttgtgggcccacgatttgcagcagaacattgccctacctgccaccaaactagtaaaattgaaagacaggaaggttcaggaacatgagaaatacatagaatattatttggtcctggataatggtgagtttaaaaggtacaatgagaatcaagatgagatcagaaagagggtatttgagatggctaattatgtcaacatgctttataaaaagctcaatactcatgtggccttagttggtatggaaatctggactgacaaggataagataaagataaccccaaatgcaagcttcaccttggagaatttttctaaatggagggggagtgttctctcaagaagaaagcgtcatgatattgctcagttaatcacagcaacagaacttgctggaacgactgtgggtcttgcatttatgtctacaatgtgttctccttattctgttggcgttgttcaggaccacagcgataatcttcttagagttgcagggacaatggcacatgaaatgggccacaactttggaatgtttcatgacgactattcttgcaagtgtccttctacaatatgtgtgatggacaaagcactgagcttctatatacccacagacttcagttcctgcagccgtctcagctatgacaagttttttgaagataaattatcaaattgcctctttaatgctccattgcctacagatatcatatccactccaatttgtgggaaccagttggtggaaatgggagaggactgtgattgtgggacatctgaggaatgtaccaatatttgctgtgatgctaagacatgtaaaatcaaagcaacttttcaatgtgcattaggagaatgttgtgaaaaatgccaatttaaaaaggctgggatggtgtgcagaccagcaaaagatgagtgcgacctgcctgaaatgtgtaatggtaaatctggtaattgtcctgatgatagattccaagtcaatggcttcccttgccatcacgggaagggccactgcttgatgggcacatgccccacactgcgggagcagtgcacagagctgtggggaccaggaactgaggttgcagataagtcatgttacaacaggaatgaaggtgggtcaaagtacgggtactgtcgcagagtggatgacacactcattccctgcaaagcaaatgataccatgtgtgggaagttgttctgtcaaggtgggtcggataatttgccctggaaaggacggatagtgactttcctgacatgtaaaacatttgatcctgaagacacaagtcaagaaataggcatggtggccaatggaactaagtgtggcgataacaaggtttgcattaatgcagaatgtgtggatattgagaaagcctacaaatcaaccaattgctcatcnaagtgcaaaggacatgctgtgtgtgaccatgagctccagtgtcaatgtgaggaaggatggatccctcccgactgcgatgactcctcagtggtcttccacttctccattgtggttggggtgctgttcccaatggcggtcatttttgtggtggttgctatggtaatccggcaccagagctccagagaaaagcagaagaaagatcagaggccactatctaccactggcaccaggccacacaaacagaagaggaaaccccagatggtaaaggctgttcaaccccaagagatgagtcagatgaagccccatgtgtatgatctgccagtagaaggcaatgagcccccagcctcttttcataaagacacaaacgcacttccccctactgttttcaaggataatccaatgtctacacctaaggactcaaatccanaagcatgaagcaacagctaagcaagaactaatggntaaattatcaacttggaaaacttggaaaatctggatgncagagaaatatactatctcaccagtatttgctctcgactcaagaaggttaacattttctgattcatgttagactttgaagagactaaagaaaattttcaagaggaacatatgcctgagaacctttgcatgaatttaaaatttcaattatccattcttataagaaggaagatgattgtaaagaaatatctccgaagttaaaatctgtaataggaattgattcattctcttaatgaaaacaaaacataaaaacatcacactaatcttggaggaataagaaaaattgtacatccattaaatgtacaattgattgcaacatcttgattgttttaaccattaacttgtcaaattacaatcacagttaagaaaatgatgtaaaattctgttttgtggatctctttcctagattagcttctgaaatcattattagctatatcatttgaggttttctacaatttggtataactaagaatttaaaaatgttttatcatatatatttgtataattaattactggcatggttaaagtggttttcactttttaaatggagaaaatttcagttaaattaataggataaaccaggttgcgaactggtgacctgtaggccatgttagcactgcaaaaaaaaaa

SEQ ID NO: 261580 - DNA, 2765 bp, Homo sapiens
  misc_feature (1940)..(1940): n is a, c, g, or t
  misc_feature (2367)..(2367): n is a, c, g, or t
  misc_feature (2402)..(2402): n is a, c, g, or t
  misc_feature (2440)..(2440): n is a, c, g, or t
ccatctgagcgagaagagcagacaccgtgctcctggaatcacccagcatgttgcaaggtctcctgccagtcagtctcctcctctctgttgcagtaagtgctataaaagaactccctggggtgaagaagtatgaagtggtttatcctataagacttcatccactgcataaaagagaggccaaagagccagagcaacaggaacaatttgaaactgaattaaagtataaaatgacaattaatggaaaaattgcagtgctttatttgaaaaaaaacaagaacctccttgcaccaggctacacggaaacatattataattccactggaaaggagatcaccacaagcccacaaattatggatgattgttattatcaaggacatattcttaatgaaaaggtttctgacgctagcatcagcacatgtaggggtctaaggggctacttcagtcagggggatcaaagatactttattgaacctttaagccccatacatcgggatggacaggagcatgcactcttcaagtataaccctgatgaaaagaattatgacagcacctgtgggatggatggtgtgttgtgggcccacgatttgcagcagaacattgccctacctgccaccaaactagtaaaattgaaagacaggaaggttcaggaacatgagaaatacatagaatattatttggtcctggataatggtgagtttaaaaggtacaatgagaatcaagatgagatcagaaagagggtatttgagatggctaattatgtcaacatgctttataaaaagctcaatactcatgtggccttagttggtatggaaatctggactgacaaggataagataaagataaccccaaatgcaagcttcaccttggagaatttttctaaatggagggggagtgttctctcaagaagaaagcgtcatgatattgctcagttaatcacagcaacagaacttgctggaacgactgtgggtcttgcatttatgtctacaatgtgttctccttattctgttggcgttgttcaggaccacagcgataatcttcttagagttgcagggacaatggcacatgaaatgggccacaactttggaatgtttcatgacgactattcttgcaagtgtccttctacaatatgtgtgatggacaaagcactgagcttctatatacccacagacttcagttcctgcagccgtctcagctatgacaagttttttgaagataaattatcaaattgcctctttaatgctccattgcctacagatatcatatccactccaatttgtgggaaccagttggtggaaatgggagaggactgtgattgtgggacatctgaggaatgtaccaatatttgctgtgatgctaagacatgtaaaatcaaagcaacttttcaatgtgcattaggagaatgttgtgaaaaatgccaatttaaaaaggctgggatggtgtgcagaccagcaaaagatgagtgcgacctgcctgaaatgtgtaatggtaaatctggtaattgtcctgatgatagattccaagtcaatggcttcccttgccatcacgggaagggccactgcttgatgggcacatgccccacactgcgggagcagtgcacagagctgtggggaccaggaactgaggttgcagataagtcatgttacaacaggaatgaaggtgggtcaaagtacgggtactgtcgcagagtggatgacacactcattccctgcaaagcaaatgataccatgtgtgggaagttgttctgtcaaggtgggtcggataatttgccctggaaaggacggatagtgactttcctgacatgtaaaacatttgatcctgaagacacaagtcaagaaataggcatggtggccaatggaactaagtgtggcgataacaaggtttgcattaatgcagaatgtgtggatattgagaaagcctacaaatcaaccaattgctcatcnaagtgcaaaggacatgctgtgtgtgaccatgagctccagtgtcaatgtgaggaaggatggatccctcccgactgcgatgactcctcagtggtcttccacttctccattgtggttggggtgctgttcccaatggcggtcatttttgtggtggttgctatggtaatccggcaccagagctccagagaaaagcagaagaaagatcagaggccactatctaccactggcaccaggccacacaaacagaagaggaaaccccagatggtaaaggctgttcaaccccaagagatgagtcagatgaagccccatgtgtatgatctgccagtagaaggcaatgagcccccagcctcttttcataaagacacaaacgcacttccccctactgttttcaaggataatccaatgtctacacctaaggactcaaatccanaagcatgaagcaacagctaagcaagaactaatggntaaattatcaacttggaaaacttggaaaatctggatgncagagaaatatactatctcaccagtatttgctctcgactcaagaaggttaacattttctgattcatgttagactttgaagagactaaagaaaattttcaagaggaacatatgcctgagaacctttgcatgaatttaaaatttcaattatccattcttataagaaggaagatgattgtaaagaaatatctccgaagttaaaatctgtaataggaattgattcattctcttaatgaaaacaaaacataaaaacatcacactaatcttggaggaataagaaaaattgtacatccattaaatgtacaattgattgcaacatcttgattg

SEQ ID NO: 261581 - DNA, 2070 bp, Homo sapiens
ccatctgagcgagaagagcagacaccgtgctcctggaatcacccagcatgttgcaaggtctcctgccagtcagtctcctcctctctgttgcagtaagtgctataaaagaactccctggggtgaagaagtatgaagtggtttatcctataagacttcatccactgcataaaagagaggccaaagagccagagcaacaggaacaatttgaaactgaattaaagtataaaatgacaattaatggaaaaattgcagtgctttatttgaaaaaaaacaagaacctccttgcaccaggctacacggaaacatattataattccactggaaaggagatcaccacaagcccacaaattatggatgattgttattatcaaggacatattcttaatgaaaaggtttctgacgctagcatcagcacatgtaggggtctaaggggctacttcagtcagggggatcaaagatactttattgaacctttaagccccatacatcgggatggacaggagcatgcactcttcaagtataaccctgatgaaaagaattatgacagcacctgtgggatggatggtgtgttgtgggcccacgatttgcagcagaacattgccctacctgccaccaaactagtaaaattgaaagacaggaaggttcaggaacatgagaaatacatagaatattatttggtcctggataatggtgagtttaaaaggtacaatgagaatcaagatgagatcagaaagagggtatttgagatggctaattatgtcaacatgctttataaaaagctcaatactcatgtggccttagttggtatggaaatctggactgacaaggataagataaagataaccccaaatgcaagcttcaccttggagaatttttctaaatggagggggagtgttctctcaagaagaaagcgtcatgatattgctcagttaatcacagcaacagaacttgctggaacgactgtgggtcttgcatttatgtctacaatgtgttctccttattctgttggcgttgttcaggaccacagcgataatcttcttagagttgcagggacaatggcacatgaaatgggccacaactttggaatgtttcatgacgactattcttgcaagtgtccttctacaatatgtgtgatggacaaagcactgagcttctatatacccacagacttcagttcctgcagccgtctcagctatgacaagttttttgaagataaattatcaaattgcctctttaatgctccattgcctacagatatcatatccactccaatttgtgggaaccagttggtggaaatgggagaggactgtgattgtgggacatctgaggaatgtaccaatatttgctgtgatgctaagacatgtaaaatcaaagcaacttttcaatgtgcattaggagaatgttgtgaaaaatgccaatttaaaaaggctgggatggtgtgcagaccagcaaaagatgagtgcgacctgcctgaaatgtgtaatggtaaatctggtaattgtcctgatgatagattccaagtcaatggcttcccttgccatcacgggaagggccactgcttgatgggcacatgccccacactgcgggagcagtgcacagagctgtggggaccaggtaggaggacaaatcctttcccctgtgcatgtgcgaaggaaaatcatttcagatgacagtgtttaaccatggtcaaaagaccattctgtcctatccttcttagaagcttcgaactcaaaatcatggaaaggttttaagatttgaggttggttttagggttgctagatttagcaagtaaaaataaggatggccccgttaaattttaacttaaaattaacaagttttttgttaattttttgttttttgtctcagcatcagtatatcccatgcaatatttgaggtgtgctcatactaaaattatttgtgtatctgaaattcaaattaaactgggtgtctttttcttttcatctggcaaccctactaagatcataaacccttggaaatctgtgtgtgtgcgggtgtgtgtgtgtgtgtgtgtgcaggggtggcagaagtactgtgggatgggacagaaat

SEQ ID NO: 261582 - DNA, 508 bp, Homo sapiens
atctagacgatccctgaatatgctgtctcagtataattccactggaaatgagataccacaagcccacaaattatggatgattgttattatcaaggacatattcttaatgaaaaggtttctgacgctagcatcagcacatgtaggggtctaaggggctacttcagtcagggggatcaaagatactttattgaacctttaagccccatacatcgggatggacaggagcatgcactcttcaagtataaccctgatgaaaagaattatgacagcacctgtgggatggatggtgtgttgtgggcccacgatttgcagcagaacattgccctacctgccaccaaactagtaaaattgaaagacaggaaggttcaggaacatgagaaatacatagaatattatttggtcctggataatggtgagtttcacaggtacaatgaggaaatcagatgagatcagaaaacgaggctatttgagacagcataatccgggaacccgagctcgaaattcgtac

SEQ ID NO: 261583 - DNA, 522 bp, Homo sapiens
tcactctgacattcatcacttcaggcttctgtgtgtggcatcgttcattgggaatgcagtaaggatggcctttactgaccagcctacttcagttctacctggataagtcttttctttttcttttttctcagtaagtgctataaaagaactccctggggtgaagaagtatgaagtggtttatcctataagacttcatccactgcataaaagagaggccaaagagccagagcaacaggaacaatttgaaactgaattaaagtataaaatgacaattaatggaaaaattgcagtgctttatttgaaaaaaaacaagaacctccttgcaccaggctacacggaaacatattataattccactggaaaggagatcaccacaagcccacaaattatggtataacggagtctcttcaattctttaattagggttttacccacagacctaaaggtagtgtccttgccaggcaaataatagaagtgaaactgcatttgtaacattagtgcttttttcagcagtagccatta

SEQ ID NO: 261584 - DNA, 2355 bp, Homo sapiens
  misc_feature (1227)..(1227): n is a, c, g, or t
  misc_feature (1654)..(1654): n is a, c, g, or t
  misc_feature (1689)..(1689): n is a, c, g, or t
  misc_feature (1727)..(1727): n is a, c, g, or t
aggaagagagatgtagaggcaagttgcttttaaccaggattggagttttgtcagctttataaaaagctcaatactcatgtggccttagttggtatggaaatctggactgacaaggataagataaagataaccccaaatgcaagcttcaccttggagaatttttctaaatggagggggagtgttctctcaagaagaaagcgtcatgatattgctcagttaatcacagcaacagaacttgctggaacgactgtgggtcttgcatttatgtctacaatgtgttctccttattctgttggcgttgttcaggaccacagcgataatcttcttagagttgcagggacaatggcacatgaaatgggccacaactttggaatgtttcatgacgactattcttgcaagtgtccttctacaatatgtgtgatggacaaagcactgagcttctatatacccacagacttcagttcctgcagccgtctcagctatgacaagttttttgaagataaattatcaaattgcctctttaatgctccattgcctacagatatcatatccactccaatttgtgggaaccagttggtggaaatgggagaggactgtgattgtgggacatctgaggaatgtaccaatatttgctgtgatgctaagacatgtaaaatcaaagcaacttttcaatgtgcattaggagaatgttgtgaaaaatgccaatttaaaaaggctgggatggtgtgcagaccagcaaaagatgagtgcgacctgcctgaaatgtgtaatggtaaatctggtaattgtcctgatgatagattccaagtcaatggcttcccttgccatcacgggaagggccactgcttgatgggcacatgccccacactgcgggagcagtgcacagagctgtggggaccaggaactgaggttgcagataagtcatgttacaacaggaatgaaggtgggtcaaagtacgggtactgtcgcagagtggatgacacactcattccctgcaaagcaaatgataccatgtgtgggaagttgttctgtcaaggtgggtcggataatttgccctggaaaggacggatagtgactttcctgacatgtaaaacatttgatcctgaagacacaagtcaagaaataggcatggtggccaatggaactaagtgtggcgataacaaggtttgcattaatgcagaatgtgtggatattgagaaagcctacaaatcaaccaattgctcatcnaagtgcaaaggacatgctgtgtgtgaccatgagctccagtgtcaatgtgaggaaggatggatccctcccgactgcgatgactcctcagtggtcttccacttctccattgtggttggggtgctgttcccaatggcggtcatttttgtggtggttgctatggtaatccggcaccagagctccagagaaaagcagaagaaagatcagaggccactatctaccactggcaccaggccacacaaacagaagaggaaaccccagatggtaaaggctgttcaaccccaagagatgagtcagatgaagccccatgtgtatgatctgccagtagaaggcaatgagcccccagcctcttttcataaagacacaaacgcacttccccctactgttttcaaggataatccaatgtctacacctaaggactcaaatccanaagcatgaagcaacagctaagcaagaactaatggntaaattatcaacttggaaaacttggaaaatctggatgncagagaaatatactatctcaccagtatttgctctcgactcaagaaggttaacattttctgattcatgttagactttgaagagactaaagaaaattttcaagaggaacatatgcctgagaacctttgcatgaatttaaaatttcaattatccattcttataagaaggaagatgattgtaaagaaatatctccgaagttaaaatctgtaataggaattgattcattctcttaatgaaaacaaaacataaaaacatcacactaatcttggaggaataagaaaaattgtacatccattaaatgtacaattgattgcaacatcttgattgttttaaccattaacttgtcaaattacaatcacagttaagaaaatgatgtaaaattctgttttgtggatctctttcctagattagcttctgaaatcattattagctatatcatttgaggttttctacaatttggtataactaagaatttaaaaatgttttatcatatatatttgtataattaattactggcatggttaaagtggttttcactttttaaatggagaaaatttcagttaaattaataggataaaccaggttgcgaactggtgacctgtaggccatgttagcactgcaaaaaaaaaa

SEQ ID NO: 261585 - DNA, 966 bp, Homo sapiens
catcgtcacccatttaaaaaaattgcgttttcaaaatgagttgcttcaacctagtgtggagaatcaaaattttaaaagatcaaaattttggtattttaaaagtcaattctgaccaattatagtgatttggttctacctgatagtttaatatttctttgctcttttagtaagtccccagcatagggggaagggggtaggcagtaagtcttagaaaactgtcttgcgaatttactgactcttatggattgggaatttctaggagtatctggaaattaaccgaagcagttctttttcttctccagttagggcaagttgccatgaaacaaataatggtgacttggttggttcatttagttcatttatttattgaatatttatggcctgtccactaattacctggcacaagtgtaggtcctagaagatacacactagggaaaaaatagacacacagactagatccctactgtcctgtcttacattctaggaggcggagagaaaatgttaaaaatgaacaaagtaagttgtcaggtcaggtgctaccaagtgctagggaaggagattagagtggtgggtgccatctggatagggtggtgaggggagccccatctgctaaggtggcatttgagaggagacttgaggtgagagactgggaagtgaggtggggaccgaagcctgacggactagccatgggcaaaccaggcaggagtttagccaaggtgaggacttgtagaggagttgggcagggatgtgaaataattagcttgatgttctgcataggatgccctgggctgcaaggtgtggaactgataagccaagacctcccaggaggctttgccgccatctgcagaatcatgctgatggctttgaagagagaggcagtggtggagagaagtggctgatttggggcatgttttgaataaagagcccacagatttgctgaagacttgactgcagggtgagagggga

SEQ ID NO: 261586 - DNA, 237 bp, Homo sapiens
tcgccgtgttagccaggatggtctcgatctcctgacctagtgatccgcccacctcggcctcccaaagtgttgggattacaggcatgagccaccatgtccggctactcagggaactcttaaaggtgacagtagcttattccaaaggaatgactctttgagggtggaatttggggtagcatgttttcctagagggagagtgtcatctgatcaaggagctcagggacacttatgcatcac

SEQ ID NO: 261587 - DNA, 485 bp, Homo sapiens
tgaaagatgaaaaatattgtcctgggtccctcagagtacacaccaggagttcccaattttgtccattccacaacgcctcaattctaaatgtaattatttggccaaatagggtagaagagggctccattaacccaaactgctactccaggcctggacatcccatgaggacaggtagcatgacattttgtactctactgtctctagcctctggtaaagtgcctggaacatgatagttgctcaacaaatatgtgttgaatagatggacagatggaggtgatgctgctgacaagcgaccacatacatcttaggaggaggataagaatgaagaacatcgcagttagaagggactctgaagtattgcaagaccagcctcttatgtttagattaggaaatgagggccaagttcacatgatggagtagaaagagcactgaaccagagtttgggagacctggaagcctcaactctgacaaaaaaacaaaacaaa

SEQ ID NO: 261588 - DNA, 443 bp, Homo sapiens
tctcaataaaaataaaaaaatcaaacgggaaggtattgatggtaaactcactaaccaaagtccttgtttaagggggcattaacaatggtagttttatcagaggcctgtgtggaaggcaacactaccagagaggaatttatagtggaagaatgaacagacaccatcgttaaaagtcagacacggacattgatgttaggagagttaatacacagagttcaataatagacaagaaaagcactgatgatagaataaagacacccagatttgaggtcaagtaagaggggcaaggagttttaattagttctgctttaattattctgttaaatatatagacaaagaggtgggatttgatattgggatagttagaaaatgcttgaactcagactagaggaacattccaggcgtaatagttaacacagaccttggtttaggatcaaaccaga

SEQ ID NO: 261589 - DNA, 4567 bp, Homo sapiens
  misc_feature (3147)..(3147): n is a, c, g, or t
  misc_feature (3197)..(3197): n is a, c, g, or t
  misc_feature (3839)..(3839): n is a, c, g, or t
  misc_feature (3921)..(3921): n is a, c, g, or t
gcggccgccccattcccagaccggccgccagcccatctggttagctcccgccgctccgcgccgcccgggagtcgggagccgcggggaaccgggcacctgcacccgcctctgggagtgagtggttccagctggtgcctggcctgtgtctcttggatgccctgtggcttcagtccgtctcctgttgcccaccacctcgtccctgggccgcctgataccccagcccaacagctaaggtgtggatggacagtagggggctggcttctctcactggtcaggggtcttctcccctgtctgcctcccggagctaggactgcagaggggcctatcatggtgcttgcaggccccctggctgtctcgctgttgctgcccagcctcacactgctggtgtcccacctctccagctcccaggatgtctccagtgagcccagcagtgagcagcagctgtgcgcccttagcaagcaccccaccgtggcctttgaagacctgcagccgtgggtctctaacttcacctaccctggagcccgggatttctcccagctggctttggacccctccgggaaccagctcatcgtgggagccaggaactacctcttcagactcagccttgccaatgtctctcttcttcaggccacagagtgggcctccagtgaggacacgcgccgctcctgccaaagcaaagggaagactgaggaggagtgtcagaactacgtgcgagtcctgatcgtcgccggccggaaggtgttcatgtgtggaaccaatgccttttcccccatgtgcaccagcagacaggtggggaacctcagccggactactgagaagatcaatggtgtggcccgctgcccctatgacccacgccacaactccacagctgtcatctcctcccagggggagctctatgcagccacggtcatcgacttctcaggtcgggaccctgccatctaccgcagcctgggcagtgggccaccgcttcgcactgcccaatataactccaagtggcttaatgagccaaacttcgtggcagcctatgatattgggctgtttgcatacttcttcctgcgggagaacgcagtggagcacgactgtggacgcaccgtgtactctcgcgtggcccgcgtgtgcaagaatgacgtggggggccgattcctgctggaggacacatggaccacattcatgaaggcccggctcaactgctcccgcccgggcgaggtccccttctactataacgagctgcagagtgccttccacttgccagagcaggacctcatctatggagttttcacaaccaacgtaaacagcatcgcggcttctgctgtctgcgccttcaacctcagtgctatctcccaggctttcaatggcccatttcgctaccaggagaaccccagggctgcctggctccccatagccaaccccatccccaatttccagtgtggcaccctgcctgagaccggtcccaacgagaacctgacggagcgcagcctgcaggacgcgcagcgcctcttcctgatgagcgaggccgtgcagccggtgacacccgagccctgtgtcacccaggacagcgtgcgcttctcacacctcgtggtggacctggtgcaggctaaagacacgctctaccatgtactctacattggcaccgagtcgggcaccatcctgaaggcgctgtccacggcgagccgcagcctccacggctgctacctggaggagctgcacgtgctgccccccgggcgccgcgagcccctgcgcagcctgcgcatcctgcacagcgcccgcgcgctcttcgtggggctgagagacggcgtcctgcgggtcccactggagaggtgcgccgcctaccgcagccagggggcatgcctgggggcccgggacccgtactgtggctgggacgggaagcagcaacgttgcagcacactcgaggacagctccaacatgagcctctggacccagaacatcaccgcctgtcctgtgcggaatgtgacacgggatgggggcttcggcccatggtcaccatggcaaccatgtgagcacttggatggggacaactcaggctcttgcctgtgtcgagctcgatcctgtgattcccctcgaccccgctgtgggggccttgactgcctggggccagccatccacatcgccaactgctccaggaatggggcgtggaccccgtggtcatcgtgggcgctgtgcagcacgtcctgtggcatcggcttccaggtccgccagcgaagttgcagcaaccctgctccccgccacgggggccgcatctgcgtgggcaagagccgggaggaacggttctgtaatgagaacacgccttgcccggtgcccatcttctgggcttcctggggctcctggagcaagtgcagcagcaactgtggagggggcatgcagtcgcggcgtcgggcctgcgagaacggcaactcctgcctgggctgcggcgtggagttcaagacgtgcaaccccgagggctgccccgaagtgcggcgcaacaccccctggacgccgtggctgcccgtgaacgtgacgcagggcggggcacggcaggagcagcggttccgcttcacctgccgcgcgccccttgcagacccgcacggcctgcagttcggcaggagaaggaccgagacgaggacctgtcccgcggacggctccggctcctgcgacaccgacgccctggtggaggtcctcctgcgcagcgggagcacctccccgcacacggtgagcgggggctgggccgcctggggcccgtggtcgtcctgctcccgggactgcgagctgggcttccgcgtccgcaagagaacgtgcactaacccggagccccgcaacgggggcctgccctgcgtgggcgatgctgccgagtaccaggactgcaacccccaggcttgcccagttcggggtgcttggtcctgctggacctcatggtctccatgctcagcttcctgtggtgggggtcactatcaacgcacccgttcctgcaccagccccgcaccctccccaggtgaggacatctgtctcgggctgcacacggaggaggcactatgtgccacacaggcctgcccagaaggctggtcgccctggtctgagtggagtaagtgcactgacgacggagcccagagccgaagccggcactgtgaggagctcctcccagggtccagcgcntgtgctggaaacagcagccagagccgcccctgcccctacagcgagattcncgtcatcctgccagcctccagcatggaggaggccaccgactgtgcagggttcaatctcatccacttggtggccacgggcatctcctgcttcttgggctctgggctcctgaccctagcagtgtacctgtcttgccagcactgccagcgtcagtcccaggagtccacactggtccatcctgccacccccaaccatttgcactacaagggcggaggcaccccgaagaatgaaaagtacacacccatggaattcaagaccctgaacaagaataacttgatccctgatgacagagccaacttctacccattgcagcagaccaatgtgtacacgactacttactacccaagccccctgaacaaacacagcttccggcccgaggcctcacctggacaacggtgcttccccaacagctgataccgccgtcctggggacttgggcttcttgccttcataaggcacagagcagatggagatgggacagtggagccagtttggttttctccctctgcactaggccaagaacttgctgccttgcctgtggggggtcccatccggcttcagagagctctggctggcattgaccatgggggaaagggctggtttcaggctgacatatggccgcaggtccagttcagcccaggtctntcatggttatcttccaacccactgtcacgctgacactatgctgccatgcctgggctgtggacctactgggcatttgaggaantggagaatggagatggcaagagggcaggcttttaagtttgggttggagacaacttcctgtggcccccacaagctgagtctggccttctccagctggccccaaaaaaggcctttgctacatcctgattatctctgaaagtaatcaatcaagtggctccagtagctctggattttctgccagggctgggccattgtggtgctgccccagtatgacatgggaccaaggccagcgcaggttatccacctctgcctggaagtctatactctacccagggcatccctctggtcagaggcagtgagtactgggaactggaggctgacctgtgcttagaagtcctttaatctgggctggtacaggcctcagccttgccctcaatgcacgaaaggtggcccaggagagaggatcaatgccataggaggcagaagtctggcctctgtgcctctatggagactatcttccagttgctgctcaacagagttgttggctgagacctgcttgggagtctctgctggcccttcatctgttcaggaacacacacacacacacactcacacacgcacacacaatcacaatttgctacagcaacaaaaaagacattgggctgtggcattattaattaaagatgatatccagtcaaaaaaaaact

SEQ ID NO: 261590 - DNA, 453 bp, Homo sapiens
agtaatcagctcggtaccggcatgtgctgtagccagcgcaggttatccacctctgcctggaagtctatactctacccagggcatccctctggtcagaggcagtgagtactgggaactggaggctgacctgtgcttagaagtcctttaatctgggctggtacaggcctcagccttgccctcaatgcacgaaaggtggcccaggagagaggatcaatgccataggaggcagaagtctggcctctgtgcctctatggagactatcttccagttgctgctcaacagagttgttggctgagacctgcttgggagtctctgctggcccttcatctgttcaggaacacacacacacacacactcacacacgcacacacaatcacaatttgctacagcaacaaaaaagacattgggctgtggcattattaattaaagatgatatccagtcaaaaaaaaact

SEQ ID NO: 261591 - DNA, 4675 bp, Homo sapiens
  misc_feature (3255)..(3255): n is a, c, g, or t
  misc_feature (3305)..(3305): n is a, c, g, or t
  misc_feature (3947)..(3947): n is a, c, g, or t
  misc_feature (4029)..(4029): n is a, c, g, or t
gcggccgccccattcccagaccggccgccagcccatctggttagctcccgccgctccgcgccgcccgggagtcgggagccgcggggaaccgggcacctgcacccgcctctgggagtgagtggttccagctggtgcctggcctgtgtctcttggatgccctgtggcttcagtccgtctcctgttgcccaccacctcgtccctgggccgcctgataccccagcccaacagctaaggtgtggatggacagtagggggctggcttctctcactggtcaggggcaggaagccaagtggagactttgaatggaggcaaggatggaggggacctggggaagaggactggcctgaatcaccttccccaaaggtcctcatggactgagctggaggtcttctcccctgtctgcctcccggagctaggactgcagaggggcctatcatggtgcttgcaggccccctggctgtctcgctgttgctgcccagcctcacactgctggtgtcccacctctccagctcccaggatgtctccagtgagcccagcagtgagcagcagctgtgcgcccttagcaagcaccccaccgtggcctttgaagacctgcagccgtgggtctctaacttcacctaccctggagcccgggatttctcccagctggctttggacccctccgggaaccagctcatcgtgggagccaggaactacctcttcagactcagccttgccaatgtctctcttcttcaggccacagagtgggcctccagtgaggacacgcgccgctcctgccaaagcaaagggaagactgaggaggagtgtcagaactacgtgcgagtcctgatcgtcgccggccggaaggtgttcatgtgtggaaccaatgccttttcccccatgtgcaccagcagacaggtggggaacctcagccggactactgagaagatcaatggtgtggcccgctgcccctatgacccacgccacaactccacagctgtcatctcctcccagggggagctctatgcagccacggtcatcgacttctcaggtcgggaccctgccatctaccgcagcctgggcagtgggccaccgcttcgcactgcccaatataactccaagtggcttaatgagccaaacttcgtggcagcctatgatattgggctgtttgcatacttcttcctgcgggagaacgcagtggagcacgactgtggacgcaccgtgtactctcgcgtggcccgcgtgtgcaagaatgacgtggggggccgattcctgctggaggacacatggaccacattcatgaaggcccggctcaactgctcccgcccgggcgaggtccccttctactataacgagctgcagagtgccttccacttgccagagcaggacctcatctatggagttttcacaaccaacgtaaacagcatcgcggcttctgctgtctgcgccttcaacctcagtgctatctcccaggctttcaatggcccatttcgctaccaggagaaccccagggctgcctggctccccatagccaaccccatccccaatttccagtgtggcaccctgcctgagaccggtcccaacgagaacctgacggagcgcagcctgcaggacgcgcagcgcctcttcctgatgagcgaggccgtgcagccggtgacacccgagccctgtgtcacccaggacagcgtgcgcttctcacacctcgtggtggacctggtgcaggctaaagacacgctctaccatgtactctacattggcaccgagtcgggcaccatcctgaaggcgctgtccacggcgagccgcagcctccacggctgctacctggaggagctgcacgtgctgccccccgggcgccgcgagcccctgcgcagcctgcgcatcctgcacagcgcccgcgcgctcttcgtggggctgagagacggcgtcctgcgggtcccactggagaggtgcgccgcctaccgcagccagggggcatgcctgggggcccgggacccgtactgtggctgggacgggaagcagcaacgttgcagcacactcgaggacagctccaacatgagcctctggacccagaacatcaccgcctgtcctgtgcggaatgtgacacgggatgggggcttcggcccatggtcaccatggcaaccatgtgagcacttggatggggacaactcaggctcttgcctgtgtcgagctcgatcctgtgattcccctcgaccccgctgtgggggccttgactgcctggggccagccatccacatcgccaactgctccaggaatggggcgtggaccccgtggtcatcgtgggcgctgtgcagcacgtcctgtggcatcggcttccaggtccgccagcgaagttgcagcaaccctgctccccgccacgggggccgcatctgcgtgggcaagagccgggaggaacggttctgtaatgagaacacgccttgcccggtgcccatcttctgggcttcctggggctcctggagcaagtgcagcagcaactgtggagggggcatgcagtcgcggcgtcgggcctgcgagaacggcaactcctgcctgggctgcggcgtggagttcaagacgtgcaaccccgagggctgccccgaagtgcggcgcaacaccccctggacgccgtggctgcccgtgaacgtgacgcagggcggggcacggcaggagcagcggttccgcttcacctgccgcgcgccccttgcagacccgcacggcctgcagttcggcaggagaaggaccgagacgaggacctgtcccgcggacggctccggctcctgcgacaccgacgccctggtggaggtcctcctgcgcagcgggagcacctccccgcacacggtgagcgggggctgggccgcctggggcccgtggtcgtcctgctcccgggactgcgagctgggcttccgcgtccgcaagagaacgtgcactaacccggagccccgcaacgggggcctgccctgcgtgggcgatgctgccgagtaccaggactgcaacccccaggcttgcccagttcggggtgcttggtcctgctggacctcatggtctccatgctcagcttcctgtggtgggggtcactatcaacgcacccgttcctgcaccagccccgcaccctccccaggtgaggacatctgtctcgggctgcacacggaggaggcactatgtgccacacaggcctgcccagaaggctggtcgccctggtctgagtggagtaagtgcactgacgacggagcccagagccgaagccggcactgtgaggagctcctcccagggtccagcgcntgtgctggaaacagcagccagagccgcccctgcccctacagcgagattcncgtcatcctgccagcctccagcatggaggaggccaccgactgtgcagggttcaatctcatccacttggtggccacgggcatctcctgcttcttgggctctgggctcctgaccctagcagtgtacctgtcttgccagcactgccagcgtcagtcccaggagtccacactggtccatcctgccacccccaaccatttgcactacaagggcggaggcaccccgaagaatgaaaagtacacacccatggaattcaagaccctgaacaagaataacttgatccctgatgacagagccaacttctacccattgcagcagaccaatgtgtacacgactacttactacccaagccccctgaacaaacacagcttccggcccgaggcctcacctggacaacggtgcttccccaacagctgataccgccgtcctggggacttgggcttcttgccttcataaggcacagagcagatggagatgggacagtggagccagtttggttttctccctctgcactaggccaagaacttgctgccttgcctgtggggggtcccatccggcttcagagagctctggctggcattgaccatgggggaaagggctggtttcaggctgacatatggccgcaggtccagttcagcccaggtctntcatggttatcttccaacccactgtcacgctgacactatgctgccatgcctgggctgtggacctactgggcatttgaggaantggagaatggagatggcaagagggcaggcttttaagtttgggttggagacaacttcctgtggcccccacaagctgagtctggccttctccagctggccccaaaaaaggcctttgctacatcctgattatctctgaaagtaatcaatcaagtggctccagtagctctggattttctgccagggctgggccattgtggtgctgccccagtatgacatgggaccaaggccagcgcaggttatccacctctgcctggaagtctatactctacccagggcatccctctggtcagaggcagtgagtactgggaactggaggctgacctgtgcttagaagtcctttaatctgggctggtacaggcctcagccttgccctcaatgcacgaaaggtggcccaggagagaggatcaatgccataggaggcagaagtctggcctctgtgcctctatggagactatcttccagttgctgctcaacagagttgttggctgagacctgcttgggagtctctgctggcccttcatctgttcaggaacacacacacacacacactcacacacgcacacacaatcacaatttgctacagcaacaaaaaagacattgggctgtggcattattaattaaagatgatatccagtcaaaaaaaaact
